United States Patent Application Publication US 2011/0183924 A1 - sequence listing, part 152

SEQ ID NO: 394844 - DNA, 4335 bp, Homo sapiens
aggcggtgcgtcgcgggggcggggccgcgcaggcgtaccgggtgccccggctctggagcataaacaagagcggggacgggatgaggcggcggttgatcccagggtggcgagtggcggcgaccgaggcggcgagcggggcccggcgccgaccctgagtgcagcctgacccgccctcgcgcgcgcgccctccccggccgggcccactcgccgcgcgcccagccatgaacctggcgagccagagcggggaggccggcgccggccagctgctcttcgccaacttcaaccaggacaacacgtccctagctgttggtagtaagtccggttataaatttttctccctttcttctgtggataagctggaacagatctatgaatgcaccgatacggaagatgtgtgcattgtagagagattgttctccagcagcctagtggccatcgtgagccttaaagcaccaaggaagctaaaggtttgccactttaagaagggaactgagatctgcaactacagctactccaacacgattctggctgtgaagctcaacaggcagaggctgatagtatgcctggaggagtccctgtacatccacaacattcgggacatgaaggtgctgcatacgatcagggagacgcctccaaaccctgcaggcctgtgtgcgctgtcaatcaacaacgacaactgctacttggcgtacccagggagcgcgaccatcggagaggtgcaggtcttcgataccattaatttgagagctgcaaacatgattccggctcacgacagtcctttagcggcactggcctttgacgcaagtggaactaaacttgccacggcttcggagaaggggaccgtgattagggtattttccattccagaaggacaaaaactctttgagtttcggagaggagtaaagagatggacggcatgttcctctccgcctccagcaacactgagaccgtgcacatcttcaaactcgagactgtgaaagaaaaacccccagaggagcccaccacctggaccgggtacttcgggaaagtgctcatggcctccaccagctacctgccttcccaagtgacagaaatgttcaaccagggcagagccttcgccacggtccgcctgccattctgcggccacaaaaacatctgctcgctagccacaattcagaagatcccgcggttgttggtgggtgccgccgacgggtacctgtacatgtacaacctggacccccaggagggcggcgagtgtgccctgatgaagcagcaccggctggacggcagtctggaaacgaccaatgagatcttggactctgcctctcacgactgccccttagtcactcagacatacggcgcagctgcaggaaaagcctacacagacgacctgggtgctgtgggtggcgcctgcctggaggacgaggccagcgccctgcgcctggatgaggacagcgagcacccgcccatgattcttcggactgactgaacttgacctgtgacctctgacccggggagcagagaacactggcttcacagaggactttgtgcattgctgctatgaactttgacctgagtcgggggagaggatggcagagactttattaaaaaaaaaaaaagattgtagtggtagtctaactccataacgctgaggaaatacatcattttcacttcagtggcttttaaatcctgcttatgaattttagctttttgtttgtttgttttctctttttgccaaaattaactgtttggtgaagcccgcaaaacctcctcgctttgcatgcatgaacgtgccaagccagcataggggagctagaagccactttccagccacctgccgttgggttttttcatatctgtacataatgccgagtgcgtaaggaaaccgtggcgtcgcgcacagtgggtctgcttgtcaaggccagttctgcagtgacaggcccaggggctgcccaccaggtgtgctgggcagacttcagctgggacagaagtccgatctccctagggccccacctggaccattttccctccgttttattttgttaattaaattctttccaaattggatcgctctgggatttcttccatggtggacttttgtttctgatcttgttttccctgtggatattggaggacagcgaggttctttctgatactaaaaacctttctttcaggcagcaaatgaacttgaaaggttgcctggactcgctggagcaaaggaaagcgattttgtttgtataattaaatgatctgttcttctacttcactcttcctgttgaaaaactgtgtgatttttttttttttttaagtaaagtttgtagctcctcccatgcccaggaaagcacagaactcaagtgtggtggccgtctgagctgtcctttcgctggccccgctgtccgcaggggcttcctacctgtgtgagaggtcgtagcgggagacagcaacagagagtaggcggctgggccacgtccttcacagggcgtcatgtgcctttctattttcatcttagaaaatttcctcagcaaaccgatgagagattgtggttgcaagcttcagtatttgcctcgcttcccttttcatatttacagaattaaaacaacctcaagtacctcagactctgcattccaaaccaaggcacccagcagccaaagtgtcgagggcatttaagtggcattaatggcaggagagatggttttagaatctatggagtggtggaagttacggatagaagggaaaaggcaaaaactatttaccctgcctttgcaggctggggtttttgaaccgaggaaggctgggacgcctgtttccagatggttgtcatggtcacgctgggcgaagagctggaggggagttgtcccctcagctgagcggctgcggtgaaatgccccagtgttcctgggttggctttacggcaaactaaatgcaggggacgctggagtccgactcacctacaccggcttcctcccagccgctggtgtgcggcacacacaacatctgcattaggcagaggtgcaagtgggctgattgaacttttccttcaaaacctgcttgtctgtcctggacctttgatgaaatgggatcccggtcacgcaggctgagacagtggggaccgccgaggccagagtgggctatgcttgagcagggatgagaagggccgcggcagcacgcagccttgacccacgcctgcgtcttgtggtgcaaggccagagggctctctctagaacctgaccgtgcactccatctcctgggagccacttttggcaagagtgagtgtggggggaaaaagtgtgcacaagagatacggaaccctgagctagggtttcctgtcaccaaagagtgagctgcatttccagttctgcgttaaagtatcgtttgttctggtgcctgcctgtggtggtgatttggagactcaaatttcctttgccaggtctcttttgtctttctttgggattggtagtatagaagatgctgggaattgtcttcctcgctcagcctcggcttcccgcactgtaagatgaggcagttgcagaggaggcctcggacgtcctgtgaccctcggcccacactcccccttgggtggccctggcagggctggctaggtgcgttccctgcagaccacgggaagccctgtgcttgcctgggtcagggctaagctgtgcgccctagaggagggaggaggactgcagattcttggtcgagaagaatgaagaggatttctgtgtttgctgagcagccattgtggagggttacccgcctccactttcccgttgcccatttcactgccaccagctcctcttcctctgctcgaacctatgagtcccagcctcactggcggcctcagacatgctcaggagtgacggggacagagggaggccgctgagttgcccgttagaactcttactgctgcgccagtgacccaggtggagagggaccctgaaccaaacagaacgtgtgctaattttccgaactccaaactgtacactcatattcatttttaaattgtatttttccaaacttcaaaaaggacgatgagcgtgggggataggaaacaaaacctgtaaacgttgtgaatgggctcagtggactctgggaccaaaccttctgtaatctctaaaacaatgggaccaagagctggatggaacctggagtcaaaaagaactgcttcagtccccgctgtaccgcctgcctagctgtgggagcaggcagggcgcctgggagcctgcgttttctggaccgttccatgggactcatccctacctcacagggctgttgtgaggtgttgtgtgactgcgtgtcctgcaaacgcccagctcggtgcccagccagcggtgggcacccaataaacgctacaacata

SEQ ID NO: 394845 - DNA, 4276 bp, Homo sapiens
  misc_feature (13)..(13): n is a, c, g, or t
  misc_feature (15)..(15): n is a, c, g, or t
ggggcagaggcgngnaaacttcggctaggtacgaggctgggttgtgcggcggttgatcccagggtggcgagtggcggccactcgccgcgcgcccagccatgaacctggcgagccagagcggggaggccggcgccggccagctgctcttcgccaacttcaaccaggacaacacgtccctagctgttggtagtaagtccggttataaatttttctccctttcttctgtggataagctggaacagatctatgaatgcaccgatacggaagatgtgtgcattgtagagagattgttctccagcagcctagtggccatcgtgagccttaaagcaccaaggaagctaaaggtttgccactttaagaagggaactgagatctgcaactacagctactccaacacgattctggctgtgaagctcaacaggcagaggctgatagtatgcctggaggagtccctgtacatccacaacattcgggacatgaaggtgctgcatacgatcagggagacgcctccaaaccctgcaggcctgtgtgcgctgtcaatcaacaacgacaactgctacttggcgtacccagggagcgcgaccatcggagaggtgcaggtcttcgataccattaatttgagagctgcaaacatgattccggctcacgacagtcctttagcggcactggcctttgacgcaagtggaactaaacttgccacggcttcggagaaggggaccgtgattagggtattttccattccagaaggacaaaaactctttgagtttcggagaggagtaaagaggtgcgtgagcatctgctccctggccttcagcatggacggcatgttcctctccgcctccagcaacactgagaccgtgcacatcttcaaactcgagactgtgaaagaaaaacccccagaggagcccaccacctggaccgggtacttcgggaaagtgctcatggcctccaccagctacctgccttcccaagtgacagaaatgttcaaccagggcagagccttcgccacggtccgcctgccattctgcggccacaaaaacatctgctcgctagccacaattcagaagatcccgcggttgttggtgggtgccgccgacgggtacctgtacatgtacaacctggacccccaggagggcggcgagtgtgccctgatgaagcagcaccggctggacggcagtctggaaacgaccaatgagatcttggactctgcctctcacgactgccccttagtcactcagacatacggcgcagctgcaggaaaaggtacttacgtgccttcatccccaacgagacttgcctacacagacgacctgggtgctgtgggtggcgcctgcctggaggacgaggccagcgccctgcgcctggatgaggacagcgagcacccgcccatgattcttcggactgactgaacttgacctgtgacctctgacccggggagcagagaacactggcttcacagaggactttgtgcattgctgctatgaactttgacctgagtcgggggagaggatggcagagactttattaaaaaaaaaaaaagattgtagtggtagtctaactccataacgctgaggaaatacatcattttcacttcagtggcttttaaatcctgcttatgaattttagctttttgtttgtttgttttctctttttgccaaaattaactgtttggtgaagcccgcaaaacctcctcgctttgcatgcatgaacgtgccaagccagcataggggagctagaagccactttccagccacctgccgttgggttttttcatatctgtacataatgccgagtgcgtaaggaaaccgtggcgtcgcgcacagtgggtctgcttgtcaaggccagttctgcagtgacaggcccaggggctgcccaccaggtgtgctgggcagacttcagctgggacagaagtccgatctccctagggccccacctggaccattttccctccgttttattttgttaattaaattctttccaaattggatcgctctgggatttcttccatggtggacttttgtttctgatcttgttttccctgtggatattggaggacagcgaggttctttctgatactaaaaacctttctttcaggcagcaaatgaacttgaaaggttgcctggactcgctggagcaaaggaaagcgattttgtttgtataattaaatgatctgttcttctacttcactcttcctgttgaaaaactgtgtgatttttttttttttttaagtaaagtttgtagctcctcccatgcccaggaaagcacagaactcaagtgtggtggccgtctgagctgtcctttcgctggccccgctgtccgcaggggcttcctacctgtgtgagaggtcgtagcgggagacagcaacagagagtaggcggctgggccacgtccttcacagggcgtcatgtgcctttctattttcatcttagaaaatttcctcagcaaaccgatgagagattgtggttgcaagcttcagtatttgcctcgcttcccttttcatatttacagaattaaaacaacctcaagtacctcagactctgcattccaaaccaaggcacccagcagccaaagtgtcgagggcatttaagtggcattaatggcaggagagatggttttagaatctatggagtggtggaagttacggatagaagggaaaaggcaaaaactatttaccctgcctttgcaggctggggtttttgaaccgaggaaggctgggacgcctgtttccagatggttgtcatggtcacgctgggcgaagagctggaggggagttgtcccctcagctgagcggctgcggtgaaatgccccagtgttcctgggttggctttacggcaaactaaatgcaggggacgctggagtccgactcacctacaccggcttcctcccagccgctggtgtgcggcacacacaacatctgcattaggcagaggtgcaagtgggctgattgaacttttccttcaaaacctgcttgtctgtcctggacctttgatgaaatgggatcccggtcacgcaggctgagacagtggggaccgccgaggccagagtgggctatgcttgagcagggatgagaagggccgcggcagcacgcagccttgacccacgcctgcgtcttgtggtgcaaggccagagggctctctctagaacctgaccgtgcactccatctcctgggagccacttttggcaagagtgagtgtggggggaaaaagtgtgcacaagagatacggaaccctgagctagggtttcctgtcaccaaagagtgagctgcatttccagttctgcgttaaagtatcgtttgttctggtgcctgcctgtggtggtgatttggagactcaaatttcctttgccaggtctcttttgtctttctttgggattggtagtatagaagatgctgggaattgtcttcctcgctcagcctcggcttcccgcactgtaagatgaggcagttgcagaggaggcctcggacgtcctgtgaccctcggcccacactcccccttgggtggccctggcagggctggctaggtgcgttccctgcagaccacgggaagccctgtgcttgcctgggtcagggctaagctgtgcgccctagaggagggaggaggactgcagattcttggtcgagaagaatgaagaggatttctgtgtttgctgagcagccattgtggagggttacccgcctccactttcccgttgcccatttcactgccaccagctcctcttcctctgctcgaacctatgagtcccagcctcactggcggcctcagacatgctcaggagtgacggggacagagggaggccgctgagttgcccgttagaactcttactgctgcgccagtgacccaggtggagagggaccctgaaccaaacagaacgtgtgctaattttccgaactccaaactgtacactcatattcatttttaaattgtatttttccaaacttcaaaaaggacgatgagcgtgggggataggaaacaaaacctgtaaacgttgtgaatgggctcagtggactctgggaccaaaccttctgtaatctctaaaacaatgggaccaagagctggatggaacctggagtcaaaaagaactgcttcagtccccgctgtaccgcctgcctagctgtgggagcaggcagggcgcctgggagcctgcgttttctggaccgttccatgggactcatccctacctcacagggctgttgtgaggtgttgtgtgactgcgtgtcctgcaaacgcccagctcggtgcccagccagcggtgggcacccaataaacgctacaacata

SEQ ID NO: 394846 - DNA, 4316 bp, Homo sapiens
aggcggtgcgtcgcgggggcggggccgcgcaggcgtaccgggtgccccggctctggagcataaacaagagcggggacgggatgaggcggcggttgatcccagggtggcgagtggcggcgaccgaggcggcgagcggggcccggcgccgaccctgagtgcagcctgacccgccctcgcgcgcgcgccctccccggccgggcccactcgccgcgcgcccagccatgaacctggcgagccagagcggggaggccggcgccggccagctgctcttcgccaacttcaaccaggacaacacccgatacggaagatgtgtgcattgtagagagattgttctccagcagcctagtggccatcgtgagccttaaagcaccaaggaagctaaaggtttgccactttaagaagggaactgagatctgcaactacagctactccaacacgattctggctgtgaagctcaacaggcagaggctgatagtatgcctggaggagtccctgtacatccacaacattcgggacatgaaggtgctgcatacgatcagggagacgcctccaaaccctgcaggcctgtgtgcgctgtcaatcaacaacgacaactgctacttggcgtacccagggagcgcgaccatcggagaggtgcaggtcttcgataccattaatttgagagctgcaaacatgattccggctcacgacagtcctttagcggcactggcctttgacgcaagtggaactaaacttgccacggcttcggagaaggggaccgtgattagggtattttccattccagaaggacaaaaactctttgagtttcggagaggagtaaagaggtgcgtgagcatctgctccctggccttcagcatggacggcatgttcctctccgcctccagcaacactgagaccgtgcacatcttcaaactcgagactgtgaaagaaaaacccccagaggagcccaccacctggaccgggtacttcgggaaagtgctcatggcctccaccagctacctgccttcccaagtgacagaaatgttcaaccagggcagagccttcgccacggtccgcctgccattctgcggccacaaaaacatctgctcgctagccacaattcagaagatcccgcggttgttggtgggtgccgccgacgggtacctgtacatgtacaacctggacccccaggagggcggcgagtgtgccctgatgaagcagcaccggctggacggcagtctggaaacgaccaatgagatcttggactctgcctctcacgactgccccttagtcactcagacatacggcgcagctgcaggaaaaggtacttacgtgccttcatccccaacgagacttgcctacacagacgacctgggtgctgtgggtggcgcctgcctggaggacgaggccagcgccctgcgcctggatgaggacagcgagcacccgcccatgattcttcggactgactgaacttgacctgtgacctctgacccggggagcagagaacactggcttcacagaggactttgtgcattgctgctatgaactttgacctgagtcgggggagaggatggcagagactttattaaaaaaaaaaaaagattgtagtggtagtctaactccataacgctgaggaaatacatcattttcacttcagtggcttttaaatcctgcttatgaattttagctttttgtttgtttgttttctctttttgccaaaattaactgtttggtgaagcccgcaaaacctcctcgctttgcatgcatgaacgtgccaagccagcataggggagctagaagccactttccagccacctgccgttgggttttttcatatctgtacataatgccgagtgcgtaaggaaaccgtggcgtcgcgcacagtgggtctgcttgtcaaggccagttctgcagtgacaggcccaggggctgcccaccaggtgtgctgggcagacttcagctgggacagaagtccgatctccctagggccccacctggaccattttccctccgttttattttgttaattaaattctttccaaattggatcgctctgggatttcttccatggtggacttttgtttctgatcttgttttccctgtggatattggaggacagcgaggttctttctgatactaaaaacctttctttcaggcagcaaatgaacttgaaaggttgcctggactcgctggagcaaaggaaagcgattttgtttgtataattaaatgatctgttcttctacttcactcttcctgttgaaaaactgtgtgatttttttttttttttaagtaaagtttgtagctcctcccatgcccaggaaagcacagaactcaagtgtggtggccgtctgagctgtcctttcgctggccccgctgtccgcaggggcttcctacctgtgtgagaggtcgtagcgggagacagcaacagagagtaggcggctgggccacgtccttcacagggcgtcatgtgcctttctattttcatcttagaaaatttcctcagcaaaccgatgagagattgtggttgcaagcttcagtatttgcctcgcttcccttttcatatttacagaattaaaacaacctcaagtacctcagactctgcattccaaaccaaggcacccagcagccaaagtgtcgagggcatttaagtggcattaatggcaggagagatggttttagaatctatggagtggtggaagttacggatagaagggaaaaggcaaaaactatttaccctgcctttgcaggctggggtttttgaaccgaggaaggctgggacgcctgtttccagatggttgtcatggtcacgctgggcgaagagctggaggggagttgtcccctcagctgagcggctgcggtgaaatgccccagtgttcctgggttggctttacggcaaactaaatgcaggggacgctggagtccgactcacctacaccggcttcctcccagccgctggtgtgcggcacacacaacatctgcattaggcagaggtgcaagtgggctgattgaacttttccttcaaaacctgcttgtctgtcctggacctttgatgaaatgggatcccggtcacgcaggctgagacagtggggaccgccgaggccagagtgggctatgcttgagcagggatgagaagggccgcggcagcacgcagccttgacccacgcctgcgtcttgtggtgcaaggccagagggctctctctagaacctgaccgtgcactccatctcctgggagccacttttggcaagagtgagtgtggggggaaaaagtgtgcacaagagatacggaaccctgagctagggtttcctgtcaccaaagagtgagctgcatttccagttctgcgttaaagtatcgtttgttctggtgcctgcctgtggtggtgatttggagactcaaatttcctttgccaggtctcttttgtctttctttgggattggtagtatagaagatgctgggaattgtcttcctcgctcagcctcggcttcccgcactgtaagatgaggcagttgcagaggaggcctcggacgtcctgtgaccctcggcccacactcccccttgggtggccctggcagggctggctaggtgcgttccctgcagaccacgggaagccctgtgcttgcctgggtcagggctaagctgtgcgccctagaggagggaggaggactgcagattcttggtcgagaagaatgaagaggatttctgtgtttgctgagcagccattgtggagggttacccgcctccactttcccgttgcccatttcactgccaccagctcctcttcctctgctcgaacctatgagtcccagcctcactggcggcctcagacatgctcaggagtgacggggacagagggaggccgctgagttgcccgttagaactcttactgctgcgccagtgacccaggtggagagggaccctgaaccaaacagaacgtgtgctaattttccgaactccaaactgtacactcatattcatttttaaattgtatttttccaaacttcaaaaaggacgatgagcgtgggggataggaaacaaaacctgtaaacgttgtgaatgggctcagtggactctgggaccaaaccttctgtaatctctaaaacaatgggaccaagagctggatggaacctggagtcaaaaagaactgcttcagtccccgctgtaccgcctgcctagctgtgggagcaggcagggcgcctgggagcctgcgttttctggaccgttccatgggactcatccctacctcacagggctgttgtgaggtgttgtgtgactgcgtgtcctgcaaacgcccagctcggtgcccagccagcggtgggcacccaataaacgctacaacata

SEQ ID NO: 394847 - DNA, 4696 bp, Homo sapiens
aggcggtgcgtcgcgggggcggggccgcgcaggcgtaccgggtgccccggctctggagcataaacaagagcggggacgggatgaggcggcggttgatcccagggtggcgagtggcggcgaccgaggcggcgagcggggcccggcgccgaccctgagtgcagcctgacccgccctcgcgcgcgcgccctccccggccgggcccactcgccgcgcgcccagccatgaacctggcgagccagagcggggaggccggcgccggccagctgctcttcgccaacttcaaccaggacaacacgtccctagctgttggtagtaagtccggttataaatttttctccctttcttctgtggataagctggaacagatctatgaatgcaatcctggaagacggtggccgctagtctgagatgctgctgagcagagaagctgcagacagagcctgtcctccctggccccccgaccctgccaccatctccccatttgtggcagacgcttgcatctgttccttttgaatgaaggtcgcttgctgttgtcagaaagaaggtttatgacagctttctggtaaaagcaactgaaaagacactgaatggatgctgtgaagagcttaggatgatgtacttgtgtttatggcccgttccatttgaagtggtgtcgcactgcaggatggcgcgtagccgatacggaagatgtgtgcattgtagagagattgttctccagcagcctagtggccatcgtgagccttaaagcaccaaggaagctaaaggtttgccactttaagaagggaactgagatctgcaactacagctactccaacacgattctggctgtgaagctcaacaggcagaggctgatagtatgcctggaggagtccctgtacatccacaacattcgggacatgaaggtgctgcatacgatcagggagacgcctccaaaccctgcaggcctgtgtgcgctgtcaatcaacaacgacaactgctacttggcgtacccagggagcgcgaccatcggagaggtgcaggtcttcgataccattaatttgagagctgcaaacatgattccggctcacgacagtcctttagcggcactggcctttgacgcaagtggaactaaacttgccacggcttcggagaaggggaccgtgattagggtattttccattccagaaggacaaaaactctttgagtttcggagaggagtaaagaggtgcgtgagcatctgctccctggccttcagcatggacggcatgttcctctccgcctccagcaacactgagaccgtgcacatcttcaaactcgagactgtgaaagaaaaacccccagaggagcccaccacctggaccgggtacttcgggaaagtgctcatggcctccaccagctacctgccttcccaagtgacagaaatgttcaaccagggcagagccttcgccacggtccgcctgccattctgcggccacaaaaacatctgctcgctagccacaattcagaagatcccgcggttgttggtgggtgccgccgacgggtacctgtacatgtacaacctggacccccaggagggcggcgagtgtgccctgatgaagcagcaccggctggacggcagtctggaaacgaccaatgagatcttggactctgcctctcacgactgccccttagtcactcagacatacggcgcagctgcaggaaaaggtacttacgtgccttcatccccaacgagacttgcctacacagacgacctgggtgctgtgggtggcgcctgcctggaggacgaggccagcgccctgcgcctggatgaggacagcgagcacccgcccatgattcttcggactgactgaacttgacctgtgacctctgacccggggagcagagaacactggcttcacagaggactttgtgcattgctgctatgaactttgacctgagtcgggggagaggatggcagagactttattaaaaaaaaaaaaagattgtagtggtagtctaactccataacgctgaggaaatacatcattttcacttcagtggcttttaaatcctgcttatgaattttagctttttgtttgtttgttttctctttttgccaaaattaactgtttggtgaagcccgcaaaacctcctcgctttgcatgcatgaacgtgccaagccagcataggggagctagaagccactttccagccacctgccgttgggttttttcatatctgtacataatgccgagtgcgtaaggaaaccgtggcgtcgcgcacagtgggtctgcttgtcaaggccagttctgcagtgacaggcccaggggctgcccaccaggtgtgctgggcagacttcagctgggacagaagtccgatctccctagggccccacctggaccattttccctccgttttattttgttaattaaattctttccaaattggatcgctctgggatttcttccatggtggacttttgtttctgatcttgttttccctgtggatattggaggacagcgaggttctttctgatactaaaaacctttctttcaggcagcaaatgaacttgaaaggttgcctggactcgctggagcaaaggaaagcgattttgtttgtataattaaatgatctgttcttctacttcactcttcctgttgaaaaactgtgtgatttttttttttttttaagtaaagtttgtagctcctcccatgcccaggaaagcacagaactcaagtgtggtggccgtctgagctgtcctttcgctggccccgctgtccgcaggggcttcctacctgtgtgagaggtcgtagcgggagacagcaacagagagtaggcggctgggccacgtccttcacagggcgtcatgtgcctttctattttcatcttagaaaatttcctcagcaaaccgatgagagattgtggttgcaagcttcagtatttgcctcgcttcccttttcatatttacagaattaaaacaacctcaagtacctcagactctgcattccaaaccaaggcacccagcagccaaagtgtcgagggcatttaagtggcattaatggcaggagagatggttttagaatctatggagtggtggaagttacggatagaagggaaaaggcaaaaactatttaccctgcctttgcaggctggggtttttgaaccgaggaaggctgggacgcctgtttccagatggttgtcatggtcacgctgggcgaagagctggaggggagttgtcccctcagctgagcggctgcggtgaaatgccccagtgttcctgggttggctttacggcaaactaaatgcaggggacgctggagtccgactcacctacaccggcttcctcccagccgctggtgtgcggcacacacaacatctgcattaggcagaggtgcaagtgggctgattgaacttttccttcaaaacctgcttgtctgtcctggacctttgatgaaatgggatcccggtcacgcaggctgagacagtggggaccgccgaggccagagtgggctatgcttgagcagggatgagaagggccgcggcagcacgcagccttgacccacgcctgcgtcttgtggtgcaaggccagagggctctctctagaacctgaccgtgcactccatctcctgggagccacttttggcaagagtgagtgtggggggaaaaagtgtgcacaagagatacggaaccctgagctagggtttcctgtcaccaaagagtgagctgcatttccagttctgcgttaaagtatcgtttgttctggtgcctgcctgtggtggtgatttggagactcaaatttcctttgccaggtctcttttgtctttctttgggattggtagtatagaagatgctgggaattgtcttcctcgctcagcctcggcttcccgcactgtaagatgaggcagttgcagaggaggcctcggacgtcctgtgaccctcggcccacactcccccttgggtggccctggcagggctggctaggtgcgttccctgcagaccacgggaagccctgtgcttgcctgggtcagggctaagctgtgcgccctagaggagggaggaggactgcagattcttggtcgagaagaatgaagaggatttctgtgtttgctgagcagccattgtggagggttacccgcctccactttcccgttgcccatttcactgccaccagctcctcttcctctgctcgaacctatgagtcccagcctcactggcggcctcagacatgctcaggagtgacggggacagagggaggccgctgagttgcccgttagaactcttactgctgcgccagtgacccaggtggagagggaccctgaaccaaacagaacgtgtgctaattttccgaactccaaactgtacactcatattcatttttaaattgtatttttccaaacttcaaaaaggacgatgagcgtgggggataggaaacaaaacctgtaaacgttgtgaatgggctcagtggactctgggaccaaaccttctgtaatctctaaaacaatgggaccaagagctggatggaacctggagtcaaaaagaactgcttcagtccccgctgtaccgcctgcctagctgtgggagcaggcagggcgcctgggagcctgcgttttctggaccgttccatgggactcatccctacctcacagggctgttgtgaggtgttgtgtgactgcgtgtcctgcaaacgcccagctcggtgcccagccagcggtgggcacccaataaacgctacaacata

SEQ ID NO: 394848 - DNA, 4059 bp, Homo sapiens
cgctgaggaaatacatcattttcacttcagtggcttttaaatcctgcttatgaattttagctttttgtttgtttgttttctctttttgccaaaattaactgtttggtgaagcccgcaaaacctcctcgctttgcatgcatgaacgtgccaagccagcataggggagctagaagccactttccagccacctgccgttgggttttttcataggctgatagtatgcctggaggagtccctgtacatccacaacattcgggacatgaaggtgctgcatacgatcagggagacgcctccaaaccctgcaggcctgtgtgcgctgtcaatcaacaacgacaactgctacttggcgtacccagggagcgcgaccatcggagaggtgcaggtcttcgataccattaatttgagagctgcaaacatgattccggctcacgacagtcctttagcggcactggcctttgacgcaagtggaactaaacttgccacggcttcggagaaggggaccgtgattagggtattttccattccagaaggacaaaaactctttgagtttcggagaggagtaaagaggtgcgtgagcatctgctccctggccttcagcatggacggcatgttcctctccgcctccagcaacactgagaccgtgcacatcttcaaactcgagactgtgaaagaaaaacccccagaggagcccaccacctggaccgggtacttcgggaaagtgctcatggcctccaccagctacctgccttcccaagtgacagaaatgttcaaccagggcagagccttcgccacggtccgcctgccattctgcggccacaaaaacatctgctcgctagccacaattcagaagatcccgcggttgttggtgggtgccgccgacgggtacctgtacatgtacaacctggacccccaggagggcggcgagtgtgccctgatgaagcagcaccggctggacggcagtctggaaacgaccaatgagatcttggactctgcctctcacgactgccccttagtcactcagacatacggcgcagctgcaggaaaaggtacttacgtgccttcatccccaacgagacttgcctacacagacgacctgggtgctgtgggtggcgcctgcctggaggacgaggccagcgccctgcgcctggatgaggacagcgagcacccgcccatgattcttcggactgactgaacttgacctgtgacctctgacccggggagcagagaacactggcttcacagaggactttgtgcattgctgctatgaactttgacctgagtcgggggagaggatggcagagactttattaaaaaaaaaaaaagattgtagtggtagtctaactccataacgctgaggaaatacatcattttcacttcagtggcttttaaatcctgcttatgaattttagctttttgtttgtttgttttctctttttgccaaaattaactgtttggtgaagcccgcaaaacctcctcgctttgcatgcatgaacgtgccaagccagcataggggagctagaagccactttccagccacctgccgttgggttttttcatatctgtacataatgccgagtgcgtaaggaaaccgtggcgtcgcgcacagtgggtctgcttgtcaaggccagttctgcagtgacaggcccaggggctgcccaccaggtgtgctgggcagacttcagctgggacagaagtccgatctccctagggccccacctggaccattttccctccgttttattttgttaattaaattctttccaaattggatcgctctgggatttcttccatggtggacttttgtttctgatcttgttttccctgtggatattggaggacagcgaggttctttctgatactaaaaacctttctttcaggcagcaaatgaacttgaaaggttgcctggactcgctggagcaaaggaaagcgattttgtttgtataattaaatgatctgttcttctacttcactcttcctgttgaaaaactgtgtgatttttttttttttttaagtaaagtttgtagctcctcccatgcccaggaaagcacagaactcaagtgtggtggccgtctgagctgtcctttcgctggccccgctgtccgcaggggcttcctacctgtgtgagaggtcgtagcgggagacagcaacagagagtaggcggctgggccacgtccttcacagggcgtcatgtgcctttctattttcatcttagaaaatttcctcagcaaaccgatgagagattgtggttgcaagcttcagtatttgcctcgcttcccttttcatatttacagaattaaaacaacctcaagtacctcagactctgcattccaaaccaaggcacccagcagccaaagtgtcgagggcatttaagtggcattaatggcaggagagatggttttagaatctatggagtggtggaagttacggatagaagggaaaaggcaaaaactatttaccctgcctttgcaggctggggtttttgaaccgaggaaggctgggacgcctgtttccagatggttgtcatggtcacgctgggcgaagagctggaggggagttgtcccctcagctgagcggctgcggtgaaatgccccagtgttcctgggttggctttacggcaaactaaatgcaggggacgctggagtccgactcacctacaccggcttcctcccagccgctggtgtgcggcacacacaacatctgcattaggcagaggtgcaagtgggctgattgaacttttccttcaaaacctgcttgtctgtcctggacctttgatgaaatgggatcccggtcacgcaggctgagacagtggggaccgccgaggccagagtgggctatgcttgagcagggatgagaagggccgcggcagcacgcagccttgacccacgcctgcgtcttgtggtgcaaggccagagggctctctctagaacctgaccgtgcactccatctcctgggagccacttttggcaagagtgagtgtggggggaaaaagtgtgcacaagagatacggaaccctgagctagggtttcctgtcaccaaagagtgagctgcatttccagttctgcgttaaagtatcgtttgttctggtgcctgcctgtggtggtgatttggagactcaaatttcctttgccaggtctcttttgtctttctttgggattggtagtatagaagatgctgggaattgtcttcctcgctcagcctcggcttcccgcactgtaagatgaggcagttgcagaggaggcctcggacgtcctgtgaccctcggcccacactcccccttgggtggccctggcagggctggctaggtgcgttccctgcagaccacgggaagccctgtgcttgcctgggtcagggctaagctgtgcgccctagaggagggaggaggactgcagattcttggtcgagaagaatgaagaggatttctgtgtttgctgagcagccattgtggagggttacccgcctccactttcccgttgcccatttcactgccaccagctcctcttcctctgctcgaacctatgagtcccagcctcactggcggcctcagacatgctcaggagtgacggggacagagggaggccgctgagttgcccgttagaactcttactgctgcgccagtgacccaggtggagagggaccctgaaccaaacagaacgtgtgctaattttccgaactccaaactgtacactcatattcatttttaaattgtatttttccaaacttcaaaaaggacgatgagcgtgggggataggaaacaaaacctgtaaacgttgtgaatgggctcagtggactctgggaccaaaccttctgtaatctctaaaacaatgggaccaagagctggatggaacctggagtcaaaaagaactgcttcagtccccgctgtaccgcctgcctagctgtgggagcaggcagggcgcctgggagcctgcgttttctggaccgttccatgggactcatccctacctcacagggctgttgtgaggtgttgtgtgactgcgtgtcctgcaaacgcccagctcggtgcccagccagcggtgggcacccaataaacgctacaacata

SEQ ID NO: 394849 - DNA, 3936 bp, Homo sapiens
gatccgcccaccttggcctcccaaagtgctgggattacaagcttgagccaccgtgcccggccctttgctctgttcttaaactttactgaggttgccgatttaccctctggtgtggaaagaatggctgtaacttaaattactgagttttcttttactcaccttaggactataaatccatcctacttcagctaaaagtggtttagtgaaatcctactccttttgtcatgtggaagcttgcagctgtgttaacgaattgttcttagtatttccttttgaacattttcctctctcaaggaaaatgtttgagaaggtggctagaggggaataaaacttaccagcaggcccaagtgtgcccgtgacaggaactcttctccgccacttgagttgaacccctggggcagctgctggctccggtggcccgccccaacctgtgcgtctccccaggtgcgtgagcatctgctccctggccttcagcatggacggcatgttcctctccgcctccagcaacactgagaccgtgcacatcttcaaactcgagactgtgaaagaaaaacccccagaggagcccaccacctggaccgggtacttcgggaaagtgctcatggcctccaccagctacctgccttcccaagtgacagaaatgttcaaccagggcagagccttcgccacggtccgcctgccattctgcggccacaaaaacatctgctcgctagccacaattcagaagatcccgcggttgttggtgggtgccgccgacgggtacctgtacatgtacaacctggacccccaggagggcggcgagtgtgccctgatgaagcagcaccggctggacggcagtctggaaacgaccaatgagatcttggactctgcctctcacgactgccccttagtcactcagacatacggcgcagctgcaggaaaaggtacttacgtgccttcatccccaacgagacttgcctacacagacgacctgggtgctgtgggtggcgcctgcctggaggacgaggccagcgccctgcgcctggatgaggacagcgagcacccgcccatgattcttcggactgactgaacttgacctgtgacctctgacccggggagcagagaacactggcttcacagaggactttgtgcattgctgctatgaactttgacctgagtcgggggagaggatggcagagactttattaaaaaaaaaaaaagattgtagtggtagtctaactccataacgctgaggaaatacatcattttcacttcagtggcttttaaatcctgcttatgaattttagctttttgtttgtttgttttctctttttgccaaaattaactgtttggtgaagcccgcaaaacctcctcgctttgcatgcatgaacgtgccaagccagcataggggagctagaagccactttccagccacctgccgttgggttttttcatatctgtacataatgccgagtgcgtaaggaaaccgtggcgtcgcgcacagtgggtctgcttgtcaaggccagttctgcagtgacaggcccaggggctgcccaccaggtgtgctgggcagacttcagctgggacagaagtccgatctccctagggccccacctggaccattttccctccgttttattttgttaattaaattctttccaaattggatcgctctgggatttcttccatggtggacttttgtttctgatcttgttttccctgtggatattggaggacagcgaggttctttctgatactaaaaacctttctttcaggcagcaaatgaacttgaaaggttgcctggactcgctggagcaaaggaaagcgattttgtttgtataattaaatgatctgttcttctacttcactcttcctgttgaaaaactgtgtgatttttttttttttttaagtaaagtttgtagctcctcccatgcccaggaaagcacagaactcaagtgtggtggccgtctgagctgtcctttcgctggccccgctgtccgcaggggcttcctacctgtgtgagaggtcgtagcgggagacagcaacagagagtaggcggctgggccacgtccttcacagggcgtcatgtgcctttctattttcatcttagaaaatttcctcagcaaaccgatgagagattgtggttgcaagcttcagtatttgcctcgcttcccttttcatatttacagaattaaaacaacctcaagtacctcagactctgcattccaaaccaaggcacccagcagccaaagtgtcgagggcatttaagtggcattaatggcaggagagatggttttagaatctatggagtggtggaagttacggatagaagggaaaaggcaaaaactatttaccctgcctttgcaggctggggtttttgaaccgaggaaggctgggacgcctgtttccagatggttgtcatggtcacgctgggcgaagagctggaggggagttgtcccctcagctgagcggctgcggtgaaatgccccagtgttcctgggttggctttacggcaaactaaatgcaggggacgctggagtccgactcacctacaccggcttcctcccagccgctggtgtgcggcacacacaacatctgcattaggcagaggtgcaagtgggctgattgaacttttccttcaaaacctgcttgtctgtcctggacctttgatgaaatgggatcccggtcacgcaggctgagacagtggggaccgccgaggccagagtgggctatgcttgagcagggatgagaagggccgcggcagcacgcagccttgacccacgcctgcgtcttgtggtgcaaggccagagggctctctctagaacctgaccgtgcactccatctcctgggagccacttttggcaagagtgagtgtggggggaaaaagtgtgcacaagagatacggaaccctgagctagggtttcctgtcaccaaagagtgagctgcatttccagttctgcgttaaagtatcgtttgttctggtgcctgcctgtggtggtgatttggagactcaaatttcctttgccaggtctcttttgtctttctttgggattggtagtatagaagatgctgggaattgtcttcctcgctcagcctcggcttcccgcactgtaagatgaggcagttgcagaggaggcctcggacgtcctgtgaccctcggcccacactcccccttgggtggccctggcagggctggctaggtgcgttccctgcagaccacgggaagccctgtgcttgcctgggtcagggctaagctgtgcgccctagaggagggaggaggactgcagattcttggtcgagaagaatgaagaggatttctgtgtttgctgagcagccattgtggagggttacccgcctccactttcccgttgcccatttcactgccaccagctcctcttcctctgctcgaacctatgagtcccagcctcactggcggcctcagacatgctcaggagtgacggggacagagggaggccgctgagttgcccgttagaactcttactgctgcgccagtgacccaggtggagagggaccctgaaccaaacagaacgtgtgctaattttccgaactccaaactgtacactcatattcatttttaaattgtatttttccaaacttcaaaaaggacgatgagcgtgggggataggaaacaaaacctgtaaacgttgtgaatgggctcagtggactctgggaccaaaccttctgtaatctctaaaacaatgggaccaagagctggatggaacctggagtcaaaaagaactgcttcagtccccgctgtaccgcctgcctagctgtgggagcaggcagggcgcctgggagcctgcgttttctggaccgttccatgggactcatccctacctcacagggctgttgtgaggtgttgtgtgactgcgtgtcctgcaaacgcccagctcggtgcccagccagcggtgggcacccaataaacgctacaacata

SEQ ID NO: 394850 - DNA, 1480 bp, Homo sapiens
aggcggtgcgtcgcgggggcggggccgcgcaggcgtaccgggtgccccggctctggagcataaacaagagcggggacgggatgaggcggcggttgatcccagggtggcgagtggcggcgaccgaggcggcgagcggggcccggcgccgaccctgagtgcagcctgacccgccctcgcgcgcgcgccctccccggccgggcccactcgccgcgcgcccagccatgaacctggcgagccagagcggggaggccggcgccggccagctgctcttcgccaacttcaaccaggacaacacgtccctagctgttggtagtaagtccggttataaatttttctccctttcttctgtggataagctggaacagatctatgaatgcaccgatacggaagatgtgtgcattgtagagagattgttctccagcagcctagtggccatcgtgagccttaaagcaccaaggaagctaaaggtttgccactttaagaagggaactgagatctgcaactacagctactccaacacgattctggctgtgaagctcaacaggcagaggctgatagtatgcctggaggagtccctgtacatccacaacattcgggacatgaaggtgctgcatacgatcagggagacgcctccaaaccctgcaggcctgtgtgcgctgtcaatcaacaacgacaactgctacttggcgtacccagggagcgcgaccatcggagaggtgcaggtcttcgataccattaatttgagagctgcaaacatgattccggctcacgacagtcctttagcggcactggcctttgacgcaagtggaactaaacttgccacggcttcggagaaggggaccgtgattagggtattttccattccagaaggacaaaaactctttgagtttcggagaggagtaaagaggtgcgtgagcatctgctccctggccttcagcatggacggcatgttcctctccgcctccagcaacactgagaccgtgcacatcttcaaactcgagactgtgaaagaaaaacccccagaggagcccaccacctggaccgggtacttcgggaaagtgctcatggcctccaccagctacctgccttcccaagtgacagaaatgttcaaccagggcagagccttcgccacggtccgcctgccattctgcggccacaaaaacatctgctcgctagccacaattcagaagatcccgcggttgttggtgggtgccgccgacgggtacctgtacatgtacaacctggacccccaggagggcggcgagtgtgccctgatgaagcagcaccggctggacggcagtctggaaacgaccaatgagatcttggactctgcctctcacgactgccccttagtcactcagacatacggcgcagctgcaggaaaaggtacttacgtgccttcatccccaacgagacttgcctacacagacgacctgggtgctgtgggtcgcccacgcgtccgcgacccacgcgtccgccc

SEQ ID NO: 394851 - DNA, 3311 bp, Homo sapiens
ctttagactttccatgtaaaactcttcatgtaaaaacgtgtgcagatagacgagattaaagttgccacggcgtgatgaatgcctggcgtcctgtgtggtgagtggtgtgctggctctgttgccgcagggcagccagtgtgtactgcccgcagggctgccctgtgtggagacgctgagctgtgtcgctttcttccctccaggctggacggcagtctggaaacgaccaatgagatcttggactctgcctctcacgactgccccttagtcactcagacatacggcgcagctgcaggaaaaggtacttacgtgccttcatccccaacgagacttgcctacacagacgacctgggtgctgtgggtggcgcctgcctggaggacgaggccagcgccctgcgcctggatgaggacagcgagcacccgcccatgattcttcggactgactgaacttgacctgtgacctctgacccggggagcagagaacactggcttcacagaggactttgtgcattgctgctatgaactttgacctgagtcgggggagaggatggcagagactttattaaaaaaaaaaaaagattgtagtggtagtctaactccataacgctgaggaaatacatcattttcacttcagtggcttttaaatcctgcttatgaattttagctttttgtttgtttgttttctctttttgccaaaattaactgtttggtgaagcccgcaaaacctcctcgctttgcatgcatgaacgtgccaagccagcataggggagctagaagccactttccagccacctgccgttgggttttttcatatctgtacataatgccgagtgcgtaaggaaaccgtggcgtcgcgcacagtgggtctgcttgtcaaggccagttctgcagtgacaggcccaggggctgcccaccaggtgtgctgggcagacttcagctgggacagaagtccgatctccctagggccccacctggaccattttccctccgttttattttgttaattaaattctttccaaattggatcgctctgggatttcttccatggtggacttttgtttctgatcttgttttccctgtggatattggaggacagcgaggttctttctgatactaaaaacctttctttcaggcagcaaatgaacttgaaaggttgcctggactcgctggagcaaaggaaagcgattttgtttgtataattaaatgatctgttcttctacttcactcttcctgttgaaaaactgtgtgatttttttttttttttaagtaaagtttgtagctcctcccatgcccaggaaagcacagaactcaagtgtggtggccgtctgagctgtcctttcgctggccccgctgtccgcaggggcttcctacctgtgtgagaggtcgtagcgggagacagcaacagagagtaggcggctgggccacgtccttcacagggcgtcatgtgcctttctattttcatcttagaaaatttcctcagcaaaccgatgagagattgtggttgcaagcttcagtatttgcctcgcttcccttttcatatttacagaattaaaacaacctcaagtacctcagactctgcattccaaaccaaggcacccagcagccaaagtgtcgagggcatttaagtggcattaatggcaggagagatggttttagaatctatggagtggtggaagttacggatagaagggaaaaggcaaaaactatttaccctgcctttgcaggctggggtttttgaaccgaggaaggctgggacgcctgtttccagatggttgtcatggtcacgctgggcgaagagctggaggggagttgtcccctcagctgagcggctgcggtgaaatgccccagtgttcctgggttggctttacggcaaactaaatgcaggggacgctggagtccgactcacctacaccggcttcctcccagccgctggtgtgcggcacacacaacatctgcattaggcagaggtgcaagtgggctgattgaacttttccttcaaaacctgcttgtctgtcctggacctttgatgaaatgggatcccggtcacgcaggctgagacagtggggaccgccgaggccagagtgggctatgcttgagcagggatgagaagggccgcggcagcacgcagccttgacccacgcctgcgtcttgtggtgcaaggccagagggctctctctagaacctgaccgtgcactccatctcctgggagccacttttggcaagagtgagtgtggggggaaaaagtgtgcacaagagatacggaaccctgagctagggtttcctgtcaccaaagagtgagctgcatttccagttctgcgttaaagtatcgtttgttctggtgcctgcctgtggtggtgatttggagactcaaatttcctttgccaggtctcttttgtctttctttgggattggtagtatagaagatgctgggaattgtcttcctcgctcagcctcggcttcccgcactgtaagatgaggcagttgcagaggaggcctcggacgtcctgtgaccctcggcccacactcccccttgggtggccctggcagggctggctaggtgcgttccctgcagaccacgggaagccctgtgcttgcctgggtcagggctaagctgtgcgccctagaggagggaggaggactgcagattcttggtcgagaagaatgaagaggatttctgtgtttgctgagcagccattgtggagggttacccgcctccactttcccgttgcccatttcactgccaccagctcctcttcctctgctcgaacctatgagtcccagcctcactggcggcctcagacatgctcaggagtgacggggacagagggaggccgctgagttgcccgttagaactcttactgctgcgccagtgacccaggtggagagggaccctgaaccaaacagaacgtgtgctaattttccgaactccaaactgtacactcatattcatttttaaattgtatttttccaaacttcaaaaaggacgatgagcgtgggggataggaaacaaaacctgtaaacgttgtgaatgggctcagtggactctgggaccaaaccttctgtaatctctaaaacaatgggaccaagagctggatggaacctggagtcaaaaagaactgcttcagtccccgctgtaccgcctgcctagctgtgggagcaggcagggcgcctgggagcctgcgttttctggaccgttccatgggactcatccctacctcacagggctgttgtgaggtgttgtgtgactgcgtgtcctgcaaacgcccagctcggtgcccagccagcggtgggcacccaataaacgctacaacata

SEQ ID NO: 394852 - DNA, 2797 bp, Homo sapiens
ttttcttaagtgcccacatttgatgagaggatggcagagactttattaaaaaaaaaaaaagattgtagtggtagtctaactccataacgctgaggaaatacatcattttcacttcagtggcttttaaatcctgcttatgaattttagctttttgtttgtttgttttctctttttgccaaaattaactgtttggtgaagcccgcaaaacctcctcgctttgcatgcatgaacgtgccaagccagcataggggagctagaagccactttccagccacctgccgttgggttttttcatatctgtacataatgccgagtgcgtaaggaaaccgtggcgtcgcgcacagtgggtctgcttgtcaaggccagttctgcagtgacaggcccaggggctgcccaccaggtgtgctgggcagacttcagctgggacagaagtccgatctccctagggccccacctggaccattttccctccgttttattttgttaattaaattctttccaaattggatcgctctgggatttcttccatggtggacttttgtttctgatcttgttttccctgtggatattggaggacagcgaggttctttctgatactaaaaacctttctttcaggcagcaaatgaacttgaaaggttgcctggactcgctggagcaaaggaaagcgattttgtttgtataattaaatgatctgttcttctacttcactcttcctgttgaaaaactgtgtgatttttttttttttttaagtaaagtttgtagctcctcccatgcccaggaaagcacagaactcaagtgtggtggccgtctgagctgtcctttcgctggccccgctgtccgcaggggcttcctacctgtgtgagaggtcgtagcgggagacagcaacagagagtaggcggctgggccacgtccttcacagggcgtcatgtgcctttctattttcatcttagaaaatttcctcagcaaaccgatgagagattgtggttgcaagcttcagtatttgcctcgcttcccttttcatatttacagaattaaaacaacctcaagtacctcagactctgcattccaaaccaaggcacccagcagccaaagtgtcgagggcatttaagtggcattaatggcaggagagatggttttagaatctatggagtggtggaagttacggatagaagggaaaaggcaaaaactatttaccctgcctttgcaggctggggtttttgaaccgaggaaggctgggacgcctgtttccagatggttgtcatggtcacgctgggcgaagagctggaggggagttgtcccctcagctgagcggctgcggtgaaatgccccagtgttcctgggttggctttacggcaaactaaatgcaggggacgctggagtccgactcacctacaccggcttcctcccagccgctggtgtgcggcacacacaacatctgcattaggcagaggtgcaagtgggctgattgaacttttccttcaaaacctgcttgtctgtcctggacctttgatgaaatgggatcccggtcacgcaggctgagacagtggggaccgccgaggccagagtgggctatgcttgagcagggatgagaagggccgcggcagcacgcagccttgacccacgcctgcgtcttgtggtgcaaggccagagggctctctctagaacctgaccgtgcactccatctcctgggagccacttttggcaagagtgagtgtggggggaaaaagtgtgcacaagagatacggaaccctgagctagggtttcctgtcaccaaagagtgagctgcatttccagttctgcgttaaagtatcgtttgttctggtgcctgcctgtggtggtgatttggagactcaaatttcctttgccaggtctcttttgtctttctttgggattggtagtatagaagatgctgggaattgtcttcctcgctcagcctcggcttcccgcactgtaagatgaggcagttgcagaggaggcctcggacgtcctgtgaccctcggcccacactcccccttgggtggccctggcagggctggctaggtgcgttccctgcagaccacgggaagccctgtgcttgcctgggtcagggctaagctgtgcgccctagaggagggaggaggactgcagattcttggtcgagaagaatgaagaggatttctgtgtttgctgagcagccattgtggagggttacccgcctccactttcccgttgcccatttcactgccaccagctcctcttcctctgctcgaacctatgagtcccagcctcactggcggcctcagacatgctcaggagtgacggggacagagggaggccgctgagttgcccgttagaactcttactgctgcgccagtgacccaggtggagagggaccctgaaccaaacagaacgtgtgctaattttccgaactccaaactgtacactcatattcatttttaaattgtatttttccaaacttcaaaaaggacgatgagcgtgggggataggaaacaaaacctgtaaacgttgtgaatgggctcagtggactctgggaccaaaccttctgtaatctctaaaacaatgggaccaagagctggatggaacctggagtcaaaaagaactgcttcagtccccgctgtaccgcctgcctagctgtgggagcaggcagggcgcctgggagcctgcgttttctggaccgttccatgggactcatccctacctcacagggctgttgtgaggtgttgtgtgactgcgtgtcctgcaaacgcccagctcggtgcccagccagcggtgggcacccaataaacgctacaacata

SEQ ID NO: 394853 - DNA, 947 bp, Homo sapiens
aggcggtgcgtcgcgggggcggggccgcgcaggcgtaccgggtgccccggctctggagcataaacaagagcggggacgggatgaggcggcggttgatcccagggtggcgagtggcggcgaccgaggcggcgagcggggcccggcgccgaccctgagtgcagcctgacccgccctcgcgcgcgcgccctccccggccgggcccactcgccgcgcgcccagccatgaacctggcgagccagagcggggaggccggcgccggccagctgctcttcgccaacttcaaccaggacaacacagaagtgaaaggggcatcaagagcagctggtcttggccgtcgcgctgttgtctggtccctagctgttggtagtaagtccggttataaatttttctccctttcttctgtggataagctggaacagatctatgaatgcaccgatacggaagatgtgtgcattgtagagagattgttctccagcagcctagtggccatcgtgagccttaaagcaccaaggaagctaaaggtttgccactttaagaagggaactgagatctgcaactacagctactccaacacgattctggctgtgaagctcaacaggcagaggctgatagtatgcctggaggagtccctgtacatccacaacattcgggacatgaaggtgctgcctgtgtgcgctgtcaatcaacaacgacaactgctacttggcgtacccagggagcgcgaccatcggagaggtgcaggtcttcgataccattaatttgagagctgcaaacatgattccggctcacgacagtcctttagcggcactggcctttgacgcaagtggaactaaacttgccacggcttcggagaaggggaccgtgattagggtattttccattccagaaggacaaaaactctttgagtttcggagaggagtaaagagggtaaagtacgtgaatgtcca

SEQ ID NO: 394854 - DNA, 669 bp, Homo sapiens
tgccatgttccctgtgtcacagaagagtgtcactctggcctgaaataggaccttttcacacttggacattttcacacttacccacttctccatgctccccgaagttattacagttcaagagatttctgttactttgagatttcataactttgacttgccagagagaccttgatgtagtgtaaacctaaattggaatgaatagtaagctaggattatactagaagttgactgggctaaaatgacggtaatttgttttaaatctacacttgaaagaaatagagaagttcccggagagagcttttatggcttataccttttcctcccttcttaatctccagaatttattgaggagcacaatttttagcaagtgaaagaatgaccgtctagaactcacatttactgtatgcagtgagaaaatttggaagccagttcacttactagaatatatatgttatagggtcatttcccttttttttgtcttttaaattctttttgtatttgttacataccaaactataactgtcctgcctttctttactggtaatatgatttccaatgtcgtactttttcatgattcctatcctaaaagtgtgcataagttttatttgttttttaccatttgttttttgttttgttttgtttttttacctagagaagtgaaaggggcat

SEQ ID NO: 394855 - DNA, 418 bp, Homo sapiens
ccttggtggcccagggcagagctgtcctggagatagccgtgtggcgcatttgcagtctgctgtgaaagatgggaaattcctgttttaactcagctcaaattcttcttttctcttttccttccacaggggaccgtgattagggtattttccattccagaaggacaaaaactctttgagtttcggagaggagtaaagagggtaaagtacgtgaatgtccagaatggattctggaggttgtatttggatttcagttttatgttatctatgaacaaacaagtagaacccccaggagaattccacacgagcatttctagcccggctgggtcaccgggtaagatctgggcgtcggtcttgtcatgggaattgaagagcactttcagaaaagcaaattgggtttttgtttgcgatcccaccagct

SEQ ID NO: 394856 - DNA, 4399 bp, Homo sapiens
aggcggtgcgtcgcgggggcggggccgcgcaggcgtaccgggtgccccggctctggagcataaacaagagcggggacgggatgaggcggcggttgatcccagggtggcgagtggcggcgaccgaggcggcgagcggggcccggcgccgaccctgagtgcagcctgacccgccctcgcgcgcgcgccctccccggccgggcccactcgccgcgcgcccagccatgaacctggcgagccagagcggggaggccggcgccggccagctgctcttcgccaacttcaaccaggacaacacgtccctagctgttggtagtaagtccggttataaatttttctccctttcttctgtggataagctggaacagatctatgaatgcaccgatacggaagatgtgtgcattgtagagagattgttctccagcagcctagtggccatcgtgagccttaaagcaccaaggaagctaaaggtttgccactttaagaagggaactgagatctgcaactacagctactccaacacgattctggctgtgaagctcaacaggcagaggctgatagtatgcctggaggagtccctgtacatccacaacattcgggacatgaaggtgctgcatacgatcagggagacgcctccaaaccctgcaggcctgtgtgcgctgtcaatcaacaacgacaactgctacttggcgtacccagggagcgcgaccatcggagaggtgcaggtcttcgataccattaatttgagagctgcaaacatgattccggctcacgacagtcctttagcggcactggcctttgacgcaagtggaactaaacttgccacggcttcggagaaggggaccgtgattagggtattttccattccagaaggacaaaaactctttgagtttcggagaggagtaaagaggtgcgtgagcatctgctccctggccttcagcatggacggcatgttcctctccgcctccagcaacactgagaccgtgcacatcttcaaactcgagactgtgaaagaaaaacccccagaggagcccaccacctggaccgggtacttcgggaaagtgctcatggcctccaccagctacctgccttcccaagtgacagaaatgttcaaccagggcagagccttcgccacggtccgcctgccattctgcggccacaaaaacatctgctcgctagccacaattcagaagatcccgcggttgttggtgggtgccgccgacgggtacctgtacatgtacaacctggacccccaggagggcggcgagtgtgccctgatgaagcagcaccggctggacggcagtctggaaacgaccaatgagatcttggactctgcctctcacgactgccccttagtcactcagacatacggcgcagctgcaggaaaaggtacttacgtgccttcatccccaacgagacttgcctacacagacgacctgggtgctgtgggtggcgcctgcctggaggacgaggccagcgccctgcgcctggatgaggacagcgagcacccgcccatgattcttcggactgactgaacttgacctgtgacctctgacccggggagcagagaacactggcttcacagaggactttgtgcattgctgctatgaactttgacctgagtcgggggagaggatggcagagactttattaaaaaaaaaaaaagattgtagtggtagtctaactccataacgctgaggaaatacatcattttcacttcagtggcttttaaatcctgcttatgaattttagctttttgtttgtttgttttctctttttgccaaaattaactgtttggtgaagcccgcaaaacctcctcgctttgcatgcatgaacgtgccaagccagcataggggagctagaagccactttccagccacctgccgttgggttttttcatatctgtacataatgccgagtgcgtaaggaaaccgtggcgtcgcgcacagtgggtctgcttgtcaaggccagttctgcagtgacaggcccaggggctgcccaccaggtgtgctgggcagacttcagctgggacagaagtccgatctccctagggccccacctggaccattttccctccgttttattttgttaattaaattctttccaaattggatcgctctgggatttcttccatggtggacttttgtttctgatcttgttttccctgtggatattggaggacagcgaggttctttctgatactaaaaacctttctttcaggcagcaaatgaacttgaaaggttgcctggactcgctggagcaaaggaaagcgattttgtttgtataattaaatgatctgttcttctacttcactcttcctgttgaaaaactgtgtgatttttttttttttttaagtaaagtttgtagctcctcccatgcccaggaaagcacagaactcaagtgtggtggccgtctgagctgtcctttcgctggccccgctgtccgcaggggcttcctacctgtgtgagaggtcgtagcgggagacagcaacagagagtaggcggctgggccacgtccttcacagggcgtcatgtgcctttctattttcatcttagaaaatttcctcagcaaaccgatgagagattgtggttgcaagcttcagtatttgcctcgcttcccttttcatatttacagaattaaaacaacctcaagtacctcagactctgcattccaaaccaaggcacccagcagccaaagtgtcgagggcatttaagtggcattaatggcaggagagatggttttagaatctatggagtggtggaagttacggatagaagggaaaaggcaaaaactatttaccctgcctttgcaggctggggtttttgaaccgaggaaggctgggacgcctgtttccagatggttgtcatggtcacgctgggcgaagagctggaggggagttgtcccctcagctgagcggctgcggtgaaatgccccagtgttcctgggttggctttacggcaaactaaatgcaggggacgctggagtccgactcacctacaccggcttcctcccagccgctggtgtgcggcacacacaacatctgcattaggcagaggtgcaagtgggctgattgaacttttccttcaaaacctgcttgtctgtcctggacctttgatgaaatgggatcccggtcacgcaggctgagacagtggggaccgccgaggccagagtgggctatgcttgagcagggatgagaagggccgcggcagcacgcagccttgacccacgcctgcgtcttgtggtgcaaggccagagggctctctctagaacctgaccgtgcactccatctcctgggagccacttttggcaagagtgagtgtggggggaaaaagtgtgcacaagagatacggaaccctgagctagggtttcctgtcaccaaagagtgagctgcatttccagttctgcgttaaagtatcgtttgttctggtgcctgcctgtggtggtgatttggagactcaaatttcctttgccaggtctcttttgtctttctttgggattggtagtatagaagatgctgggaattgtcttcctcgctcagcctcggcttcccgcactgtaagatgaggcagttgcagaggaggcctcggacgtcctgtgaccctcggcccacactcccccttgggtggccctggcagggctggctaggtgcgttccctgcagaccacgggaagccctgtgcttgcctgggtcagggctaagctgtgcgccctagaggagggaggaggactgcagattcttggtcgagaagaatgaagaggatttctgtgtttgctgagcagccattgtggagggttacccgcctccactttcccgttgcccatttcactgccaccagctcctcttcctctgctcgaacctatgagtcccagcctcactggcggcctcagacatgctcaggagtgacggggacagagggaggccgctgagttgcccgttagaactcttactgctgcgccagtgacccaggtggagagggaccctgaaccaaacagaacgtgtgctaattttccgaactccaaactgtacactcatattcatttttaaattgtatttttccaaacttcaaaaaggacgatgagcgtgggggataggaaacaaaacctgtaaacgttgtgaatgggctcagtggactctgggaccaaaccttctgtaatctctaaaacaatgggaccaagagctggatggaacctggagtcaaaaagaactgcttcagtccccgctgtaccgcctgcctagctgtgggagcaggcagggcgcctgggagcctgcgttttctggaccgttccatgggactcatccctacctcacagggctgttgtgaggtgttgtgtgactgcgtgtcctgcaaacgcccagctcggtgcccagccagcggtgggcacccaataaacgctacaacata

SEQ ID NO: 394857 - DNA, 4366 bp, Homo sapiens
aggcggtgcgtcgcgggggcggggccgcgcaggcgtaccgggtgccccggctctggagcataaacaagagcggggacgggatgaggcggcggttgatcccagggtggcgagtggcggcgaccgaggcggcgagcggggcccggcgccgaccctgagtgcagcctgacccgccctcgcgcgcgcgccctccccggccgggcccactcgccgcgcgcccagccatgaacctggcgagccagagcggggaggccggcgccggccagctgctcttcgccaacttcaaccaggacaacacgtccctagctgttggtagtaagtccggttataaatttttctccctttcttctgtggataagctggaacagatctatgaatgcaccgatacggaagatgtgtgcattgtagagagattgttctccagcagcctagtggccatcgtgagccttaaagcaccaaggaagctaaaggtttgccactttaagaagggaactgagatctgcaactacagctactccaacacgattctggctgtgaagctcaacaggcagaggctgatagtatgcctggaggagtccctgtacatccacaacattcgggacatgaaggtgctgcatacgatcagggagacgcctccaaaccctgcaggcctgtgtgcgctgtcaatcaacaacgacaactgctacttggcgtacccagggagcgcgaccatcggagaggtgcaggtcttcgataccattaatttgagagctgcaaacatgattccggctcacgacagtcctttagcggcactggcctttgacgcaagtggaactaaacttgccacggcttcggagaaggggaccgtgattagggtattttccattccagaaggacaaaaactctttgagtttcggagaggagtaaagaggtgcgtgagcatctgctccctggccttcagcatggacggcatgttcctctccgcctccagcaacactgagaccgtgcacatcttcaaactcgagactgtgaaagaaaaacccccagaggagcccaccacctggaccgggtacttcgggaaagtgctcatggcctccaccagctacctgccttcccaagtgacagaaatgttcaaccagggcagagccttcgccacggtccgcctgccattctgcggccacaaaaacatctgctcgctagccacaattcagaagatcccgcggttgttggtgggtgccgccgacgggtacctgtacatgtacaacctggacccccaggagggcggcgagtgtgccctgatgaagcagcaccggctggacggcagtctggaaacgaccaatgagatcttggactctgcctctcacgactgccccttagtcactcagacatacggcgcagctgcaggaaaagcctacacagacgacctgggtgctgtgggtggcgcctgcctggaggacgaggccagcgccctgcgcctggatgaggacagcgagcacccgcccatgattcttcggactgactgaacttgacctgtgacctctgacccggggagcagagaacactggcttcacagaggactttgtgcattgctgctatgaactttgacctgagtcgggggagaggatggcagagactttattaaaaaaaaaaaaagattgtagtggtagtctaactccataacgctgaggaaatacatcattttcacttcagtggcttttaaatcctgcttatgaattttagctttttgtttgtttgttttctctttttgccaaaattaactgtttggtgaagcccgcaaaacctcctcgctttgcatgcatgaacgtgccaagccagcataggggagctagaagccactttccagccacctgccgttgggttttttcatatctgtacataatgccgagtgcgtaaggaaaccgtggcgtcgcgcacagtgggtctgcttgtcaaggccagttctgcagtgacaggcccaggggctgcccaccaggtgtgctgggcagacttcagctgggacagaagtccgatctccctagggccccacctggaccattttccctccgttttattttgttaattaaattctttccaaattggatcgctctgggatttcttccatggtggacttttgtttctgatcttgttttccctgtggatattggaggacagcgaggttctttctgatactaaaaacctttctttcaggcagcaaatgaacttgaaaggttgcctggactcgctggagcaaaggaaagcgattttgtttgtataattaaatgatctgttcttctacttcactcttcctgttgaaaaactgtgtgatttttttttttttttaagtaaagtttgtagctcctcccatgcccaggaaagcacagaactcaagtgtggtggccgtctgagctgtcctttcgctggccccgctgtccgcaggggcttcctacctgtgtgagaggtcgtagcgggagacagcaacagagagtaggcggctgggccacgtccttcacagggcgtcatgtgcctttctattttcatcttagaaaatttcctcagcaaaccgatgagagattgtggttgcaagcttcagtatttgcctcgcttcccttttcatatttacagaattaaaacaacctcaagtacctcagactctgcattccaaaccaaggcacccagcagccaaagtgtcgagggcatttaagtggcattaatggcaggagagatggttttagaatctatggagtggtggaagttacggatagaagggaaaaggcaaaaactatttaccctgcctttgcaggctggggtttttgaaccgaggaaggctgggacgcctgtttccagatggttgtcatggtcacgctgggcgaagagctggaggggagttgtcccctcagctgagcggctgcggtgaaatgccccagtgttcctgggttggctttacggcaaactaaatgcaggggacgctggagtccgactcacctacaccggcttcctcccagccgctggtgtgcggcacacacaacatctgcattaggcagaggtgcaagtgggctgattgaacttttccttcaaaacctgcttgtctgtcctggacctttgatgaaatgggatcccggtcacgcaggctgagacagtggggaccgccgaggccagagtgggctatgcttgagcagggatgagaagggccgcggcagcacgcagccttgacccacgcctgcgtcttgtggtgcaaggccagagggctctctctagaacctgaccgtgcactccatctcctgggagccacttttggcaagagtgagtgtggggggaaaaagtgtgcacaagagatacggaaccctgagctagggtttcctgtcaccaaagagtgagctgcatttccagttctgcgttaaagtatcgtttgttctggtgcctgcctgtggtggtgatttggagactcaaatttcctttgccaggtctcttttgtctttctttgggattggtagtatagaagatgctgggaattgtcttcctcgctcagcctcggcttcccgcactgtaagatgaggcagttgcagaggaggcctcggacgtcctgtgaccctcggcccacactcccccttgggtggccctggcagggctggctaggtgcgttccctgcagaccacgggaagccctgtgcttgcctgggtcagggctaagctgtgcgccctagaggagggaggaggactgcagattcttggtcgagaagaatgaagaggatttctgtgtttgctgagcagccattgtggagggttacccgcctccactttcccgttgcccatttcactgccaccagctcctcttcctctgctcgaacctatgagtcccagcctcactggcggcctcagacatgctcaggagtgacggggacagagggaggccgctgagttgcccgttagaactcttactgctgcgccagtgacccaggtggagagggaccctgaaccaaacagaacgtgtgctaattttccgaactccaaactgtacactcatattcatttttaaattgtatttttccaaacttcaaaaaggacgatgagcgtgggggataggaaacaaaacctgtaaacgttgtgaatgggctcagtggactctgggaccaaaccttctgtaatctctaaaacaatgggaccaagagctggatggaacctggagtcaaaaagaactgcttcagtccccgctgtaccgcctgcctagctgtgggagcaggcagggcgcctgggagcctgcgttttctggaccgttccatgggactcatccctacctcacagggctgttgtgaggtgttgtgtgactgcgtgtcctgcaaacgcccagctcggtgcccagccagcggtgggcacccaataaacgctacaacata

SEQ ID NO: 394858 - DNA, 4359 bp, Homo sapiens
  misc_feature (13)..(13): n is a, c, g, or t
  misc_feature (15)..(15): n is a, c, g, or t
ggggcagaggcgngnaaacttcggctaggtacgaggctgggttgtgcggcggttgatcccagggtggcgagtggcggcgaccgaggcggcgagcggggcccggcgccgaccctgagtgcagcctgacccgccctcgcgcgcgcgccctccccggccgggcccactcgccgcgcgcccagccatgaacctggcgagccagagcggggaggccggcgccggccagctgctcttcgccaacttcaaccaggacaacacgtccctagctgttggtagtaagtccggttataaatttttctccctttcttctgtggataagctggaacagatctatgaatgcaccgatacggaagatgtgtgcattgtagagagattgttctccagcagcctagtggccatcgtgagccttaaagcaccaaggaagctaaaggtttgccactttaagaagggaactgagatctgcaactacagctactccaacacgattctggctgtgaagctcaacaggcagaggctgatagtatgcctggaggagtccctgtacatccacaacattcgggacatgaaggtgctgcatacgatcagggagacgcctccaaaccctgcaggcctgtgtgcgctgtcaatcaacaacgacaactgctacttggcgtacccagggagcgcgaccatcggagaggtgcaggtcttcgataccattaatttgagagctgcaaacatgattccggctcacgacagtcctttagcggcactggcctttgacgcaagtggaactaaacttgccacggcttcggagaaggggaccgtgattagggtattttccattccagaaggacaaaaactctttgagtttcggagaggagtaaagaggtgcgtgagcatctgctccctggccttcagcatggacggcatgttcctctccgcctccagcaacactgagaccgtgcacatcttcaaactcgagactgtgaaagaaaaacccccagaggagcccaccacctggaccgggtacttcgggaaagtgctcatggcctccaccagctacctgccttcccaagtgacagaaatgttcaaccagggcagagccttcgccacggtccgcctgccattctgcggccacaaaaacatctgctcgctagccacaattcagaagatcccgcggttgttggtgggtgccgccgacgggtacctgtacatgtacaacctggacccccaggagggcggcgagtgtgccctgatgaagcagcaccggctggacggcagtctggaaacgaccaatgagatcttggactctgcctctcacgactgccccttagtcactcagacatacggcgcagctgcaggaaaaggtacttacgtgccttcatccccaacgagacttgcctacacagacgacctgggtgctgtgggtggcgcctgcctggaggacgaggccagcgccctgcgcctggatgaggacagcgagcacccgcccatgattcttcggactgactgaacttgacctgtgacctctgacccggggagcagagaacactggcttcacagaggactttgtgcattgctgctatgaactttgacctgagtcgggggagaggatggcagagactttattaaaaaaaaaaaaagattgtagtggtagtctaactccataacgctgaggaaatacatcattttcacttcagtggcttttaaatcctgcttatgaattttagctttttgtttgtttgttttctctttttgccaaaattaactgtttggtgaagcccgcaaaacctcctcgctttgcatgcatgaacgtgccaagccagcataggggagctagaagccactttccagccacctgccgttgggttttttcatatctgtacataatgccgagtgcgtaaggaaaccgtggcgtcgcgcacagtgggtctgcttgtcaaggccagttctgcagtgacaggcccaggggctgcccaccaggtgtgctgggcagacttcagctgggacagaagtccgatctccctagggccccacctggaccattttccctccgttttattttgttaattaaattctttccaaattggatcgctctgggatttcttccatggtggacttttgtttctgatcttgttttccctgtggatattggaggacagcgaggttctttctgatactaaaaacctttctttcaggcagcaaatgaacttgaaaggttgcctggactcgctggagcaaaggaaagcgattttgtttgtataattaaatgatctgttcttctacttcactcttcctgttgaaaaactgtgtgatttttttttttttttaagtaaagtttgtagctcctcccatgcccaggaaagcacagaactcaagtgtggtggccgtctgagctgtcctttcgctggccccgctgtccgcaggggcttcctacctgtgtgagaggtcgtagcgggagacagcaacagagagtaggcggctgggccacgtccttcacagggcgtcatgtgcctttctattttcatcttagaaaatttcctcagcaaaccgatgagagattgtggttgcaagcttcagtatttgcctcgcttcccttttcatatttacagaattaaaacaacctcaagtacctcagactctgcattccaaaccaaggcacccagcagccaaagtgtcgagggcatttaagtggcattaatggcaggagagatggttttagaatctatggagtggtggaagttacggatagaagggaaaaggcaaaaactatttaccctgcctttgcaggctggggtttttgaaccgaggaaggctgggacgcctgtttccagatggttgtcatggtcacgctgggcgaagagctggaggggagttgtcccctcagctgagcggctgcggtgaaatgccccagtgttcctgggttggctttacggcaaactaaatgcaggggacgctggagtccgactcacctacaccggcttcctcccagccgctggtgtgcggcacacacaacatctgcattaggcagaggtgcaagtgggctgattgaacttttccttcaaaacctgcttgtctgtcctggacctttgatgaaatgggatcccggtcacgcaggctgagacagtggggaccgccgaggccagagtgggctatgcttgagcagggatgagaagggccgcggcagcacgcagccttgacccacgcctgcgtcttgtggtgcaaggccagagggctctctctagaacctgaccgtgcactccatctcctgggagccacttttggcaagagtgagtgtggggggaaaaagtgtgcacaagagatacggaaccctgagctagggtttcctgtcaccaaagagtgagctgcatttccagttctgcgttaaagtatcgtttgttctggtgcctgcctgtggtggtgatttggagactcaaatttcctttgccaggtctcttttgtctttctttgggattggtagtatagaagatgctgggaattgtcttcctcgctcagcctcggcttcccgcactgtaagatgaggcagttgcagaggaggcctcggacgtcctgtgaccctcggcccacactcccccttgggtggccctggcagggctggctaggtgcgttccctgcagaccacgggaagccctgtgcttgcctgggtcagggctaagctgtgcgccctagaggagggaggaggactgcagattcttggtcgagaagaatgaagaggatttctgtgtttgctgagcagccattgtggagggttacccgcctccactttcccgttgcccatttcactgccaccagctcctcttcctctgctcgaacctatgagtcccagcctcactggcggcctcagacatgctcaggagtgacggggacagagggaggccgctgagttgcccgttagaactcttactgctgcgccagtgacccaggtggagagggaccctgaaccaaacagaacgtgtgctaattttccgaactccaaactgtacactcatattcatttttaaattgtatttttccaaacttcaaaaaggacgatgagcgtgggggataggaaacaaaacctgtaaacgttgtgaatgggctcagtggactctgggaccaaaccttctgtaatctctaaaacaatgggaccaagagctggatggaacctggagtcaaaaagaactgcttcagtccccgctgtaccgcctgcctagctgtgggagcaggcagggcgcctgggagcctgcgttttctggaccgttccatgggactcatccctacctcacagggctgttgtgaggtgttgtgtgactgcgtgtcctgcaaacgcccagctcggtgcccagccagcggtgggcacccaataaacgctacaacata

SEQ ID NO: 394859 - DNA, 4336 bp, Homo sapiens
gcccttctttcctgtcacacttgctaggtcggctggtttagcggttgatccaggtgtgagtgtgtactgggcgtggaggggccgggcgaccctagtgctgctgaccgccctcgcgcgcgcgccctccccggccgggcccactcgccgcgcgcccagccatgaacctggcgagccagagcggggaggccggcgccggccagctgctcttcgccaacttcaaccaggacaacacgtccctagctgttggtagtaagtccggttataaatttttctccctttcttctgtggataagctggaacagatctatgaatgcaccgatacggaagatgtgtgcattgtagagagattgttctccagcagcctagtggccatcgtgagccttaaagcaccaaggaagctaaaggtttgccactttaagaagggaactgagatctgcaactacagctactccaacacgattctggctgtgaagctcaacaggcagaggctgatagtatgcctggaggagtccctgtacatccacaacattcgggacatgaaggtgctgcatacgatcagggagacgcctccaaaccctgcaggcctgtgtgcgctgtcaatcaacaacgacaactgctacttggcgtacccagggagcgcgaccatcggagaggtgcaggtcttcgataccattaatttgagagctgcaaacatgattccggctcacgacagtcctttagcggcactggcctttgacgcaagtggaactaaacttgccacggcttcggagaaggggaccgtgattagggtattttccattccagaaggacaaaaactctttgagtttcggagaggagtaaagaggtgcgtgagcatctgctccctggccttcagcatggacggcatgttcctctccgcctccagcaacactgagaccgtgcacatcttcaaactcgagactgtgaaagaaaaacccccagaggagcccaccacctggaccgggtacttcgggaaagtgctcatggcctccaccagctacctgccttcccaagtgacagaaatgttcaaccagggcagagccttcgccacggtccgcctgccattctgcggccacaaaaacatctgctcgctagccacaattcagaagatcccgcggttgttggtgggtgccgccgacgggtacctgtacatgtacaacctggacccccaggagggcggcgagtgtgccctgatgaagcagcaccggctggacggcagtctggaaacgaccaatgagatcttggactctgcctctcacgactgccccttagtcactcagacatacggcgcagctgcaggaaaaggtacttacgtgccttcatccccaacgagacttgcctacacagacgacctgggtgctgtgggtggcgcctgcctggaggacgaggccagcgccctgcgcctggatgaggacagcgagcacccgcccatgattcttcggactgactgaacttgacctgtgacctctgacccggggagcagagaacactggcttcacagaggactttgtgcattgctgctatgaactttgacctgagtcgggggagaggatggcagagactttattaaaaaaaaaaaaagattgtagtggtagtctaactccataacgctgaggaaatacatcattttcacttcagtggcttttaaatcctgcttatgaattttagctttttgtttgtttgttttctctttttgccaaaattaactgtttggtgaagcccgcaaaacctcctcgctttgcatgcatgaacgtgccaagccagcataggggagctagaagccactttccagccacctgccgttgggttttttcatatctgtacataatgccgagtgcgtaaggaaaccgtggcgtcgcgcacagtgggtctgcttgtcaaggccagttctgcagtgacaggcccaggggctgcccaccaggtgtgctgggcagacttcagctgggacagaagtccgatctccctagggccccacctggaccattttccctccgttttattttgttaattaaattctttccaaattggatcgctctgggatttcttccatggtggacttttgtttctgatcttgttttccctgtggatattggaggacagcgaggttctttctgatactaaaaacctttctttcaggcagcaaatgaacttgaaaggttgcctggactcgctggagcaaaggaaagcgattttgtttgtataattaaatgatctgttcttctacttcactcttcctgttgaaaaactgtgtgatttttttttttttttaagtaaagtttgtagctcctcccatgcccaggaaagcacagaactcaagtgtggtggccgtctgagctgtcctttcgctggccccgctgtccgcaggggcttcctacctgtgtgagaggtcgtagcgggagacagcaacagagagtaggcggctgggccacgtccttcacagggcgtcatgtgcctttctattttcatcttagaaaatttcctcagcaaaccgatgagagattgtggttgcaagcttcagtatttgcctcgcttcccttttcatatttacagaattaaaacaacctcaagtacctcagactctgcattccaaaccaaggcacccagcagccaaagtgtcgagggcatttaagtggcattaatggcaggagagatggttttagaatctatggagtggtggaagttacggatagaagggaaaaggcaaaaactatttaccctgcctttgcaggctggggtttttgaaccgaggaaggctgggacgcctgtttccagatggttgtcatggtcacgctgggcgaagagctggaggggagttgtcccctcagctgagcggctgcggtgaaatgccccagtgttcctgggttggctttacggcaaactaaatgcaggggacgctggagtccgactcacctacaccggcttcctcccagccgctggtgtgcggcacacacaacatctgcattaggcagaggtgcaagtgggctgattgaacttttccttcaaaacctgcttgtctgtcctggacctttgatgaaatgggatcccggtcacgcaggctgagacagtggggaccgccgaggccagagtgggctatgcttgagcagggatgagaagggccgcggcagcacgcagccttgacccacgcctgcgtcttgtggtgcaaggccagagggctctctctagaacctgaccgtgcactccatctcctgggagccacttttggcaagagtgagtgtggggggaaaaagtgtgcacaagagatacggaaccctgagctagggtttcctgtcaccaaagagtgagctgcatttccagttctgcgttaaagtatcgtttgttctggtgcctgcctgtggtggtgatttggagactcaaatttcctttgccaggtctcttttgtctttctttgggattggtagtatagaagatgctgggaattgtcttcctcgctcagcctcggcttcccgcactgtaagatgaggcagttgcagaggaggcctcggacgtcctgtgaccctcggcccacactcccccttgggtggccctggcagggctggctaggtgcgttccctgcagaccacgggaagccctgtgcttgcctgggtcagggctaagctgtgcgccctagaggagggaggaggactgcagattcttggtcgagaagaatgaagaggatttctgtgtttgctgagcagccattgtggagggttacccgcctccactttcccgttgcccatttcactgccaccagctcctcttcctctgctcgaacctatgagtcccagcctcactggcggcctcagacatgctcaggagtgacggggacagagggaggccgctgagttgcccgttagaactcttactgctgcgccagtgacccaggtggagagggaccctgaaccaaacagaacgtgtgctaattttccgaactccaaactgtacactcatattcatttttaaattgtatttttccaaacttcaaaaaggacgatgagcgtgggggataggaaacaaaacctgtaaacgttgtgaatgggctcagtggactctgggaccaaaccttctgtaatctctaaaacaatgggaccaagagctggatggaacctggagtcaaaaagaactgcttcagtccccgctgtaccgcctgcctagctgtgggagcaggcagggcgcctgggagcctgcgttttctggaccgttccatgggactcatccctacctcacagggctgttgtgaggtgttgtgtgactgcgtgtcctgcaaacgcccagctcggtgcccagccagcggtgggcacccaataaacgctacaacata

SEQ ID NO: 394860 - DNA, 4057 bp, Homo sapiens
  misc_feature (1)..(1): n is a, c, g, or t
nttcatagatctgttccagcttatccacagaagaaaccgatacggaagatgtgtgcattgtagagagattgttctccagcagcctagtggccatcgtgagccttaaagcaccaaggaagctaaaggtttgccactttaagaagggaactgagatctgcaactacagctactccaacacgattctggctgtgaagctcaacaggcagaggctgatagtatgcctggaggagtccctgtacatccacaacattcgggacatgaaggtgctgcatacgatcagggagacgcctccaaaccctgcaggcctgtgtgcgctgtcaatcaacaacgacaactgctacttggcgtacccagggagcgcgaccatcggagaggtgcaggtcttcgataccattaatttgagagctgcaaacatgattccggctcacgacagtcctttagcggcactggcctttgacgcaagtggaactaaacttgccacggcttcggagaaggggaccgtgattagggtattttccattccagaaggacaaaaactctttgagtttcggagaggagtaaagaggtgcgtgagcatctgctccctggccttcagcatggacggcatgttcctctccgcctccagcaacactgagaccgtgcacatcttcaaactcgagactgtgaaagaaaaacccccagaggagcccaccacctggaccgggtacttcgggaaagtgctcatggcctccaccagctacctgccttcccaagtgacagaaatgttcaaccagggcagagccttcgccacggtccgcctgccattctgcggccacaaaaacatctgctcgctagccacaattcagaagatcccgcggttgttggtgggtgccgccgacgggtacctgtacatgtacaacctggacccccaggagggcggcgagtgtgccctgatgaagcagcaccggctggacggcagtctggaaacgaccaatgagatcttggactctgcctctcacgactgccccttagtcactcagacatacggcgcagctgcaggaaaaggtacttacgtgccttcatccccaacgagacttgcctacacagacgacctgggtgctgtgggtggcgcctgcctggaggacgaggccagcgccctgcgcctggatgaggacagcgagcacccgcccatgattcttcggactgactgaacttgacctgtgacctctgacccggggagcagagaacactggcttcacagaggactttgtgcattgctgctatgaactttgacctgagtcgggggagaggatggcagagactttattaaaaaaaaaaaaagattgtagtggtagtctaactccataacgctgaggaaatacatcattttcacttcagtggcttttaaatcctgcttatgaattttagctttttgtttgtttgttttctctttttgccaaaattaactgtttggtgaagcccgcaaaacctcctcgctttgcatgcatgaacgtgccaagccagcataggggagctagaagccactttccagccacctgccgttgggttttttcatatctgtacataatgccgagtgcgtaaggaaaccgtggcgtcgcgcacagtgggtctgcttgtcaaggccagttctgcagtgacaggcccaggggctgcccaccaggtgtgctgggcagacttcagctgggacagaagtccgatctccctagggccccacctggaccattttccctccgttttattttgttaattaaattctttccaaattggatcgctctgggatttcttccatggtggacttttgtttctgatcttgttttccctgtggatattggaggacagcgaggttctttctgatactaaaaacctttctttcaggcagcaaatgaacttgaaaggttgcctggactcgctggagcaaaggaaagcgattttgtttgtataattaaatgatctgttcttctacttcactcttcctgttgaaaaactgtgtgatttttttttttttttaagtaaagtttgtagctcctcccatgcccaggaaagcacagaactcaagtgtggtggccgtctgagctgtcctttcgctggccccgctgtccgcaggggcttcctacctgtgtgagaggtcgtagcgggagacagcaacagagagtaggcggctgggccacgtccttcacagggcgtcatgtgcctttctattttcatcttagaaaatttcctcagcaaaccgatgagagattgtggttgcaagcttcagtatttgcctcgcttcccttttcatatttacagaattaaaacaacctcaagtacctcagactctgcattccaaaccaaggcacccagcagccaaagtgtcgagggcatttaagtggcattaatggcaggagagatggttttagaatctatggagtggtggaagttacggatagaagggaaaaggcaaaaactatttaccctgcctttgcaggctggggtttttgaaccgaggaaggctgggacgcctgtttccagatggttgtcatggtcacgctgggcgaagagctggaggggagttgtcccctcagctgagcggctgcggtgaaatgccccagtgttcctgggttggctttacggcaaactaaatgcaggggacgctggagtccgactcacctacaccggcttcctcccagccgctggtgtgcggcacacacaacatctgcattaggcagaggtgcaagtgggctgattgaacttttccttcaaaacctgcttgtctgtcctggacctttgatgaaatgggatcccggtcacgcaggctgagacagtggggaccgccgaggccagagtgggctatgcttgagcagggatgagaagggccgcggcagcacgcagccttgacccacgcctgcgtcttgtggtgcaaggccagagggctctctctagaacctgaccgtgcactccatctcctgggagccacttttggcaagagtgagtgtggggggaaaaagtgtgcacaagagatacggaaccctgagctagggtttcctgtcaccaaagagtgagctgcatttccagttctgcgttaaagtatcgtttgttctggtgcctgcctgtggtggtgatttggagactcaaatttcctttgccaggtctcttttgtctttctttgggattggtagtatagaagatgctgggaattgtcttcctcgctcagcctcggcttcccgcactgtaagatgaggcagttgcagaggaggcctcggacgtcctgtgaccctcggcccacactcccccttgggtggccctggcagggctggctaggtgcgttccctgcagaccacgggaagccctgtgcttgcctgggtcagggctaagctgtgcgccctagaggagggaggaggactgcagattcttggtcgagaagaatgaagaggatttctgtgtttgctgagcagccattgtggagggttacccgcctccactttcccgttgcccatttcactgccaccagctcctcttcctctgctcgaacctatgagtcccagcctcactggcggcctcagacatgctcaggagtgacggggacagagggaggccgctgagttgcccgttagaactcttactgctgcgccagtgacccaggtggagagggaccctgaaccaaacagaacgtgtgctaattttccgaactccaaactgtacactcatattcatttttaaattgtatttttccaaacttcaaaaaggacgatgagcgtgggggataggaaacaaaacctgtaaacgttgtgaatgggctcagtggactctgggaccaaaccttctgtaatctctaaaacaatgggaccaagagctggatggaacctggagtcaaaaagaactgcttcagtccccgctgtaccgcctgcctagctgtgggagcaggcagggcgcctgggagcctgcgttttctggaccgttccatgggactcatccctacctcacagggctgttgtgaggtgttgtgtgactgcgtgtcctgcaaacgcccagctcggtgcccagccagcggtgggcacccaataaacgctacaacata

SEQ ID NO: 394861 - DNA, 3624 bp, Homo sapiens
gactctctgtagcagatttggcagagagtataatgaagaatcttaggcgggtgcacccagtgggaccgtgattagggtattttccattccagaaggacaaaaactctttgagtttcggagaggagtaaagaggtgcgtgagcatctgctccctggccttcagcatggacggcatgttcctctccgcctccagcaacactgagaccgtgcacatcttcaaactcgagactgtgaaagaaaaacccccagaggagcccaccacctggaccgggtacttcgggaaagtgctcatggcctccaccagctacctgccttcccaagtgacagaaatgttcaaccagggcagagccttcgccacggtccgcctgccattctgcggccacaaaaacatctgctcgctagccacaattcagaagatcccgcggttgttggtgggtgccgccgacgggtacctgtacatgtacaacctggacccccaggagggcggcgagtgtgccctgatgaagcagcaccggctggacggcagtctggaaacgaccaatgagatcttggactctgcctctcacgactgccccttagtcactcagacatacggcgcagctgcaggaaaaggtacttacgtgccttcatccccaacgagacttgcctacacagacgacctgggtgctgtgggtggcgcctgcctggaggacgaggccagcgccctgcgcctggatgaggacagcgagcacccgcccatgattcttcggactgactgaacttgacctgtgacctctgacccggggagcagagaacactggcttcacagaggactttgtgcattgctgctatgaactttgacctgagtcgggggagaggatggcagagactttattaaaaaaaaaaaaagattgtagtggtagtctaactccataacgctgaggaaatacatcattttcacttcagtggcttttaaatcctgcttatgaattttagctttttgtttgtttgttttctctttttgccaaaattaactgtttggtgaagcccgcaaaacctcctcgctttgcatgcatgaacgtgccaagccagcataggggagctagaagccactttccagccacctgccgttgggttttttcatatctgtacataatgccgagtgcgtaaggaaaccgtggcgtcgcgcacagtgggtctgcttgtcaaggccagttctgcagtgacaggcccaggggctgcccaccaggtgtgctgggcagacttcagctgggacagaagtccgatctccctagggccccacctggaccattttccctccgttttattttgttaattaaattctttccaaattggatcgctctgggatttcttccatggtggacttttgtttctgatcttgttttccctgtggatattggaggacagcgaggttctttctgatactaaaaacctttctttcaggcagcaaatgaacttgaaaggttgcctggactcgctggagcaaaggaaagcgattttgtttgtataattaaatgatctgttcttctacttcactcttcctgttgaaaaactgtgtgatttttttttttttttaagtaaagtttgtagctcctcccatgcccaggaaagcacagaactcaagtgtggtggccgtctgagctgtcctttcgctggccccgctgtccgcaggggcttcctacctgtgtgagaggtcgtagcgggagacagcaacagagagtaggcggctgggccacgtccttcacagggcgtcatgtgcctttctattttcatcttagaaaatttcctcagcaaaccgatgagagattgtggttgcaagcttcagtatttgcctcgcttcccttttcatatttacagaattaaaacaacctcaagtacctcagactctgcattccaaaccaaggcacccagcagccaaagtgtcgagggcatttaagtggcattaatggcaggagagatggttttagaatctatggagtggtggaagttacggatagaagggaaaaggcaaaaactatttaccctgcctttgcaggctggggtttttgaaccgaggaaggctgggacgcctgtttccagatggttgtcatggtcacgctgggcgaagagctggaggggagttgtcccctcagctgagcggctgcggtgaaatgccccagtgttcctgggttggctttacggcaaactaaatgcaggggacgctggagtccgactcacctacaccggcttcctcccagccgctggtgtgcggcacacacaacatctgcattaggcagaggtgcaagtgggctgattgaacttttccttcaaaacctgcttgtctgtcctggacctttgatgaaatgggatcccggtcacgcaggctgagacagtggggaccgccgaggccagagtgggctatgcttgagcagggatgagaagggccgcggcagcacgcagccttgacccacgcctgcgtcttgtggtgcaaggccagagggctctctctagaacctgaccgtgcactccatctcctgggagccacttttggcaagagtgagtgtggggggaaaaagtgtgcacaagagatacggaaccctgagctagggtttcctgtcaccaaagagtgagctgcatttccagttctgcgttaaagtatcgtttgttctggtgcctgcctgtggtggtgatttggagactcaaatttcctttgccaggtctcttttgtctttctttgggattggtagtatagaagatgctgggaattgtcttcctcgctcagcctcggcttcccgcactgtaagatgaggcagttgcagaggaggcctcggacgtcctgtgaccctcggcccacactcccccttgggtggccctggcagggctggctaggtgcgttccctgcagaccacgggaagccctgtgcttgcctgggtcagggctaagctgtgcgccctagaggagggaggaggactgcagattcttggtcgagaagaatgaagaggatttctgtgtttgctgagcagccattgtggagggttacccgcctccactttcccgttgcccatttcactgccaccagctcctcttcctctgctcgaacctatgagtcccagcctcactggcggcctcagacatgctcaggagtgacggggacagagggaggccgctgagttgcccgttagaactcttactgctgcgccagtgacccaggtggagagggaccctgaaccaaacagaacgtgtgctaattttccgaactccaaactgtacactcatattcatttttaaattgtatttttccaaacttcaaaaaggacgatgagcgtgggggataggaaacaaaacctgtaaacgttgtgaatgggctcagtggactctgggaccaaaccttctgtaatctctaaaacaatgggaccaagagctggatggaacctggagtcaaaaagaactgcttcagtccccgctgtaccgcctgcctagctgtgggagcaggcagggcgcctgggagcctgcgttttctggaccgttccatgggactcatccctacctcacagggctgttgtgaggtgttgtgtgactgcgtgtcctgcaaacgcccagctcggtgcccagccagcggtgggcacccaataaacgctacaacata

SEQ ID NO: 394862 - DNA, 3467 bp, Homo sapiens
ttactgacatgatcacaattaatccctcagaaaatcctgtgaagtaagtagtttcccttttatagatgtgggaatgaatcaagactcaggtggtgtgcacacacctggaccgggtacttcgggaaagtgctcatggcctccaccagctacctgccttcccaagtgacagaaatgttcaaccagggcagagccttcgccacggtccgcctgccattctgcggccacaaaaacatctgctcgctagccacaattcagaagatcccgcggttgttggtgggtgccgccgacgggtacctgtacatgtacaacctggacccccaggagggcggcgagtgtgccctgatgaagcagcaccggctggacggcagtctggaaacgaccaatgagatcttggactctgcctctcacgactgccccttagtcactcagacatacggcgcagctgcaggaaaaggtacttacgtgccttcatccccaacgagacttgcctacacagacgacctgggtgctgtgggtggcgcctgcctggaggacgaggccagcgccctgcgcctggatgaggacagcgagcacccgcccatgattcttcggactgactgaacttgacctgtgacctctgacccggggagcagagaacactggcttcacagaggactttgtgcattgctgctatgaactttgacctgagtcgggggagaggatggcagagactttattaaaaaaaaaaaaagattgtagtggtagtctaactccataacgctgaggaaatacatcattttcacttcagtggcttttaaatcctgcttatgaattttagctttttgtttgtttgttttctctttttgccaaaattaactgtttggtgaagcccgcaaaacctcctcgctttgcatgcatgaacgtgccaagccagcataggggagctagaagccactttccagccacctgccgttgggttttttcatatctgtacataatgccgagtgcgtaaggaaaccgtggcgtcgcgcacagtgggtctgcttgtcaaggccagttctgcagtgacaggcccaggggctgcccaccaggtgtgctgggcagacttcagctgggacagaagtccgatctccctagggccccacctggaccattttccctccgttttattttgttaattaaattctttccaaattggatcgctctgggatttcttccatggtggacttttgtttctgatcttgttttccctgtggatattggaggacagcgaggttctttctgatactaaaaacctttctttcaggcagcaaatgaacttgaaaggttgcctggactcgctggagcaaaggaaagcgattttgtttgtataattaaatgatctgttcttctacttcactcttcctgttgaaaaactgtgtgatttttttttttttttaagtaaagtttgtagctcctcccatgcccaggaaagcacagaactcaagtgtggtggccgtctgagctgtcctttcgctggccccgctgtccgcaggggcttcctacctgtgtgagaggtcgtagcgggagacagcaacagagagtaggcggctgggccacgtccttcacagggcgtcatgtgcctttctattttcatcttagaaaatttcctcagcaaaccgatgagagattgtggttgcaagcttcagtatttgcctcgcttcccttttcatatttacagaattaaaacaacctcaagtacctcagactctgcattccaaaccaaggcacccagcagccaaagtgtcgagggcatttaagtggcattaatggcaggagagatggttttagaatctatggagtggtggaagttacggatagaagggaaaaggcaaaaactatttaccctgcctttgcaggctggggtttttgaaccgaggaaggctgggacgcctgtttccagatggttgtcatggtcacgctgggcgaagagctggaggggagttgtcccctcagctgagcggctgcggtgaaatgccccagtgttcctgggttggctttacggcaaactaaatgcaggggacgctggagtccgactcacctacaccggcttcctcccagccgctggtgtgcggcacacacaacatctgcattaggcagaggtgcaagtgggctgattgaacttttccttcaaaacctgcttgtctgtcctggacctttgatgaaatgggatcccggtcacgcaggctgagacagtggggaccgccgaggccagagtgggctatgcttgagcagggatgagaagggccgcggcagcacgcagccttgacccacgcctgcgtcttgtggtgcaaggccagagggctctctctagaacctgaccgtgcactccatctcctgggagccacttttggcaagagtgagtgtggggggaaaaagtgtgcacaagagatacggaaccctgagctagggtttcctgtcaccaaagagtgagctgcatttccagttctgcgttaaagtatcgtttgttctggtgcctgcctgtggtggtgatttggagactcaaatttcctttgccaggtctcttttgtctttctttgggattggtagtatagaagatgctgggaattgtcttcctcgctcagcctcggcttcccgcactgtaagatgaggcagttgcagaggaggcctcggacgtcctgtgaccctcggcccacactcccccttgggtggccctggcagggctggctaggtgcgttccctgcagaccacgggaagccctgtgcttgcctgggtcagggctaagctgtgcgccctagaggagggaggaggactgcagattcttggtcgagaagaatgaagaggatttctgtgtttgctgagcagccattgtggagggttacccgcctccactttcccgttgcccatttcactgccaccagctcctcttcctctgctcgaacctatgagtcccagcctcactggcggcctcagacatgctcaggagtgacggggacagagggaggccgctgagttgcccgttagaactcttactgctgcgccagtgacccaggtggagagggaccctgaaccaaacagaacgtgtgctaattttccgaactccaaactgtacactcatattcatttttaaattgtatttttccaaacttcaaaaaggacgatgagcgtgggggataggaaacaaaacctgtaaacgttgtgaatgggctcagtggactctgggaccaaaccttctgtaatctctaaaacaatgggaccaagagctggatggaacctggagtcaaaaagaactgcttcagtccccgctgtaccgcctgcctagctgtgggagcaggcagggcgcctgggagcctgcgttttctggaccgttccatgggactcatccctacctcacagggctgttgtgaggtgttgtgtgactgcgtgtcctgcaaacgcccagctcggtgcccagccagcggtgggcacccaataaacgctacaacata

SEQ ID NO: 394863 - DNA, 1300 bp, Homo sapiens
aggcggtgcgtcgcgggggcggggccgcgcaggcgtaccgggtgccccggctctggagcataaacaagagcggggacgggatgaggcggcggttgatcccagggtggcgagtggcggcgaccgaggcggcgagcggggcccggcgccgaccctgagtgcagcctgacccgccctcgcgcgcgcgccctccccggccgggcccactcgccgcgcgcccagccatgaacctggcgagccagagcggggaggccggcgccggccagctgctcttcgccaacttcaaccaggacaacacgtccctagctgttggtagtaagtccggttataaatttttctccctttcttctgtggataagctggaacagatctatgaatgcaccgatacggaagatgtgtgcattgtagagagattgttctccagcagcctagtggccatcgtgagccttaaagcaccaaggaagctaaaggtttgccactttaagaagggaactgagatctgcaactacagctactccaacacgattctggctgtgaagctcaacaggcagaggctgatagtatgcctggaggagtccctgtacatccacaacattcgggacatgaaggtgctgcatacgatcagggagacgcctccaaaccctgcaggcctgtgtgcgctgtcaatcaacaacgacaactgctacttggcgtacccagggagcgcgaccatcggagaggtgcaggtcttcgataccattaatttgagagctgcaaacatgattccggctcacgacagtcctttagcggcactggcctttgacgcaagtggaactaaacttgccacggcttcggagaaggggaccgtgattagggtattttccattccagaaggacaaaaactctttgagtttcggagaggagtaaagaggtgcgtgagcatctgctccctggccttcagcatggacggcatgttcctctccgcctccagcaacactgagaccgtgcacatcttcaaactcgagactgtgaaagaaaaaccccagaggagccacaactggacgggtactcgggaagtgtcatgactcacagtactggctccacagtgacgaagtgtaacaggcgagcctcgcacgccgctgcataggggcaaaaacttgtcgtagcagatagagatcccggtgggggcgcacggtctgcacgtgaacggcccgaagggatgcctaacacacggggataaacagactgaccgccagcctacacaagcgaaagtgacacagaaagtggccacccagataccatcccagttttgcgtgtcttcggg

SEQ ID NO: 394864 - DNA, 829 bp, Homo sapiens
  misc_feature (13)..(13): n is a, c, g, or t
  misc_feature (15)..(15): n is a, c, g, or t
ggggcagaggcgngnaaacttcggctaggtacgaggctgggttgtgcggcggttgatcccagggtggcgagtggcggccactcgccgcgcgcccagccatgaacctggcgagccagagcggggaggccggcgccggccagctgctcttcgccaacttcaaccaggacaacacagaagtgaaaggggcatcaagagcagctggtcttggccgtcgcgctgttgtctggttagttccaaccctggtttctgaaagtatcaccttggaaggcttatgttagaggacttttttggctttttgaaattgcagtgaaccagttaataagtgggagaggatcacttgaatctgaaatggaaatatcaaggactacatttttccagtggataccacagcttgtgggaagtccctagctgttggtagtaagtccggttataaatttttctccctttcttctgtggataagctggaacagatctatgaatgcaccgatacggaagatgtgtgcattgtagagagattgttctccagcagcctagtggccatcgtgagccttaaagcaccaaggaagctaaaggtttgccactttaagaagggaactgagatctgcaactacagctactccaacacgattctggctgtgaagctcaacaggcagaggctgatagtatgcctggaggagtccctgtacatccacaacattcgggacatgaaggtgctgcatacgatcagggagacgcctccaaaccctgcaggttccgcagatgagacagattttaaaagtattgatcccaaaccaagctgccttcctactgatgctggtcatgtgaccac

SEQ ID NO: 394865 - DNA, 315 bp, Homo sapiens
tcaaccccttctcctggctggaacattctccctggctctttacacagacagctccttttcatctgccccaaactcacctcctcagaggggccttcattggccaccctaccaacagctatcgcctcctctgccaaagcccccaggctgcccctcctgcctttacattcttcacaacactcaccactctttgacagacaggatttgcttcctgcctttattcacccttaagctgtctgttaccctccccagaatgcaaaccccttgaaggcagagattttgctgccctctggttggattgtggttacgtatctaggc

SEQ ID NO: 394866 - DNA, 159 bp, Homo sapiens
gaatgtcttgcagggaagccaacagtgaaaagaaatgatggtgcctcattctgtcttaggagtctccctgacacattcctgaagcacctggtgcttatttaagcatagcgcttttaatcatggtcgcaattttctgtttacttgtctgttgcttccacc

SEQ ID NO: 394867 - DNA, 367 bp, Homo sapiens
aagttagcctggtatggtggtgcacatctgtaatcccagctactcaggaggaggaggtgggagaatggcttgaactcaggaggtggaggttgcagtgagccgagattgagccactgcactccagcctaggcaaaagagcgaaaccctgtcaaaaaaaaaagttaaaaaatcaaaatcaaggtgctgaatgagatcacctagagacaaagtctagataagaaagataaggaaactcaggacagaaccttggggtactcgagtatcctagaggttgagcagaggtcgggcagcccacaagactgagaaaggagccagtgaaataaggaaactcatctgtttgtgctgcctgccaagacaataggggtga

SEQ ID NO: 394868 - DNA, 297 bp, Homo sapiens
aagtggctaattagctccaagtagtaagaataaagagttgcatttaactaagtaactgattcttatcctggaaaggatagaagtgaacagggaaaagtgaagaaaatttagataaattaatagaccacaaataaatgggttgtcagaggaagttaggatgtttgaagttttgcagatgctttttcgtagcatatcccgctctgtcaaagataaactaggaaagacgccagttctgctgtcttctgcagactgggtcagcaaacagtgaccgctagacactgaggtcaccaagatgaa

SEQ ID NO: 394869 - DNA, 478 bp, Homo sapiens
caccagctgtggatggatgggtgtggcatgtgacacacttagtggattgagggaactgttaggtatttgaagtgtgtatgttttgttcattctcatgtcttagttcacctggtacggttgtctgtattcacctagcatttctcacagacacaattgtgcataggcaaacatgaatttgctttatgcttacattggttcctaatctaccagttatgctgggacaagtttatgtttttaaaacatgatttgctgtaaaatataactgactgtattcgaaaatagcttattaggtatccatggaaacagacaacttattagttgttcttgggattggcaaggaaacctttctgtgaactttgttgtcggtgttcttcgaaattataaggaagcatttctgagaatttctttggaaagcaaaagatcatttatgtgttatgtgtatctagattttagtattttaagcgctttggcttttaat

SEQ ID NO: 394870 - DNA, 437 bp, Homo sapiens
cggcacaggtcagggggcaaagctggctccgaggagcctctgaccgctggccactgtggtggtcttggggcagctccagacacacaagcccagaagacccagaggctgcctcacgtcggagaaatgcgctgatcgtctctctctctctttgtctctccatctctgtctctctccgtctctgtctgtctctccatctctgtctccctgtctctctctctgtctctgtctctctctgtctctgtctctccatctctttctctgtctctctctgtctctccgtctgtctctctgtctctccgtctgtctctctgtctctctttccgtctctgtctctccatctctgtctctgtccctgtctctgtctctctgtgtttctctgtgtctgtctctgtctctctccgtctctgtctgtgtctgtccctgtctctgtttctctg

SEQ ID NO: 394871 - DNA, 272 bp, Homo sapiens
tctaatagaatctcctgttccctagattacttttcccactacagaatccgtcaacccctctgccttttattgtagctatagcaaccaatcactccatatctggaggacataacccacccttgaccgccccccataacactagcatgaaaaatgttttaagcttcatgaagaaagaaatttgaggtgtttggtgcactactgaattcccagcacctagaacaatgcctggccatagcaggtgctcaataattcttggtaggaaggatgaggga

SEQ ID NO: 394872 - DNA, 180 bp, Homo sapiens
gtggatgacaaaattctgggaaagtccctttaaatggataaccacagtattgaaaagtgtatcatataataatacaattcttacaaatctctttttcctcttttgtttaatatcgtagtctccccttatctgtggtttcactttccagtttacatatctagtgtatcatatctttttttt

SEQ ID NO: 394873 - DNA, 330 bp, Homo sapiens
tcactctaacagtaatcacttatttcagatagttcctgtgacatgtcctatttgtgtatctcttccttggggagatcctagccagattaccagaaatttcgttagtcatctaaatcagagacatcagtttgattatggagaatttgtgaatcttcagctagatgaagaaactcaatgtcaaactgctgttgaagaatcatttcaagtaaacatctgaaggctgtagacatctctgcatctttgtacctgcaagtgccatctttaagggggaaactacatgaagtcaccgtttcagtaacttgatgtgtatattaataaaagtaattcagt

SEQ ID NO: 394874 - DNA, 350 bp, Homo sapiens
gtgtctttttggtagaatgatttactttcctttgggtatatacccagtaatgggattgctgggtcgaatggtagttgtattttagttctttgagaaatttccaaactgcttttcatagtggctgaactaatttacattcccaccaacagtgtacaagcattcccttttctctgcagcctctccaacatctcacaagcaaagttttgaagtgttcacaaagtaaaacaaactttagtgcatgcaatattttcatgagaatctagatatatattggataccagtatttagaagccatacttctcgcatttggtttgtaggaataactaggaatgttgtgaaacagaaatctt

SEQ ID NO: 394875 - DNA, 343 bp, Homo sapiens
aaggcaagaccacgaggcatgattagcaggacttgtcttacactatttacaggactgctttgattttcagaccacaatcggttttcatatgactgattaaaaacatgtgccagttgaagtcacagctgcagaagaaaactggaaaaagcagtgagccttagatgttggaacttgcctctatttgcaaaaatgacctctgacttgatttatgcccttgatttcctgacagtgagggctgtgtccctgaaccacttctcctaccacaccccaccctaccaccacattggcctgactctagcaaacatcatgaggctcatcttacaattacccaaagaaaagcatg

SEQ ID NO: 394876 - DNA, 253 bp, Homo sapiens
actcacagtttctcaggctggggaggcctcgggaattatggtggaaggcacctcttcacaaggtggcaggagagagaatgagtacccagcgaagggagaaacctcttataaaaccatcagatctcgtgagaactcactcactattacgagaacaggatggaggaaaccatcctcatgattcagttatctccaccttgtccctctcatgacacgtggggattatgggagctacaattcaagatgagatttgggt

SEQ ID NO: 394877 - DNA, 343 bp, Homo sapiens
aaaaaaatgaggaaaaaaacagatacagaaaaggaaaaaaggatttcacaacattcaagactcactcataataaaaactagcaaaataagaacagaagaaaacttcttaaaccatgtagagagcaactacaaaaaatctacagctaacatcatacagaacagtgaaagactgaaagactgaaagcgctcagaacaatgaacagtgatagcccttctcagcacctctatttgacagtatactggaggtcccacccactgtaataagacaaggaagaaaaaggcataaagattggaaagagcaataaaaatttatttgcaggccaggcgtggtggctcatgcctg

SEQ ID NO: 394878 - DNA, 282 bp, Homo sapiens
gcacagaggtctcagaccagcagggccatttctagcacaagagttagaagcagtaatactctaatttggcctgaggcagtggtagcattgaagtgacaatattcattcttgcctggtttcatgaagtagaactagatccctgaagttttttctttaagggattttctcctggaaatgcatcctctaggagaacacttagttgcaatctgcttgttagaagacagagatgcatctgctggcctcctgccttgtgtatggttttggagtccagttgagcagctg

SEQ ID NO: 394879 - DNA, 352 bp, Homo sapiens
ttttttttttctttttgacatagggtctcactctgtcacccaggctggagtgcagtggtgcaatcactgctcactgcagcctcgaactctcaggctcaagtaattatcctgcctcagcctctgaagtagctgggactgcagatgcatgccaccacgcctggctaattttttgtattttttgtagagatggggttttgccttgttgcccaggttggtctcaaattcctgcactgaagtgatccacttgcctggtctcccaaattgctggttttacacgtttgaaccaccatgcctggccaaaggagaagtttctaagattgtagtatgcttctcttggggcatagcagctttt

SEQ ID NO: 394880 - DNA, 421 bp, Homo sapiens
cacccaagaatgatcaataaaaaaaaaattaaattaaaaaaaaaaaaggtagtaaggattaactgtgaacttactcataaagcttataatgcagtgactggcattttatcagtttaagaaatgttcatttctctcctccctatgtgcagactgtgggactacaaaggtgaatcagatgtttttgcctgacaagaagctcataatataataaagatgacaaaaatatacatgagaaattaaaatgcctggatgaaagacagtgcagtttcatgtaaatgtacctaaatactatgagggtgtagagaagaaaaggaagagctgagatgcccagaacgaatcctcagagtgcctggcatttgaactggtcccaaggtttctcagggggagggggaacatgaattttgccattcagagacaggat

SEQ ID NO: 394881 - DNA, 440 bp, Homo sapiens
tgggcaaaaaaatttcctactcgatctacttagtaagtgacattgccaagatctgaagacagatccggctgcctaccccattcccagctacccaaagtgcctttaactgggcacttaaggtgctattttagccctaacttcccttggcttactctgtcatccttacggcatcctatagccaaaaaagagctgatgagctgttcagcgagccttaccctcaaacaggccacacaagagtctccctccctccctgcctgtgctcatgatgctcgctctgcatcttgccccagtatctcttgtagaactctttcctgtaactttccaagcaggggtaacaaactcaaatgccctcaggaagcagacgggtagaagaaagcttctacttcactaagctgggttgggtcccgcataccacccctgaaccgcctagacccttgatc

SEQ ID NO: 394882 - DNA, 269 bp, Homo sapiens
cctccctgcttgctctttatgcatgctcctttgcaatgtgattttgctattagctccatcaagagatgggtctccttgaatctgagcttgaccacgtgaattgctttgaccactggagcattcacaaacatggcacaacggaggcttgaaaaatgcatgtgccttgggacttgccctctcttgttacttttggaaccagagacctccatgcaatgagcctagactagcctcctagaagatgaggacaagaagaagcagaaatcaagcac

SEQ ID NO: 394883 - DNA, 360 bp, Homo sapiens
ggcatggtgaagccgtctctactaaaaatacaaaaattagccaggaatggtggcgtgcacctgtagtcacagctactcaggaggctgaggtgggagagtcgcttgaacctgggaggtggaagttgcaataagccgagatcgtgtcattgcactctagcctgcatgatagagtgagaccctgtctcaaagaaaaaaaattagaagcacataagcatataatcctacatgaacaagagtgaacaaacaacaaaattgtgatacttgtttcagatattgttggacatttagattgcgtgtactcctttaacagactacaagaattttttttttttttttggggagggaaagggggatcctcta

SEQ ID NO: 394884 - DNA, 258 bp, Homo sapiens
cccaataatttactgcacctgatatgctgatccttcttttgtctggcacataaaaggtgtccaaggaaggctgaactgaacagtctacacctttgcttgctcaccaatgactctgtctgaccccgtctgacccctgaagcttccattaaaataagcagtctcaaaacaaaaaaaattaaaaataaataaaataagcagtctcagccaggaggggtggctcatgcctgtaatcccaacactttgggagggggagatgga

SEQ ID NO: 394885 - DNA, 299 bp, Homo sapiens
tgacctagcccctgacgaccacagcagcctgaacactctttcccatccctctttacctgcctagtttctattcatcttcagatttcagcttgggatggtcttccctgactccccaggatggaactagggctccctgcttcccatgtgcacccaggccctatacttacttccatgtatcccttgtatggtattataattgcctgcttatcccaactaaatagaaagctgcttgagagtaggaacgatttcttggtctttacaaaattcttagtgcctacacagtgcctgttacaaaacaa

SEQ ID NO: 394886 - DNA, 456 bp, Homo sapiens
ctttaattgttctcactcacttccaagttttgaataagacttttattgaggtatttacaaatccatatctgcatcccttctttctatgtttctaattgtcactttcacctatacatgctgactcctagaaaatagtttgttaaatagcaaggcatgagcaattattaataatccccaaattcaaatttttaaattcatatttttaatgacatgagcatttcccatgtcacctatattactttttaaattactccttttccctggcttgccttattccacatccacctaagtccatctgtctttcacatgctatcatatttatctttatgagtacagctttcattgaattttactaaacctagaaattgcaagacacttgagaaacttctagtaacctaatatgtaatcacatgttaggtaatcaactttttgcaggttattttcaattactctcca

SEQ ID NO: 394887 - DNA, 580 bp, Homo sapiens
gttcactgaagtgataagcataaatatgtaagcagagaggctagaaccctggtctaagtcctagaaattcaatgtaggcctgaagaaggacaaaagaaatctgaggttctatatggaaatttacaagggggacccagaaatagaaagatttagaagttacattaaaaactttggcgaattctaaaagttgtagccatgttcaagtgcactgaaagaagaacctgaagggaattgaacctccttcacaatcttgcaggcagtcttttctgaaagctgtagtccagtgaccctttgaagtggcaaggcacattcaggatctcatcatcctataatgctaatgggtaaaaagtgatacctttcatctttaaagctttcagacaaacttacatcattcaaattcttcaagcagttcccctttcctgcagaaaaaaatggcaatttcttctttctaaaaatctttttttaatttttaagtttttttgtgtgattgagatggaatatcatggagtcattatgtcttttgtttccagacatgatgtcagaaatgtcatcccgaagaaagacaactctgtgcatcaaa

SEQ ID NO: 394888 - DNA, 178 bp, Homo sapiens
cacttggttctccctctctggacatgtgtctttgaaataaatcctagtttcagcacacacaaaaaagacctgtttcccaggctagtcccagaagattctatggtaattacaacaggatcccaaatccaagccctctgagtaacagtccattcatttctttttttttttttttttttga

SEQ ID NO: 394889 - DNA, 606 bp, Homo sapiens
tttcagttacaacggaaacttttggtgggcaagtactaaaggtaatcctgagccaggatcagtacagagtggaaccaccaggtcttaggactcacccaatagacttttaatcaatttacaaatgtgtaattgaaatagacatacttagtgcttggcagaatccccatattgttacctggattatggggtaagttctctcatagtacagaaggccaatctgcagctttgaaactgctcacctgtcaagtcagtaagccaaaaacaatatcacttcctggagaaaatagcagaaattaatgcaactcttaaagatctaaaagggtgcagtggtagtagcccccatttttattcccaataaattcatgaatttgtctacaacaaaagcccagagagatcctgaaggataacaatggattatcacaaattcatccaagaagcattctcaattgcagattctttctggaattacggatcttgctagcctataacacaacagaaatgcatggtagctcaaagcttttaaggatgaggctatgtattaccccactaagtaagacaaatacaccagcagagctgttcacatacggaaagttccgttgaagccgt

SEQ ID NO: 394890 - DNA, 160 bp, Homo sapiens
atcatttcctttacattttctaatttaattattttgtcacaagtaggtgtgatttttaaaatcacaaaagataaacgttgtttttttgtttgtgttttgttttttgagacagggtctcatcctgtcacccaggagctggagtacagtggtgtggtcatag

SEQ ID NO: 394891 - DNA, 186 bp, Homo sapiens
actgcagcctcaaactcgtgggctcaagtgattctctagcctcagccttctaagtagctgggactacagtcatacaccaacatgcccagctaattttccttttttttaattcttgtagagatgtttgagacggcttgggctctgttgcccaggctgttctcaaactcctgagctcaagcgatcctc

SEQ ID NO: 394892 - DNA, 739 bp, Homo sapiens
agaacaatgtaaataaaaactaatacaagcaatggaagttgaacagtgcagggaggagaagtgaagaaaatataattgtacccttcatatcccagctattctagctgtccccagatactgagcctgttgggtacaatctctttggggaataagttttaaacgaaatcctacatctcaaaccatgagttcccaccttacacctagcccctttcccctggttggcccaaagtactgggagccaggcttataccatctaggcagaatattgaaatatttctttcgagggaaaatggtactgacattttgggattctctaaaggaaagtcaggttcctaccccgtccctagttctgtgcatccccgtgcttgaattataagcatccagtcagctgttttaatgtttcattttgttgttgctgttgtttaaaaatagtgttattgagatataactgtataccatagaattcactcaaagtgtataattcagtggtttttagtataggcacagttgtacagccattgccacaatctaattttgggacatttcaccacatcaaaaagaagctataactattagcagtcataccctattcccactcttctctccatggcccaggcaaccactacaggagtgtccaatctttgggcttctctgggccgcattggaaggaaagaattgtcttgagccacacatgcaatacattaacactcacgatagctgatgagctaaaaaaaaaaaa

SEQ ID NO: 394893 - DNA, 460 bp, Homo sapiens
tagtgttaataatggcctctcctggttctgaatggtattatgaggatggctgagtttctcaagtctgttaaaatggcttttttcttcaagtctatgtcctagcccaagtctctgaagtagagatagcagtagtaaataaaacaggccccacaagcagctggcactggctccagagggccttgtccttcctcctttgcagtgaagcacagctgagagggccagataaaacggtcaggagcagagctcagagccgggactgcaggaactgtccctggtgaggtctcagaggaaacagctgagcatccattcactctgagcttcctgcaggacagactggaggaggagggaccacagcagcctgagggaatctcactcctgaccatggacttgccagcagcattgctgtcatttgaccgaaagcagtgaaccctgtgcctaggcaacatggcaaaatcccgtt

SEQ ID NO: 394894 - DNA, 296 bp, Homo sapiens
ctggagggaaagatatgacttgttcatcttcatttactggcatgacagagatgacttcctttctacctccctgtttgcctccaagtagcaatgtccatcagtgtccttgcaatccaagagcagaccttttagataccttgatgtgtagaccaaaagagcaatgaacaaaggagagtaccagatgccaacttccttttctccctccttgcaatgacctggcctcagagagtcagtcacctgggagaaaagagaatttctttctgaagatgatcccttccccaggatgtcagggaaag

SEQ ID NO: 394895 - DNA, 426 bp, Homo sapiens
gctaacataacagaattttaaagcaactattgtaacgaagctcaattaaataaaataaaacatgcttaaatgcatgaaaatcacattggaaaaacagaaacaatgaaaaacaatcaaatgtaagtcctaggactgaaaaatacaatttctgaaataaaaaaatgtgttggatgaacataaccaaatggacatgacaaagcaaaaataagtgaagactgactaaagacagacaaaaattatccaaggtgaaaacagaaaaagactgaaaaatgacaaatttgtagacacaaaatcagaataaacacaaagaaagccacacagaggcatgtcatggctaaactgttgaaagtaaaagatacagagcaagatactgaaagcagcaagagaaaacccaaatattacaaaatgtgggaacaacaatctaat

SEQ ID NO: 394896 - DNA, 227 bp, Homo sapiens
  misc_feature (78)..(78): n is a, c, g, or t
gtgtgcggcttctccttcttcatggggtagttgcgaaagttaataatatcttgtgggtaaagacctcagaaaaggggncaaggttgcacagcttctctccactcagtgggccgacctgatttgtattcccacactctgctggccctgggtgctggcctccatgtgccacagtgcctctgcgggccgtccggtcattctgtccacctttgcccacttcctgctgcatg

SEQ ID NO: 394897 - DNA, 807 bp, Homo sapiens
ggagagggcgttacacacacactcgccggagcgctcgggccctgggaatcggcaaacgctgcgggttccagccccgcgactcaggccgggcgaagattagagtcaccgcctcagttcctccatctgtaaagtgggacccaggagggtcggacccccaggggtgtggctggcggcagcgtaggtcttcggggctgcggactcccggcccccgggacccccctgtcccgctgtggaaactggcacggggaccggagggcggatcccccgggcacttgccgaggccactgacccaggtctggatgttccccgaggcccaaggtcaccactgggcccccccggggactgacgagaggcctctggcgggaaaaggggctggctcaggcaggcagcaggccccagaaccccccgcacacgcgggcacaggaagccccagcaatgcccctccctccaatttctcaacccgtgatgggaaaagaagagaaaaggaagaaagatttcctccaaagcttcactgtggcagaattccgctctgaggtccttacccgcctccaggcagccctccctgctcgccgctcaccacgaacacagggcacaaattgtgtccttcttctgctctaaactctgctgtggctccccagtgccctcaggagaaaaaccaaactcctccctgcggcccatgaagccctcagcaggcttggcatcccctgctccagccacaccagctgcccgaaggacacaccaggctccaggtggccccagcccttgcattggctgccccatgagaacctgctcctctcgccttcttat

SEQ ID NO: 394898 - DNA, 415 bp, Homo sapiens
cagggggtgggtccctaggagggactgaaggcctccaaggatgaggcctcgggaagccccctcatggcatcttcccctcagcccgatggaggcctcagacagcagccagccaggccggctgtgcctggatgctggtctgggttagggccactctcttccctgtatttctgtagtttgtggacttctctgtttcctaggaccaagtcctttgtaaaaacatcgggcctgccttgggtgagtgaagtgggtggttaggaaggtcgcaggccctggccggctgcctggttcaagccctggctccgcccacttcagcctggagcaagtctccgacctcagcattcctcggtctcctcgagtggggccgtaacagatctactttttgggtgattggaagatggaatgagtccctttgtgt

SEQ ID NO: 394899 - DNA, 160 bp, Homo sapiens
agtagcattaaaggagaaaaactggaaacttgtgtgtttctgccacccgattcagttatttagcgtcccgtccctacaccacctaaattacatcagatgtccgcaaggggcactattacacgttgctgtattcagacctagtctagagcttgaccaattg

SEQ ID NO: 394900 - DNA, 400 bp, Homo sapiens
tttaacattatataacataatgtattaacattaactcaccttccacgaattgacatttccacttactacttgtgctgtgctgtgaagaactattttgttctatttactttttaaaacaagctatttgtgaagcactaaactggtatatgaccctgttgttggggaaaccactgatccagataggacctagcagtatctgcagagcattcttctgttcagaagatctcagtagctgagggtgtgtctgcgaagcctggtgctttctaaatgagcaagcaagcatctttgtatactgcagagggtttggggatccctcagcctgtagtcagcagatgttgattaagcttctgatatgtgacagtcactgttgtaggtagcatgtgcttccccgggaggtgct

SEQ ID NO: 394901 - DNA, 396 bp, Homo sapiens
tcagtctccaagacagtgcgagcaagggcggggcctctatgcctgcgttaggatgttcttttcttccaaacgtcagctgtgggctataggtccagggactcaggacctggataaccaccaccacagccccactcatagtcctgtgtccgtggcagtgaaggtaactggccagaaaaggcaagcaagcacgctgtccatgccataaagttctgggaggcggtggcctgaagccaaggtgtgcctggtctgtgtcccaggctggccaggtgtgagaggggtcactggaatacatggtcaggtgttcaccgcatcacctcccacctttgactttggcaagcatgtggcccaagaagctggtcctgcctgctcctggcctcgtgctggcccttggaatgt

SEQ ID NO: 394902 - DNA, 264 bp, Homo sapiens
tctctattaaaaatacaaaaattagctgggcgtgatagcgcacgcctgtaatcccagctactcgggaggctgagacacaagaatcgcttgaacccaggatgtggagattgcagtgaggcgacatcacgccactgcactccagccggggtgacagagaaagactctgtttccaaaacaaaacaattaaatacagtatgattccatttatctattaagtgtctagagtagttaaactcatagagttacaaactagaaaggtggccc

SEQ ID NO: 394903 - DNA, 405 bp, Homo sapiens
taggatgcaaggatgattcaacatatgttaatcaagaaatgtgattcatcacataaacagaaataaaggcaaaaaccatatgattatctcaatagatgcatcctagggataaaacctactagatcatggtggattagctttgtttcttattttttaagacagggttttgctctgtcacctgtgctggagtgtgggttgtgatcaaggcccactgcagccttggactcccgggctcaatccattctcccacctcagcctccactcctgggactgcaggtgcacaccaccatgcctggcttatttttcaatttttttagagacaaagttttgccatgttgctcacgctggtctcaaacgtcgacgcggccgcgaatttagtagtagtagtaggcggccgctctagag

SEQ ID NO: 394904 - DNA, 211 bp, Homo sapiens
catacaaattcctatatcagaagctatcttcttgctcaacaaaatgcaaggcaagtcttcattaactacggcctggtcatttacaacacacaccaaaaataaatgaggatgctatttaagataagaatacaataatgtttaaagagtattaagccacatcagatgcggtggcacggacctgtactcccagctactcgggaggctgaggtga

SEQ ID NO: 394905 - DNA, 269 bp, Homo sapiens
tgccattccatacctggtccttcccctatgttacatatggcagaaatactgaaagtggagaatatacagttagtactttataataaataacttttaaaaatatgctcatattaggtattttagttgcacttttatagatgaggtgcaactaaagattgaagctcagagcagataaataactaaataatagtcataagaatgcgtgtcaggcacttcacatacattattacatttaattcttataatcctgtaagaaaagaattactctg

SEQ ID NO: 394906 - DNA, 228 bp, Homo sapiens
ggcctagacacatttaaaaaataagaaaactgaggttttggtcagttgacttggtcaaattcaactaaattccgactgaaatataaaactatgaaattcatactaggtttttgttttatattttttgttttctataacttttctcaaaaattaaattaaattaaattaaattcagaattgtttgaggttttattttctaaaacatattctatcatggaaattttgttt

SEQ ID NO: 394907 - DNA, 259 bp, Homo sapiens
catatgctgttcctctgcctggaactctcctcctcctcctcagctcctgggcttccctctccctgtccttggctggctgcccattgccttctgggctctttatcatctcctcgactagaagccgcgtttccaaagggcagggactgcctgtgctcagcacattcctcaggattgacccgtacaggtggctgtgagtaaatactgtttctttggctaaatcttagtgagcaaaatgacacatatatgtatttttataagt

SEQ ID NO: 394908 - DNA, 380 bp, Homo sapiens
gagccacgttgttacggaagggctgggacccagacacagggtccagagtgtcctcgaggtatcagaagaactcctggagagcaagctgagggctgtgtcgtcgccacaccctccgtgggtccctgctcctgagttaggctgtgcccagccgcccagtgactcagaagctgtgcacacaagggtcctgctgaaggacagcggcttctgcttcctctgatcctggcagcctggaacttcctgagaggactgggcatgtggatagccatggggggggacgtcctttaaactggggaatgggctcccctagacacagtcgcttccacaggaatcttctagagcctcacccagggcagagcagacacccgcagcagcctggagtt

SEQ ID NO: 394909 - DNA, 305 bp, Homo sapiens
ttaggttagcgtagagtgtagagcgtgcgcgtggcatcactgcctaacagatttagccacgcattccctgtattcctgtattcccatgccttctatcaacagtttaaaatttctgctgctctttgatggtaatgtcaggtccaggtctcctcagatcatgagtgccttttggtaaatccttgccttcccgtctgctgccatggaccttaattcctgtcattagtgttggtctctgaacccaagtggggattttcaagtgactcatcggcccactcacccatgaactgttattagtagcaaaaact

SEQ ID NO: 394910 - DNA, 291 bp, Homo sapiens
aataggaagatggttctcttattattattattcaagttaggatacgtgtcctgaatgatgaggtgcatgtgctgtatcccttattccccttgactagagactgcatgaggtcctattgaacagggatgagttccagacaactttgcctcacccggcccatggcccaagaacccctggtttttggttggtcactatgttcagtcattgggagctcaaaggagaagggccagggatgggctccttgtcccactacctattgtaacatgaccagcagctgtgaaaatccctaga

SEQ ID NO: 394911 - DNA, 279 bp, Homo sapiens
cagaacactgcgtgtcctgtgcgcgcgtacgggtccggccgcgggtcccaccgcaagcgggcgtgtgcagctgcggctgcctggcgggcgagcttaggagggagctggagctgcggagcggcgggaacaggagcaggccgagggtcctctggccagaagaaatctggcctcggaacacgccattctccgcgccgcttccaataaccactaacatccctaacgagcatccgagccgagggctctgctcggaaatcgtcctggcccaactcggcccttcga

SEQ ID NO: 394912 - DNA, 210 bp, Homo sapiens
tttcagttgtttatttttcaaacagatgtcagggtagttaagagaatgaagtggttggactttggcaaacatttattatgcattgtttaaatagtattaagtgaaggcctgatcctgtaaaaacaagacagtttagaaaagccagcttcctcatattatcttttgagcttggatacaggagggattaattggattccattcaatacttgt

SEQ ID NO: 394913 - DNA, 340 bp, Homo sapiens
tttttgagaaggagtctcactctgtagcccaagctggagtgcagtgagtgacacgatctctgctcactgcaacctttgcctctggggctcaagcaattctcctgcctcagcctcccaagtagctgggaccagaggcatgcgccaccacacctggttaattttcttgtatgccacacttctttagttccttgtagccgggctccttgaccttctgcagggcatctgtggttgtggtatttataagcactcactgtgtcatgagtgtgttcacagagctctaagacaagggccctgtctgtggaagagcttttagggtggtgagggagaagtcatctaaata

SEQ ID NO: 394914 - DNA, 363 bp, Homo sapiens
tgaggaggttttctctctccctgaatcccatacattccttaagaccttaccagatggttgtagattattttagcagagaaagaatctgggtcttctggtccccagtctcaaaatatttctattagcatggaatttacagacattattccaggaaaattgcaaagattgattagataataatgcacaggcatatgtgcaaaggttatttgtgttaagtacctaatatatgccaaacattgtgctgagctcttcaaatacattatgtgatattaatcattattctaccctgtaaggccgttattaccgccatttaagagattgggaaagtgagttttaggataattcacttgtccacagtcccat

SEQ ID NO: 394915 - DNA, 543 bp, Homo sapiens
ttttttttgagacagagtctcgctctgtggttaaggctggagcacagtagggtggtctctgctcactgcaatctctgcctcctggattcaagcgattctcctgcctcagcctcccgagtagctgggattacaggcttgtgccaccaagcccagctaatttttgtatttttagtagagatggagtttcagggttttaccatgttggccagcctaggcaatatagcaggaccccatttgtaaacaacaagaacaacaacaaaaatttatggaataaaactaaggcagtacttaaagggaaacttgtattcgtaaatgcccaattaagaaactagcaataacctagacttctgccctaggacactggaaaatgaaacacaaactacacttaaagcaaacagaggaaggaaataatacaggcaagagcagaaattaatagagaacagaaaaacaacaaagaaaatcatgaaaccaaaaggtggttctcgtgaaagaccaacaaaattggcaaacctttagctagattgaccaaaaagaaagagtaaa

SEQ ID NO: 394916 - DNA, 227 bp, Homo sapiens
tgcgggcgctacttggaatgtccattgtgaggcaccaccggggtcatcagggattggtggagagagagtctaaagccccagggttgctaagggagggcccagaccgaagaaggtttggtggaaagcagaacctttgtctcctaattgctcctaagcctcacgctcccttgccccgcctgtcctgttgcttccctgatcttctccgtgacctgtagctaaaccttcca

SEQ ID NO: 394917 - DNA, 312 bp, Homo sapiens
attcattcagagaacaaaattaaatattcaggattgtaggtgaggcctgatttctagtgccacagattcacaccatttcactggatataaatagaggaatgatcagaggctgacagttggcttcaaaggcagagagggtaagaaggagacgccatcagcttcaagccaacttcttcgtaaggtgcactctgtcctcagctgtcagagaacaatctggaaacaatctgctgagcagctgctctcatcaacaaactgtttattgtaagaaagtggctgggtcaaaggctaaacatcaacccgagctgaaagcat

SEQ ID NO: 394918 - DNA, 340 bp, Homo sapiens
tacttttcatttgtggaaaaaatatactgagactattccacttggaaaatgagagttttaaagtatattgttgccatgtataattgaaaaagtggcatgcacatgttgggaatgagttcattgcttccaaagcacactgtggatgtggaactcttctgggtgaaggggattccatggtttcaggctgggtgtctttgctggaggacttgtcagagctttaaaaatgctaattctcattgtgaatttctaggaaggggatatagttctccaaatttatttgaccataaaccttttcatggaatcttaacccaggatcaaaaataaatactaaccccttacc

SEQ ID NO: 394919 - DNA, 347 bp, Homo sapiens
aagtggtggttgcatcagttcagggtttcttcatagtcccaggggagagacaacatgagagaaatgctgggccaatgggacactcctttgagaagaacaaataatcctgtatcctggatgtaaatttcaccacaaccatcacaacaagccggatagtcccataaaagcagacaaaggaaggtcaatgttcaatgtatctgtgccccttttggaaaattttttaaattaaaaaaatttttgaccggggtcttgctatgttgcccaggctagtctccaactcctgggctcaagtgacccccctgcctcagcctccagagcagctaggatttcagttgctcgccaccaca

SEQ ID NO: 394920 - DNA, 592 bp, Homo sapiens
caggaaatgaaagaggcctatagacatggaagttctgaaggagaatagcgttgccatcctccctacccacctctgagtctctggttcctggtcacccaagcctccatcatgccctcttcccttctcttccttttattttttaataccctaagccacagctcaaaatgctgagcaccacttctcttcagcatgactgaggtctaggtatagatggttatggggacagctccagggacttagcttcagctgtttcaaataaaggagaaagaagagaacagggatctcatgttttctcaccagccatgcatgcccaaggcatcttcctatgagagccctgaggagggaacggccaatcccaggttccatgcagtgcctccagcctgttcctgggacaggctccaatctcttggtgcagttagcttcatccattaagacaggcatggatatttccatgttcttcctgaatcacaggtattgagaggaagtgtgggaaatgggagaacagctgccttatgaatcgtgaggttcacctaaaccttgggggctagaattgagatggagcagtgttctgaggggtcccaagaagcctagt

SEQ ID NO: 394921 - DNA, 528 bp, Homo sapiens
caagctgagggctcattgttcttccatacacacattcattctctctctcccatatttgggactaggtttgcacagacaaacacagctctttttgggagagaagagagaagatgggggaagggagggtgcttttctgttacagctttcttccacccatctcatgcctgggcgtttttgcaaccttgtgaggcagaagagtgcattggaaactaaaggacactcaaaaacatgttcagagacttctcttctctctgcctccctttattccttttgcagccgtggtttctgctgctctttctttgttgtatatgtaaagataaaatccctctttatatgttgtggccttacgttcagctctcattgcttttgtatttctcattgaccctgattttgtcggggacagtgatttgttcacttgagtcttagtagtgaatgtgagcagagtctttctagatagaaatagattttattgattaatattataaaggttgtattgaggttaatatttagcaagatgatgtttgcatg

SEQ ID NO: 394922 - DNA, 204 bp, Homo sapiens
tgttcccagggctggtcacaaacccctgggctcaagcagtcttctcacctcagcctctcaaagtgctggcgttataggcgtgagccaccacaccagggcctattcccagtttttaaaaactgggcatcattacgtatgcttcgattttgtagtacaaattactggaatttttattctgtttcccaagttgggctagatttctac

SEQ ID NO: 394923 - DNA, 623 bp, Homo sapiens
atgataatctgacctgggtggtagcagtggtgatagtaaaatggagcccaattctgagtccactgtgaaaggtgggtcagcacgatgtcccaaagaggaggagaagaatcaaggatgacagcaaaagatttatggtacgaacacctacaaagagttctatttcgtgacatgggaaaaactgcagaaagaaggtcattgtttggcaagatgtggtaggtggggagaggaagagggctgaaatcagtagttcaattttaacatattgagattgggttgtctataagaaattaactatagatgttaggttggcagctgtacattcaagtccggaactcagaagagaggtcagggctagagctattaagcagggaatcatcagcacaaagtcgattatttcaagtcaggataatgtatgaatgcatctaaggaatgagtgtagacagagatgatgtttaaagactatgacctagggtatctaacatttagctggggagatgaggacaaaccagcaaagacagtgagatgcagtggccagtgaggtctgagaaaaacaagacgaccgagatgtccctgaaacaagtatgtcaaatgttacttataggtcaaataaaacaaagactgag

SEQ ID NO: 394924 - DNA, 406 bp, Homo sapiens
ctgatgacactgtacatcttctgtgtgtttattggccaactgtagatcttgtttggataatgtgcattcaaatccttggcccatttttaaattggtttgtttgtctttatattattgagttgtaggtgtcctttatatattctacaaacacgtctcttatcatatatatgatttgcacaaattttctcctaaactgtaggttgtcttttcacacttttgatagtgtcctttgaagcataatttttaaatcaagcccaatttctgtttttcttgtttgttttgtttttgtcacttacgtttttgtcatgatatcaaagaaaccattgtctaacccaaggtcacaaagtgatgcctatgttatcctcaaagagtttcatcattttagctcttaaatttaggtctttgc

SEQ ID NO: 394925 - DNA, 421 bp, Homo sapiens
ataaatttctaggtcctctgtctctcccaatttggccaacaccggtagagaagccactaactatttggttagtttcattttacttttagacttctaaaggtacctggctatttacatttaaggggacccatcaagtgctaaatttgttgactctttaataaaagaaaattttaagaaaagaaaaaggaactgatatatttcacaactggtaaattacagtaagctaaagtcccatgacattccagagtgcctcaaccacccacagcactcttagagataataaggaaatttcagactaaccaaacttgtcctgtgtattttcttcctgtggtacatattagactacaaagcttgcagtagaagaagaaaagacaatcactgtgtactgctgggttgtgggttctgaagcaaacttgaaatt

SEQ ID NO: 394926 - DNA, 1121 bp, Homo sapiens
cgccgtggctcacgcctataatcccagcactttgggaggccaaggcaggcagatcacgaggtcaggagatcgagaccatcgtggctaacacggtgaaaccccgtctccactaaaaaatacaaaaaaattgaccgggtgtagtggcgggcgcctgtagtcccagctacttcggaggctgaggcaggagaatggcgtgaacctgggaggtggagcttgcagtgagccgagattgcgccattgcactccagcctgggcgacagagcgagactccgtctcaaacaaaacaaaacaaaacaaaacctagaaaaagatgagcaaactaaaccaaaagcaaacaatggatataataaagatgagagccgatataagtgaactagagaataaaaaaatgagaaatactttttaaagtttattatctaaaaagataaagagattgacaaactttgagctaaactgaccaagaaaagaaaaaaaaagaaaactcaaagtactaaaaacaggaaagaaacagtacattactacaacttgtagggtaggcataacaaggatcgtaaagaaataatgtgaactgaatactaacaaattaaataactaaagggaagggacaaattcttacaaagtcacagactatcaaaattgacttaggatgaaacagacaatctgaataaacctggtaacaagtgaagagattgcattagtaatttaaaacttccattacaagaaaatctcacaaattttttaaaccggaaaagttgtgaccggaacatccaaatcatttaccggcccttttttcccgttacaccctccaaaactccagaatggaaatccgcctgggtttttttgaaaatggcccaaaatggcccggcggaagctaccccggaacccgaattctgggcgcttgccgcggcacacggccagattggacccctggtaacgtgaaaacccgtttctaaatctctatttgcacaggggctgcccggcccacttctctgacccctcgtaatatggcgccccccgcgcgcgttcgccctcatctcccttctccagtcgcacccaacatcctcccaaccgacgcttacctctcgccctgcacaccctatcctcgctcttccggcgcctcc

SEQ ID NO: 394927 - DNA, 1064 bp, Homo sapiens
cgccgtggctcacgcctataatcccagcactttgggaggccaaggcaggcagatcacgaggtcaggagatcgagaccatcgtggctaacacggtgaaaccccgtctccactaaaaaatacaaaaaaattgaccgggtgtagtggcgggcgcctgtagtcccagctacttcggaggctgaggcaggagaatggcgtgaacctgggaggtggagcttgcagtgagccgagattgcgccattgcactccagcctgggcgacagagcgagactccgtctcaaacaaaacaaaacaaaacaaaacctagaaaaagatgagcaaactaaaccaaaagcaaacaatggatataataaagatgagagccgatataagtgaactagagaataaaaaaatgagaaatactttttaaagtttattatctaaaaagataaagagattgacaaactttgagctaaactgaccaagaaaagattgtagggtaggcataacaaggatcgtaaagaaataatgtgaactgaatactaacaaattaaataactaaagggaagggacaaattcttacaaagtcacagactatcaaaattgacttaggatgaaacagacaatctgaataaacctggtaacaagtgaagagattgcattagtaatttaaaacttccattacaagaaaatctcacaaattttttaaaccggaaaagttgtgaccggaacatccaaatcatttaccggcccttttttcccgttacaccctccaaaactccagaatggaaatccgcctgggtttttttgaaaatggcccaaaatggcccggcggaagctaccccggaacccgaattctgggcgcttgccgcggcacacggccagattggacccctggtaacgtgaaaacccgtttctaaatctctatttgcacaggggctgcccggcccacttctctgacccctcgtaatatggcgccccccgcgcgcgttcgccctcatctcccttctccagtcgcacccaacatcctcccaaccgacgcttacctctcgccctgcacaccctatcctcgctcttccggcgcctcc

SEQ ID NO: 394928 - DNA, 432 bp, Homo sapiens
  misc_feature (9)..(9): n is a, c, g, or t
  misc_feature (16)..(16): n is a, c, g, or t
cgactctanaggatcncagaccgaatgcgatatagagagaaaatgtttaaaaaaaacagtaggaagcttagatttccactatgggggctcacacagaaactcaatttcatcaaaaatctataaattaagtaattaagaagactagtcaagatttgggtagacccttgatcaaagagtaaagtcttacccactttacctccactatctgaaataattagtacctctcagccaatgaattttcacaaaataagggactcttcttctaatggtatggccgtttaccaatctggcaggaacatcaattcccctctcacattttagtaaacttactcaacccatctgtttctctgcccttcagagagtcggcacacagttctgtggatgttttctgcaaaaggccctgacatctacagtttctatcgcattcggtct

SEQ ID NO: 394929 - DNA, 130 bp, Homo sapiens
caggatcaacaaaaagagaaaaagaaagaatgcagaaataaatatatctttaagaaggagctatctaaagaccagcaaaattctgataataactaaggcttaatgactgggttcatgagagttcactgta

SEQ ID NO: 394930 - DNA, 748 bp, Homo sapiens
gactcaatgataattcagtcagcagcaaatagggaacctctttgatttgagaagtgcaaagagattgaggatatcttcagaagctatgcctccctaaagttagcctcctggtaagataagactgtatttctacatctcttgcaagaacccaggaaggacagaggagggaagaaaccaaaaagtcagcttggtggtactgaagatatcggcttgtggccaaccactcatttactgcagggaacattaaactacaacaatcccagatccctgcaattggtgcttcttggcagatccttagaaatgatcgaattcaattttcttattttacaaataaggacattgaggccaaagaacttgggagatgactaatttagaaaatattgttttgggaagtaattgtattaaaaaaataactccacagcttagcaaaagtggtttctatgttcaagttcagtgtttgtgtgaaacccttgaaattaagttataacagcagaacacaacaatgtatttctgtggctgagacctctaactatcctccaaagatttcttctttccttccatgtcacagggttgtttctaggaagtggatgctcagctagggacattttttttctagctgtcttcgcatttactttggacctagtatctagcctggaccatgagatgcaggtaaaattcttatatttcacctgcagaattcacctccaggaagtcacaccatcctccacaatctctttcctgcatggtc

SEQ ID NO: 394931 - DNA, 535 bp, Homo sapiens
gatattttcaaaattttctctaaagaccttagttggaattattttacaatcagcagtctatgagagtgcttgtttctccattatctttacaacttagatgtgttatcaaacattttggtctttgccaatctgataggtaaaaaaaatggtatcacttcgtagattcatttgcattgctctcatgcatgaggttgaagaacttttcatctatatgaaaatcatgtatctttttttgtgagctggctgtccatgttagactttgattcttttttcattgattacacattttttcttttttcaaattttaattcctgtttaacaacatcctaacagttttttttcttatgaatttgtaggagccgtttatgtaatggaattagcttatgtgttgcaaatttattttcccagtttgttagtcatttgacttggtttgcttattttgatgtagagcttagttgtggttacacgggattgtaaattctgttgctaagttgtgtggattgagatctcgaataatggtataagtatgcttacc

SEQ ID NO: 394932 - DNA, 152 bp, Homo sapiens
actcttatgaatcccccacccctacccggaagatgttctagcgagtgatgcatcctccagtgacgaggaagagggagcttcaaaggaaggatcaatttttaacagtggtggatagaagagtgatgtaaagtgtaggaagtggaaacagcaag

SEQ ID NO: 394933 - DNA, 188 bp, Homo sapiens
gtcaccgacacttcctcagcatccacaggtcacgccacctctcttcctgtcaccgacacttcctcagcatccacaggtcacgccacccctcttcctgtcaccgacacttcctcagcatccacaggtcaggccacccctcttcctgtcaccagcccttcctcagcatccacaggtcacgccatccctct

SEQ ID NO: 394934 - DNA, 235 bp, Homo sapiens
gagatcacgccattgcactccagcctgggcagcagagtaagactctgtctcaaaaaacacacaaacaacaaaacaacaacaaaaaccaaaatgtgacctatgtgatttgtctttgttagaatttatggagattttgtttcctatagtttatttcttacttgtctattagtcatgtgggaaagcatattatagtctcctagtcctttggcttattaaattctgattgtgtctaata

SEQ ID NO: 394935 - DNA, 517 bp, Homo sapiens
ttccatggccatgaactatagacgttgtcttacaaaaatatgccactgacttaaaagtggtctagatgaagggagcacaagttatcaccccagaaagaacatgttcaacaggcaaggagtaagaacatcttaagcatcactctaaagacaagttatctctgaggctgctttgatccaactaggagtgacatgattattatggtcctaaatgttatatgcattcattcagcaaatacttacctagtttcccggcagtgtagcttgttagttgtaatctttgctttgacaacacatgggaaactagaaacaaatgtttaagaaggaggacaatctgtcacttttcacaagttattcatctaacagtaggggcttttaagtgtcagtccagataaagcagttcttattctctttaatgcaatttatgactcagtttttacaaccattttaagactacgagccaaaagggagagagaaggaaactttcagacattaactactcatggaatcctaaaaccac

SEQ ID NO: 394936 - DNA, 530 bp, Homo sapiens
atcaaggagggaagacaagttgggagaccagagttaagtatccgaactgcccacccccgttacaacagcagtgtgtaaaaatcacgccccgggcctctgctcctgaggacggtactcgtgcctctgtccctgtaactacggctcaccttctttctatgtgcagactgctcctaaagccactctgtgcgctgagctctttttctccctgctgcttgactcctgaaccttccattctcctagtttccttctcttgcaaaatggaagccgtagttgggcctgcacattgatcatctgtatcctctatttttatactagagcaatcgggatttctatgcctttcaaccctctcttcatcctctagcaggaccagtcctattctaatcctatcccttgcttgtgactctaccaaaaaatatttttgcaaacacttaagtttgtgtttttctaagaaaactccccttgtggccagtgtggatggtcaaatggagcagggaaaaactggaggcaataaattaaatatttattgatag

SEQ ID NO: 394937 - DNA, 273 bp, Homo sapiens
agaagtgcaaaacacatctttcattcccttgtccgataactagcagtcatctcagaacaggagatggcttctctctgctgaagcttttttctccagcttcagaccaggggaaaaaatatgttatcagaccaatgaatgggtattagccatcactgggaacccaccaaatacagcactggaggagaaaaggaggtagcagataaaactgtgttttcagagactatacagcctagttttgcagacaagacagagatgtgagggacccagaaccaa

SEQ ID NO: 394938 - DNA, 332 bp, Homo sapiens
ggacgctgcaaaccacactgaagacaagagccaaattcataacctggaggcacaaaactgggccatttgcaccatcttctagcagcgctgattaattatagactcagtttttaaatagcacacggacctcacaaaagctaaggtgaaaccctcaacatatgaagagccagcaaagggaattccccgaagtgaatgcctaattcattcaatcacttctgcttcctatagttacagccttgttccatgaaggactgcccaatattttaatactgaataaagaaagccaaaaattgaaactgctgacacatttttatgattattccacaaacata

SEQ ID NO: 394939 - DNA, 702 bp, Homo sapiens
gtttttcattaacaccaacctacggagggagaagacatgacaattctcgtttccccaaatccaggcgagcctagcgccctgcttctctggcgtgttttattccagcagtgctgcgtttcaggccggggcctggcgtgggcccaggagccttggagccccgccgggcgtctggtgccagaggattccagcccggattaggggtggccgccgagctccatggaggcatcgcacggcaaggtcctttggcccgaaccacccggtcaacggagactcaccaagagccatctgcagccagggtcactcatcaggaatgtccggtggatctgggagaagcccagtgtgttactgtggatttgctcccctggagacccccatcctcacaccaccagaaccagccgcttctgtctgttcgcggagtgcctgggatgggccccgccctgaaagcagacaggcaggggcggccgggggtctgagtggcagctggcagcagtagagaccaccaggttccaagcaccagtctaacccttcggaatcgtgttaaaacccacttctgatcgtggccccgccaggcctcctgtcttgctcaaagtataaacccaaggccatcccttaccccgcaagccccacatgacagccacctgtccagtaccttttttattttattttttaagacagtgtctggccggtgcaatggctcacacc

SEQ ID NO: 394940 - DNA, 467 bp, Homo sapiens
ctcacacattagctagggttagggtttgggtacttccctctctctctaaacaattcggaaactttgaggatgggggttatagcttgtatagctttatttcccatatttgggttatatattaaaaatgttcttaaatacttgctaaagaaataagaaatcactggtgttaaaattttatatttaggctgggcacagtggcttatgcctataatcccagcactttgggaggttgaggtgggtggatcacttgaggtcaggagtttgagacccacgtggccaacatggtgaaaccttgactctactaaaaatacaaaaattagccaggtgtggtggtgggcgccaataatcccagcaactcgggagtctgaagcaggagaatcacttgaacccaggagacagagtttgcagtgagccacgatcacaccactgtgctccagcttgggtaacagagtgagactctatctcaa

SEQ ID NO: 394941 - DNA, 417 bp, Homo sapiens
tggacggatggatggatggatggatggatggatggatggatggatggatggatggatggacgagtgaacagctgtgtagatgactgagtgggtgggttagtgagtagatgggtgggtaagtgggtggatgaatgatcagtcatgtcgaatttattgggaaaataaatacatttcattcacactctgctagcaaaaggagactcacacgcttgcaggtctcatactccccccatcttagccatccagctatgtcaccacttacattctcaacagccccagctgtggaaaagctgtgatagggtctgaagcacaaggccagggacctatataagacataatgtgtgcttgctagtgagacccttccagccctcttgcaacttcaagcctgttacccagtccctgcacagtagccccatc

SEQ ID NO: 394942 - DNA, 431 bp, Homo sapiens
ctgaggtgatgggcagggcagagccggagacagggagaaagagagggaggacgggaatgccccaggattgatccgggaagtgacccagaatgagccagaaggttcacaagccagagtcacagatgtcaccccctggagaatcaccatggggtcaacatccccacccctgagggtgtgcaggctgcctgtgcccttcccctcactgcaccaggtgcctctgggcagagaaacccagcccatgactcatgtgcaccccacctgaggtggcattgcaccagcgacaggagcccatatgctcaagtcacagatcacagagccacaggtctgagggttggaagggcctttcaggggccctgcgtgcttttctggctcagcgtcttatggagaaaaaccctcgtgtgggtcccactggtttcccagggacactggag

SEQ ID NO: 394943 - DNA, 1622 bp, Homo sapiens
  misc_feature (1545)..(1545): n is a, c, g, or t
ggtgacggaagtgcggtgttgagcgccggcggctcgcgcccacgctgggccgggagtcgaaatgcttcccggtgccgggagtgagcgatgagctggcttctgttcctggcccacagagtcgccttggccgccttgccctgccgccgcggctctcgcgggttcgggatgttctatgccgtgaggaggggccgcaagaccggggtctttctgacctggaatgagtgcagagcacaggtggaccggtttcctgctgccagatttaagaagtttgccacagaggatgaggcctgggcctttgtcaggaaatctgcaagcccggaagtttcagaagggcatgaaaatcaacatggacaagaatcggaggcgaaagccagcaagcgactccgtgagccactggatggagatggacatgaaagcgcagagccgtatgcaaagcacatgaagccgagcgtggagccggcgcctccagttagcagagacacgttttcctacatgggagacttcgtcgtcgtctacactgatggctgctgctccagtaatgggcgtagaaggccgcgagcaggaatcggcgtttactgggggccaggccatcctttaaatgtaggcattagacttcctgggcggcagacaaaccaaagagcggaaattcatgcagcctgcaaagccattgaacaagcaaagactcaaaacatcaataaactggttctgtatacagacagtatgtttacgataaatggtataactaactgggttcaaggttggaagaaaaatgggtggaagacaagtgcagggaaagaggtgatcaacaaagaggactttgtggcactggagaggcttacccaggggatggacattcagtggatgcatgttcctggtcattcgggatttataggcaatgaagaagctgacagattagccagagaaggagctaaacaatcggaagactgagccatgtgactttagtccttgggagaacttgagccagcggctgtcttgctgcctgtacttactggtgtggaaaatagcctgcaggtaggaccattgcagtgatgggcagatgcgtctttcacacggaatcaggcacagtggccttctgtgacatgtgtttataaaaaatggttaagtatataataaattgaacatctttgagattggagaattatgtgagatttccacattatgtttactgggttcaatactgtccttgcttgttttattgcaggcaagcaaggcaaatggcctaaaatgctgtggcttatattttgataagaaatcaaaaaaccattggttaaaagatgcaactcagaagtctggaagtattctgaaagcatccatttaccgtccagttgacaggtttgagtctcctgcttgtataggtgacttgtgcccatgggtacattaaaggaacatgctgcccagggcctgggcggacagctcagtgggcaggatgtgtgctgggtctcagccccatgtgcctgcttgctgggcagttagtataggcaaagcctcctgcggcgaccctggctgctaggccattctctaggnacagctgcgactcataaagaccaaagcttaatcaggttcaacattactggtctagtaaaactggaattaaaaaacaa

SEQ ID NO: 394944 - DNA, 1589 bp, Homo sapiens
  misc_feature (1512)..(1512): n is a, c, g, or t
ggtgacggaagtgcggtgttgagcgccggcggctcgcgcccacgctgggccgggagtcgaaatgcttcccggtgccgggagtgagcgatgagctggcttctgttcctggcccacagagtcgccttggccgccttgccctgccgccgcggctctcgcgggttcgggatgttctatgccgtgaggaggggccgcaagaccggggtctttctgacctggaatgagtgcagagcacaggtggaccggtttcctgctgccagatttaagaagtttgccacagaggatgaggcctgggcctttgtcaggaaatctgcaagcccggaagtttcagaagggcatgaaaatcaacatggacaagaatcggaggcgaaagccagcaagcgactccgtgagccactggatggagatggacatgaaagcgcagagccgtatgcaaagcacatgaagccgagcgtggagccggcgcctccagttagcagagacacgttttcctacatgggagacttcgtcgtcgtctacactgatggctgctgctccagtaatgggcgtagaaggccgcgagcaggaatcggcgtttactgggggccaggccatcctttaaatgtaggcattagacttcctgggcggcagacaaaccaaagagcggaaattcatgcagcctgcaaagccattgaacaagcaaagactcaaaacatcaataaactggttctgtatacagacagtatgtttacgataaatggtataactaactgggttcaaggttggaagaaaaatgggtggaagacaagtgcagggaaagaggtgatcaacaaagaggactttgtggcactggagaggcttacccaggggatggacattcagtggaatgaagaagctgacagattagccagagaaggagctaaacaatcggaagactgagccatgtgactttagtccttgggagaacttgagccagcggctgtcttgctgcctgtacttactggtgtggaaaatagcctgcaggtaggaccattgcagtgatgggcagatgcgtctttcacacggaatcaggcacagtggccttctgtgacatgtgtttataaaaaatggttaagtatataataaattgaacatctttgagattggagaattatgtgagatttccacattatgtttactgggttcaatactgtccttgcttgttttattgcaggcaagcaaggcaaatggcctaaaatgctgtggcttatattttgataagaaatcaaaaaaccattggttaaaagatgcaactcagaagtctggaagtattctgaaagcatccatttaccgtccagttgacaggtttgagtctcctgcttgtataggtgacttgtgcccatgggtacattaaaggaacatgctgcccagggcctgggcggacagctcagtgggcaggatgtgtgctgggtctcagccccatgtgcctgcttgctgggcagttagtataggcaaagcctcctgcggcgaccctggctgctaggccattctctaggnacagctgcgactcataaagaccaaagcttaatcaggttcaacattactggtctagtaaaactggaattaaaaaacaa

SEQ ID NO: 394945 - DNA, 847 bp, Homo sapiens
ggtgacggaagtgcggtgttgagcgccggcggctcgcgcccacgctgggccgggagtcgaaatgcttcccggtgccgggagtgagcgatgagctggcttctgttcctggcccacagagtcgccttggccgccttgccctgccgccgcggctctcgcgggttcgggatgttctatgccgtgaggaggggccgcaagaccggggtctttctgacctggaatgagtgcagagcacaggtggaccggtttcctgctgccagatttaagaagtttgccacagaggatgaggcctgggcctttgtcaggaaatctgcaagcccggaagtttcagaagggcatgaaaatcaacatggacaagaatcggaggcgaaagccagcaagcgactccgtgagccactggatggagatggacatgaaagcgcagagccgtatgcaaagcacatgaagccgagcgtggagccggcgcctccagttagcagagacacgttttcctacatgggagacttcgtcgtcgtctacactgatggctgctgctccagtaatgggcgtagaaggccgcgagcaggaatcggcgtttactgggggccaggccatcctttgtaagttaaacgaagctgagttttactgaatcatgttccacaacttgtgaaaagatgaggcgggatctgctcattgtttgattattgggaaaacctgcagataagtagctctggcaggggtggcagaggagcagctttggttcgtgttggggctaagcggcattgcttttcaaaacgtgaggtacctcagctttacttcctttgctttttttttttttttttttttttttttagaacacggtctcacactg

SEQ ID NO: 394946 - DNA, 1157 bp, Homo sapiens
ggtgacggaagtgcggtgttgagcgccggcggctcgcgcccacgctgggccgggagtcgaaatgcttcccggtgccgggagtgagcgatgagctggcttctgttcctggcccacagagtcgccttggccgccttgccctgccgccgcggctctcgcgggttcgggatgttctatgccgtgaggaggggccgcaagaccggggtctttctgacctggaatgagtgcagagcacaggtggaccggtttcctgctgccagatttaagaagtttgccacagaggatgaggcctgggcctttgtcaggaaatctgcaagcccggaagtttcagaagggcatgaaaatcaacatggacaagaatcggaggcgaaagccagcaagcgactccgtgagccactggatggagatggacatgaaagcgcagagccgtatgcaaagcacatgaagccgagcgtggagccggcgcctccagttagcagagacacgttttcctacatgggagacttcgtcgtcgtctacactgatggctgctgctccagtaatgggcgtagaaggccgcgagcaggaatcggcgtttactgggggccaggccatcctttaaatgtaggcattagacttcctgggcggcagacaaaccaaagagcggaaattcatgcagcctgcaaagccattgaacaagcaaagactcaaaacatcaataaactggttctgtatacagacagtatgtttacgataaatggtataactaactgggttcaaggttggaagaaaaatgggtggaagacaagtgcagggaaagaggtgatcaacaaagaggactttgtggcactggagaggcttacccaggggatggacattcagtggatgcatgttcctggtcattcgggatttataggcaatgaagaagctgacagattagccagagaaggagctaaacaatcggaagactgagccatgtgactttagtccttgggagaacttgagccagcggctgtcttgctgcctgtacttactggtgtggaaaatagcctgcaggtaggaccattgcagtgatgggcagatgcgtctttcacacggaatcaggcacagtggccttctgtgacatgtgtttataaaaaatggttaagtatataataaattgaacatctttgagattggag

SEQ ID NO: 394947 - DNA, 841 bp, Homo sapiens
ggtgacggaagtgcggtgttgagcgccggcggctcgcgcccacgctgggccgggagtcgaaatgcttcccggtgccgggagtgagcgatgagctggcttctgttcctggcccacagagtcgccttggccgccttgccctgccgccgcggctctcgcgggttcgggatgttctatgccgtgaggaggggccgcaagaccggggtctttctgacctggaatgagtgcagagcacaggtggaccggtttcctgctgccagatttaagaagtttgccatcctttaaatgtaggcattagacttcctgggcggcagacaaaccaaagagcggaaattcatgcagcctgcaaagccattgaacaagcaaagactcaaaacatcaataaactggttctgtatacagacagtatgtttacgataaatggtataactaactgggttcaaggttggaagaaaaatgggtggaagacaagtgcagggaaagaggtgatcaacaaagaggactttgtggcactggagaggcttacccaggggatggacattcagtggatgcatgttcctggtcattcgggatttataggcaatgaagaagctgacagattagccagagaaggagctaaacaatcggaagactgagccatgtgactttagtccttgggagaacttgagccagcggctgtcttgctgcctgtacttactggtgtggaaaatagcctgcaggtaggaccattgcagtgatgggcagatgcgtctttcacacggaatcaggcacagtggccttctgtgacatgtgtttataaaaaatggttaagtatataataaattgaacatctttgagattggag

SEQ ID NO: 394948 - DNA, 618 bp, Homo sapiens
gttctgggtttggatactggctcagttgagccacttcctggctgtgtgacacaggacaaatgaatctcctccctaagcctcagtttccccaggtatgaacaggttgaccagaacattatcagcagaagcagcaaccagtacttaaccgtgtgcattaattcataaattctccacctctctagaggtggagagcattatcatgccacttcacagatagggacgtttagggctagagaggtgatgttgctcaccagtatcacacagcatgagtttgaacgcacctggcagagcctccctgaccatgtttccagaagaacagctgtcattattattgttgagacacagtttcactctgttgcccaggctggagtgcagtggcacaatctcagctcactgcaacctccggctcccaagttcaagcgattcttgtgcttcagtctcccaagtagctgggattacaggtgccggccaccacgcccggctaatttttgtatttttagtagagacagggtttcaccatgttggccaggctggtcttgaactcctggcctcaagtgatctgcctgcctctgcctcccaaagtgctgggattacaggcgtgagccaccgtgcccagcc

SEQ ID NO: 394949 - DNA, 342 bp, Homo sapiens
caaagtcctgtgcagggctccagggccaaccagaataacctgagagtctaatgctggcctgtccttccgcagatactgcctaactcagcaccacactccaggaggccatgaaggattaatttcctattcacagctccatggggtaaagcttggctgtgctgaggaagggatggcgaaggaggttcccaaagactctgtccctttcctccttcccaaaggaaaagatttgtgagctttagactagagaatgtaaaagcaaggaatgtgcttagggaacatctcatccatccgcttcatcctacagattaaagagaacaactaccattcattgagcacttactg

SEQ ID NO: 394950 - DNA, 240 bp, Homo sapiens
cccccatcttccccaggggaacctgtgattcataggattcaggctgttgacaaaggtacacacagacattttttataaaacaaaagggaaccaaaggaaactcagcttttaagccagttttactgatcactaacagaattaaaatagaatgtgttcatcttccaaatttattttcttatttttattttttaaatatgttgttgtcgttgtttaaaatagagacagggtctcactgtgttg

SEQ ID NO: 394951 - DNA, 486 bp, Homo sapiens
catggcgaaaccctgtctctactaaaaatacaaaaattggctgggtgtggtggcgggtgcctgtggtctcagcctccgaagtagctgggactacaggcacatgccaccatgcccggctaatttttgtatttttagtgtagatggggtttcaccatattggccaagctggtcccgaactcctgaccttgtgatccgcccgccccagccttccaaagtgctgggattacaggtgtgaaccactgcaccagctgtttaaatggtttccgattaaatggtactaggaatggcagaagttgctttcatgaatcagcattttttttttttttttgagatggagtttctcttattgcccagactggagtgcaatggcgcaatcttggctcactgcgacctctgcctccggggttcaagagattctcctgcctcagcctcccaagtagttggaattacaggtgtccatcaccaagcctggctaatttttttttt

SEQ ID NO: 394952 - DNA, 391 bp, Homo sapiens
gtgagataggagtctcactccattcgcccaggcatggagtgcatgtggcatgatctcgtgctcacgtgcaaccatctgcttcactgggttcaagtgattcacttgcctcaccttccaaagtgctgggattacaggtgtgaaccactgcaccagctgtttaaatggtttccgattaaatggtactaggaatggcagaagttgctttcatgaatcagcattttttttttttttttgagatggagtttctcttattgcccagactggagtgcaatggcgcaatcttggctcactgcgacctctgcctccggggttcaagagattctcctgcctcagcctcccaagtagttggaattacaggtgtccatcaccaagcctggctaatttttttttt

SEQ ID NO: 394953 - DNA, 354 bp, Homo sapiens
ctttcgggtgaggtggaaggagagagcatacctgttggtgaggtaagagtgttttccttcagagaaccaaagaaacaaaggctccctttctgaattttgtgttctgcctctttgcatttctgaggctccttgtgtctggcagggctgtgagtgaggagatgagggtgtgctcctctgcaggcagaagtcagctgtaggtcagatgtggctttggaacacaatggaatccagggggaatgttggcgagcacagcaaggctggggtgatgatcctctaatcttttgcagcgtgctgtaagagtatctttaactttcgccgagacaggcagggcaatgagcaaaaggacctcggtgt

SEQ ID NO: 394954 - DNA, 360 bp, Homo sapiens
gaggaataggacagacttctgaaacagcatcctatcatttgctaaattgaccttataaataatgttttgcttttgtgacattattattctttttagcattatttttaaaattagattattgttcatattttatttgtactccataatctaatgtactgtatagtgtcacttgtgtggaaactgttttgcagacataaattactaaataaatgttctgttttcagatagtttagtctttgtgacattaagtattgggacagattgttttgactccaattaatattctgaaatttttctcctttcattacctacctctccattatgcctcagttgtaacggtgagtaaaactatttttgtgt

SEQ ID NO: 394955 - DNA, 372 bp, Homo sapiens
tactgtttacaagagacaagctttagactcaaagacacaaataggttaaaaataaaaagatggaaaaaaaagttaccatgcaagcaatatccaaaagcaagctagagaataccagataaaacaataattactaattattactaatatcaggtaaaataaagaccaaacttgttcctagggacaaagaaggccatcttataatgacaaaagggccaatccatcaagaagacataacaatttaaaatatacataaatgtgtgtctaagaacagagcccaaaaaaacattgagcaaaaaaactttttttttgagatggagtttcgcactgtcacccagactggagtgcagtggcgagacctcggctcattgcaac

SEQ ID NO: 394956 - DNA, 352 bp, Homo sapiens
gacagcccaatttttaaaagttgggaaaagaacaggcacttcacgaaagaggacgttcaactagccaacaagcacattgaaaggtgctcaacatcaggaaaaatgcaaataaataccttaatgagataccacattcagccagaacggctacaattaagaagactgacaacaaaactcttgtgttgacaaggataagaggcacctagaactctctcatattgctggcaaaggcgtaaattggtacaatcattttgaaaaactggcaatgtctactatcactgatcatgtgcataccctccctacacactagcaattcctctcctagaaatgtgtgcaagtgtctacaaaaaga

SEQ ID NO: 394957 - DNA, 300 bp, Homo sapiens
gggcgaggaaaagggaggagtcaagggcagctcccaggtttctgggcaactggatggattgactgggctggaaaagatgggggtggagagtggagaaggggtttgatggtaagaaatcacatggcctggcaagtattgtgcaaagtgcccatgggacctgcaaatgaagccactgagcagggtgggggtgccgggctgtggctgggagagacgctgggcttgggaatggccatcagcagatggacctagtttaaaggcacggcagaggtgacatccttgagggaggtgtgcagggagagg

SEQ ID NO: 394958 - DNA, 379 bp, Homo sapiens
tcttttttttaaatgtacacatttacaactgtgcatttcccttctaggcactgctttaactgcatgcacattttggtacattgtgtttttattttcattcatcccaaattatgctttaatttcttttgatgtattgttttacttactgtttatttaaagtgtgttgacatatttgtgaatttcccaaatttctttcagttactgatgtttagtttcattccattttggtcagagaacatatactttatgttttcaacccttttagttttattgagacttgttttatgctgtaaaatatcatctatactggagactgctccaaagtacttaaaaagagtttgtattgttctgttgtagggtagtgatatagatatccatg

SEQ ID NO: 394959 - DNA, 352 bp, Homo sapiens
tgcagctggtgcacttgactctgggcagcgcgttcccaggaacccgcaggacactgaggaccgtgcgtgatgtaacccagatctgccagatgtgggagccagcatgagtcacaatgccgggccgttcattaagaaatgctttctgggtcatctgggtgcagggcactgctgcttccctgctgtccagggttggaggcatcaagtctgcccaccaggaatccccaagttcatgaacatctgtctaaaattatagcctggttttctgagccgatgtggcacagagtacacgcacgctgatggtctctggcttgtaatttgttaaaggatctcaccactttggttagtggtggga

SEQ ID NO: 394960 - DNA, 144 bp, Homo sapiens
  misc_feature (101)..(101): n is a, c, g, or t
tgcgttgttcaacggtcaatggtacataaaaagcatgtcaatctcttttcttgaccaaggataatcaatccctccatctgtggccttgatcccatctattnctagaaatatgctcctttaaattattttggttctttcccaaat

SEQ ID NO: 394961 - DNA, 308 bp, Homo sapiens
tgcacaccacagctgcctgctccccactgcacagcctggctagcttttgatgccgctgccgcgatgttgcaccatgtacactccaaggttgcgtcagcctaggacctttgcattgcttgctttcttggcctgaatcttgctgctctttgatcttctgttgactggctccttcttgtcactcagatctcagcttaaacattatcttctcagagacttccctgattcccaagtcatagcacagcagatcaccttaccttaactcttggtatagcactcatcaccatctgatacttgtcttgtttatacct

SEQ ID NO: 394962 - DNA, 258 bp, Homo sapiens
ggcgtcatcctcatgctcaacaatagagctgtgtttctgtgcaccaaccgcagatgctgggtctggcccccacagaaggagtgcctcagtagggcatcccaaatggggctgtgcatagcgtcactccagaggctggggacagtgcagatccagacctttcccagcctgttgagttagaactgggggactgtgctccagggcgtgaggaggtgggttgggaaatggtattttaaacaagcgaagtgattgtcatataac

SEQ ID NO: 394963 - DNA, 291 bp, Homo sapiens
cgaaagtgaggggcgcggcggggagggggcgacagccctggcttggtgctgagccgtggcgctggggaacctctaggagccgggtggccggtcagtgcgggcgttcccggaaccgccaaactttctccgccaaccgaagttagggactccgaggacagtgacgaggaggacaccgcggaggggggtctcccgtcacctcccgcctccagtagccgagggagaaggcgaccctgagtactaggtggccccgagcgcgccaccccggccccggggcgcctccctcgcggccgc

SEQ ID NO: 394964 - DNA, 609 bp, Homo sapiens
cctggtgtcccctgttatttctgctgaaacatacagtcccaggccaggctgctcagtatcctcagggtttaaggacaataggaagtcccatcatcacccatctctaggatgtcctcagacagggaagctgcagagaaaacacacctagtggggcaaagtaggactgtgaagctggaagggacccagcacctgtatgttccaggtgaggacccacaggtgggtcaggcaggcatcagccagtcagggaaggaccagaagtgcctggggctgtgactcccagtcctcggtctgtccacgacccaacactgctgctcagttcacacttgagaaagtctgtgcttctctcacacagagcaggcggcctcacggtctctgagccctcagatcattgcacatctgtcttgtgaaacacacacttgccatgggcttttagggacttgggttggctgagaggtggggagatgccaactctgattgaaaaatgcccggacggaatcccagcactttgggaggccgaggcgggcagatcacgaggtcaggaggtcgagaccatcctggctaacagtgaccatcctggctaaaatacaaaaaactagccgggcatggtgg

SEQ ID NO: 394965 - DNA, 498 bp, Homo sapiens
cctctgtgagtcacctttctcatgcttaaaacggcagtaaattacctctacctgccagggttgttgcaatgatctgaggaggtgccttatgcaaagcacagttcatgtgctcggggcaaacagtggaaaaacaaaccaggaaatgcttctctgtctgtctgtgcctcctacctgccacaggagaactgagggtagaatctgtgtacccttctcagcacaccacaaatcctagtcacttagagagacacagactgcctacaaggctagtcaactcccaaccacctttgcagaagggggagagagtgggagtttgtgaagagcaaaagcaggaattggatgggaaaatggtctagggctcacgtggagtgacccaggacccagagtctcacctcccaaggctaggccttgtagggcagcagggccaagcatgctgcaggaaagaacacagagtctggagccagactgttcaggtttaaattttggctctgctactactag

SEQ ID NO: 394966 - DNA, 313 bp, Homo sapiens
cctctgtgagtcacctttctcatgcttaaaacggcagtaaattacctctacctgccagggttgttgcaatgatctgaggaggtgccttatgcaaagcacagttcatgtgctcggggcaaacagtggaaaaacaaaccaggaaatgcttctctgtctgtctgtgcctcctacctgccacaggagaactgagggtagaatctgtgtacccttctcagcacaccacaaatcctagtcacttagagagacacagactgcctacaagccacggtcaacccacaagccacggtcaacccacaagccacggtcaacccac

SEQ ID NO: 394967 - DNA, 296 bp, Homo sapiens
ctgaatatatattggtctatggatatattttcacaattatttctttgttaccaatttagagaaaataaaattaaccatttgactatggaaagaacaactgcatatatgtattttaaaaggaaacgaactcaataagaagtctcagcttgatgttctcggacaaatcctttgtaaccaggcctcaccagcaataagaaaaatcaagggcccagatcataattgaaagagaatttgggaagctttgaaatccagctctccctcactgttggcatagaaaatatctgggggtaccgagc

SEQ ID NO: 394968 - DNA, 587 bp, Homo sapiens
gagatggagcacagcttcagcttgcctttcaccaccaccacgtcgttcttgcgcctcttcttggctttccgcttgcgcttgggtatctggcttggggggcggagtggatcctgctttctggcggaaatccttagcaggccgccggtggcgatcatggcgagctcctggagtgcaggactagcctctgggatggaggcttgcacagggagggcgccaactgcccactagctgctcagccacctcctcctgccagggagaccgagggaggtcggggccggcgaacgggcgctcgggcgacacaaaggaaccatggagaaactttttcagcccgagccgacggcggagcgcagggacagcgccccggggccccgcatccgagcgcggctcagcagccccgcgggggcgagcgcccgccccaggctcgcagtccccgccggcgctgtggcgggagccatttccaagagtttccaagaagtgtcaggtcctccgcatcccgcatcccgcctcggagccctcctctctgccgctcatcctccagctcccggcgtcccctagcgcggcgctcccgggcgggcccctgcggccgc

SEQ ID NO: 394969 - DNA, 432 bp, Homo sapiens
acctacctcttgggttactcatcagttttactttttttcccattaaatgttgcttttagtgttatgttttctttatactcattttgctaatctctttcaaacacctggaaatgacatctgaattttttaaacatttaattgaaatatatattcacaaaagagtagaattacaaaggtataatgcatcattaatttctacaccttgatgcacacatgacacatctaaatcattgcccctcttcgcaaatggaaactattctcacttctaacggtataggttaattttgtctgtttttaaactttataaatgaaatcatctattcatttatgtctagcttttttgattcaacattatgtttatgagtcatccatactgttacacatatagttcttttccttttaccgaaaagcactccataatacaggttgaat

SEQ ID NO: 394970 - DNA, 537 bp, Homo sapiens
caccgctcacactgatctctttccagcctcggctggccctcaaatccctgtccagactggcctcttccatgcccatgtccatacccacatccatgagggatgctgccagcaaatcagcctttttctcaagccttctattagcctccctctttgcctcctgatcttggttaatgtacaccttcgtggccacttcaataagctgagtagcattcatccctttaaaaccttccattttctgcaattttcactggatatccccctgggcctgctctacaaatgccatgttcatcatgcactggcctcaccaagtcttttataaaaatggctggggctttcatctgcaccctgatgcccctctgagatttttcctatattgattgcctgtctcccgccttcccttaaattttgcaggagtgcctcttggtatcttggcagctgctatagttgggctgcctcattcctttgggttctagtgggggtcctctagtttccaggagaggcatttgcatagccctaacacaacctgactggaggtgg

SEQ ID NO: 394971 - DNA, 391 bp, Homo sapiens
agggtggataaacaatgtttggcttctcttaagtaagacttaattttttttaggtaatgaaaatattagtacttttgtatattgattgccagaacaaagccagaactctgatgcaagtttgtatacctgagaaggtactcaagtgggagggatagaagcttccttttgatgctggggtgggttgttctgaggtaacaatgatttatttctgtatttctttttctttttggagacagggtctcactccgttgcccaggctagagtgcagtggtgtgatcattcctctttgtagcctcaaccgcctggctcaagtggtcctcccatctcagcatgtagctgggactacaggcatgcatgtgccaccatgcctggctaatttttaattttttct

SEQ ID NO: 394972 - DNA, 374 bp, Homo sapiens
aaacgctaagtaatattatactatggaatatgaaacaagacaacaaagaaaaaaagagaagtttatacagtaatagaaagttagaagagatcctccccacccccgctccctcatagtctacccccacgcctcagtgtctcctcaggcacaggaagtgggcggtgggggaggggtaagggcctgacagtgggtgggtgggtatattcctcaggagtccacagactggagtggacctggaacttagagacgggagggacccgagcctggcttttgacctaagaaccctagcaggagaatacagtctccatcctgctgtctctgtcctgtccccaagttttcaaataaaactttccaaaaagtgaaaaaaaaaaaac

SEQ ID NO: 394973 - DNA, 300 bp, Homo sapiens
ttttttcatccctcccctcccccttcctccccggaaaccagagactttgccacgcctcagtgtctcctcaggcacaggaagtgggcggtgggggaggggtaagggcctgacagtgggtgggtgggtatattcctcaggagtccacagactggagtggacctggaacttagagacgggagggacccgagcctggcttttgacctaagaaccctagcaggagaatacagtctccatcctgctgtctctgtcctgtccccaagttttcaaataaaactttccaaaaagtgaaaaaaaaaaaac

SEQ ID NO: 394974 - DNA, 1292 bp, Homo sapiens
ttttttcatccctcccctcccccttcctccccggaaaccagagactttgccaccaccagtattggggatgctgagctgcggggtacgggcctgaggagggatgggagtaagaagtgctgtggaaaccgtcaggccatgaaccaggctgaccctcggctcagagcagtgtgcttgtggactctcacatctgcagccatgagcagaggcgacaactgcacggatctactcgcactgggaatcccctccataacccaggcctggggactgtgggtcctcttaggggctgtgacgctgctatttctcatctcgctggctgcacacttgtcccagtggaccaggggccggagcaggagccatccggggcagggacgctctggagagtctgtggaagaggtcccgctgtatgggaacctgcattatctacagacaggacggctgtctcaagacccagagccagaccagcaggatccaactcttggaggccctgccagggctgcagaggaggtgatgtgctataccagcctgcagctgcggcctcctcagggtcggatccccggtcctggaacccccgtcaagtactcggaggtggtgctggactctgagccaaagtcccaggcctcgggccccgagccggagctctatgcctcagtatgtgcccagacccgcagggcccgggcctccttcccggatcaggcctatgccaacagccagcctgcagccagctgagatggagggcctggcacagcggggcgtgcactgccccagccccccgtagcaggggcatgactgtttcccaaccagcacccaaagacgggcgccattgccaagtcacaggatgtgatctaccccggacttcctatctgagcttcaagggagacatctcagggcaaagctttcgtgatggaggaggcaaagacagtagccccctccttatttcttttttctatctgttcctcttagcccccaaactcccaggttctcacttccttcttctggagtttaaccagatcctccccacccccgctccctcatagtctacccccacgcctcagtgtctcctcaggcacaggaagtgggcggtgggggaggggtaagggcctgacagtgggtgggtgggtatattcctcaggagtccacagactggagtggacctggaacttagagacgggagggacccgagcctggcttttgacctaagaaccctagcaggagaatacagtctccatcctgctgtctctgtcctgtccccaagttttcaaataaaactttccaaaaagtgaaaaaaaaaaaac

SEQ ID NO: 394975 - DNA, 976 bp, Homo sapiens
gagagttctctcttaccgagaagtccccactcatcccctaaactctgcgttgcagctctggagagtctgtggaagaggtcccgctgtatgggaacctgcattatctacagacaggacggctgtctcaagacccagagccagaccagcaggatccaactcttggaggccctgccagggctgcagaggaggtgatgtgctataccagcctgcagctgcggcctcctcagggtcggatccccggtcctggaacccccgtcaagtactcggaggtggtgctggactctgagccaaagtcccaggcctcgggccccgagccggagctctatgcctcagtatgtgcccagacccgcagggcccgggcctccttcccggatcaggcctatgccaacagccagcctgcagccagctgagatggagggcctggcacagcggggcgtgcactgccccagccccccgtagcaggggcatgactgtttcccaaccagcacccaaagacgggcgccattgccaagtcacaggatgtgatctaccccggacttcctatctgagcttcaagggagacatctcagggcaaagctttcgtgatggaggaggcaaagacagtagccccctccttatttcttttttctatctgttcctcttagcccccaaactcccaggttctcacttccttcttctggagtttaaccagatcctccccacccccgctccctcatagtctacccccacgcctcagtgtctcctcaggcacaggaagtgggcggtgggggaggggtaagggcctgacagtgggtgggtgggtatattcctcaggagtccacagactggagtggacctggaacttagagacgggagggacccgagcctggcttttgacctaagaaccctagcaggagaatacagtctccatcctgctgtctctgtcctgtccccaagttttcaaataaaactttccaaaaagtgaaaaaaaaaaaac

SEQ ID NO: 394976 - DNA, 1156 bp, Homo sapiens
ttttttcatccctcccctcccccttcctccccggaaaccagagactttgccaccaccagtattggggatgctgagctgcggggtacgggcctgaggagggatgggagtaagaagtgctgtggaaaccgtcaggccatgaaccaggctgaccctcggctcagagcagtgtgcttgtggactctcacatctgcagccatgagcagaggcgacaactgcacggatctactcgcactggctctggagagtctgtggaagaggtcccgctgtatgggaacctgcattatctacagacaggacggctgtctcaagacccagagccagaccagcaggatccaactcttggaggccctgccagggctgcagaggaggtgatgtgctataccagcctgcagctgcggcctcctcagggtcggatccccggtcctggaacccccgtcaagtactcggaggtggtgctggactctgagccaaagtcccaggcctcgggccccgagccggagctctatgcctcagtatgtgcccagacccgcagggcccgggcctccttcccggatcaggcctatgccaacagccagcctgcagccagctgagatggagggcctggcacagcggggcgtgcactgccccagccccccgtagcaggggcatgactgtttcccaaccagcacccaaagacgggcgccattgccaagtcacaggatgtgatctaccccggacttcctatctgagcttcaagggagacatctcagggcaaagctttcgtgatggaggaggcaaagacagtagccccctccttatttcttttttctatctgttcctcttagcccccaaactcccaggttctcacttccttcttctggagtttaaccagatcctccccacccccgctccctcatagtctacccccacgcctcagtgtctcctcaggcacaggaagtgggcggtgggggaggggtaagggcctgacagtgggtgggtgggtatattcctcaggagtccacagactggagtggacctggaacttagagacgggagggacccgagcctggcttttgacctaagaaccctagcaggagaatacagtctccatcctgctgtctctgtcctgtccccaagttttcaaataaaactttccaaaaagtgaaaaaaaaaaaac

SEQ ID NO: 394977 - DNA, 373 bp, Homo sapiens
atgttttcttatcaaatcaaacgtctcgatcattcgcattagggctttcttcattgaagagcctcttgtatgttcatgctgcttctggcatcattcaagaacattgtgcaaacattcactgagcacctttgagcatttacagtgtaacagagccccatgctagctgctggaaatacaaagatatcaagacaaaatccctgctgctctgtgacttaacagtcccatgaaacacggggggcagacaagttacaaaacagtgtgacagatgtggtgatagtgatgggcatacaatgtcagtgggcccacaccaccaactacagcacatataagctgagtttttgtttttgttttttttggccggtggggagggggg

SEQ ID NO: 394978 - DNA, 453 bp, Homo sapiens
atccttatttacaggtcgggcatgccaggttcttaggcccatttctgctttccttctccattatcttgctttaccaggtagactttctcttctgccttcacccatgtctatgccttctaaacaatgtctcccatttcatctcttttccctttcagagctcccccttctttcatggccaggcttctgtgagaaatgttctattgtcactgcttctgcttcctcatttccaccttcatcgtttcatctagtctccctcaggtctccgttgtcaaatccactggtgtctatttaatgttaatcctacttaacttccctggcatttgacactgttgcccacccttcctagcaattcctccttcctgcccgcatcctctgtctcgctaccctgctttctctctggtatttatcgctttgtagcatactatgtaattgtgtgacctattatctgtctct

SEQ ID NO: 394979 - DNA, 108 bp, Homo sapiens
aagaatgggcacagaagttaggaagggctgtcactggtcctcagctgctcctggccacctggctcatcttccttccacatccctcccactgcaaaacctcacccatgt

SEQ ID NO: 394980 - DNA, 582 bp, Homo sapiens
gagaagggctggtatgggggtggagggaggtggagggaagagaaagtcaggcctcctctgggtcttggggctcagccagggatggggcagaggcacagatggcccttacctgggacccttcccctatacctgtccctatagctggtctgccagccagtggagcagccagtcgccccccgacccccaccccggaaccctccctcatgtcctgagtgtgggtggcaggaccagtgagaacacaattgaccttgccctgagaggctcccagctcaatgaagcagatgcagtctacctccagagaggaggtgagcctgtttccacctgtctacacatgcaagatcccctgttctggggaaagaccattaccccaacctgcctcatcattgacatgtcacaagagtccagccaaatgggctactgatttccaggtcatccagtgcaccacaattctagtgaaacctcatatccttgcattgccattggtgtggtagtgaagaacgtggcttctggtttcagactgcaaggggtcaccttttggctctgccactgatttgctatgtcacattgggcaagctggctaac

SEQ ID NO: 394981 - DNA, 453 bp, Homo sapiens
tctcagtctttcctttcctgcctccctccttggtctcccccacagcatcccagccccattctgcatttcccatggaaatccaagtctcagagactgttccagctccatcctggtggggccccaggttttactgaggagtatctagaccagtatttctcaccttttaatatgcaacacgcagcagggcacaatggctcatttctgtaatcccagcacttttggaggctgagactggaagattgcttgaggccagtagtttgagaccagcctgaccccttttctacaaaaaatttagaaaaaaaaattagccaggtatggtgctgtgtgcctatagtcccagcaactcaggaggctgaggggggaggattgcttgagctcaggagttccaggctgcagtgagttataatcatatcactgcattccagcctgggtgacagagcgagaccctatctc

SEQ ID NO: 394982 - DNA, 259 bp, Homo sapiens
ctgggcagtgcgctcccatctgcaccttatggacagcgtggccagggtcgaggtccgagttcctggccgcgtcccaaggatcggattccgggtctatagttctcatggtggttcagagtgggctgaattgggattggagtctggaatccgcatcgtggttctgagtccgcgctattgggatggaagttgggaatccatgttgtggttttgagtcaaagcccgaattgggaccggagtcggaaatccacttagtggttct

SEQ ID NO: 394983 - DNA, 570 bp, Homo sapiens
aatcacaatccccaacgtgctgggtaaaggaggcagaatggtgtctacagagctgactgcaaatttcagtgaataatgacatgtatgatattcttgatctataatttaccctagtaatctccaaatcaaagatagattttaaaggaacagaaagataaccatttgtgttactccgtgaatttaacaaaattcagaaatttttccaaaaaggaattaggagtcaaaatgaatatggtataatttcttaaaaactcagctacagaagactgttaacagctctttgaaaacccaatttttttttatccagattttactatttggaggggttaagtgtgagaggccagatatgaccagggtgtagcagccaccgggagtcctgggttctaaggggtcttgaatgtctcagcatcaagggtgaggaaggtgacggtgcgttggcattaaagaaatgggaagggtggttgagtgtagagaagtggaggagaagaaaccctagccttccctttgttctggtattttatccccaatggatcctgagaactaacttccctgtaacaattttcatttaac

SEQ ID NO: 394984 - DNA, 370 bp, Homo sapiens
actttctctaaccataaaatggagatgacatcgcatcttgtgaacagttgttacaggaggaaatgagattacatgtgtcacatgcttcgctcgttctctggaccgtaactcgtacctgtaagtgtccttccttcctttctccccaccacttactctcatctccctcttactcagtgttgtgttttctaagatttaaaaaacagacaacagaaaacaatattttaatccctttttatgttaggatctgaaaatctttagatatttcctttctccctttcattccttcattcatttttggctttgcaccaggacttatttcttgagggtcagataagccctctgacctcagggaggcacccaggttaatcca

SEQ ID NO: 394985 - DNA, 614 bp, Homo sapiens
aggcttctgtctctccatcccgctgtttcagggttctgcatcctgctgtttcggggttctgcatcccgctgtttcagggttctgcatcccgctgtttcagggtgcacgtttccttctcgggcttggctccttgggtcatgtctccagcctgacgttccagctgagaggtggtgaggcaggaaggggtgtctctgcatcaggaaagcgatagggagttcaggaaacccagtgtctctcattggctggaagagtattacacggctacctctggttgcccagatgcctggggcagggtctgtgctcgagaaaataaggctctgtgagtaagggtctcccacagccagatcaacaaggagctgtaggctgtaagtcctggttcctgactgagggaggcctaaaaagtggggctgttggggctttatatttagcacccactttttaccctctcaaattccagaccagttgagagagccgcacacactgtagataggcaagtggagatcagatacaggctctgttttagataaaagcaactggagaaagtggctgactggccaagcgggtttgctaatcctttatcccaaattagacaaacttcccacctagtaacgagc

SEQ ID NO: 394986 - DNA, 130 bp, Homo sapiens
taccaacaataatctaacttgtcctgcacctgctgttggacctcctccatattattacttctgccactgactcccaaaagccaggttattaatctgaagacaactcaagacccaagccacatcattactg

SEQ ID NO: 394987 - DNA, 250 bp, Homo sapiens
actccccccttcttctcccccattaagtaacctctcccctattaggtatataaacccccatctttagttgtttagagtcacatttttctgtgtgctcctgcgtgaataaaaatctatgttttgtctaagtttaattcccaggccctcaagaactgaacctaagagagtagaggaaaagattttcctctccaacaaacattacttacaaaggtaagtaatttcatcttcattaaaaacatgagaaaactta

SEQ ID NO: 394988 - DNA, 392 bp, Homo sapiens
accgcacccggccaatgtatgtatttttaaacataaccacatactgttatatttaatgcttctgaccatgtcttaagaaaaaaacaaaaactccctttggcttccttgacatcacagtctctctgtttctctgactcttcttcctcatctcctatggctaaattctctccctctgtccactgcttacacatgggcatttcacaatgtcctttttccctgaaggaacttaccccctcccctcagccttaagtaccccatctgtggggatgatgcccatgcctgtagtcctgactcactcaccacgctctatcgcagttatttactgatgcatctctctcccctatcagacgctgaggtctttgatggagcaaccttgtatttgtccgtgtatc

SEQ ID NO: 394989 - DNA, 458 bp, Homo sapiens
tcatcatcaccatcatcacagtcattactatatcaccatcaccataattatcaccatcatcaccattaccactgtcatcatcattgccatcatcactaccaccatcatcacaaccatcatcaccatcagaatcaccattatcatcaacatcatcattgtggcagctgtcattcatgagatcccacaatgcacaaaatattttcctgtattttattcctttggccagtactttttatatcccagtgatgttccatggaccatcatggggctggggaaatcagtgacacaattaaacaaccaacgatacaatgtgtgaggttggcgatagaagggattaagtgtcccaagggagcagggagttgtaaggcacctggcttcaggacaactgctttacagcatgctataaaagctgagaagactagcatgaaagggacttggatggtcaggaggcagaggag

SEQ ID NO: 394990 - DNA, 650 bp, Homo sapiens
gtattgttactctttcctggctgggaggaaatttattgaaaaagcttctcaaatctttttttttaatctaagtttcctatatgttttttttccatgaaaaggagtaatagatatatcagaaataaaggctaactctccagcccctgctagaaattgtgttgcttaggcaaagattcaaagatttcattgtagaagctctggctttttagaaatttgttttttagtctccacatttattatgcttctgtgggagggtgtaacttctgtagattgaggggaacagacagaatctgatgagtacaagttgcctctacaagagcattcacagtcttctcaggaacatctagggaaagagttcctcacaaggcaccacttctgaggggttacattatatcttggtcaaaaaggaggatccaatatggttttgtgtagaatatgaccttctaacagaagtggacttaaatttttttttctcattttggcatcttatcccttccaatggaattaaaattctgaattcctttttttcttaataaaactattttttaaatcctattacaaatatatattcattgtagaaaacttgaaaacatttttaaaagaacaaggacaacaataaagaaaattcactacctacagttaatattggt

SEQ ID NO: 394991 - DNA, 229 bp, Homo sapiens
aatttaacaattctttaataattgtctttttattttacaatcaataccaagaaaaacctcagcctaacctcatttcaactcaaaattcaaaatcaaataagtcaattcacataataccttctactaaccagaaatttcaaagaacaatttaatactgtagatggaattcaggggcttagataactgattacattctcatttttgtgcagaaaaccatatattcttctaa

SEQ ID NO: 394992 - DNA, 201 bp, Homo sapiens
cttgctgtggagtgactatctggagtgtaacacatcccctggtacccaattagtcaagtagaagaaaatccaccacttactttccttgaaagtcaagtcactctctgattctttaattcattaatctgtcagtgaatggcaggtttcctgatttaatgagatccaaaagtttcaatagcctgtctgcgaaagtaattcaac

SEQ ID NO: 394993 - DNA, 1357 bp, Homo sapiens
gaggaaaacccttggcccaggagagatcacggaaggctggtcacaaaccaagccagatgttgactttcttaagaccagcgaatagagacaggagtttcttttatacttagagaaaccagagagtttcacggtagcgtaacaacacgagtggtaagagttgtctatcagaaatacaaagccagacccattgctctctgaagaagccacacatttcctagaagatccagccttggctactcttccacttagtatccacagctactagatacgctacctcacacctgtaacccagatgtcataggtctcaggctgggtactcagtctttgccttgcaccttaagactgaactttgatgcattgctgaaataaatttaactccacaatgagaaataaaatgtttaatcaaatttaatggggaattattgaagagaggtgcatgtacatcacagaggagaagcctatctggccacctccgtgatccccccattatccattaatgttcttctcctagtctcagctccccacttctctcctttctcctggaaattcccatctatgcagcctctggccactctggatccactctgcctcctgcctctcagccacacagtatgcccattcttctgtggcatcatttatctccctccggttttctccactgtgaatcctcacacatatcacttaacttagtaagcaagtctccatctgtcttgaaaaaaagaagaaaatgatgatggaatggaagaaagagaactaaaggagagccatcaaatcagacaaaagctatctgtctctttggagagacaacctctggcctcatccactgcattacattcttagagcttgtagaagagcggttattaaatattttcaaggctacagactccttcaagaattgataaaagctatagaacttctttccacaaaaatgcatgtattgcacactgaatgtctgcatgcagtccttgaggggaggacctctgaggcctatctctgagtctgcagtgtccatgagcccatgtcaggaattcctgcaacacacattatgtgattttaaaatacttaaatgaaagttttttccagtgtcctccagaagcaaattccattaaacaagccaatgtgtataatattaccctagaaattcgagagttggtgtaatgcaaatgggagatatgagcatgtgtgtgcatgtgtgtgtgcttgtgtataccttcacatcttatctataaacacatgctaagaagtcatctttagtttcagccttattcctataataaaaatgtcaagtcttatgaggtggatagattcataggattattataacccccattcaatcaacaaagaagctaaagtcaga

SEQ ID NO: 394994 - DNA, 112 bp, Homo sapiens
aaggtctggtgacacagcccacatccctagcctcttttaaaactttgtattccacctgctgatagaatgctctgcactcaggagcaccttaaaacatttatttcatggcaca

SEQ ID NO: 394995 - DNA, 241 bp, Homo sapiens
ttgattcaaagtgccaaggacattcacatattttcgctattcataaccacttacccaagagggattaaaaagagagagagagagagcgcgctacataaaaatcagaggcttataaacaaatctgctctttgctgaacacatcatcctacagataaagcatcatgcgatacagcacaatgaaatggatctatggaacttgctagttcatcagcactctgcaaccaaagctacagttattatt

SEQ ID NO: 394996 - DNA, 225 bp, Homo sapiens
aggagggctacttttataagggaaaacgcatatactattgtcaagaataaaaacttttttcagactgatcattttagaagaaatttgaaaaagaatatacttgtaaaaaaagacaactgaggccgggtgcaatggctcatgcctgtaatcccagcactttgggaggctgagatgggcggatcacgaggtcaggagtttgagaccagcttggccaacatggtgaaa

SEQ ID NO: 394997 - DNA, 306 bp, Homo sapiens
tataggcgctaggtcaaaaggcgaaagctccatggtaaacccctactttgccctatattcctttgagatttcacttcaggtcaaggaaaaaattatgttgaatgctgcctgggcttcatcccagtttggttctatttttgcatggaggcatgacttgtatctagctcccctttttagctctgaatctgttctgtcctgttaaatcagataaccactacctcccaggttatagcaaagttgaggtatgattctgtagagaaaacagcaaacccaggccctcactgctgatacatggcagttttcaac

SEQ ID NO: 394998 - DNA, 409 bp, Homo sapiens
cttagtttcatcatctgtaacatgaagagaataacagtaacatctatcttacagggttgtggtaaggactgaatgagggattcatgcaaagtttttagaacagggcctgatatatagtattgctaaataaatattaacatttgctatcactgcttgaagcctcatattgggtgttattcccctttaagccttctctaatccttcaagtctagattagcccccatcttggatgcttctatagtacctcatcagttatgcctaaggtggcactcatcatacttgtccatgctcctgccctctgcatcaccttctctcccttccaattatattttctgtattcacctttagatctgcagtgtctagtgcaattttatttttagtctctaaacttgtggcaactttctcatca

SEQ ID NO: 394999 - DNA, 359 bp, Homo sapiens
ccataaatttactttgggaggcatgagaatgtaacatagagccgtggatcactaaagtctaacaactactgatatactcaaaaggcagacaaatctattgtcatatcagacagacaaaggttatggtggaagaggctgttacaacaataatgagatggtgaccatccggcatggagcaacaggtgccaaccaggatacccagtattccaactcctagtccaataaactttccaccctgcgtgaagatgcattcatcccgtgcacacttagaacacgttacagcatttactagcttatatccagaaggaaggtaaacttttcaaggcaaagctaaaatacaatagtcttgagtcagtttc

SEQ ID NO: 395000 - DNA, 275 bp, Homo sapiens
ggcaagaagggaggagtaaaccagtatagcagtctagaaagttatccccaagagccaaaatgccagagcaacagacatgaagttactcttcataacatcaatactcattaagtttataagccagaaggctgagagactagtggaaacagggtatcacagtttttttttgagacagggtgtctctgtcacccaggctagagggcagtggtgtgataatggctcactgcagcctcaacctcctgggctcaagcaatcccgagtagctgggactatgg

SEQ ID NO: 395001 - DNA, 256 bp, Homo sapiens
gagaggcagtgggggccagaggcaaaggcccttcaatgccaggccagggagctggacttcatccgggggcagggaaggttttaagcaagggataccctggtcccctccagtgcctttcaggggacaagggaggtcggtaccgcataccttctgtccccaagttttctgtgcctgagctagccaggcatgctttccccacctgggttccctcagttgctcatggggtgcccctgactcagcttcatgcctgtggggg

SEQ ID NO: 395002 - DNA, 708 bp, Homo sapiens
actctgcctcagttacacaaataggaaatagaaaaacctctctttatgctcagtgtgtatcactcgaacttttcaagttaaatgttatcaagcagtaagtgtctgttcttcactctgacaatttctttgctgttccttgtaaaaagttctactgcgcattttgttgtggtaaaatatacataatgtaaaatttatcatcttaactatttttaactgtataattgagtggcattaagtccattcacagtattttgtcactatcaccaaaactttttcattaccccaaacagaaatctgtaaccattaagcaataattccccattttcccagcccctttctgtttgtgtgaatatgcgtattctagatacctcatataagcagaattgtacggtatttatcctgttgtgtaaactgattaatcagtttacacaaattacattgtcatgaaaaacagaagaaaaagccccaaagtctttttcggacctcccctccttacccaaaatacagacacacaggcaagaactctcataaattcaaattcatcatttgagaggttgaagcctccaaggattcttctagctccagggtacatccactgtatgcttccagatgttttttccagatttcaatgtagtgtggctcttctttttcttttagggctggggggcatcttctgcaggcagctggggcctgtgtgggtagctgaga

SEQ ID NO: 395003 - DNA, 542 bp, Homo sapiens
tctagcagaattagctttctgatcttggactatgatctaacctcattgtgtctcctatctacaaccagtcaatgcctctaaaatatgcaagaagaatgagacatagtaggtgtaattgtctagggtgccctgaaataaggatacactttctatagtgaatggacagtgagtaactggatcatgccagcagtggaacatctccattgctctctttccttggctgattcaatcatagcaacccagcagcgttttcagagtatcttccagaatgatacaattttcaccttaatcctactctgaactgatttgcaaggcaaattagtgttaatctcctgcttatttgaatagctggtttctggcctatatacaagaaaaagcatattataaaaacacactcaggccggcgtggtggctcatgcctgtaatcctagcactttgggaggccaaggctggcagatgacgaggtcaggagttcaagaccagcctgaccaacatggtgaaaccctatctctactaaaaatacaaaaattagccgggggtgg

SEQ ID NO: 395004 - DNA, 291 bp, Homo sapiens
gctctattctatttcagttttaaaaaaaatgctggttttcccttaaattgatattttaaactataatggattgcagtctccagttggaaaaacatggacttaaaatttaaaaatatgaatcttaatttctgctttacttaaaaatcagtaaagatgaattttgaatgaaaatgtacaaggtaaaataaaacctaggtgtggaagaatatctttatgacgttagaagaaaaaagatttcttgagcaagatgacagcataaataagaaaggaaacaattgacaaattaaactt

SEQ ID NO: 395005 - DNA, 427 bp, Homo sapiens
acgtgaacatttttatatacatacacatacactcattaaatatgctgagtacttttatgtcataggcaaggaaattggcactcagagaggttcattgtttatagccaattggtgctagaaagggtcagtttaaatccaatactgtctgaccacaaatcttatgccattaatctcccagtactaatcttaaattctgggcactttaggaatgctcttagcattctatactgttctcagcgtacttcagtttagcctagttagtctagaaaagttcttgacctgtattatcttaaaaacagatcgggcacttttcttcaagttgcctgcttggatctcttggaagtgttctttcctttctttcctgttctaaagtctttttaataaatttccactcctgctcctgctctgggaaacaaacaaacaaaca

SEQ ID NO: 395006 - DNA, 332 bp, Homo sapiens
ctctgtgcctttgtctccatgtaaatgaacagcaatcataatacaccaaggtaccaacctcgtaagttggttgtgaggatttaatgcactaatacatgcaaagcaggtaacaaccactcaatcagtgtgaactattactaattttttttttctgagatggagtgtggctctctcactcaggctggagtgcagtggcacgatcttggctcactgcaacctctgcctcccaggttcaagcagttttcctgcctcagcctcccaggtagctgggattacaggcacagccaccacacctggctaatttttgtatttttagtagagacggggtttca

SEQ ID NO: 395007 - DNA, 537 bp, Homo sapiens
ttgggggacttctggaaagtaaataaggatctgagtaatttgttttctaaccatgtaaactattcttgcaaaagtagtatctctgatagctataacttcattttttatcacttcttcctatttaaagtactattataacatgctaacttgtatttctccctctgcctctcttctttttcagtattttatatacacatcacttcttcatgcagagctgcaaccatactcctcttagcttctgccaaaccagactattatgtagtctttgaacatacctaaatataccctggctttgggcttttgttcatcttgtttctcctgcttgtcaataataagcattgcttgaggaacttctatatgccaagctctatggcaggcataacatagtgaacaagaaatggcttgtgccctcatagagtatatactgtagtaggggagagagacaaaactcagaaagacacatgaaatgactgcacacaagtgccaagaaggaaacaaacatgaagcaaagagagaataatagttgttaactactta

SEQ ID NO: 395008 - DNA, 125 bp, Homo sapiens
aatggtgggtgccaggagttggggaggggatggagagtgagtgtttcatggggacagagcttcagtttgggaagataaaagagttctggggccgggcgcagtggctcatgcctgtattcccagca

SEQ ID NO: 395009 - DNA, 228 bp, Homo sapiens
attactctgcttttttggaattctgaaccatatgaatatattatctactcacaagaacttaaaaaaacttttaaaagaaaattgtttgtacaaaaatttactaacatcttaaataagaacactagttccagttcttaagctgcttttcatggggcccttttcctgccaaaaacggggctcaggaggggaaagcattgtctactctccctacagacctgaacttggatg

SEQ ID NO: 395010 - DNA, 497 bp, Homo sapiens
gtcaacacaagtctcccagccttacaggcatttaataaaacactcaatactttggattctgttgattgctatcagggtttttcctcttcttcttctgcttctaaagggctcagttctttggacctgattgagtgctataaggcagttcattctagggatccttggaatgcatatacccaaacaaaggccttgtgccaaacataaccagcacgtacaccatttttattttcctatgaccaatgacttagtttctgtggtcagttagtgacattagccatgtagaatcacattgaggaagaatgcaaagctttctatgagcccctgacagcttcagttttcctctctaataacatgtatgaatcagaagccactagtttgcatttcagaaatatttgtggtagttaggaaacatactgcacttattgtattcccatagaaatagagtgtccttgggaagaatggaaaaatggcactgagacatccaccaagatataggc

SEQ ID NO: 395011 - DNA, 340 bp, Homo sapiens
tgcaaggcagaggttgcagtgagccaagatcacgccactgcatttcagggtgggagatgcagccaggccctgtctcaaaaaaaaaattaaaaattaaaaaaaaaataaaccattagaggaataaatctgcctgaaccagataccaaacacgctagctgtacaatttccgtctttgtgtttctcctacaccctaaaggaaaaaccacaaacctcaatgtcaggctacaagatcttactgttaaactatctggtggtttggggtcgcacaaaatgggaagcactgatagtttgaatgtgacaccacacacccctccccttccaccccccacatccctaccca

SEQ ID NO: 395012 - DNA, 335 bp, Homo sapiens
gtacaagggggcaggagggatgatccccatggggcatggccactggctgtgagaaacacaggagagaggccaggcagctgcctgggcagttaggttcaccactgcatgatggcagcattgagcaggttggcttccttcagggtccagctctcgtcagccagctctttgtttgggaaagtagtcatgaggataaagctggtggcagccatggctggccgggcatccacaatgaagagttggatgttgctgatcctgtggctgtggttaaatttctgcaccagcctcccaccgtctgcaagccgaatttggatgtttgtggtagtctctgattcgac

SEQ ID NO: 395013 - DNA, 115 bp, Homo sapiens
tcaggtaggggcttctagattcttatattttccttaaaggagtcaaattcacacaaagagtagcatggtggctgccaggggttgggaacgaggaggaaacgagtagctatttttt

SEQ ID NO: 395014 - DNA, 390 bp, Homo sapiens
aatccctatcctactggagcccctttccttgggttacttcacagattatctggtttataatactgattctagaaaagtcgagaactagcacatccaaaatagggtggtctctgaaaataatcagcgagtaaaatcccaccatgtctattgtctcaacactttggttctgaggtctgcatgctatctctgactctctgtagcgttgaattgaactcaacaactttccctccaaaaccagctcttcctcttgacatccctctgacaccattttaccactttcccatggtccaaacccaggattctttgactcattctgtcatttagaatcttatttgggcacctaataggtacaggcacatagaccctgtagcccaacagctgaaatttgag

SEQ ID NO: 395015 - DNA, 307 bp, Homo sapiens
ataatcaatgcttaatgcacatttgagttaaagtaacttaatgctaggaacgatgtaagacagttaactgagtaagtaggggccgaacaaatgatggaggtcatgagtgctgtagaattgaaggaagagaggttattggactatcacaggcttgatgggcctcagagagagcgtttcaggcagggaaagctgtgtaaacaaagacagggaagcaggcaaggacaagattgtacaagaaatagtgaaaaagactggcccacatggagtagtattggagaacttttaagtaggaagttgtgaagggaca

SEQ ID NO: 395016 - DNA, 324 bp, Homo sapiens
aggggaactgggaagctggggagagatgaaggatcactttcgtgtcatttataaatcttactcattgaaaacaatcgacttcccgatgcaatgtagtatcccagaacagaaaaagggccttagtggggaaactggtgaaagcagagaaaagtctagttggtagtgttgtaccaatgttacatttcttgttttggcaaatgtacgaaatgtagttttcgtggttgtttcccagttcataattctgtcctatacatttcttctccctcctctgtgtggaactcacacagaaaaccttgaacatcttccattgtttcctgtgcctag

SEQ ID NO: 395017 - DNA, 653 bp, Homo sapiens
ctatgatcatagactttacagatttttattttctgataatttgtattcatccattcattttccaacctgctttttccagttcaggctcttggatggtgagagcctattccagcaactcagggaaccaggctggaaccagccttgaacaggacaccgtcctgttgcaggatgcccccatgcacacacgcacactcactcagacatggacaatttagacatgcctgtgaacctcttacgcacatctttgcaatatgggttttttttcccttatttcattaaaaccgaatcatgatgaaccaaacaacattatttgagaacctgctgtagtcttttttgacgttagtgttttttctatattataaccattctagtgtgtatgaaatggtatctggtttttgttttgttttgttttgggacagggccttgctctgttgttcaggctggagtgcagtagtgagatcttggcacactgcagctcagcctcacaggtcaagcaatcctaccacctcagcctccccaacagctgggactataggtgcatggcatcactcctggctaatttttgtagaaacgggattttgccgtgttgcccaggcttgtctcaaactcctgagctcaagggatccacccgccttggcctcccaaagtgctgg

SEQ ID NO: 395018 - DNA, 273 bp, Homo sapiens
atacatatacgaatcgagctgttaccagatatgcagagaaccccagagtaaaaggggaaagagacccggaggagacagggacggagaccggagaaacagacagagacccagagagacggagacagagacccagagagggaaacagggacccagagagagggagacagacagggagacagaggtgagaaagagacagagactgggagaaggggagacacagagacggagatagatagacagatgagatccaagaaaggacagagacctggagat

SEQ ID NO: 395019 - DNA, 667 bp, Homo sapiens
gtgggcgcctgtaatctcagctactcgggaagctggggcaggagaatcacttgaaccccaggaggtggaggttgcagtgagccgagatcacgccattgcactccaggctgggcgacaagagcaagactgttgtctcaaaaaaaaaaaaaaagcctttaataaaactatgggaaaaaaaaaattttattacatactgttttaaccaggaatgtatctgaaacaaaaggctacagaaatattgaaaattgaaggtaaaataatggaaaaagatattacatgcaaatactaacaaaaagaaagctaacataaattattaattttagacaaagtagactttaagataaatgacattactaaccatgaaaaatactacataatgataaaaggtttaatttaccattatcaattattgtatgagaagatataataattctaaatttgtatacacttaataatatagttccaaaatacataaagcaaaaaatgaaaaatctaaaaggaagaatagacaaatctgcaatcttagtgaaattttatgacaccttttagaaactgatagaatatgttaatggaaaaaattagtaaagatatagaaataccatgtttaacaaacttgacctaatatacattcctagaacactgtactcaataactgcagagtgaatat

SEQ ID NO: 395020 - DNA, 260 bp, Homo sapiens
cttgaggaaggaaccttttggtaagatgtgtgcatagtgtgacagcgcattctatgaatgactgaggaactaaaagaagtcaagacagctggagtttcttgagcaaggaggcaagtggagggagatgatgcagaaccaagcactggctcccatcacaagggccttggatgccataataaggatctggtactttattctaaaggtcttgatgtctattaaaaagatctcaagtacagattttggaaaagactgtgccagcc

SEQ ID NO: 395021 - DNA, 431 bp, Homo sapiens
tgactccagagcatggcctcttcaccatgctgctgtctttcctcagtttctctctcatgaaaacacagaaggaaaagtcacctgcctgctctccagcccttgtttgagccaccccaccgggggcttctccaagcccagaagcagccaccaagaggggtccagggagcagtgtgtgcaccaaaccctactctgggtgcttcttgacctttccctcctttaaccctcatagcaaatgctggaggtcggtgttattatttgcattttacagagaagttcagggacttgttcaaggtcacctggtgcacaggagttgggactcccaccgaggcagccgtgcccacctctgcagtcagcacctcccaccaccacaccagcccgcctggttaagtgaaccaagctgaacaccctcacagacactaaatttatatttc

SEQ ID NO: 395022 - DNA, 569 bp, Homo sapiens
ggtttttggaaatatttcattttgctttggaagccactcgagcaaacagttatttaaatgtacacatttggcagtacaattccatttttgtttttaaaactgttcatacatattcatagactaaagactgggaggttatataccaaatgttaacagattctcaggaaagaagggtaatgaaaagtaattatttttcaataaagggaatgtaggtgatcttaatacatttttttctgcttatttctattgtccaaattttctgcagtcaacatgagaaaaatctattataatagtgaccggtaagaatgattgatatcattttcctcaagaaatgtctactgttgaggttaaaatcgatattccacctattttaaatggcatgctgttatttcccaatgttatttttctttggagtgagaagtttgttttttgttgataatttgatttatttctttttaaaatttctttaactaggtaatgttttcatggcacaaaacttaaaatgataaacatttctacttctttttctgttgatttcttttataacactttgttgcgtggctgtggta

SEQ ID NO: 395023 - DNA, 672 bp, Homo sapiens
aacagaatatagagcttcagaacaaacccacacgtatggactttagcatatttcagaagcagcaaatcattgtggaaaggatggactattcaaatccttgtaacaaggatggatgatacatgatggaaaaagatgcaactgaaaactgtattacatcagtacttataatttttactcatcaaagattccatcaacaaagcaaaaagagaagctacaaacagagtatatttgcaacccatgcgaacaacacgtttaatattaaaaccaaaatgtagtgtgtatactcataagtgtgtatatatgtgcacacaaatatgtacgtatacataaatcaagacaaaataagtagaaaaatgggcaaaggatattcaggggcatttcacagaaaagaaacaggactggtcaaaaaacatgaaatgatgttcaatctcattggtaattgcaaatacaaattaagagttcagtaaggtgtcatttcacgcacacttggatgacagaaatttaaaggctgacattaccgagtcgcgaagaagatgtgcaacaaataatgccaactctgtgctgctggcaaagtcaaaccaaagaagtgcaagcacctggaaaacgaacttggcattatttttctttctttttttttttcttttgagacagagtctcgctctgacgccaggc

SEQ ID NO: 395024 - DNA, 501 bp, Homo sapiens
gatgcaggacggggctgcagaacccacacaagctttgaggtcagacagtccacgaatcccagctctaccacccacagcttttcctcttctcagctgtgtggccttgggcaaattgcataacctctctgaaactactgtcatatctttaaaatgagtaggaaatgagacctcctttgcaaggtaattgtgaggattaagttgtgagggttaattgttctaggtgctttcacccagaacaatacaccagcatataaaactgacctccaacaaatatgaagtcactttatccttgtctggcctgttctgcctcttcaattctatgcaatgaggcataaaaactcggatgtcctgggcctccacgttttacatgtataaaactggggtatcctgtaatcccagcactttggggggccaaggtgggcagatcacctgaggtcaggagttcgagaccagcttggctaacatagcaaaaccctgtttctactaaaaatacaaaaataa

SEQ ID NO: 395025 - DNA, 371 bp, Homo sapiens
gaaagacaagatggaggggaacagcgctctcagctgagattagaggggtaggcaagggccacaccacttagggccttgcaggtcgcagtaagcagcctggattttatgccccctcagtgatatgagaattcaccaaagcacagaagagttaactgtctgacttatgttttcaacagatgagtctggtctgacagatcagaaagtaaataatacactcctgcagttctctattaaaatgtctcattttagttgatctttccaccgaaacccaagagaggtcttggcttaattggtattaaagtgtataccagtaacatttcagcaggaatccaccaggatgaaagaagcatggaggaccaggagacaggaaa

SEQ ID NO: 395026 - DNA, 248 bp, Homo sapiens
accagcctaaatttgattaaaatattatattaccaaggaggaacagaacactatgtagttatgggaaaagtggggttctaccagctcttgactaactggcactgacagtatcacagacagctaaaacagtgactacacacacatagtaaagggattcatctattaaatttgcctagggaaagttacagtgaccaactttttttttttttttttttgagacagagttttgttcttgttgcccaggctgg

SEQ ID NO: 395027 - DNA, 337 bp, Homo sapiens
ttttcacccattctggtgtagggtagatcaatcaattaaaagaaattgcaaaggctatatgctatggtttgggtgtttgtcctctccaaacctcatgttgaaatatgattcccagtattgaaggtggggcctaatgggaggtgtttggatcatgagatgaggacagatccctcatgaataaattaattgtgtctcttggaggtgagttcttactcagttcccatgagagctggttgtcacaaagagctggtatctccccaccttcttgcttcctctctctccatgtgatctctgcacatgccagctctccttcaccttctaccatgagtggacacag

SEQ ID NO: 395028 - DNA, 167 bp, Homo sapiens
taaaaccccagaacagagaggaacgaacccaaacaggcaggaacaaccctgaacaggcagtaacaaccctgaacagagagtaacaacccttggtggagcacttagtaaatggcagctggatatagctgttatgagctgggtatgaggaagaacttccaaccatcgga

SEQ ID NO: 395029 - DNA, 284 bp, Homo sapiens
ttgcaccatcagacacacatgccagtccagaagctgtggtcaggaggagcagggacacccttcacctttgcagttcagtccctgggcccttctccagaccccaaatgtgcagtcacgtggcaggaagccccagggagaggggctggagcagcgctctgagtggagccacctggtacactcagggctaagtgtgtggctgggtctcagcaggaaactcggccttggggagccaacgcagcctcacaagcaagctggggatgaaggagcacctctggggcctcaga

SEQ ID NO: 395030 - DNA, 430 bp, Homo sapiens
ctgctgtgaggaccttcttttgcctcttcttcactttggtgaccactcccacaaacacagcttggatctggtcactaccaagaataggtccatctccaaaacttggattttgcactctataaccactacctctcctattctgcaatcttccctcatctaactttcactaactgttttcttttgttgttgtttttaaatatatattttcctctttttaaaccctgtttcttgaacccaaactttctgctcctcaatcttcctattgggactgacttagctcagctttaactatccagacggtttctttgctgccttccagaattaccctcttcaaggtgataggagaccctcttcaagtcccagactgaacatggcacttctaaacttaaacatgcaatctggttcccctttgtgcaaacccacagggccc

SEQ ID NO: 395031 - DNA, 402 bp, Homo sapiens
cttctgtaggcaactccacagctacaaccagaaggccattttgttacaggcctgaaagccccgttttctttttattcttctttgaaacctttagaaggaacaaagtattggctactttttaccgctgatgtcagtgttaagaatcttgtgataacatagatttactctccctgctgaaaatcactatgtggctcatcagtaacacaactagacatgatgacttaatgcaaaggaagtcctatgtaaatgagcaatgaaattgcaactgtgtataaggaacaaaatagaatatgaaactccagaatcttttgttttcatttctgtttctcccaaggctctatcattcaaaactccagaatctttcagcatgcaattgtctcctgatatcagcccctctcttgt

SEQ ID NO: 395032 - DNA, 676 bp, Homo sapiens
tcaggcctttaaaaaaagaaatgttatactcttctaatggttagatttgcagtaattctcaactctgcatgttagaatctcctggagaacttttaaaaacacacgtgtccatgccccaccccagaccaattaaatcaggaactctggagtggggatcaggcatgattgtttgcttgtttgtttttgtcttgttttaagctttccaggtggttctgatgtgtggccagggttgagaactactgctgtttaaactttagaaaagcgtaacacttttaaaaggttctattccatgtgatacctcttatcctttcacatcaacaaataacccctactttccatttcttcttcatgaaagatagtgttctcatttctcaaaattagaaggcatgaaacaaacatggttaaaagagaacacaatatagtagctatacaaaatatatctctaggccctaaaaatttgcttttggggcactgaaaagatatgcagataaaattgcgtagccataagttcttaaagcttatgataaatgagagtggccaaaagacaggaattgaggaaatgtcaacccagtagtccaaaaggtgactcatggacaataaataccagctgataaaatcgaagctgtttcctgggaaaaaattatagaatgcttaattaaaaagataatttgtgaga

SEQ ID NO: 395033 - DNA, 584 bp, Homo sapiens
aggcagaggttgcagtgagccaagatcgtgccactgcactgcagccagggccacagagcgagactctgtctcaaaaaaggaaaaaaaataaaaagaaaagacctaatgagtgctgacagtggatcccagctccagagattctgaattaatctggttggggtacagcctcgtcattggagttttgtgatgctctctagtggatttcagcatttagtcactgctaaacattgaggagcacttctcaaaccttcatgtttaggaaatcacctgggcaccctgtgaaatgcaggttctgactcagaaaataggggcggggcctgaaattctgcataatctgctgctggcttgtggactccaccctgggtgacagagcaagactctgtcttaaacaaacaaataaacacaacctggcacctctttcttctctctctcttgttctctcaccatgtaacatgctggctcctttcctcttgccatgattgtaaacttcctgaggccctcaccagaagcagataccagcattatactccttgtacactctacggaactgtgagccaaaataaaactcttttctttataaattg

SEQ ID NO: 395034 - DNA, 476 bp, Homo sapiens
ctaggcatggtggctcatgcctgtaatctcagcactttgggaggctgaggctggcagatcacaatttcaggagatggagaccatcctggccaacatcttgaaaccctatctctactaaaaatacaaaaattagccaggtgtggtggcacgtatctgtagtcccagctactcaggaggctgaggcaggagaatcgcttgaacccaggaggcagatgttgcagtgagctgagatcgcgccactgcactccagcctgggtgacagagcaagactctgtcttaaacaaacaaataaacacaacctggcacctctttcttctctctctcttgttctctcaccatgtaacatgctggctcctttcctcttgccatgattgtaaacttcctgaggccctcaccagaagcagataccagcattatactccttgtacactctacggaactgtgagccaaaataaaactcttttctttataaattg

SEQ ID NO: 395035 - DNA, 140 bp, Homo sapiens
tgctaggaagctcattggagaccctaacttggaatttgttgccatgcctgctctcgccccaccagaagttgtcatggacccagctttggcagcacagtatgagcacgacttagaggttgctcagacaactgctctcccgg

SEQ ID NO: 395036 - DNA, 313 bp, Homo sapiens
agccagcaggggaggggaggaggaggaaagacaggagggactcaggcgacgaaggtaggacttagacacgtgggttctggggccagtttgggattgccttggacgtgacaccacaccaacaccttggaccttctggcactcctggccctccacatccccactggcatgggggggcagggtccagggatcagcgaggatccttccagcaattcctctcctctactgaatcttgagccaaggcgtggggaatgaacatgccttcccctctgccttggtggctccttccttgaccactaaccactggggttccttg

SEQ ID NO: 395037 - DNA, 496 bp, Homo sapiens
gtattctctctatgcgttctgcctcctggacttaaataatcaaaaaagtaattctagattcccttccactaaccaaggctagatacccgaatttactgtgttttttgagaaacctttgaaaggtctgacctagccatacatcagagctgaagaatctcagcgaaccatgtccatttctggggtaaggtggtttaggataggcagagcagcctcagcgccccaaattcatttcagtgttcccacgcttgagcagacttggtcttaattttctcgtttttcatcagatttgcgtttatatataggagcagaaggagttgaaagtgaactcttaagagcatatttgacatggaattagattgatgttatagcaactataggtaaaaaaggattttatagttgaaaaatttgaaaagctcagtattaagtatctgttatgatgtagtactgtgttaatgtagactttgggcagtttggggatcaatactattttaaaaga

SEQ ID NO: 395038 - DNA, 356 bp, Homo sapiens
ctaggattacaggcatgagccacaacacccagcctcatgtaatttcttaacatgacaattcccaaatatgctcaaacatgaaatatggttctctagagaagttgattatatgtctttaattcacttatatcaaataactcccttaatcattaaattttttaaatacagcctaatcttttgtgttgttcttcacccaacttttctttctcttttcagcaggataggaaaagtaccatataattattaaagccatcttttgattacaaagtactgacaaatgtgtttctttaccatcttttcttctaatttggtaatgtcagtcctaagtgcacattagaaccatctggagaagtttt

SEQ ID NO: 395039 - DNA, 290 bp, Homo sapiens
tcgagaccagcctggcgagcatggtgaaaccctgtctctgctaaaaatacaaataattagctgggcgtggtggcgcatgcctgtaatcccagctacttgggaggctgaggttcgagaatcacttgaacctgggaggctgaggttgcagtgagctatgattatgccactgccttccactgcgttccatcctgggtgacagagtgagattgtctcaaaagaaaaaaaaataataatcctgcactttgcactaatttatattgttcttaatgtctcctccaaaatgttaaata

SEQ ID NO: 395040 - DNA, 402 bp, Homo sapiens
aggatccccgccgctctctctgtggcgggactgctctccctgtggggtctggtccttttcttcccaggtcctcagcgctgcctgtacgctctctctgtggtgggacgctctctctgtgggggacgctctctctgtggtggttcggcgccttgcctctttctctgcacctccagcagcctgaactatgcccacttgggaaggacgagatcgtcggacgctgggagaggctccctccatgtcaggcctgctctcgggctccacgtggataatcagctccacacctcatccctcatggcaattctgcttggctttggtttctactgaggtaaaattcatgtaacataaaattaaccactttaaagtgtccaattccgcagcacttcatctgctcacagtgctgtg

SEQ ID NO: 395041 - DNA, 260 bp, Homo sapiens
cagtgctcctcctcccgtcccctccttgggacttggattttgcttcggcttctgtgagcatcgcttccagtacctcggatactctttcagtgaagcagcaaccgggaatcggctggcccttctgcactctcctcccagaccccgccctggctggcagcccgacgctaccacttgggcctggctcatctctgtcccatgacagaccccaggcgcccctcctgagcccccggcctctgtggaaaagattcacatcctccagc

SEQ ID NO: 395042 - DNA, 271 bp, Homo sapiens
ataatatgccacgcaatagtcaacgtcctgcttctatccaaacccacggtcagagtcaccaacctcagcctgtgtccttgcccatcatctctcaccaacctcagcctgtgtaattgcccataatctctcaccaacctcagcctgcgtccttgcccatcatctgtccaggcatctggggtagctccatgattactgcagttccaatggcttcatgatagtaagagcaacacttactgaactttcagttctaagccagagcctcctgtaagca

SEQ ID NO: 395043 - DNA, 284 bp, Homo sapiens
tgaaataaatgtgagctatgtacacatttaagagagattaataaaaacaagtaagataagtaattacctgtttattctagttcagggtcacaggtggctggaacctatcctggcaactcagggtacaaggagggaaccagccctagacagacaccattccattgcagagtgtactcacacactcccactcacacagactggggcaacttcaacacactagttcacctaacgtgcacatatttaggatgtgggaggaaaccggactacctggaaaaaacccatgc

SEQ ID NO: 395044 - DNA, 778 bp, Homo sapiens
tctcttgctccacacactctacccagaccatttactatgccaccccactttacaaatttccagcattccctctagcactgatgaaaggaagaataagaagggtcttcccaaaattgggaaaagctggatttggcggggggtggggaaggaaacgaagagtaatctcgaaatatactttggggctttgagaaagatctgaaatgttccaaaaagtgacagaccggggagagcagagaacagaaacctcctacctcatctctaccactgcagtaattcatgcactaattatgtgtaacatcttttaaaactggaagaatcacattaaggaaaatgaaaacatgaactcataaaattgcttcccagataatttatctaccaaactggctgaaagcttatgatactacaaatgtttcctagcaaagtggctattagaatcttagtgataatcagcaaattggtggctacttggaaggactggagtggcttaagtccacctggtggtatgggggaaaggcactgacagtgagaaaggagcaattcccttcattccccaaaagcagagaagagtattataatgggtttcctgaaaactgtattagaaaaaggatcctaggccaggtgtggtggctcacgcctgtaatcccagcactttgggaagcttaggcaggcggatcacgagctcgggagttcgagaccagcctggccaatatggtgaaactccgtctctactaaaaatacaaaaattagccgggcatggtgccgtgcacctgtagtccca

SEQ ID NO: 395045 - DNA, 400 bp, Homo sapiens
accccatctcagacagacagacatcttattgtaccacggtgctataacgcgttatagcaccgtgataatcagcaaattggtggctacttggaaggactggagtggcttaagtccacctggtggtatgggggaaaggcactgacagtgagaaaggagcaattcccttcattccccaaaagcagagaagagtattataatgggtttcctgaaaactgtattagaaaaaggatcctaggccaggtgtggtggctcacgcctgtaatcccagcactttgggaagcttaggcaggcggatcacgagctcgggagttcgagaccagcctggccaatatggtgaaactccgtctctactaaaaatacaaaaattagccgggcatggtgccgtgcacctgtagtccca

SEQ ID NO: 395046 - DNA, 334 bp, Homo sapiens
gccactaaatcccagggatccttcccagcttttcttctctttgatctccatggcatttggttttttcaatggcttttatttttggaaacactctcttgcttagcctcagtgacatttcccattggttttttttttcttctcattcttgaccatttctttttgttttccttcctggttcccactcccagtcctgccctttaaaggctgctgtcccacaagggctggctgtgtcgtcttcctctctcatcttgtctctgggcagcctcatccatctgtgtccatggttttaactaaccctacctctccttctaccttcccccaaccccactgccca

SEQ ID NO: 395047 - DNA, 744 bp, Homo sapiens
gtattcaaaaaggtcagtataatgtttaagaagagtttattcaactgcaaagctaaggtccctgcaaacacagattccatagaaaggaagttagttttccaaagtgtagaagtttggagtcacttatacagacaaagctttctatataaggcttattgcagagttaacaaaaatctgatttgttgaggtagtctttttgtttcaggaaaggtatactcaacatttcacactaaagatgtaactgtcatggggtcttcggcaccatccagtctgaattaggccaataaaaggacaattaatcccaaagatcagtgattggaatggggaatgtctggtgtctcctagttatttactgaacaagatcaatgagcaggagctattatctaagaaactgtaagaaagagaattgcacacattctgtgtgattcagtttctagggtttaacttcccccttggcatgataaatttagagggtcctgaagttttattttctttctgtgagtaactcaggagtgtacaatatgggctgccgtgagatgtaaccaaaggaacagtaaatttatagagaaatgacaagacaaagggaaggacttgaagttgccatgggaagcaaattgtggaaaggtaaatatttggcagaagttatatagattaattctgtgctgcctttaggcttgtaagaatatagagttgtcttcagaaattaagaatcaccctgtcctttcaagtagaaaggaggatagg

SEQ ID NO: 395048 - DNA, 444 bp, Homo sapiens
aacaaaaaacggataaatccaggcataacagagtagcctttagcatactaaatcctttcactggaattaattacaaaatttaacagactttactggtaaggggactttccatgacaaaatagtggaaacccaagcagaaaacagcaggagacagttagaagtactggattctaaagtagctggaactcaagaggcacaatctgggagaggagggaactacagaaaaataatatgcatagaaatctcccctcctccaagtcattggcggactcctaaactgcacatttacagagtgagacttcaaaaacttaacagaacacagcagttaaacgtcaaagagctaataagattatagcagctatgctgagttgagagttgaaatttaagaccagcaagatagaggggttttggtaaagacctggatttcgggttgagactcaagga

SEQ ID NO: 395049 - DNA, 750 bp, Homo sapiens
tgttctaaatgcatgttacattgctttcttaatctaactatactgagcagagtttacactttatactgagcagagtttacactttatttgaagtttcagaaatagcattcagaacatcttcttttgtacaacacagcaacttcaggggctcttcaagatttcccaggttactaggttcttaaggttcactcttttaagagagtttctttctttcccattgtctaagtctagactaagatccaagtttacttccagcatttctttatctttatccttcttcatttgcagcttcttcttgtttatgctttgggaaaccagatgaagaaactggtccaaattacagtatacctaaaaggagaatttacagggtctctgtggcagaatggagttcccgcttgtaaataaatataaaagttttagtgcaaaaagatatgcaatcaatttttactgtcatcatatctgttaaaattattgttgatttctctcagcaatgttcaatacagttgaggtttctggataagttatctaagtatatacggagtatggtcatacattaaaaaaatacaaaaggtttcagacagcatttaatgtcattcttcaaattcttattaaaattgcatcgtatttatctatagacaataattatccacctaacttgtttgaatgttctataataatgcaaaatgtctatgattgcaagaaaagtgagtttttaaaatttttggtcttttggtgtgtttttttctcatt

SEQ ID NO: 395050 - DNA, 343 bp, Homo sapiens
agctaccattttttcctcagatctgggctatatttagcttgtgtgttttttcctcattttcctcaaaccccagaatgtccccaggaattcaaggagtctggaggttaatgcccagtcttaagtatttagtcatgaaaattaaatttgaaaatattctttcaggaaccatctcactgactaaaaccatgactgatttaaaatgctacttaggaatatacaaggcagaaattttaaagatgatgcagagtgttatgactagaaagttctgatggaatcttttacccactcacgcattcattaattcataaaataaacgtcttttaagaacctgtgctgggccaga

SEQ ID NO: 395051 - DNA, 185 bp, Homo sapiens
tgagccggaccgacacatagaatgaggagggtccatatattaacaataactttctaaaaatttttaggactactaatgcctgatacttatgagtacttatatgtgtcaggcagtgtgctaaaggccttatttgcatcagctcacgtaatcctcataaccacagtaaggcataggtattattattc

SEQ ID NO: 395052 - DNA, 151 bp, Homo sapiens
tcctgtcctctgtggctagagaaagccctcttctgggtgatcacagcggttccttaggatctccccttcaacattccttcatcgttagttggttcttcccagaaggtaagcccaatcccttctactgcagtccctagcatcctctccgttg

SEQ ID NO: 395053 - DNA, 318 bp, Homo sapiens
tgagcactcatcactgctggggcattacacttacatcacttttcaggacttttcctcttctctagttttttgtttttctttcatttaattttggagtacggaaggcctcccatatttatatagaagaaaagactgaacacataagaaatgtgaacgtctgtgtacacagtgtccacggctactttcgtgctccaatggcacaaacagatggtactgagatggcacggctctcaaagcctaaaatatttattatctgattctttctagaaaaaggttttggctgggcgtaatggctcacacctgtaatcccaatacttt

SEQ ID NO: 395054 - DNA, 231 bp, Homo sapiens
gtttggactgctataaaaaacataccataaactaggcagcctataaacaacaaatatttacttctcacagttctggaagctggaagtccaagatcatggtgctggaagattctgtgtctggagagggcccacttccacgtgatggaaagggcgaggttcctcttgggtctctttatgagggcactaatcccatttattagggctctgccctcatagcctaaccatctccca

SEQ ID NO: 395055 - DNA, 416 bp, Homo sapiens
tgtaagtcagaagtgcccacaagttggagccattaggttttaaatgacagaaacccaattcaagctagtaagcaaaaagagaatttattgtcttacacatctgggaagtccggggctacaacaaacttcggtactcctgtttacggagttctctgtctccctcatcatctctggccctgcctccctgtttctttcctcaacttctcctgtgagaaatcactttctttggccaccagtagcccagcttctcatcctgagtttgcctgctccatggcaaaaagtgcatttctcctaacaacaattaatccaaccctaggaacattctgattgactggcttgggttgtaagcctttggcaaggggaaggtggtgaagatgttgtgattgacaggtttgcctggaccacatggaaagaga

SEQ ID NO: 395056 - DNA, 409 bp, Homo sapiens
ccaggctggttgctactgtgttgcccaggctggtcccaaactcctggtcttaagcaatcctcctgcctcggcttcctaaagtgctgggattacaggtgtgagccaccttaccaggcctaaacccaattcttaaaagcaggattgaaaagaaggaatgtcctacagcagtggtcccccacccctggggtgcgaaccagtactggtcagtggcctgttaggaaccaggctgcacaggaggaggccagtgagtgagcattactgcctgagctccacctcctgtcagatcagcagcagcattagatctcatagggcacaaaccctattgtaaattgtgcatgtgagggatctaggttgtgcgcttcttatgagaatctaactgatgcctgaggatctgaggtgaaagtttcat

SEQ ID NO: 395057 - DNA, 215 bp, Homo sapiens
aatggcactggaggaggagctgggtgaaggcacggggaggggtgagggcctgcaaggtgtgggcgacaggaaagcccggctgcacaccatcgccctctgcagagccaccgtcgtgctcctaaacatctggccacggcagcctggctcccaaagctcaccaagcgaaggaccgactgtgaagtgaacttcgtacccagagctggcaaatgtggctt

SEQ ID NO: 395058 - DNA, 310 bp, Homo sapiens
taaagtgactgcaaggtaagaattccataaatattaactcccctccccaccatatcagagaaccctaaagttgagaactgcatttctgtacatatcactatattaaaaacctaaaggggaaaaaaatggactattctagtgactacttgttcatctcccactcaaatgccaaaaaatgttttttcaagggaaacaaaatagtaggaaaaggaaggatgctttaaaaaaaaaaaaaaaagtctctcttctcccttgccctaaaaaaaaaaaaaaatggtttctagaacatcaaaagctcctcaaaggatca

SEQ ID NO: 395059 - DNA, 317 bp, Homo sapiens
ttggtaaaaggctatcagtaaaatggatttttaacacttggttgctcaatggaaccttaaaaattcctatgatctgcattccagggtatctgtcgtactagatttgctattgtcctgtttgttgaagcttcgtctatatgaaaccagttagatatattgttgggtatgtacagctattcaaatgtgtttggaataccatcatgcaaaaatatacataaaatgttagtcattagaatcatttaacagatcagcaaactgcaactcacagggtagtgattcccaaatccaggttacataagcttcctgggtcccatttt

SEQ ID NO: 395060 - DNA, 687 bp, Homo sapiens
ggattaggacaaacccgtgcaggaacaatggcaagtctttagcccgatcaggagcggcaatgggcgcctccctggatggggagcacagcggacaccctgtcggatccggaggtatggaagtcagcagcgggtctgcgacggtggcaaagggcggcaaacagcagctagtcctgcctctcactatgactcccggagctgcacctacaacatgtaccggcaataccggtacctgaccaccgcaggcgctgtcacccagtgctaccgcgccagggcccactccatccagatcactccaccagatgaaggtggaggtgatcgcagccagcaagtgccgccggccggctgtcaagcagttccacgactccaagatcaagttcctgctgccccaccgggtcctgagccgtcagcacaagccacgcctcaccaccaagaggcccaacaccttcttctaggtgcagggcccttgcctgggtgggccccaaataaactcaggaacgccccggtgaaaaaaaaaagacataaactgtaaatgcttagacaattggtcatgcctgttggcagagaacacagccccgcctccatgatgtaaaccaaaaataaaatcctaagtccccccaccaactgaatggaccctctcttggccaagaagacctcagagaaacctgaaaaactgtgttcttggccatg

SEQ ID NO: 395061 - DNA, 177 bp, Homo sapiens
tcatacttgtttaaaatatttttagaagttatatcatgaaattgttgcctgtccctgaaaagtaaaaacaatctactctcaaccaaaacatctatgcaatttcataaaacaaacaaagaaaaagggactaaacaatatggagagagaaatcaaaagaaggtactcagattgctggtg

SEQ ID NO: 395062 - DNA, 384 bp, Homo sapiens
agcaattcacccgccttggcctcccaaagtgctgggatgatagacatgagccaccatgctcggcagtgttcatctttcgtagctattgctagaccatttcctgaatgaaatgcttataccagtatccactttaccagcagtgtcctgtgtcttgcagctccacagtcttaccaacatttgctgttggccaagtgaatgggtagaaaatggaatctttgggaacttggtttctaggtccctgagccctgctgctgaatatctcctcttatgtttattggcatatgtgtttcctgtgaaatattcatgtcttttgccagtttttcattagggttcttggtgctttattttttgttgatctatagggctctttatatattgctgatt

SEQ ID NO: 395063 - DNA, 447 bp, Homo sapiens
gttctccatgaccctctctgggaacagacaatgttctcaatgtctggtgttgccatctgtccactcctaacaaggtcagaagttatgaggaaactgctgcatagaaactattctcttgggagttaatatcaattctagaagaaaatgtgtagagaaaataattcaaagttgtatttaaatgttcagagggggaataataccaggatcctttctcaaactgaaatgagccggctcatttcagtttcagggaacaaaggacttcaagcctgtgtatactcactcttctcagctccttcctgtgcgccggttaagggtctgcttgataggaaatgctacagccttggctctaaggataggacctcgtggggcctttctgtcttggagcattttacagtttctcttagaatactcagatccaatcagaaacaggggtaccgagctcgcaat

SEQ ID NO: 395064 - DNA, 226 bp, Homo sapiens
aaatcgagctcggcccatattaacgtggactgcgacaacagacgtgggggtcggggtgacatcacagctgggaggggccacaggccagggaagctagagaaggcagggacgcagatcctcctggagtgtctccggaaggaaccaggcttgctgctgacccctgaccccttgacctccgaccttcagaaccattagataaaagactggtgttgcttgtgtgttttgt

SEQ ID NO: 395065 - DNA, 683 bp, Homo sapiens
  misc_feature (24)..(24): n is a, c, g, or t
  misc_feature (33)..(33): n is a, c, g, or t
gtgacgatcgggtcggccccggancacactgcncatagcgagaccctgtctctatgaaagataaaaaataaaattagccaggtgtactggtgtgcacctgtagtcccgggtactcaggaggctgagatggacggatcactcaagcccaggaggtcgaggctgcagtgagccaggatggcaccatggcactccagcccggacaacagagtgagaatctgtctcaaacaaacaaaaacaaaaacaaacaaaaaaaagaaaacctaatgaatagaaaacttggtgaagtgactagagtaagtccttgtggtcgtctgactctcagcccctcaaagatgtccccatcctaactgctggagcctgtgactgtgttatgttacctgaggcgctgcaggggtgatgaggtgacaggccttgagatgggagatgattctggacaatctgggccagccagcaagggtccccataaaagggagggtcagaggaggactgcgacaacagacgtgggggtcggggtgacatcacagctgggaggggccacaggccagggaagctagagaaggcagggacgcagatcctcctggagtgtctccggaaggaaccaggcttgctgctgacccctgaccccttgacctccgaccttcagaaccattagataaaagactggtgttgcttgtgtgttttgt

SEQ ID NO: 395066 - DNA, 326 bp, Homo sapiens
tagcaatggtacctacagcttaaggttgataccaggttaaatgagttatccgtctaaagcacttataagagtgtatttgccattgttactgtgtaggctgaaaaaggacagccatgatctcactggattgtcacagcagcactacgagatgggtttttactgcctttcccatttttacagaggcctccaggcaaagcgctttgtccaaggtcactaggctggcaaatgccaagccagttcacacagcctgggaatctgaatgccggcaggctagctcagaagcccacgatctttgtgggtttgtttgtttgtttgtttgttttgag

SEQ ID NO: 395067 - DNA, 522 bp, Homo sapiens
tgaggctggctgactgtgtggacacttgcctgatcacttcaagtcaagccacctgggccaggctgattccaacctgactagggataaggtgaaaaggggaacggctctcaaagtttagcgtgcttactattttgtcattattaagcacttaccatgtgccaggcactgtgctaaattctttttttttttttttttgagacggagtctcactctgtcaaccaggctggggtgcaatggtgcagtctcggttcactgcaagctccgcctcccagattcaagcgaatctcccgcctcagcctcccgagtagctgggactacaggcgcccgccaccatgcttggctaatttttgtacttttagtagagaccggggtttcaccatgttggccaggttggtcttgaactcctgacctcaagtaatctgcccgcctcggcctcctaaagtgctgggattacaggtgtgagccaccgcacaggccgctaaattcttttatcatgtatcatcgctttaaagcttcacaaca

SEQ ID NO: 395068 - DNA, 321 bp, Homo sapiens
gctttagctaattgccactatactccacaaacttacttgagaaagaagtgtccagtggaaggtaagtggaaatcactgggggttccagaaaaactctttaaaggagtctgattcaacaagaggcatgcccttttccccttggttcttcctctttctgtaatctggtgtgcaggtgtgatggctggaaccacagtggctatagtgtgaccatgagggaatcctgaagatgtaggctatatactaaggatgatgggagcagaatgagaggaagagctagggtccctgatgatcttggagctctcaatccagccctgggctgat

SEQ ID NO: 395069 - DNA, 280 bp, Homo sapiens
gaacccaccgggcagcgagcctcctaacatgcagacccccgccagcaagcagaagctccgggggagttgagtgggggagcagcttctggctggagactaggaagtgctttccaacaattgtctgaaaatagaacggccggctcacgaggaaatgagtccccatcacggggagcgggaggcgggagcaggaagactgtggcgcagggagggggcccgtggcctctgaccccgagagacctgagtccttccgttcctcacccctgacatcccagacatccag

SEQ ID NO: 395070 - DNA, 539 bp, Homo sapiens
cagcttccctacctggggtggggtgacgactggccagaagatgtgccaaaggcctctctgtacatgagtgtagctgtctggagtggggtctctgctcttctgtatgccgtcgttcttgtcagatgtgtcacaggatgcctctgggttcagatgtggcgtggttggttgtggcacatggctctgcttcaggtcacaggatgactgtttctaggtcttggattttaggtgtctggtattggttttcctttttctggtacatgcccacctccttatgttaacatcctcactgtctaactactcttgttcttaacccgtgatgtattttcactcctgccagagaaattcagtctagtttggctttgtgtcttgacaggtccacagagagattgaacaggatcctaggggagatactctttggccattggtggttggaggtgatgaactgtttgcagaagtggatgcgtttaagagacagggtcgtcattgctgccctgatttctcctcacaaatggaaaactattaatgtatacaaaacaacg

SEQ ID NO: 395071 - DNA, 280 bp, Homo sapiens
aagtgattctcctgcctcagcctcctgagtagctgggactacaggcgtccacaaccacgcccagctaatctttgtattactttattgtataaaatgggaaggcaaaagctagcaaatttcatgtggaagcccaaaagatacattctgaatgcatctcacactcctaagatgccctcctgcaaatcatttatacataggaagtgtttacatttggtgtagttacggagaccagtaattggagagttcccagaaaatccagaggaagtcaagatgcccaaaa

SEQ ID NO: 395072 - DNA, 407 bp, Homo sapiens
atttctgcttctattattacattgataaatctcacatttaaccagactttgagggatatgctgttgaactgatgtaaatcttgaatcgaaaactgcggtgcaatcctcattggtcataatgtgtgggctgttttgcgcataataactgatggaggcatctcagttttaaagtttgagaatgaagcattgttcagttttgtcaccctgaatcaatcattttattttgtgcattgttttatcgtgatgtttttggaataaagattggttctaggaaaggggtgggtcatttcatttggtgataacggaaatgcccttctactttttaagtgtctttggtatgaggtggggccctaggtagggcctggatgtctgactgtcctgtcattttgaaaagctcccttttaaga

SEQ ID NO: 395073 - DNA, 308 bp, Homo sapiens
gtaaaccctccaccctcgtccatcattccaacaaccaacaataaaaataaataacaaaacctacttagcatagttttcttgctctttcttaagaaggggttactatttagatctaattatttaagattctctattggcccaggagcagctttcagtatcttccaagcctctttttagaacagatgtgcttttcctgtactgaacactaaaatactatgaactatcagagttctaaaatgtgtgtttttttaattcacaaattttgaacacatttaaaaaggggcaaaaggtatgtgataaatgaattc

SEQ ID NO: 395074 - DNA, 419 bp, Homo sapiens
aggggcaggcagagttcattatactattgagtctacttacatatatttgaactttactataataactttttttaattgggctagtaggatgagaggaagggcgtcacagaggaggtgccatctgaaccgcatcttacagggcatgaaggccggacgatgctcccaccgagacagtgcggggaggagccacgcggggaagaaccgacagccagtccccgtagggcaaaggcaaaaaatagttgaggctggagagaggtgggaagaagccagggctccagggagataaggaaccagccatacttgtgcttctggccctacagggactctggtgaccctgcagatggtggcactgatgggactataaaagagaggggcctcccaggaaggcaccacaacagatgtggctgctatgtgtgact

SEQ ID NO: 395075 - DNA, 637 bp, Homo sapiens
gggcggatggacggtcacaccgacaccatcagctctgacctctccccttcagagaggtctcctttacactggtctcacatgctacagatttcacttcacttggattgcaagcattttccttgaattcagcacctcaacattgaaaaccaaagtttgttcaaaataggcttcttttccccccaacccattttactcagtggccttcctgttactctctcctctcaaagcctggaagcctttacttattatgcttctctcactttctgtccagtatctcagtccttcaaatattttgtttgattattttaatcaaattatttttattattttgtatttattatattttgtattattataatcatgtctcttggggttcatctgatttctaagacgtcaggaatttgggcctgattttttagaactgtctcgctgcctccattttccccctctctagtttttttttttttttttgtatcattgtcatattaatcttctcaaaactccatgttcatcaagctgcagcacctactgaggcttccgatgccctgactggcagtagggcctaaatcacttcttttctgctgatctccaaactgcactctattttgccaagcaggtcttccccactcttcctgct

SEQ ID NO: 395076 - DNA, 122 bp, Homo sapiens
caactaggtgagaatcaattgctagcagcttagggagggaagaaacttattaccatactgtgttcaattccaaaatgttatgttaaataaatatttatattgttaatgaggacagggactat

SEQ ID NO: 395077 - DNA, 215 bp, Homo sapiens
atgaagaattttagaaaggggtccgcaaagagcttttcaatttaatgatcatattttcagggctattgatgggccaggccctgcgctgagcaatggggaagtccacatagagaggcctggtccctgccctttataagccctgaagtaatgaaagatgagtccttaccacagccctgtggattaggtcccatgaaatgaaagcccagagaaggtta

SEQ ID NO: 395078 - DNA, 155 bp, Homo sapiens
gaggatagtcagtattaatcatctatctttctatctatctataattagtaaggagctagtctaactcacatcataataaggctttgtctgcctctttaaatggtgtgtctctagtacctaggacaaatgtcctgccttcattattctatctgaaa

SEQ ID NO: 395079 - DNA, 342 bp, Homo sapiens
gagctcggcccacttatgaccgagttcccaatgaatagatcttcccaagaacacttcagtcagctctggcttccctggaggcccctttcctctttctttgctcaactatgcctctgtcgccacgctgctgctctgggcagtgaagctctctgctcctgcaccactgaaaagcaatgtcaggaaagccagcaatgtcacgaaagcccgcaatgcctggcgagtaaagttccaagattttgggagccttggaaagggccttggaagatcatttctcccattcaatccctccacctcccagagaccttaccctgactcactactcctgggacgaggtctgtggcc

SEQ ID NO: 395080 - DNA, 413 bp, Homo sapiens
ataaaaaaaagatatgtaacattaggcattgatggaaaaggactagatcctagtataagcatcctaataaaaggagaggttcaaagacgctctccagaaccagtatttcagactttctatgataaactaaatgtgccagtacctgagattccaggaaaaactaaaaatttgtttttgcaattagccgaacacgtagcccagtctctacaagtcacctcatgttatgtttgcggaggaaccgtaacaggagatcaatggccataggaagcccgagaattagttcccacagacccagttcctgatgaattcccagcccaaaagaaccaccctgacaatttttaggttctaaaagtctcaattattagacagtattgcacagctattgaaggaaaacaattcactcattctatagg

SEQ ID NO: 395081 - DNA, 369 bp, Homo sapiens
aggagacagtagcaagcaccttacccctggttgggtggtgaggagcaaccttagacaggaaaagggtacaggggcctactctgctaagtatctcctgatctttcatccctccagatcagaaagagtccccacagctcatcttccctttctgcctccctgaatctacctctgggtaggaggtacttttcatttctgtaggaaatatcagacaccgctggacctcaaggcctcagtaaaatgggtttcaaccccatctcagaacctctcccaattctgtaactgtggaagcttcagatcactgacttgtaagagtcaaacaggccaggtgggatgttaagaatctcccttcagggctgcaggggagtctgc

SEQ ID NO: 395082 - DNA, 293 bp, Homo sapiens
cttggtctgtgccctgaatgggggagctcagtccagcccagctcccaattgctgcagcgtgtgtgtgggcttctccaggaggagagtgggttctgaagaaaggggtcagaaactcacttattgatcttcccataggagcttcttgtccctgcattgccctggtgcagtgggcagctgagaccatctttccacagggtgaggtcttccctgtgtgtgtgtgtgattgtggcataggaaggggatgtgttgattctgagcaataaacagcacattttggatattcaatatagact

SEQ ID NO: 395083 - DNA, 110 bp, Homo sapiens
aatacttcttagcttctcctctaaccgtcttaggtgagtcagtaaggctggagaggctggagttaggtatttccctctcctagcgatgaaggttagaagaggctgaagtt

SEQ ID NO: 395084 - DNA, 384 bp, Homo sapiens
gttttcaccaagggaaagcagccagaaagattcattcaaaaccagcgcgatcatcgtcttactctgctcatcgtcttactctactcatcgtctctcctgcaatggcgcccatctcactcagagcaaaagacaaagttctagcctgtatgaggccctaggcaaggtgacctctccaatctcatgtccagctacacagccttagttccctccactccacccactggcctccttgcagttcctccacaggccagacgtgctcctgcttcaggattttgcattgctgttccctacacctggaacactcttctctctgttttccacatggctaaaccattcacttttgggttgttgttcaaatgtctccttctcaatgaggcctcctct

SEQ ID NO: 395085 - DNA, 494 bp, Homo sapiens
tcacatataagaagctccaaaatgtactaagcttattatattaacattggccacactgaactcttgggaatactacaattttaaagtaagagagaaagtagggaaacagaaacatgagtctggggggtatgttgtctaatgttagagataccaaaaattttccatgtggttgtttttagcagagctactatatgcaaactgcacgtgaaggatataagttataaaggaatagagcttctagaaggagaaatgtgagttaacttttttctaccatttaatcattctttcctcacctcttagtgtgtgtttcaataatgttagagatacgtatctctaacattatcttaaaacaactagacaacacacacacacacaaaaccttaaaaaagagagagaaacatacacactctctgaagaatctctgaaactgtttacaaggaatctcgaaaaacagggatgtctaactgatgccggctctgtttttctgtaaataa

SEQ ID NO: 395086 - DNA, 228 bp, Homo sapiens
agggaaacagcaactgacttgataacatacaaatgtaaaacttccattcaccaaatagaaacgcgaacaaaaaaatcataacagatataactttttaagtaacataaaatgcaagtgccctatttggccacgtttctttacatttgaaagagtagttgatacctttaaaacagaaagggggctgtgtgcagtggcgcacacctgtaatcccagcactttgggaggctg

SEQ ID NO: 395087 - DNA, 109 bp, Homo sapiens
aactatttctgtgcagcacagcgtggaacctggcccagtgtcttacttagggaagtcactccatggagtcacttgctaatcattccaatattaaatgaaatctaatatt

SEQ ID NO: 395088 - DNA, 846 bp, Homo sapiens
cagatatggagggtaaactctagagagagagagagtgtgtgtgtgtgtgtgtttgtatgtgtatggtgttggtggtggagtaaaatatatataacataaaattcataaagttgacaatttttaagttcagcataccttcaccttcacattgttcaaccaacaccaccaccatttcccgaactttcttatcttcccaaactatacacattaaatggtaactcagctgtttagctgttagtccagcccagctctgcctcagtgaactatgctgtgctctgctccactgaggtgcagggctgactgtatcatcaccagcaggggggatggctggccccaacctgaggaggagaaaaagaaggaggtacgcaggtccctggggtttctggttgtattcttgtccctaggcccctgcgttgtcccttagtgagggagaaaccttatgatcctggcccagccttgcaggctcccccggcatagagacacgtgctctgtgctgtcttctaggggctgctgctgccctatgtctcctggccagttgacattttggcaaccatgaagtgacctgaagcgagcctccatttactgatattataattggagccttggtaccattcacccaatctcgctgagccagcaggggtctctggtgagtctcctctcagatttcaaatcttcctaattttggtttgagattcatactttgttcaagcaaccaattccacacttgatggagctggaattaaagttctgcttctaaggacacaatcatagacactggttattttacctaggctttgattggaatggcaaattttcagatatgaccagactgctttaaaacattga

SEQ ID NO: 395089 - DNA, 528 bp, Homo sapiens
ttactagtaaaatgcatagaaaaaattcttctcaccttgaagcactattcttgaaacctgaacataatggtatatttctgattctttgttcatacttcttcttggtaaggaagacgtagcacaaatatgctgcataatagaaaggtcatactcttcctgcatcactgtcatctggcttggtccaaaaacttttttacccccaaaatacttatactatatgtaacaaatctattcttgttactataattgcctaatataagggcaacaatttttcttgaacctttaaaaatattagaattctaacaaatacccttaaaaattattgaacaaactatgcctttctacaaacatatgttttcctcacactgtaactaataacaacctttgaaatttctttatgattcaatcaaaatgtgctatgagtagttaagaagactcttaaggcctaaaatattcttaatgactctaccaggttattttagtttagtatacagacattggagggagtactcttaaattaatttgtaa

SEQ ID NO: 395090 - DNA, 824 bp, Homo sapiens
  misc_feature (49)..(49): n is a, c, g, or t
aggacaacaacactgcacgcacaagcaagaaaacacttgcattgactanggccggtgggtttcactggcacgaaggctttccagccccggtaccggaccctgcagccgcagagatgttgatgcctaagaagaaccggattgccatttatgaactcctttttaaggagggagtcatggtggccaagaaggatgtccacatgcctaagcacccggagctggcagacaagaatgtgcccaaccttcatgtcatgaaggccatgcagtctctcaagtcccgaggctacgtgaaggaacagtttgcctggagacatttctactggtaccttaccaatgagggtatccagtatctccgtgattaccttcatctgcccccggagattgtgcctgccaccctacgccgtagccgtccagagactggcaggcctcggcctaaaggtctggagggtgagcgacctgcgagactcacaagaggggaagctgacagagatacctacagacggagtgctgtgccacctggtgccgacaagaaagccgaggctggggctgggtcagcaaccgaattccagtttagaggcggatttggtcgtggacgtggtcagccacctcagtaaaattggagaggattcttttgcattgaataaacttacagccaaaaaaccttaaaaaaaaaaaaaaaacaaaaaaaaaaaccttaaaggaaaaaaaatatataataaaaggaaactttgtggcccgcttggcccaattgaattttgacatgagcgcctattcattggggcccaatttgggctaacttggccttcccctttatggagagcgttttt

SEQ ID NO: 395091 - DNA, 843 bp, Homo sapiens
  misc_feature (7)..(7): n is a, c, g, or t
  misc_feature (9)..(9): n is a, c, g, or t
  misc_feature (12)..(12): n is a, c, g, or t
  misc_feature (93)..(93): n is a, c, g, or t
gcaaagncngcntcccacagcgctggtccacctgatcgtggagcacgacaggttgtaccatggaagagccgctcgttggtctcggaatgcagntgctggggccgacccacccgcaaatgcgccggcctcgtgccgaattcggcacgagcggaccctgcagccgcagagatgttgatgcctaagaagaaccggattgccatttatgaactcctttttaaggagggagtcatggtggccaagaaggatgtccacatgcctaagcacccggagctggcagacaagaatgtgcccaaccttcatgtcatgaaggccatgcagtctctcaagtcccgaggctacgtgaaggaacagtttgcctggagacatttctactggtaccttaccaatgagggtatccagtatctccgtgattaccttcatctgcccccggagattgtgcctgccaccctacgccgtagccgtccagagactggcaggcctcggcctaaaggtctggagggtgagcgacctgcgagactcacaagaggggaagctgacagagatacctacagacggagtgctgtgccacctggtgccgacaagaaagccgaggctggggctgggtcagcaaccgaattccagtttagaggcggatttggtcgtggacgtggtcagccacctcagtaaaattggagaggattcttttgcattgaataaacttacagccaaaaaaccttaaaaaaaaaaaaaacctcttccgctttcgccactcgaccgcgtcccacataaacaaaaacttcgggggggggcccgtacccaaactgcctcatatggggccgtttaacaattagtggccgcgttttc

SEQ ID NO: 395092 - DNA, 2666 bp, Homo sapiens
agagcttcaggccagaagataatccaacatgaggcctgaaagaaacttgggccagaaaatctccagggtacctgcccgccgaagtcccttccgaggactctcctgagccagtggctgagacatgcacatccatggtggaagctccaggtctgggcagccctctccctgcagtcacagactatgcccactaggaacacccacctgggacaaagcctggccacagtcagagagcaggacggctctcaccaagcccctcaggtggctccccgccgctgaccctgtgctgcgtggcacaggcttccccaacgccctgccacatttggcttcctccaagcaggctatgtgcttaggatgagatgtggctacttttagcaaacaacactagagtggcttcagcccagccacggtgacttctcgctcccataagagctcaagagggagaggtgatctccctccccagccactggggaccccagttcctgttgcctattctgccactgtcatcttcctgcaccacctcatggtcctggatggctgcacaggctctagccgtcatgcccctattccagctaggagaaagggggaagcataagtggcaaggagaagcaccctccccttcttcttttttttttaattgctctatacatttattattagctattattaatgcagaaccaggggacaaaaagctcacaaacactctacacaatttcacaagacacattgcaggggaaaaagtgactgagatggatcaacagtatgctagggtcttggtggactcattcctaggggaggtggacctctaattcctggtggagggggtctcattcctggagggggcatgcctactggtgtccctcgagcagagggaagcccaattggtgggcccgtgggtggcctcataccaggttcagaagctccaagtttaactgtggacattggatctgggggaacggcagtcgtgaccgtgggcaagagtagcaagatgctgccacacacggaccacagaatgagacgtatcctacaagatggccgagtcttcattggcaccttcaaggcttttgacaagcatatgaatatgatcccctgtgattgtgatgagttcagaaagatgaaactaaagaatgcgaagcaaccagcacgtgaagaaaagcgggtttcgggcccctccgcttctaaagaagcttgctgggggcgccacactcactgccattgctcagagcttggttacacggcccggccacaccaggccacacagagacaagaagcgcaatgtgctggcaaagactcttaccggaggagaaggggagaatggctgtctttgccaaatagcccgtcacgaacgtacccctgctgggcccccgcaagtgcaccaaccgactcgaaagtcccagagagggctggcgggcaaggacctgagtctccagccacccctgcaggaggagcccagggaccctcgcatccctgataaggaagcaggtggcgtgccctgctgtgaccccgaaacagcctgtagtctcaccctccatttccacgagactctaagtctgccgcttttgcagcaaaagcccagtgctgggggtgagcgtgtggggagtgtgggagacgggctctgacccggccaccctgggcagctgtgctcacgcagcacccccgccgttcccagctggacttcacctggcaggacagccaacaggcctcaccgtggcctccgtcccgggggtcgtgcatgggggactgggccagcccgagcagtgggacatgctgccttcctaccctgctccacctgccacaaacacaaactggaatgttctcagccacctccagacttcacaccctttgggctttggggcacagaggtcgggctgccctggggagaggagggagagaaggaggcttcgagagagcacggacatgagtcagacctgaaataaagcaaagccacaccgccccggaccctgcagccgcagagatgttgatgcctaagaagaaccggattgccatttatgaactcctttttaaggagggagtcatggtggccaagaaggatgtccacatgcctaagcacccggagctggcagatgtcatgaaggccatgcagtctctcaagtcccgaggctacgtgaaggaacagtttgcctggagacatttctactggtaccttaccaatgagggtatccagtatctccgtgattaccttcatctgcccccggagattgtgcctgccaccctacgccgtagccgtccagagactggcaggcctcggcctaaaggtctggagggtgagcgacctgcgagactcacaagaggggaagctgacagagatacctacagacggagtgctgtgccacctggtgccgacaagaaagccgaggctggggctgggtcagcaaccgaattccagtttagaggcggatttggtcgtggacgtggtcagccacctcagtaaaattggagaggattcttttgcattgaataaacttacagccaaaaaaccttaaaaaaaaaaaaaaaaaaaaaaaaaaaaaaaaaccccggggcctccttattgtgggggggggggaaaaaggggggtcttcgaaaaggggccccgggcccaaaggtggtttcccgtgccccccccttttcttgtgtcccccgggggggaaaacccggggggggtccca

SEQ ID NO: 395093 - DNA, 991 bp, Homo sapiens
  misc_feature (185)..(185): n is a, c, g, or t
  misc_feature (187)..(188): n is a, c, g, or t
  misc_feature (725)..(725): n is a, c, g, or t
ctgagattactgccagtgcactccagcctggacgacagagcgagacggtctcaaaacatggtgctggagaaactggatatgtacatgcaaatgaaatgaaagttggaccactactacatgcaaaaattaactcaaaacacatcaaagacctctacataagaatgaaaactagctgtccagccccngnnccggaccctgcagccgcagagatgttgatgcctaagaagaaccggattgccatttatgaactcctttttaaggagggagtcatggtggccaagaaggatgtccacatgcctaagcacccggagctggcagatgtcatgaaggccatgcagtctctcaagtcccgaggctacgtgaaggaacagtttgcctggagacatttctactggtaccttaccaatgagggtatccagtatctccgtgattaccttcatctgcccccggagattgtgcctgccaccctacgccgtagccgtccagagactggcaggcctcggcctaaaggtctggagggtgagcgacctgcgagactcacaagaggggaagctgacagagatacctacagacggagtgctgtgccacctggtgccgacaagaaagccgaggctggggctgggtcagcaaccgaattccagtttagaggcggatttggtcgtggacgtggtcagccacctcagtaaaattggagaggattcttttgcattgaataaacttacagncaaagaaacaaaaaaaaaaacttcgagaaataagttctctcgacctcggggaagttcgacatcgtcttttaaaaccctgtcggtgtggaaatcccttgaggcaaccggccgttgtatgcccgagggaaagcacggggcgaccgtggaaggtcaattacttcccgttaagatccatccacctatggactgattatccgaagagtgttcacctggtggagcacgcacagatgtgcgtccaagggaattccgaaaatcggaatgtaccg

SEQ ID NO: 395094 - DNA, 801 bp, Homo sapiens
ggcggggggcgggtccacgccagcccggaagagacgcagcaccgcgcatgctccttcttttccagccccggtaccggaccctgcagccgcagagatgttgatgcctaagaagaaccggattgccatttatgaactcctttttaaggagggagtcatggtggccaagaaggatgtccacatgcctaagcacccggagctggcagacaagaatgtgcccaaccttcatgtcatgaaggccatgcagtctctcaagtcccgaggctacgtgaaggaacagtttgcctggagacatttctactggtaccttaccaatgagggtatccagtatctccgtgattaccttcatctgcccccggagattgtgcctgccaccctacgccgtagccgtccagagactggcaggcctcggcctaaaggtctggagggtgagcgacctgcgagactcacaagaggggaagctgacagagatacctacagacggagtgctgtgccacctggtgccgacaagaaagccgaggctggggctgggtcagcaaccgaattccagtttagaggcggatttggtcgtggacgtggtcagccacctcagtaaaattggagaggattcttttgcattgaataaacttacagccaaaaaaccttaaaaaaaaaaaaaaaaaaaaaaaaactccgggggttcttttcggggggggggacaaaaggggtatgaaagtgggcctgggcaacgtttccccggacccgttttttttccaaaggggaattgcgggccccaagggggcggtaatcaaaaaccgttcctat

SEQ ID NO: 395095 - DNA, 3381 bp, Homo sapiens
  misc_feature (2381)..(2381): n is a, c, g, or t
  misc_feature (2384)..(2384): n is a, c, g, or t
  misc_feature (2389)..(2389): n is a, c, g, or t
  misc_feature (2391)..(2391): n is a, c, g, or t
  misc_feature (3234)..(3234): n is a, c, g, or t
  misc_feature (3241)..(3241): n is a, c, g, or t
ttttcatttaaatattcttcttttgcttctcttaagcagaagctggtctctgcttttcaccacctggaatcccagtcccaacagctgctcttctaacccttccggcctaattgtggaataatcgtttaaatcattaagagacagaatctgatgttggtagctctgacagacctctctagcttctttcataagccagggctcttgcccagctcctgcacacagcctgccagttctccatcttagcacagttccacttttccatagtagccagaaacatctggctgaagacaaacagttacaaagcagaagccaaggtgatgggatctgttgtcacatatggggctggcagctcaaggaatgtggttctctgctgaggagatgtggcaatccagtcagcccctggctgtcctgccaagggtctcaaggcagctagccagcagctgcatgcttggtgactggagctactactactgccaggctgcctggtgaaccttttttgattctcagtaggtaccatctgccaccaagcactaagaaagggagctgaagtacctagaaagttcccatttgggaagtgttcctgtcacccaagagacaggatcaaggcatctcaacaaggtttaggtcaaccaagtgtccacccagtctgactttaaacccccatgctacagaaaggtttctggttttccaggtcttggttgccccttacgtccaaaggcaccagatcactcagcaaatgtccctgaattcagtgattggtggaagggaagacaccagcttttttggatagctgtgctgtatcaccgtttaaggcaagaagtgaatttttgtctgagaacagggagcaagggtttaatgggacagtacagcatctccctctttgcacaggtaagtataggtgggtgtctccatctctaatgtcaagctctgaccataaaggaatgctttagtgggtaatgggcctgtcctagagctttgctacccagaattccccttctgtctggtgttacctcttggaattcactgtggtaatgttcagagaggcaaatgtgttgggccaatagacattcccaggagaacatcctccagagcattgatttattttaagatggcactaagtgacatctctccccaagagatgatctctgacacaatcccatatgaaaactcttctgaaaatgaattgctaattgctattagccttgatgcacttactctaagcagttcttcagacttctggatcagtgcttctcaaactgtggttcttggacaacttacagtagaactacatgggtccttattaaaatacagatccatttcagacctaaaatcagaataagaatgggagtcagagggacccaggattagtatttttaaaacaagatttcttcattttaggtgtctgccctcagcctcctcagcaaggcagagtcagtctcaggtctacttgccattgtggttttgtgcatggtgctttgattctttgctaattatgttgcaggcacagtggtgtttgtcttctgtttcctaccaaactcagcttttttggctgtctgcgcctcacctcccatcttttctaggctgttgctgctttccaggtttctcccttgaatagctgtatgtgctggagtcttttctttatgttgaatcattttaatttttgtccttatttctaggatctagggtccttttgatctttcccttctctgtttatcgtgctagtcctcccagttttaatgatgggtaagtcaggaaagtaagactgggcacatattttctctctcccttcccactgtccatttgcgattcctccagactggatatgctactctctatgactcagaatcttattttctgtctgattcccttctgcttgagccagagagggctttttgttaatttttgttttgtttttaggttaagcttttagagactgctgagctgaagttttgctgaattctcaaaacactaaactgcctgtgttccctctcggctttcattttctaattggaacaaggcacagtattgtaacagagaactgcaattaattttctaaaatagtggcaacttgcacagtataataactttggttgtaaccaagtgaaagcataataacaaaaatacaaaattactaatgaaaccagaaagagtcatataccacattcttcctttagtttgtatctcagtaagtgctgtgttacttaggaataggggcagaagcctgcaactgggcagggaggttcagggacatgaggacgaagctagggcattttgagctagaaagcaagaataaggattagtgctttcaacactggaattaacatggaccacccccccacctcccaataagtggggattgtaggcacataagtggtttactnagncgagncncagaggtgagtttctgtggcgttcgagttccatcggctcccatccgggctatcctgccgccttagcggctgcttctccccaggatgcgggcagggggcctctctcccactccccacacaccgatttctgagtagcgataggggctggaggcttattttatggggtagggggccgctggtaggcgaagattgtccgagggagagggggaggatgaagccagtgcgtggcggagacttgcccggaccctgcagccgcagagatgttgatgcctaagaagaaccggattgccatttatgaactcctttttaaggagggagtcatggtggccaagaaggatgtccacatgcctaagcacccggagctggcagacaagaatgtgcccaaccttcatgtcatgaaggccatgcagtctctcaagtcccgaggctacgtgaaggaacagtttgcctggagacatttctactggtaccttaccaatgagggtatccagtatctccgtgattaccttcatctgcccccggagattgtgcctgccaccctacgccgtagccgtccagagactggcaggcctcggcctaaaggtctggagggtgagcgacctgcgagactcacaagaggggaagctgacagagatacctacagacggagtgctgtgccacctggtgccgacaagaaagccgaggctggggctgggtcagcaaccgaattccagtttagaggcggatttggtcgtggacgtggtcagccacctcagtaaaattggagaggattcttttgcattgaataaacttacagccaaaaaaccttaaaaaaaaaaaaaaaaaaaaaaaaaaaaaaaaaaanggggggnattaagggggggggggaaaaaggggtaggaaggggccaggggccaataggtgtccgggaccacgtttctgggcaccagggggaaaactccgcaggaccccataaaggagacgaataattccgaaaacccggtacccggta

SEQ ID NO: 395096 - DNA, 3525 bp, Homo sapiens
  misc_feature (2381)..(2381): n is a, c, g, or t
  misc_feature (2384)..(2384): n is a, c, g, or t
  misc_feature (2389)..(2389): n is a, c, g, or t
  misc_feature (2391)..(2391): n is a, c, g, or t
ttttcatttaaatattcttcttttgcttctcttaagcagaagctggtctctgcttttcaccacctggaatcccagtcccaacagctgctcttctaacccttccggcctaattgtggaataatcgtttaaatcattaagagacagaatctgatgttggtagctctgacagacctctctagcttctttcataagccagggctcttgcccagctcctgcacacagcctgccagttctccatcttagcacagttccacttttccatagtagccagaaacatctggctgaagacaaacagttacaaagcagaagccaaggtgatgggatctgttgtcacatatggggctggcagctcaaggaatgtggttctctgctgaggagatgtggcaatccagtcagcccctggctgtcctgccaagggtctcaaggcagctagccagcagctgcatgcttggtgactggagctactactactgccaggctgcctggtgaaccttttttgattctcagtaggtaccatctgccaccaagcactaagaaagggagctgaagtacctagaaagttcccatttgggaagtgttcctgtcacccaagagacaggatcaaggcatctcaacaaggtttaggtcaaccaagtgtccacccagtctgactttaaacccccatgctacagaaaggtttctggttttccaggtcttggttgccccttacgtccaaaggcaccagatcactcagcaaatgtccctgaattcagtgattggtggaagggaagacaccagcttttttggatagctgtgctgtatcaccgtttaaggcaagaagtgaatttttgtctgagaacagggagcaagggtttaatgggacagtacagcatctccctctttgcacaggtaagtataggtgggtgtctccatctctaatgtcaagctctgaccataaaggaatgctttagtgggtaatgggcctgtcctagagctttgctacccagaattccccttctgtctggtgttacctcttggaattcactgtggtaatgttcagagaggcaaatgtgttgggccaatagacattcccaggagaacatcctccagagcattgatttattttaagatggcactaagtgacatctctccccaagagatgatctctgacacaatcccatatgaaaactcttctgaaaatgaattgctaattgctattagccttgatgcacttactctaagcagttcttcagacttctggatcagtgcttctcaaactgtggttcttggacaacttacagtagaactacatgggtccttattaaaatacagatccatttcagacctaaaatcagaataagaatgggagtcagagggacccaggattagtatttttaaaacaagatttcttcattttaggtgtctgccctcagcctcctcagcaaggcagagtcagtctcaggtctacttgccattgtggttttgtgcatggtgctttgattctttgctaattatgttgcaggcacagtggtgtttgtcttctgtttcctaccaaactcagcttttttggctgtctgcgcctcacctcccatcttttctaggctgttgctgctttccaggtttctcccttgaatagctgtatgtgctggagtcttttctttatgttgaatcattttaatttttgtccttatttctaggatctagggtccttttgatctttcccttctctgtttatcgtgctagtcctcccagttttaatgatgggtaagtcaggaaagtaagactgggcacatattttctctctcccttcccactgtccatttgcgattcctccagactggatatgctactctctatgactcagaatcttattttctgtctgattcccttctgcttgagccagagagggctttttgttaatttttgttttgtttttaggttaagcttttagagactgctgagctgaagttttgctgaattctcaaaacactaaactgcctgtgttccctctcggctttcattttctaattggaacaaggcacagtattgtaacagagaactgcaattaattttctaaaatagtggcaacttgcacagtataataactttggttgtaaccaagtgaaagcataataacaaaaatacaaaattactaatgaaaccagaaagagtcatataccacattcttcctttagtttgtatctcagtaagtgctgtgttacttaggaataggggcagaagcctgcaactgggcagggaggttcagggacatgaggacgaagctagggcattttgagctagaaagcaagaataaggattagtgctttcaacactggaattaacatggaccacccccccacctcccaataagtggggattgtaggcacataagtggtttactnagncgagncncagaggtgagtttctgtggcgttcgagttccatcggctcccatccgggctatcctgccgccttagcggctgcttctccccaggatgcgggcagggggcctctctcccactccccacacaccgatttctgagtagcgataggggctggaggcttattttatggggtagggggccgctggtaggcgaagattgtccgagggagagggggaggatgaagccagtgcgtggcggagacttgcccggaccctgcagccgcagagatgttgatgcctaagaagaaccggattgccatttatgaactcctttttaaggagggagtcatggtggccaagaaggatgtccacatgcctaagcacccggagctggcagacaagaatgtgcccaaccttcatgtcatgaaggccatgcagtctctcaagtcccgaggctacgtgaaggaacagtttgcctggagacatttctactggtaccttaccaatgagggtatccagtatctccgtgattaccttcatctgcccccggagattgtgcctgccaccctacgccgtagccgtccagagactggcaggcctcggcctaaaggtctggagggtgagcgacctgcgagactcacaagaggggaagctgacagagatacctacagacggagtgctgtgccacctggtgccgacaagaaagccgaggctggggctgggtcagcaaccgaattccagtttagaggcggatttggtcgtggacgtggtcagccacctcagtaaaattggagaggattcttttgcattgaataaacttacagccaaaaaaccttaaaaaaaaaaaaaaaaaaaaaaaaaaaaaaaaaaaaaaaaaaaaaaaccccggggcctaaatggggggggggaaaaaggggaaaaaaaggggccggggcacaaaaggaggtgcacagacccaccgtattttttgcacaacaagggggaaaaaatcagcggcgggccaccccataaaaggagggggcggaaataaaatttgcgaaacaccccagggtaaccagcgatataaaagacagccgagaagaacacgcggagtagagcccacccagacacacagaggagagcataatggacgaagacacaccagaacgagaacatcctcacac

SEQ ID NO: 395097 - DNA, 3724 bp, Homo sapiens
  misc_feature (2381)..(2381): n is a, c, g, or t
  misc_feature (2384)..(2384): n is a, c, g, or t
  misc_feature (2389)..(2389): n is a, c, g, or t
  misc_feature (2391)..(2391): n is a, c, g, or t
ttttcatttaaatattcttcttttgcttctcttaagcagaagctggtctctgcttttcaccacctggaatcccagtcccaacagctgctcttctaacccttccggcctaattgtggaataatcgtttaaatcattaagagacagaatctgatgttggtagctctgacagacctctctagcttctttcataagccagggctcttgcccagctcctgcacacagcctgccagttctccatcttagcacagttccacttttccatagtagccagaaacatctggctgaagacaaacagttacaaagcagaagccaaggtgatgggatctgttgtcacatatggggctggcagctcaaggaatgtggttctctgctgaggagatgtggcaatccagtcagcccctggctgtcctgccaagggtctcaaggcagctagccagcagctgcatgcttggtgactggagctactactactgccaggctgcctggtgaaccttttttgattctcagtaggtaccatctgccaccaagcactaagaaagggagctgaagtacctagaaagttcccatttgggaagtgttcctgtcacccaagagacaggatcaaggcatctcaacaaggtttaggtcaaccaagtgtccacccagtctgactttaaacccccatgctacagaaaggtttctggttttccaggtcttggttgccccttacgtccaaaggcaccagatcactcagcaaatgtccctgaattcagtgattggtggaagggaagacaccagcttttttggatagctgtgctgtatcaccgtttaaggcaagaagtgaatttttgtctgagaacagggagcaagggtttaatgggacagtacagcatctccctctttgcacaggtaagtataggtgggtgtctccatctctaatgtcaagctctgaccataaaggaatgctttagtgggtaatgggcctgtcctagagctttgctacccagaattccccttctgtctggtgttacctcttggaattcactgtggtaatgttcagagaggcaaatgtgttgggccaatagacattcccaggagaacatcctccagagcattgatttattttaagatggcactaagtgacatctctccccaagagatgatctctgacacaatcccatatgaaaactcttctgaaaatgaattgctaattgctattagccttgatgcacttactctaagcagttcttcagacttctggatcagtgcttctcaaactgtggttcttggacaacttacagtagaactacatgggtccttattaaaatacagatccatttcagacctaaaatcagaataagaatgggagtcagagggacccaggattagtatttttaaaacaagatttcttcattttaggtgtctgccctcagcctcctcagcaaggcagagtcagtctcaggtctacttgccattgtggttttgtgcatggtgctttgattctttgctaattatgttgcaggcacagtggtgtttgtcttctgtttcctaccaaactcagcttttttggctgtctgcgcctcacctcccatcttttctaggctgttgctgctttccaggtttctcccttgaatagctgtatgtgctggagtcttttctttatgttgaatcattttaatttttgtccttatttctaggatctagggtccttttgatctttcccttctctgtttatcgtgctagtcctcccagttttaatgatgggtaagtcaggaaagtaagactgggcacatattttctctctcccttcccactgtccatttgcgattcctccagactggatatgctactctctatgactcagaatcttattttctgtctgattcccttctgcttgagccagagagggctttttgttaatttttgttttgtttttaggttaagcttttagagactgctgagctgaagttttgctgaattctcaaaacactaaactgcctgtgttccctctcggctttcattttctaattggaacaaggcacagtattgtaacagagaactgcaattaattttctaaaatagtggcaacttgcacagtataataactttggttgtaaccaagtgaaagcataataacaaaaatacaaaattactaatgaaaccagaaagagtcatataccacattcttcctttagtttgtatctcagtaagtgctgtgttacttaggaataggggcagaagcctgcaactgggcagggaggttcagggacatgaggacgaagctagggcattttgagctagaaagcaagaataaggattagtgctttcaacactggaattaacatggaccacccccccacctcccaataagtggggattgtaggcacataagtggtttactnagncgagncncagaggtgagtttctgtggcgttcgagttccatcggctcccatccgggctatcctgccgccttagcggctgcttctccccaggatgcgggcagggggcctctctcccactccccacacaccgatttctgagtagcgataggggctggaggcttattttatggggtagggggccgctggtaggcgaagattgtccgagggagagggggaggatgaagccagtgcgtggcggagacttgcccggaccctgcagccgcagagatgttgatgcctaagaagaaccggattgccatttatgaactcctttttaaggagggagtcatggtggccaagaaggatgtccacatgcctaagcacccggagctggcagacaagaatgtgcccaaccttcatgtcatgaaggccatgcagtctctcaagtcccgaggctacgtgaaggaacagtttgcctggagacatttctactggtaccttaccaatgagggtatccagtatctccgtgattaccttcatctgcccccggagattgtgcctgccaccctacgccgtagccgtccagagactggcaggcctcggcctaaaggtctggagggtgagcgacctgcgagactcacaagaggggaagctgacagagatacctacagacggagtgctgtgccacctggtgccgacaagaaagccgaggctggggctgggtcagcaaccgaattccagtttagaggcggatttggtcgtggacgtggtcagccacctcagtaaaattggagaggattcttttgcattgaataaacttacagccaaaaaaccttaaaaaaaaaaaaaaaaaaaaaaaaaaaaaaaaaaaaaaaaaaaaaaaaaaaaaaaaaaaaaaaaaaaaaaaaaaaagagagcgagggggggcgcgcggcgcgcccagaataatatctcccccgcggggggcgccccacagttgagcgggccgccccccgcttttttgggtacagggggggcccccatgaggggggcgcgtttataaaaacagcgggggggtgggggcgcgccgggtaaaaccagcgctccggaggcggcgaaaaacccgcgggccggcgggcaatcgtggggggagaaggaccccccactcgttgcggggcgcgcggccttgtggggcgaccacccccccccaaagcgaatataaggacgcgggagaaaaacaaaacagaagggcgtctcgggcgacacccccgaggcaatgtgtgcggccggccaaaaaatgggacaaggaaataataataaaaacaaatttgagcggcccgcactctaaacataacaggcagaagaaaacgccagccaataaac

SEQ ID NO: 395098 - DNA, 3444 bp, Homo sapiens
  misc_feature (2381)..(2381): n is a, c, g, or t
  misc_feature (2384)..(2384): n is a, c, g, or t
  misc_feature (2389)..(2389): n is a, c, g, or t
  misc_feature (2391)..(2391): n is a, c, g, or t
ttttcatttaaatattcttcttttgcttctcttaagcagaagctggtctctgcttttcaccacctggaatcccagtcccaacagctgctcttctaacccttccggcctaattgtggaataatcgtttaaatcattaagagacagaatctgatgttggtagctctgacagacctctctagcttctttcataagccagggctcttgcccagctcctgcacacagcctgccagttctccatcttagcacagttccacttttccatagtagccagaaacatctggctgaagacaaacagttacaaagcagaagccaaggtgatgggatctgttgtcacatatggggctggcagctcaaggaatgtggttctctgctgaggagatgtggcaatccagtcagcccctggctgtcctgccaagggtctcaaggcagctagccagcagctgcatgcttggtgactggagctactactactgccaggctgcctggtgaaccttttttgattctcagtaggtaccatctgccaccaagcactaagaaagggagctgaagtacctagaaagttcccatttgggaagtgttcctgtcacccaagagacaggatcaaggcatctcaacaaggtttaggtcaaccaagtgtccacccagtctgactttaaacccccatgctacagaaaggtttctggttttccaggtcttggttgccccttacgtccaaaggcaccagatcactcagcaaatgtccctgaattcagtgattggtggaagggaagacaccagcttttttggatagctgtgctgtatcaccgtttaaggcaagaagtgaatttttgtctgagaacagggagcaagggtttaatgggacagtacagcatctccctctttgcacaggtaagtataggtgggtgtctccatctctaatgtcaagctctgaccataaaggaatgctttagtgggtaatgggcctgtcctagagctttgctacccagaattccccttctgtctggtgttacctcttggaattcactgtggtaatgttcagagaggcaaatgtgttgggccaatagacattcccaggagaacatcctccagagcattgatttattttaagatggcactaagtgacatctctccccaagagatgatctctgacacaatcccatatgaaaactcttctgaaaatgaattgctaattgctattagccttgatgcacttactctaagcagttcttcagacttctggatcagtgcttctcaaactgtggttcttggacaacttacagtagaactacatgggtccttattaaaatacagatccatttcagacctaaaatcagaataagaatgggagtcagagggacccaggattagtatttttaaaacaagatttcttcattttaggtgtctgccctcagcctcctcagcaaggcagagtcagtctcaggtctacttgccattgtggttttgtgcatggtgctttgattctttgctaattatgttgcaggcacagtggtgtttgtcttctgtttcctaccaaactcagcttttttggctgtctgcgcctcacctcccatcttttctaggctgttgctgctttccaggtttctcccttgaatagctgtatgtgctggagtcttttctttatgttgaatcattttaatttttgtccttatttctaggatctagggtccttttgatctttcccttctctgtttatcgtgctagtcctcccagttttaatgatgggtaagtcaggaaagtaagactgggcacatattttctctctcccttcccactgtccatttgcgattcctccagactggatatgctactctctatgactcagaatcttattttctgtctgattcccttctgcttgagccagagagggctttttgttaatttttgttttgtttttaggttaagcttttagagactgctgagctgaagttttgctgaattctcaaaacactaaactgcctgtgttccctctcggctttcattttctaattggaacaaggcacagtattgtaacagagaactgcaattaattttctaaaatagtggcaacttgcacagtataataactttggttgtaaccaagtgaaagcataataacaaaaatacaaaattactaatgaaaccagaaagagtcatataccacattcttcctttagtttgtatctcagtaagtgctgtgttacttaggaataggggcagaagcctgcaactgggcagggaggttcagggacatgaggacgaagctagggcattttgagctagaaagcaagaataaggattagtgctttcaacactggaattaacatggaccacccccccacctcccaataagtggggattgtaggcacataagtggtttactnagncgagncncagaggtgagtttctgtggcgttcgagttccatcggctcccatccgggctatcctgccgccttagcggctgcttctccccaggatgcgggcagggggcctctctcccactccccacacaccgatttctgagtagcgataggggctggaggcttattttatggggtagggggccgctggtaggcgaagattgtccgagggagagggggaggatgaagccagtgcgtggcggagacttgcccggaccctgcagccgcagagatgttgatgcctaagaagaaccggattgccatttatgaactcctttttaaggagggagtcatggtggccaagaaggatgtccacatgcctaagcacccggagctggcagacaagaatgtgcccaaccttcatgtcatgaaggccatgcagtctctcaagtcccgaggctacgtgaaggaacagtttgcctggagacatttctactggtaccttaccaatgagggtatccagtatctccgtgattaccttcatctgcccccggagattgtgcctgccaccctacgccgtagccgtccagagactggcaggcctcggcctaaaggtctggagggtgagcgacctgcgagactcacaagaggggaagctgacagagatacctacagacggagtgctgtgccacctggtgccgacaagaaagccgaggctggggctgggtcagcaaccgaattccagtttagaggcggatttggtcgtggacgtggtcagccacctcagtaaaattggagaggattcttttgcattgaataaacttacagccaaaaaaccttaaaaaaaaaaaaaacaaaaaacacgaagacacaacaacaaaaacacaaaaaaggctccgagggcacatttatcggcggggggcggaacaaaagcctgcgtatacgaaagggcgccaggtggcgcaaaagatatgactacggcacccaacgatattgtttactacacacagtgggaacactcagagggcgccaccaaaatgagagagcgcatatattctcgacaacccgcgtacacccgtttatagt

SEQ ID NO: 395099 - DNA, 3361 bp, Homo sapiens
  misc_feature (2381)..(2381): n is a, c, g, or t
  misc_feature (2384)..(2384): n is a, c, g, or t
  misc_feature (2389)..(2389): n is a, c, g, or t
  misc_feature (2391)..(2391): n is a, c, g, or t
ttttcatttaaatattcttcttttgcttctcttaagcagaagctggtctctgcttttcaccacctggaatcccagtcccaacagctgctcttctaacccttccggcctaattgtggaataatcgtttaaatcattaagagacagaatctgatgttggtagctctgacagacctctctagcttctttcataagccagggctcttgcccagctcctgcacacagcctgccagttctccatcttagcacagttccacttttccatagtagccagaaacatctggctgaagacaaacagttacaaagcagaagccaaggtgatgggatctgttgtcacatatggggctggcagctcaaggaatgtggttctctgctgaggagatgtggcaatccagtcagcccctggctgtcctgccaagggtctcaaggcagctagccagcagctgcatgcttggtgactggagctactactactgccaggctgcctggtgaaccttttttgattctcagtaggtaccatctgccaccaagcactaagaaagggagctgaagtacctagaaagttcccatttgggaagtgttcctgtcacccaagagacaggatcaaggcatctcaacaaggtttaggtcaaccaagtgtccacccagtctgactttaaacccccatgctacagaaaggtttctggttttccaggtcttggttgccccttacgtccaaaggcaccagatcactcagcaaatgtccctgaattcagtgattggtggaagggaagacaccagcttttttggatagctgtgctgtatcaccgtttaaggcaagaagtgaatttttgtctgagaacagggagcaagggtttaatgggacagtacagcatctccctctttgcacaggtaagtataggtgggtgtctccatctctaatgtcaagctctgaccataaaggaatgctttagtgggtaatgggcctgtcctagagctttgctacccagaattccccttctgtctggtgttacctcttggaattcactgtggtaatgttcagagaggcaaatgtgttgggccaatagacattcccaggagaacatcctccagagcattgatttattttaagatggcactaagtgacatctctccccaagagatgatctctgacacaatcccatatgaaaactcttctgaaaatgaattgctaattgctattagccttgatgcacttactctaagcagttcttcagacttctggatcagtgcttctcaaactgtggttcttggacaacttacagtagaactacatgggtccttattaaaatacagatccatttcagacctaaaatcagaataagaatgggagtcagagggacccaggattagtatttttaaaacaagatttcttcattttaggtgtctgccctcagcctcctcagcaaggcagagtcagtctcaggtctacttgccattgtggttttgtgcatggtgctttgattctttgctaattatgttgcaggcacagtggtgtttgtcttctgtttcctaccaaactcagcttttttggctgtctgcgcctcacctcccatcttttctaggctgttgctgctttccaggtttctcccttgaatagctgtatgtgctggagtcttttctttatgttgaatcattttaatttttgtccttatttctaggatctagggtccttttgatctttcccttctctgtttatcgtgctagtcctcccagttttaatgatgggtaagtcaggaaagtaagactgggcacatattttctctctcccttcccactgtccatttgcgattcctccagactggatatgctactctctatgactcagaatcttattttctgtctgattcccttctgcttgagccagagagggctttttgttaatttttgttttgtttttaggttaagcttttagagactgctgagctgaagttttgctgaattctcaaaacactaaactgcctgtgttccctctcggctttcattttctaattggaacaaggcacagtattgtaacagagaactgcaattaattttctaaaatagtggcaacttgcacagtataataactttggttgtaaccaagtgaaagcataataacaaaaatacaaaattactaatgaaaccagaaagagtcatataccacattcttcctttagtttgtatctcagtaagtgctgtgttacttaggaataggggcagaagcctgcaactgggcagggaggttcagggacatgaggacgaagctagggcattttgagctagaaagcaagaataaggattagtgctttcaacactggaattaacatggaccacccccccacctcccaataagtggggattgtaggcacataagtggtttactnagncgagncncagaggtgagtttctgtggcgttcgagttccatcggctcccatccgggctatcctgccgccttagcggctgcttctccccaggatgcgggcagggggcctctctcccactccccacacaccgatttctgagtagcgataggggctggaggcttattttatggggtagggggccgctggtaggcgaagattgtccgagggagagggggaggatgaagccagtgcgtggcggagacttgcccggaccctgcagccgcagagatgttgatgcctaagaagaaccggattgccatttatgaactcctttttaaggagggagtcatggtggccaagaaggatgtccacatgcctaagcacccggagctggcagacaagaatgtgcccaaccttcatgtcatgaaggccatgcagtctctcaagtcccgaggctacgtgaaggaacagtttgcctggagacatttctactggtaccttaccaatgagggtatccagtatctccgtgattaccttcatctgcccccggagattgtgcctgccaccctacgccgtagccgtccagagactggcaggcctcggcctaaaggtctggagggtgagcgacctgcgagactcacaagaggggaagctgacagagatacctacagacggagtgctgtgccacctggtgccgacaagaaagccgaggctggggctgggtcagcaaccgaattccagtttagaggcggatttggtcgtggacgtggtcagccacctcagtaaaattggagaggattcttttgcattgaataaacttacagccaaaaaaccttaaaaaaaaaaaaaaaacaaaaaaaaaaaccttaaaggaaaaaaaatatataataaaaggaaactttgtggcccgcttggcccaattgaattttgacatgagcgcctattcattggggcccaatttgggctaacttggccttcccctttatggagagcgttttt

SEQ ID NO: 395100 - DNA, 3350 bp, Homo sapiens
  misc_feature (2381)..(2381): n is a, c, g, or t
  misc_feature (2384)..(2384): n is a, c, g, or t
  misc_feature (2389)..(2389): n is a, c, g, or t
  misc_feature (2391)..(2391): n is a, c, g, or t
  misc_feature (3229)..(3229): n is a, c, g, or t
  misc_feature (3239)..(3240): n is a, c, g, or t
  misc_feature (3246)..(3246): n is a, c, g, or t
  misc_feature (3251)..(3251): n is a, c, g, or t
  misc_feature (3265)..(3265): n is a, c, g, or t
  misc_feature (3273)..(3273): n is a, c, g, or t
  misc_feature (3277)..(3279): n is a, c, g, or t
  misc_feature (3290)..(3290): n is a, c, g, or t
  misc_feature (3292)..(3292): n is a, c, g, or t
  misc_feature (3299)..(3300): n is a, c, g, or t
  misc_feature (3308)..(3309): n is a, c, g, or t
  misc_feature (3323)..(3324): n is a, c, g, or t
  misc_feature (3329)..(3329): n is a, c, g, or t
ttttcatttaaatattcttcttttgcttctcttaagcagaagctggtctctgcttttcaccacctggaatcccagtcccaacagctgctcttctaacccttccggcctaattgtggaataatcgtttaaatcattaagagacagaatctgatgttggtagctctgacagacctctctagcttctttcataagccagggctcttgcccagctcctgcacacagcctgccagttctccatcttagcacagttccacttttccatagtagccagaaacatctggctgaagacaaacagttacaaagcagaagccaaggtgatgggatctgttgtcacatatggggctggcagctcaaggaatgtggttctctgctgaggagatgtggcaatccagtcagcccctggctgtcctgccaagggtctcaaggcagctagccagcagctgcatgcttggtgactggagctactactactgccaggctgcctggtgaaccttttttgattctcagtaggtaccatctgccaccaagcactaagaaagggagctgaagtacctagaaagttcccatttgggaagtgttcctgtcacccaagagacaggatcaaggcatctcaacaaggtttaggtcaaccaagtgtccacccagtctgactttaaacccccatgctacagaaaggtttctggttttccaggtcttggttgccccttacgtccaaaggcaccagatcactcagcaaatgtccctgaattcagtgattggtggaagggaagacaccagcttttttggatagctgtgctgtatcaccgtttaaggcaagaagtgaatttttgtctgagaacagggagcaagggtttaatgggacagtacagcatctccctctttgcacaggtaagtataggtgggtgtctccatctctaatgtcaagctctgaccataaaggaatgctttagtgggtaatgggcctgtcctagagctttgctacccagaattccccttctgtctggtgttacctcttggaattcactgtggtaatgttcagagaggcaaatgtgttgggccaatagacattcccaggagaacatcctccagagcattgatttattttaagatggcactaagtgacatctctccccaagagatgatctctgacacaatcccatatgaaaactcttctgaaaatgaattgctaattgctattagccttgatgcacttactctaagcagttcttcagacttctggatcagtgcttctcaaactgtggttcttggacaacttacagtagaactacatgggtccttattaaaatacagatccatttcagacctaaaatcagaataagaatgggagtcagagggacccaggattagtatttttaaaacaagatttcttcattttaggtgtctgccctcagcctcctcagcaaggcagagtcagtctcaggtctacttgccattgtggttttgtgcatggtgctttgattctttgctaattatgttgcaggcacagtggtgtttgtcttctgtttcctaccaaactcagcttttttggctgtctgcgcctcacctcccatcttttctaggctgttgctgctttccaggtttctcccttgaatagctgtatgtgctggagtcttttctttatgttgaatcattttaatttttgtccttatttctaggatctagggtccttttgatctttcccttctctgtttatcgtgctagtcctcccagttttaatgatgggtaagtcaggaaagtaagactgggcacatattttctctctcccttcccactgtccatttgcgattcctccagactggatatgctactctctatgactcagaatcttattttctgtctgattcccttctgcttgagccagagagggctttttgttaatttttgttttgtttttaggttaagcttttagagactgctgagctgaagttttgctgaattctcaaaacactaaactgcctgtgttccctctcggctttcattttctaattggaacaaggcacagtattgtaacagagaactgcaattaattttctaaaatagtggcaacttgcacagtataataactttggttgtaaccaagtgaaagcataataacaaaaatacaaaattactaatgaaaccagaaagagtcatataccacattcttcctttagtttgtatctcagtaagtgctgtgttacttaggaataggggcagaagcctgcaactgggcagggaggttcagggacatgaggacgaagctagggcattttgagctagaaagcaagaataaggattagtgctttcaacactggaattaacatggaccacccccccacctcccaataagtggggattgtaggcacataagtggtttactnagncgagncncagaggtgagtttctgtggcgttcgagttccatcggctcccatccgggctatcctgccgccttagcggctgcttctccccaggatgcgggcagggggcctctctcccactccccacacaccgatttctgagtagcgataggggctggaggcttattttatggggtagggggccgctggtaggcgaagattgtccgagggagagggggaggatgaagccagtgcgtggcggagacttgcccggaccctgcagccgcagagatgttgatgcctaagaagaaccggattgccatttatgaactcctttttaaggagggagtcatggtggccaagaaggatgtccacatgcctaagcacccggagctggcagacaagaatgtgcccaaccttcatgtcatgaaggccatgcagtctctcaagtcccgaggctacgtgaaggaacagtttgcctggagacatttctactggtaccttaccaatgagggtatccagtatctccgtgattaccttcatctgcccccggagattgtgcctgccaccctacgccgtagccgtccagagactggcaggcctcggcctaaaggtctggagggtgagcgacctgcgagactcacaagaggggaagctgacagagatacctacagacggagtgctgtgccacctggtgccgacaagaaagccgaggctggggctgggtcagcaaccgaattccagtttagaggcggatttggtcgtggacgtggtcagccacctcagtaaaattggagaggattcttttgcattgaataaacttacagccaaaaaaccttaaaaaaaaaaaaaaaaaaaaaaaaaaaaatnggggttttanntggggnggggnaaaaggggtggaanggcctggncaannnggttcggaccnantttttgnncaaggggnnattgggggtcctannggggngataattgaaagcagtaagtg

SEQ ID NO: 395101 - DNA, 3357 bp, Homo sapiens
  misc_feature (2381)..(2381): n is a, c, g, or t
  misc_feature (2384)..(2384): n is a, c, g, or t
  misc_feature (2389)..(2389): n is a, c, g, or t
  misc_feature (2391)..(2391): n is a, c, g, or t
ttttcatttaaatattcttcttttgcttctcttaagcagaagctggtctctgcttttcaccacctggaatcccagtcccaacagctgctcttctaacccttccggcctaattgtggaataatcgtttaaatcattaagagacagaatctgatgttggtagctctgacagacctctctagcttctttcataagccagggctcttgcccagctcctgcacacagcctgccagttctccatcttagcacagttccacttttccatagtagccagaaacatctggctgaagacaaacagttacaaagcagaagccaaggtgatgggatctgttgtcacatatggggctggcagctcaaggaatgtggttctctgctgaggagatgtggcaatccagtcagcccctggctgtcctgccaagggtctcaaggcagctagccagcagctgcatgcttggtgactggagctactactactgccaggctgcctggtgaaccttttttgattctcagtaggtaccatctgccaccaagcactaagaaagggagctgaagtacctagaaagttcccatttgggaagtgttcctgtcacccaagagacaggatcaaggcatctcaacaaggtttaggtcaaccaagtgtccacccagtctgactttaaacccccatgctacagaaaggtttctggttttccaggtcttggttgccccttacgtccaaaggcaccagatcactcagcaaatgtccctgaattcagtgattggtggaagggaagacaccagcttttttggatagctgtgctgtatcaccgtttaaggcaagaagtgaatttttgtctgagaacagggagcaagggtttaatgggacagtacagcatctccctctttgcacaggtaagtataggtgggtgtctccatctctaatgtcaagctctgaccataaaggaatgctttagtgggtaatgggcctgtcctagagctttgctacccagaattccccttctgtctggtgttacctcttggaattcactgtggtaatgttcagagaggcaaatgtgttgggccaatagacattcccaggagaacatcctccagagcattgatttattttaagatggcactaagtgacatctctccccaagagatgatctctgacacaatcccatatgaaaactcttctgaaaatgaattgctaattgctattagccttgatgcacttactctaagcagttcttcagacttctggatcagtgcttctcaaactgtggttcttggacaacttacagtagaactacatgggtccttattaaaatacagatccatttcagacctaaaatcagaataagaatgggagtcagagggacccaggattagtatttttaaaacaagatttcttcattttaggtgtctgccctcagcctcctcagcaaggcagagtcagtctcaggtctacttgccattgtggttttgtgcatggtgctttgattctttgctaattatgttgcaggcacagtggtgtttgtcttctgtttcctaccaaactcagcttttttggctgtctgcgcctcacctcccatcttttctaggctgttgctgctttccaggtttctcccttgaatagctgtatgtgctggagtcttttctttatgttgaatcattttaatttttgtccttatttctaggatctagggtccttttgatctttcccttctctgtttatcgtgctagtcctcccagttttaatgatgggtaagtcaggaaagtaagactgggcacatattttctctctcccttcccactgtccatttgcgattcctccagactggatatgctactctctatgactcagaatcttattttctgtctgattcccttctgcttgagccagagagggctttttgttaatttttgttttgtttttaggttaagcttttagagactgctgagctgaagttttgctgaattctcaaaacactaaactgcctgtgttccctctcggctttcattttctaattggaacaaggcacagtattgtaacagagaactgcaattaattttctaaaatagtggcaacttgcacagtataataactttggttgtaaccaagtgaaagcataataacaaaaatacaaaattactaatgaaaccagaaagagtcatataccacattcttcctttagtttgtatctcagtaagtgctgtgttacttaggaataggggcagaagcctgcaactgggcagggaggttcagggacatgaggacgaagctagggcattttgagctagaaagcaagaataaggattagtgctttcaacactggaattaacatggaccacccccccacctcccaataagtggggattgtaggcacataagtggtttactnagncgagncncagaggtgagtttctgtggcgttcgagttccatcggctcccatccgggctatcctgccgccttagcggctgcttctccccaggatgcgggcagggggcctctctcccactccccacacaccgatttctgagtagcgataggggctggaggcttattttatggggtagggggccgctggtaggcgaagattgtccgagggagagggggaggatgaagccagtgcgtggcggagacttgcccggaccctgcagccgcagagatgttgatgcctaagaagaaccggattgccatttatgaactcctttttaaggagggagtcatggtggccaagaaggatgtccacatgcctaagcacccggagctggcagacaagaatgtgcccaaccttcatgtcatgaaggccatgcagtctctcaagtcccgaggctacgtgaaggaacagtttgcctggagacatttctactggtaccttaccaatgagggtatccagtatctccgtgattaccttcatctgcccccggagattgtgcctgccaccctacgccgtagccgtccagagactggcaggcctcggcctaaaggtctggagggtgagcgacctgcgagactcacaagaggggaagctgacagagatacctacagacggagtgctgtgccacctggtgccgacaagaaagccgaggctggggctgggtcagcaaccgaattccagtttagaggcggatttggtcgtggacgtggtcagccacctcagtaaaattggagaggattcttttgcattgaataaacttacagccaaaaaaccttaaaaaaaaaaaaaaaaaaaaaaaaactccgggggttcttttcggggggggggacaaaaggggtatgaaagtgggcctgggcaacgtttccccggacccgttttttttccaaaggggaattgcgggccccaagggggcggtaatcaaaaaccgttcctat

SEQ ID NO: 395102 - DNA, 3325 bp, Homo sapiens
  misc_feature (2381)..(2381): n is a, c, g, or t
  misc_feature (2384)..(2384): n is a, c, g, or t
  misc_feature (2389)..(2389): n is a, c, g, or t
  misc_feature (2391)..(2391): n is a, c, g, or t
ttttcatttaaatattcttcttttgcttctcttaagcagaagctggtctctgcttttcaccacctggaatcccagtcccaacagctgctcttctaacccttccggcctaattgtggaataatcgtttaaatcattaagagacagaatctgatgttggtagctctgacagacctctctagcttctttcataagccagggctcttgcccagctcctgcacacagcctgccagttctccatcttagcacagttccacttttccatagtagccagaaacatctggctgaagacaaacagttacaaagcagaagccaaggtgatgggatctgttgtcacatatggggctggcagctcaaggaatgtggttctctgctgaggagatgtggcaatccagtcagcccctggctgtcctgccaagggtctcaaggcagctagccagcagctgcatgcttggtgactggagctactactactgccaggctgcctggtgaaccttttttgattctcagtaggtaccatctgccaccaagcactaagaaagggagctgaagtacctagaaagttcccatttgggaagtgttcctgtcacccaagagacaggatcaaggcatctcaacaaggtttaggtcaaccaagtgtccacccagtctgactttaaacccccatgctacagaaaggtttctggttttccaggtcttggttgccccttacgtccaaaggcaccagatcactcagcaaatgtccctgaattcagtgattggtggaagggaagacaccagcttttttggatagctgtgctgtatcaccgtttaaggcaagaagtgaatttttgtctgagaacagggagcaagggtttaatgggacagtacagcatctccctctttgcacaggtaagtataggtgggtgtctccatctctaatgtcaagctctgaccataaaggaatgctttagtgggtaatgggcctgtcctagagctttgctacccagaattccccttctgtctggtgttacctcttggaattcactgtggtaatgttcagagaggcaaatgtgttgggccaatagacattcccaggagaacatcctccagagcattgatttattttaagatggcactaagtgacatctctccccaagagatgatctctgacacaatcccatatgaaaactcttctgaaaatgaattgctaattgctattagccttgatgcacttactctaagcagttcttcagacttctggatcagtgcttctcaaactgtggttcttggacaacttacagtagaactacatgggtccttattaaaatacagatccatttcagacctaaaatcagaataagaatgggagtcagagggacccaggattagtatttttaaaacaagatttcttcattttaggtgtctgccctcagcctcctcagcaaggcagagtcagtctcaggtctacttgccattgtggttttgtgcatggtgctttgattctttgctaattatgttgcaggcacagtggtgtttgtcttctgtttcctaccaaactcagcttttttggctgtctgcgcctcacctcccatcttttctaggctgttgctgctttccaggtttctcccttgaatagctgtatgtgctggagtcttttctttatgttgaatcattttaatttttgtccttatttctaggatctagggtccttttgatctttcccttctctgtttatcgtgctagtcctcccagttttaatgatgggtaagtcaggaaagtaagactgggcacatattttctctctcccttcccactgtccatttgcgattcctccagactggatatgctactctctatgactcagaatcttattttctgtctgattcccttctgcttgagccagagagggctttttgttaatttttgttttgtttttaggttaagcttttagagactgctgagctgaagttttgctgaattctcaaaacactaaactgcctgtgttccctctcggctttcattttctaattggaacaaggcacagtattgtaacagagaactgcaattaattttctaaaatagtggcaacttgcacagtataataactttggttgtaaccaagtgaaagcataataacaaaaatacaaaattactaatgaaaccagaaagagtcatataccacattcttcctttagtttgtatctcagtaagtgctgtgttacttaggaataggggcagaagcctgcaactgggcagggaggttcagggacatgaggacgaagctagggcattttgagctagaaagcaagaataaggattagtgctttcaacactggaattaacatggaccacccccccacctcccaataagtggggattgtaggcacataagtggtttactnagncgagncncagaggtgagtttctgtggcgttcgagttccatcggctcccatccgggctatcctgccgccttagcggctgcttctccccaggatgcgggcagggggcctctctcccactccccacacaccgatttctgagtagcgataggggctggaggcttattttatggggtagggggccgctggtaggcgaagattgtccgagggagagggggaggatgaagccagtgcgtggcggagacttgcccggaccctgcagccgcagagatgttgatgcctaagaagaaccggattgccatttatgaactcctttttaaggagggagtcatggtggccaagaaggatgtccacatgcctaagcacccggagctggcagacaagaatgtgcccaaccttcatgtcatgaaggccatgcagtctctcaagtcccgaggctacgtgaaggaacagtttgcctggagacatttctactggtaccttaccaatgagggtatccagtatctccgtgattaccttcatctgcccccggagattgtgcctgccaccctacgccgtagccgtccagagactggcaggcctcggcctaaaggtctggagggtgagcgacctgcgagactcacaagaggggaagctgacagagatacctacagacggagtgctgtgccacctggtgccgacaagaaagccgaggctggggctgggtcagcaaccgaattccagtttagaggcggatttggtcgtggacgtggtcagccacctcagtaaaattggagaggattcttttgcattgaataaacttacagccaaaaaaccttaaaaaaaaaaaaaacctcttccgctttcgccactcgaccgcgtcccacataaacaaaaacttcgggggggggcccgtacccaaactgcctcatatggggccgtttaacaattagtggccgcgttttc

SEQ ID NO: 395103 - DNA, 844 bp, Homo sapiens
  misc_feature (49)..(49): n is a, c, g, or t
  misc_feature (697)..(697): n is a, c, g, or t
  misc_feature (704)..(704): n is a, c, g, or t
aggacaacaacactgcacgcacaagcaagaaaacacttgcattgactanggccggtgggtttcactggcacgaaggctttccagccccggtaccggaccctgcagccgcagagatgttgatgcctaagaagaaccggattgccatttatgaactcctttttaaggagggagtcatggtggccaagaaggatgtccacatgcctaagcacccggagctggcagacaagaatgtgcccaaccttcatgtcatgaaggccatgcagtctctcaagtcccgaggctacgtgaaggaacagtttgcctggagacatttctactggtaccttaccaatgagggtatccagtatctccgtgattaccttcatctgcccccggagattgtgcctgccaccctacgccgtagccgtccagagactggcaggcctcggcctaaaggtctggagggtgagcgacctgcgagactcacaagaggggaagctgacagagatacctacagacggagtgctgtgccacctggtgccgacaagaaagccgaggctggggctgggtcagcaaccgaattccagtttagaggcggatttggtcgtggacgtggtcagccacctcagtaaaattggagaggattcttttgcattgaataaacttacagccaaaaaaccttaaaaaaaaaaaaaaaaaaaaaaaaaaaaaaaaaaanggggggnattaagggggggggggaaaaaggggtaggaaggggccaggggccaataggtgtccgggaccacgtttctgggcaccagggggaaaactccgcaggaccccataaaggagacgaataattccgaaaacccggtacccggta

SEQ ID NO: 395104 - DNA, 788 bp, Homo sapiens
  misc_feature (26)..(26): n is a, c, g, or t
  misc_feature (641)..(641): n is a, c, g, or t
  misc_feature (648)..(648): n is a, c, g, or t
aataggctagtacgaggctggtgtanatcggccgaggcggaccctgcagccgcagagatgttgatgcctaagaagaaccggattgccatttatgaactcctttttaaggagggagtcatggtggccaagaaggatgtccacatgcctaagcacccggagctggcagacaagaatgtgcccaaccttcatgtcatgaaggccatgcagtctctcaagtcccgaggctacgtgaaggaacagtttgcctggagacatttctactggtaccttaccaatgagggtatccagtatctccgtgattaccttcatctgcccccggagattgtgcctgccaccctacgccgtagccgtccagagactggcaggcctcggcctaaaggtctggagggtgagcgacctgcgagactcacaagaggggaagctgacagagatacctacagacggagtgctgtgccacctggtgccgacaagaaagccgaggctggggctgggtcagcaaccgaattccagtttagaggcggatttggtcgtggacgtggtcagccacctcagtaaaattggagaggattcttttgcattgaataaacttacagccaaaaaaccttaaaaaaaaaaaaaaaaaaaaaaaaaaaaaaaaaaanggggggnattaagggggggggggaaaaaggggtaggaaggggccaggggccaataggtgtccgggaccacgtttctgggcaccagggggaaaactccgcaggaccccataaaggagacgaataattccgaaaacccggtacccggta

SEQ ID NO: 395105 - DNA, 3328 bp, Homo sapiens
  misc_feature (2381)..(2381): n is a, c, g, or t
  misc_feature (2384)..(2384): n is a, c, g, or t
  misc_feature (2389)..(2389): n is a, c, g, or t
  misc_feature (2391)..(2391): n is a, c, g, or t
ttttcatttaaatattcttcttttgcttctcttaagcagaagctggtctctgcttttcaccacctggaatcccagtcccaacagctgctcttctaacccttccggcctaattgtggaataatcgtttaaatcattaagagacagaatctgatgttggtagctctgacagacctctctagcttctttcataagccagggctcttgcccagctcctgcacacagcctgccagttctccatcttagcacagttccacttttccatagtagccagaaacatctggctgaagacaaacagttacaaagcagaagccaaggtgatgggatctgttgtcacatatggggctggcagctcaaggaatgtggttctctgctgaggagatgtggcaatccagtcagcccctggctgtcctgccaagggtctcaaggcagctagccagcagctgcatgcttggtgactggagctactactactgccaggctgcctggtgaaccttttttgattctcagtaggtaccatctgccaccaagcactaagaaagggagctgaagtacctagaaagttcccatttgggaagtgttcctgtcacccaagagacaggatcaaggcatctcaacaaggtttaggtcaaccaagtgtccacccagtctgactttaaacccccatgctacagaaaggtttctggttttccaggtcttggttgccccttacgtccaaaggcaccagatcactcagcaaatgtccctgaattcagtgattggtggaagggaagacaccagcttttttggatagctgtgctgtatcaccgtttaaggcaagaagtgaatttttgtctgagaacagggagcaagggtttaatgggacagtacagcatctccctctttgcacaggtaagtataggtgggtgtctccatctctaatgtcaagctctgaccataaaggaatgctttagtgggtaatgggcctgtcctagagctttgctacccagaattccccttctgtctggtgttacctcttggaattcactgtggtaatgttcagagaggcaaatgtgttgggccaatagacattcccaggagaacatcctccagagcattgatttattttaagatggcactaagtgacatctctccccaagagatgatctctgacacaatcccatatgaaaactcttctgaaaatgaattgctaattgctattagccttgatgcacttactctaagcagttcttcagacttctggatcagtgcttctcaaactgtggttcttggacaacttacagtagaactacatgggtccttattaaaatacagatccatttcagacctaaaatcagaataagaatgggagtcagagggacccaggattagtatttttaaaacaagatttcttcattttaggtgtctgccctcagcctcctcagcaaggcagagtcagtctcaggtctacttgccattgtggttttgtgcatggtgctttgattctttgctaattatgttgcaggcacagtggtgtttgtcttctgtttcctaccaaactcagcttttttggctgtctgcgcctcacctcccatcttttctaggctgttgctgctttccaggtttctcccttgaatagctgtatgtgctggagtcttttctttatgttgaatcattttaatttttgtccttatttctaggatctagggtccttttgatctttcccttctctgtttatcgtgctagtcctcccagttttaatgatgggtaagtcaggaaagtaagactgggcacatattttctctctcccttcccactgtccatttgcgattcctccagactggatatgctactctctatgactcagaatcttattttctgtctgattcccttctgcttgagccagagagggctttttgttaatttttgttttgtttttaggttaagcttttagagactgctgagctgaagttttgctgaattctcaaaacactaaactgcctgtgttccctctcggctttcattttctaattggaacaaggcacagtattgtaacagagaactgcaattaattttctaaaatagtggcaacttgcacagtataataactttggttgtaaccaagtgaaagcataataacaaaaatacaaaattactaatgaaaccagaaagagtcatataccacattcttcctttagtttgtatctcagtaagtgctgtgttacttaggaataggggcagaagcctgcaactgggcagggaggttcagggacatgaggacgaagctagggcattttgagctagaaagcaagaataaggattagtgctttcaacactggaattaacatggaccacccccccacctcccaataagtggggattgtaggcacataagtggtttactnagncgagncncagaggtgagtttctgtggcgttcgagttccatcggctcccatccgggctatcctgccgccttagcggctgcttctccccaggatgcgggcagggggcctctctcccactccccacacaccgatttctgagtagcgataggggctggaggcttattttatggggtagggggccgctggtaggcgaagattgtccgagggagagggggaggatgaagccagtgcgtggcggagacttgcccggaccctgcagccgcagagatgttgatgcctaagaagaaccggattgccatttatgaactcctttttaaggagggagtcatggtggccaagaaggatgtccacatgcctaagcacccggagctggcagacaagaatgtgcccaaccttcatgtcatgaaggccatgcagtctctcaagtcccgaggctacgtgaaggaacagtttgcctggagacatttctactggtaccttaccaatgagggtatccagtatctccgtgattaccttcatctgcccccggagattgtgcctgccaccctacgccgtagccgtccagagactggcaggcctcggcctaaaggtctggagggtgagcgacctgcgagactcacaagaggggaagctgacagagatacctacagacggagtgctgtgccacctggtgccgacaagaaagccgaggctggggctgggtcagcaaccgaattccagtttagaggcggatttggtcgtggacgtggtcagccacctcagtaaaattggagaggattcttttgcattgaataaacttacagccaaaaaaaacaacacaaaacctccaaggcaacatcaatgacgggtgcgggcaccatagcgtactcacattgcgccctggcccacacctgtacctagacccacttttctgttcaaagtggcgatctgccggctccccaaaga

SEQ ID NO: 395106 - DNA, 3274 bp, Homo sapiens
  misc_feature (2381)..(2381): n is a, c, g, or t
  misc_feature (2384)..(2384): n is a, c, g, or t
  misc_feature (2389)..(2389): n is a, c, g, or t
  misc_feature (2391)..(2391): n is a, c, g, or t
ttttcatttaaatattcttcttttgcttctcttaagcagaagctggtctctgcttttcaccacctggaatcccagtcccaacagctgctcttctaacccttccggcctaattgtggaataatcgtttaaatcattaagagacagaatctgatgttggtagctctgacagacctctctagcttctttcataagccagggctcttgcccagctcctgcacacagcctgccagttctccatcttagcacagttccacttttccatagtagccagaaacatctggctgaagacaaacagttacaaagcagaagccaaggtgatgggatctgttgtcacatatggggctggcagctcaaggaatgtggttctctgctgaggagatgtggcaatccagtcagcccctggctgtcctgccaagggtctcaaggcagctagccagcagctgcatgcttggtgactggagctactactactgccaggctgcctggtgaaccttttttgattctcagtaggtaccatctgccaccaagcactaagaaagggagctgaagtacctagaaagttcccatttgggaagtgttcctgtcacccaagagacaggatcaaggcatctcaacaaggtttaggtcaaccaagtgtccacccagtctgactttaaacccccatgctacagaaaggtttctggttttccaggtcttggttgccccttacgtccaaaggcaccagatcactcagcaaatgtccctgaattcagtgattggtggaagggaagacaccagcttttttggatagctgtgctgtatcaccgtttaaggcaagaagtgaatttttgtctgagaacagggagcaagggtttaatgggacagtacagcatctccctctttgcacaggtaagtataggtgggtgtctccatctctaatgtcaagctctgaccataaaggaatgctttagtgggtaatgggcctgtcctagagctttgctacccagaattccccttctgtctggtgttacctcttggaattcactgtggtaatgttcagagaggcaaatgtgttgggccaatagacattcccaggagaacatcctccagagcattgatttattttaagatggcactaagtgacatctctccccaagagatgatctctgacacaatcccatatgaaaactcttctgaaaatgaattgctaattgctattagccttgatgcacttactctaagcagttcttcagacttctggatcagtgcttctcaaactgtggttcttggacaacttacagtagaactacatgggtccttattaaaatacagatccatttcagacctaaaatcagaataagaatgggagtcagagggacccaggattagtatttttaaaacaagatttcttcattttaggtgtctgccctcagcctcctcagcaaggcagagtcagtctcaggtctacttgccattgtggttttgtgcatggtgctttgattctttgctaattatgttgcaggcacagtggtgtttgtcttctgtttcctaccaaactcagcttttttggctgtctgcgcctcacctcccatcttttctaggctgttgctgctttccaggtttctcccttgaatagctgtatgtgctggagtcttttctttatgttgaatcattttaatttttgtccttatttctaggatctagggtccttttgatctttcccttctctgtttatcgtgctagtcctcccagttttaatgatgggtaagtcaggaaagtaagactgggcacatattttctctctcccttcccactgtccatttgcgattcctccagactggatatgctactctctatgactcagaatcttattttctgtctgattcccttctgcttgagccagagagggctttttgttaatttttgttttgtttttaggttaagcttttagagactgctgagctgaagttttgctgaattctcaaaacactaaactgcctgtgttccctctcggctttcattttctaattggaacaaggcacagtattgtaacagagaactgcaattaattttctaaaatagtggcaacttgcacagtataataactttggttgtaaccaagtgaaagcataataacaaaaatacaaaattactaatgaaaccagaaagagtcatataccacattcttcctttagtttgtatctcagtaagtgctgtgttacttaggaataggggcagaagcctgcaactgggcagggaggttcagggacatgaggacgaagctagggcattttgagctagaaagcaagaataaggattagtgctttcaacactggaattaacatggaccacccccccacctcccaataagtggggattgtaggcacataagtggtttactnagncgagncncagaggtgagtttctgtggcgttcgagttccatcggctcccatccgggctatcctgccgccttagcggctgcttctccccaggatgcgggcagggggcctctctcccactccccacacaccgatttctgagtagcgataggggctggaggcttattttatggggtagggggccgctggtaggcgaagattgtccgagggagagggggaggatgaagccagtgcgtggcggagacttgcccggaccctgcagccgcagagatgttgatgcctaagaagaaccggattgccatttatgaactcctttttaaggagggagtcatggtggccaagaaggatgtccacatgcctaagcacccggagctggcagacaagaatgtgcccaaccttcatgtcatgaaggccatgcagtctctcaagtcccgaggctacgtgaaggaacagtttgcctggagacatttctactggtaccttaccaatgagggtatccagtatctccgtgattaccttcatctgcccccggagattgtgcctgccaccctacgccgtagccgtccagagactggcaggcctcggcctaaaggtctggagggtgagcgacctgcgagactcacaagaggggaagctgacagagatacctacagacggagtgctgtgccacctggtgccgacaagaaagccgaggctggggctgggtcagcaaccgaattccagtttagaggcggatttggtcgtggacgtggtcagccacctcagtaaaattggagaggattcttttgcattgaataaacttacagcaaaaaaaaaaaattccgcgctgatccggaaagggcgacctcgaggggccgggacacatttgcctaagggggaaaaagcagggacagg

SEQ ID NO: 395107 - DNA, 3307 bp, Homo sapiens
  misc_feature (2381)..(2381): n is a, c, g, or t
  misc_feature (2384)..(2384): n is a, c, g, or t
  misc_feature (2389)..(2389): n is a, c, g, or t
  misc_feature (2391)..(2391): n is a, c, g, or t
ttttcatttaaatattcttcttttgcttctcttaagcagaagctggtctctgcttttcaccacctggaatcccagtcccaacagctgctcttctaacccttccggcctaattgtggaataatcgtttaaatcattaagagacagaatctgatgttggtagctctgacagacctctctagcttctttcataagccagggctcttgcccagctcctgcacacagcctgccagttctccatcttagcacagttccacttttccatagtagccagaaacatctggctgaagacaaacagttacaaagcagaagccaaggtgatgggatctgttgtcacatatggggctggcagctcaaggaatgtggttctctgctgaggagatgtggcaatccagtcagcccctggctgtcctgccaagggtctcaaggcagctagccagcagctgcatgcttggtgactggagctactactactgccaggctgcctggtgaaccttttttgattctcagtaggtaccatctgccaccaagcactaagaaagggagctgaagtacctagaaagttcccatttgggaagtgttcctgtcacccaagagacaggatcaaggcatctcaacaaggtttaggtcaaccaagtgtccacccagtctgactttaaacccccatgctacagaaaggtttctggttttccaggtcttggttgccccttacgtccaaaggcaccagatcactcagcaaatgtccctgaattcagtgattggtggaagggaagacaccagcttttttggatagctgtgctgtatcaccgtttaaggcaagaagtgaatttttgtctgagaacagggagcaagggtttaatgggacagtacagcatctccctctttgcacaggtaagtataggtgggtgtctccatctctaatgtcaagctctgaccataaaggaatgctttagtgggtaatgggcctgtcctagagctttgctacccagaattccccttctgtctggtgttacctcttggaattcactgtggtaatgttcagagaggcaaatgtgttgggccaatagacattcccaggagaacatcctccagagcattgatttattttaagatggcactaagtgacatctctccccaagagatgatctctgacacaatcccatatgaaaactcttctgaaaatgaattgctaattgctattagccttgatgcacttactctaagcagttcttcagacttctggatcagtgcttctcaaactgtggttcttggacaacttacagtagaactacatgggtccttattaaaatacagatccatttcagacctaaaatcagaataagaatgggagtcagagggacccaggattagtatttttaaaacaagatttcttcattttaggtgtctgccctcagcctcctcagcaaggcagagtcagtctcaggtctacttgccattgtggttttgtgcatggtgctttgattctttgctaattatgttgcaggcacagtggtgtttgtcttctgtttcctaccaaactcagcttttttggctgtctgcgcctcacctcccatcttttctaggctgttgctgctttccaggtttctcccttgaatagctgtatgtgctggagtcttttctttatgttgaatcattttaatttttgtccttatttctaggatctagggtccttttgatctttcccttctctgtttatcgtgctagtcctcccagttttaatgatgggtaagtcaggaaagtaagactgggcacatattttctctctcccttcccactgtccatttgcgattcctccagactggatatgctactctctatgactcagaatcttattttctgtctgattcccttctgcttgagccagagagggctttttgttaatttttgttttgtttttaggttaagcttttagagactgctgagctgaagttttgctgaattctcaaaacactaaactgcctgtgttccctctcggctttcattttctaattggaacaaggcacagtattgtaacagagaactgcaattaattttctaaaatagtggcaacttgcacagtataataactttggttgtaaccaagtgaaagcataataacaaaaatacaaaattactaatgaaaccagaaagagtcatataccacattcttcctttagtttgtatctcagtaagtgctgtgttacttaggaataggggcagaagcctgcaactgggcagggaggttcagggacatgaggacgaagctagggcattttgagctagaaagcaagaataaggattagtgctttcaacactggaattaacatggaccacccccccacctcccaataagtggggattgtaggcacataagtggtttactnagncgagncncagaggtgagtttctgtggcgttcgagttccatcggctcccatccgggctatcctgccgccttagcggctgcttctccccaggatgcgggcagggggcctctctcccactccccacacaccgatttctgagtagcgataggggctggaggcttattttatggggtagggggccgctggtaggcgaagattgtccgagggagagggggaggatgaagccagtgcgtggcggagacttgcccggaccctgcagccgcagagatgttgatgcctaagaagaaccggattgccatttatgaactcctttttaaggagggagtcatggtggccaagaaggatgtccacatgcctaagcacccggagctggcagacaagaatgtgcccaaccttcatgtcatgaaggccatgcagtctctcaagtcccgaggctacgtgaaggaacagtttgcctggagacatttctactggtaccttaccaatgagggtatccagtatctccgtgattaccttcatctgcccccggagattgtgcctgccaccctacgccgtagccgtccagagactggcaggcctcggcctaaaggtctggagggtgagcgacctgcgagactcacaagaggggaagctgacagagatacctacagacggagtgctgtgccacctggtgccgacaagaaagccgaggctggggctgggtcagcaaccgaattccagtttagaggcggatttggtcgtggacgtggtcagccacctcagtaaaattggagaggattcttttgcattgaataaacttacagcaaaaacttaaaaaaaaaaaaattcggggttagtgggtgggaaaaggggtatgatggcatggtctagtgttctgaccagttttgtaagggagttggggcccaagggggttatgaagcgacg

SEQ ID NO: 395108 - DNA, 3645 bp, Homo sapiens
  misc_feature (2381)..(2381): n is a, c, g, or t
  misc_feature (2384)..(2384): n is a, c, g, or t
  misc_feature (2389)..(2389): n is a, c, g, or t
  misc_feature (2391)..(2391): n is a, c, g, or t
ttttcatttaaatattcttcttttgcttctcttaagcagaagctggtctctgcttttcaccacctggaatcccagtcccaacagctgctcttctaacccttccggcctaattgtggaataatcgtttaaatcattaagagacagaatctgatgttggtagctctgacagacctctctagcttctttcataagccagggctcttgcccagctcctgcacacagcctgccagttctccatcttagcacagttccacttttccatagtagccagaaacatctggctgaagacaaacagttacaaagcagaagccaaggtgatgggatctgttgtcacatatggggctggcagctcaaggaatgtggttctctgctgaggagatgtggcaatccagtcagcccctggctgtcctgccaagggtctcaaggcagctagccagcagctgcatgcttggtgactggagctactactactgccaggctgcctggtgaaccttttttgattctcagtaggtaccatctgccaccaagcactaagaaagggagctgaagtacctagaaagttcccatttgggaagtgttcctgtcacccaagagacaggatcaaggcatctcaacaaggtttaggtcaaccaagtgtccacccagtctgactttaaacccccatgctacagaaaggtttctggttttccaggtcttggttgccccttacgtccaaaggcaccagatcactcagcaaatgtccctgaattcagtgattggtggaagggaagacaccagcttttttggatagctgtgctgtatcaccgtttaaggcaagaagtgaatttttgtctgagaacagggagcaagggtttaatgggacagtacagcatctccctctttgcacaggtaagtataggtgggtgtctccatctctaatgtcaagctctgaccataaaggaatgctttagtgggtaatgggcctgtcctagagctttgctacccagaattccccttctgtctggtgttacctcttggaattcactgtggtaatgttcagagaggcaaatgtgttgggccaatagacattcccaggagaacatcctccagagcattgatttattttaagatggcactaagtgacatctctccccaagagatgatctctgacacaatcccatatgaaaactcttctgaaaatgaattgctaattgctattagccttgatgcacttactctaagcagttcttcagacttctggatcagtgcttctcaaactgtggttcttggacaacttacagtagaactacatgggtccttattaaaatacagatccatttcagacctaaaatcagaataagaatgggagtcagagggacccaggattagtatttttaaaacaagatttcttcattttaggtgtctgccctcagcctcctcagcaaggcagagtcagtctcaggtctacttgccattgtggttttgtgcatggtgctttgattctttgctaattatgttgcaggcacagtggtgtttgtcttctgtttcctaccaaactcagcttttttggctgtctgcgcctcacctcccatcttttctaggctgttgctgctttccaggtttctcccttgaatagctgtatgtgctggagtcttttctttatgttgaatcattttaatttttgtccttatttctaggatctagggtccttttgatctttcccttctctgtttatcgtgctagtcctcccagttttaatgatgggtaagtcaggaaagtaagactgggcacatattttctctctcccttcccactgtccatttgcgattcctccagactggatatgctactctctatgactcagaatcttattttctgtctgattcccttctgcttgagccagagagggctttttgttaatttttgttttgtttttaggttaagcttttagagactgctgagctgaagttttgctgaattctcaaaacactaaactgcctgtgttccctctcggctttcattttctaattggaacaaggcacagtattgtaacagagaactgcaattaattttctaaaatagtggcaacttgcacagtataataactttggttgtaaccaagtgaaagcataataacaaaaatacaaaattactaatgaaaccagaaagagtcatataccacattcttcctttagtttgtatctcagtaagtgctgtgttacttaggaataggggcagaagcctgcaactgggcagggaggttcagggacatgaggacgaagctagggcattttgagctagaaagcaagaataaggattagtgctttcaacactggaattaacatggaccacccccccacctcccaataagtggggattgtaggcacataagtggtttactnagncgagncncagaggtgagtttctgtggcgttcgagttccatcggctcccatccgggctatcctgccgccttagcggctgcttctccccaggatgcgggcagggggcctctctcccactccccacacaccgatttctgagtagcgataggggctggaggcttattttatggggtagggggccgctggtaggcgaagattgtccgagggagagggggaggatgaagccagtgcgtggcggagacttgcccggaccctgcagccgcagagatgttgatgcctaagaagaaccggattgccatttatgaactcctttttaaggagggagtcatggtggccaagaaggatgtccacatgcctaagcacccggagctggcagacaagaatgtgcccaaccttcatgtcatgaaggccatgcagtctctcaagtcccgaggctacgtgaaggaacagtttgcctggagacatttctactggtaccttaccaatgagggtatccagtatctccgtgattaccttcatctgcccccggagattgtgcctgccaccctacgccgtagccgtccagagactggcaggcctcggcctaaaggtctggagggtgagcgacctgcgagactcacaagaggggaagctgacagagatacctacagacggagtgctgtgccacctggtgccgacaagaaagccgaggctggggctgggtcagcaaccgaattccagtttagaggcggatttggtcgtggacgtggtcagccacctcagtaaaattggagaggattcttttgcattgaataaacttacagccaaaaaaaaccttaaaaaaagataactccaacgtgtcactgaagctcaagcggctagagtacggggtcctgagaagcagcgttaccaaggtgacatgtggcacaagctgctcaatatgcaaattcttggtccccgaggggtgaaattcggcgaggtgcccattagtcggggcgcgatacgactaagagaagagcgcaggttactctggtagatagcgcgctgaacacaacacaggaggacccgtcccaaataaagaattttggggatacacatacataggatcgggagccatcaaaaaccaaggatcacaaaaaaaacagcaggggacgaaacagaggtgagcccacaagacgagtgcagcgatggcacagtggcaacagagactcaacgagaccgatgatgtgcagaagggaagaacaacgaacccaaagaagggagataccaaaacagaagaaagc

SEQ ID NO: 395109 - DNA, 3374 bp, Homo sapiens
  misc_feature (2381)..(2381): n is a, c, g, or t
  misc_feature (2384)..(2384): n is a, c, g, or t
  misc_feature (2389)..(2389): n is a, c, g, or t
  misc_feature (2391)..(2391): n is a, c, g, or t
  misc_feature (3296)..(3296): n is a, c, g, or t
  misc_feature (3301)..(3301): n is a, c, g, or t
  misc_feature (3304)..(3304): n is a, c, g, or t
  misc_feature (3308)..(3309): n is a, c, g, or t
  misc_feature (3315)..(3315): n is a, c, g, or t
  misc_feature (3320)..(3320): n is a, c, g, or t
  misc_feature (3322)..(3322): n is a, c, g, or t
  misc_feature (3326)..(3326): n is a, c, g, or t
  misc_feature (3333)..(3333): n is a, c, g, or t
  misc_feature (3353)..(3353): n is a, c, g, or t
  misc_feature (3357)..(3357): n is a, c, g, or t
  misc_feature (3360)..(3360): n is a, c, g, or t
ttttcatttaaatattcttcttttgcttctcttaagcagaagctggtctctgcttttcaccacctggaatcccagtcccaacagctgctcttctaacccttccggcctaattgtggaataatcgtttaaatcattaagagacagaatctgatgttggtagctctgacagacctctctagcttctttcataagccagggctcttgcccagctcctgcacacagcctgccagttctccatcttagcacagttccacttttccatagtagccagaaacatctggctgaagacaaacagttacaaagcagaagccaaggtgatgggatctgttgtcacatatggggctggcagctcaaggaatgtggttctctgctgaggagatgtggcaatccagtcagcccctggctgtcctgccaagggtctcaaggcagctagccagcagctgcatgcttggtgactggagctactactactgccaggctgcctggtgaaccttttttgattctcagtaggtaccatctgccaccaagcactaagaaagggagctgaagtacctagaaagttcccatttgggaagtgttcctgtcacccaagagacaggatcaaggcatctcaacaaggtttaggtcaaccaagtgtccacccagtctgactttaaacccccatgctacagaaaggtttctggttttccaggtcttggttgccccttacgtccaaaggcaccagatcactcagcaaatgtccctgaattcagtgattggtggaagggaagacaccagcttttttggatagctgtgctgtatcaccgtttaaggcaagaagtgaatttttgtctgagaacagggagcaagggtttaatgggacagtacagcatctccctctttgcacaggtaagtataggtgggtgtctccatctctaatgtcaagctctgaccataaaggaatgctttagtgggtaatgggcctgtcctagagctttgctacccagaattccccttctgtctggtgttacctcttggaattcactgtggtaatgttcagagaggcaaatgtgttgggccaatagacattcccaggagaacatcctccagagcattgatttattttaagatggcactaagtgacatctctccccaagagatgatctctgacacaatcccatatgaaaactcttctgaaaatgaattgctaattgctattagccttgatgcacttactctaagcagttcttcagacttctggatcagtgcttctcaaactgtggttcttggacaacttacagtagaactacatgggtccttattaaaatacagatccatttcagacctaaaatcagaataagaatgggagtcagagggacccaggattagtatttttaaaacaagatttcttcattttaggtgtctgccctcagcctcctcagcaaggcagagtcagtctcaggtctacttgccattgtggttttgtgcatggtgctttgattctttgctaattatgttgcaggcacagtggtgtttgtcttctgtttcctaccaaactcagcttttttggctgtctgcgcctcacctcccatcttttctaggctgttgctgctttccaggtttctcccttgaatagctgtatgtgctggagtcttttctttatgttgaatcattttaatttttgtccttatttctaggatctagggtccttttgatctttcccttctctgtttatcgtgctagtcctcccagttttaatgatgggtaagtcaggaaagtaagactgggcacatattttctctctcccttcccactgtccatttgcgattcctccagactggatatgctactctctatgactcagaatcttattttctgtctgattcccttctgcttgagccagagagggctttttgttaatttttgttttgtttttaggttaagcttttagagactgctgagctgaagttttgctgaattctcaaaacactaaactgcctgtgttccctctcggctttcattttctaattggaacaaggcacagtattgtaacagagaactgcaattaattttctaaaatagtggcaacttgcacagtataataactttggttgtaaccaagtgaaagcataataacaaaaatacaaaattactaatgaaaccagaaagagtcatataccacattcttcctttagtttgtatctcagtaagtgctgtgttacttaggaataggggcagaagcctgcaactgggcagggaggttcagggacatgaggacgaagctagggcattttgagctagaaagcaagaataaggattagtgctttcaacactggaattaacatggaccacccccccacctcccaataagtggggattgtaggcacataagtggtttactnagncgagncncagaggtgagtttctgtggcgttcgagttccatcggctcccatccgggctatcctgccgccttagcggctgcttctccccaggatgcgggcagggggcctctctcccactccccacacaccgatttctgagtagcgataggggctggaggcttattttatggggtagggggccgctggtaggcgaagattgtccgagggagagggggaggatgaagccagtgcgtggcggagacttgcccggaccctgcagccgcagagatgttgatgcctaagaagaaccggattgccatttatgaactcctttttaaggagggagtcatggtggccaagaaggatgtccacatgcctaagcacccggagctggcagacaagaatgtgcccaaccttcatgtcatgaaggccatgcagtctctcaagtcccgaggctacgtgaaggaacagtttgcctggagacatttctactggtaccttaccaatgagggtatccagtatctccgtgattaccttcatctgcccccggagattgtgcctgccaccctacgccgtagccgtccagagactggcaggcctcggcctaaaggtctggagggtgagcgacctgcgagactcacaagaggggaagctgacagagatacctacagacggagtgctgtgccacctggtgccgacaagaaagccgaggctggggctgggtcagcaaccgaattccagtttagaggcggatttggtcgtggacgtggtcagccacctcagtaaaattggagaggattcttttgcattgaataaacttacagccaaaaaaccttaaaaaaaaaaaaaaaaacaaaaaaaacaaaacaaacaaaaaaaaaaccccggggcgttcttttgggggggggggaaaaaggggtttcaaagggccggnggcangtnttcnnggcccnttttngnccangggggancgcgggcccccaaggggggntaantcnaaccggggacggta

SEQ ID NO: 395110 - DNA, 3268 bp, Homo sapiens
  misc_feature (2381)..(2381): n is a, c, g, or t
  misc_feature (2384)..(2384): n is a, c, g, or t
  misc_feature (2389)..(2389): n is a, c, g, or t
  misc_feature (2391)..(2391): n is a, c, g, or t
ttttcatttaaatattcttcttttgcttctcttaagcagaagctggtctctgcttttcaccacctggaatcccagtcccaacagctgctcttctaacccttccggcctaattgtggaataatcgtttaaatcattaagagacagaatctgatgttggtagctctgacagacctctctagcttctttcataagccagggctcttgcccagctcctgcacacagcctgccagttctccatcttagcacagttccacttttccatagtagccagaaacatctggctgaagacaaacagttacaaagcagaagccaaggtgatgggatctgttgtcacatatggggctggcagctcaaggaatgtggttctctgctgaggagatgtggcaatccagtcagcccctggctgtcctgccaagggtctcaaggcagctagccagcagctgcatgcttggtgactggagctactactactgccaggctgcctggtgaaccttttttgattctcagtaggtaccatctgccaccaagcactaagaaagggagctgaagtacctagaaagttcccatttgggaagtgttcctgtcacccaagagacaggatcaaggcatctcaacaaggtttaggtcaaccaagtgtccacccagtctgactttaaacccccatgctacagaaaggtttctggttttccaggtcttggttgccccttacgtccaaaggcaccagatcactcagcaaatgtccctgaattcagtgattggtggaagggaagacaccagcttttttggatagctgtgctgtatcaccgtttaaggcaagaagtgaatttttgtctgagaacagggagcaagggtttaatgggacagtacagcatctccctctttgcacaggtaagtataggtgggtgtctccatctctaatgtcaagctctgaccataaaggaatgctttagtgggtaatgggcctgtcctagagctttgctacccagaattccccttctgtctggtgttacctcttggaattcactgtggtaatgttcagagaggcaaatgtgttgggccaatagacattcccaggagaacatcctccagagcattgatttattttaagatggcactaagtgacatctctccccaagagatgatctctgacacaatcccatatgaaaactcttctgaaaatgaattgctaattgctattagccttgatgcacttactctaagcagttcttcagacttctggatcagtgcttctcaaactgtggttcttggacaacttacagtagaactacatgggtccttattaaaatacagatccatttcagacctaaaatcagaataagaatgggagtcagagggacccaggattagtatttttaaaacaagatttcttcattttaggtgtctgccctcagcctcctcagcaaggcagagtcagtctcaggtctacttgccattgtggttttgtgcatggtgctttgattctttgctaattatgttgcaggcacagtggtgtttgtcttctgtttcctaccaaactcagcttttttggctgtctgcgcctcacctcccatcttttctaggctgttgctgctttccaggtttctcccttgaatagctgtatgtgctggagtcttttctttatgttgaatcattttaatttttgtccttatttctaggatctagggtccttttgatctttcccttctctgtttatcgtgctagtcctcccagttttaatgatgggtaagtcaggaaagtaagactgggcacatattttctctctcccttcccactgtccatttgcgattcctccagactggatatgctactctctatgactcagaatcttattttctgtctgattcccttctgcttgagccagagagggctttttgttaatttttgttttgtttttaggttaagcttttagagactgctgagctgaagttttgctgaattctcaaaacactaaactgcctgtgttccctctcggctttcattttctaattggaacaaggcacagtattgtaacagagaactgcaattaattttctaaaatagtggcaacttgcacagtataataactttggttgtaaccaagtgaaagcataataacaaaaatacaaaattactaatgaaaccagaaagagtcatataccacattcttcctttagtttgtatctcagtaagtgctgtgttacttaggaataggggcagaagcctgcaactgggcagggaggttcagggacatgaggacgaagctagggcattttgagctagaaagcaagaataaggattagtgctttcaacactggaattaacatggaccacccccccacctcccaataagtggggattgtaggcacataagtggtttactnagncgagncncagaggtgagtttctgtggcgttcgagttccatcggctcccatccgggctatcctgccgccttagcggctgcttctccccaggatgcgggcagggggcctctctcccactccccacacaccgatttctgagtagcgataggggctggaggcttattttatggggtagggggccgctggtaggcgaagattgtccgagggagagggggaggatgaagccagtgcgtggcggagacttgcccggaccctgcagccgcagagatgttgatgcctaagaagaaccggattgccatttatgaactcctttttaaggagggagtcatggtggccaagaaggatgtccacatgcctaagcacccggagctggcagacaagaatgtgcccaaccttcatgtcatgaaggccatgcagtctctcaagtcccgaggctacgtgaaggaacagtttgcctggagacatttctactggtaccttaccaatgagggtatccagtatctccgtgattaccttcatctgcccccggagattgtgcctgccaccctacgccgtagccgtccagagactggcaggcctcggcctaaaggtctggagggtgagcgacctgcgagactcacaagaggggaagctgacagagatacctacagacggagtgctgtgccacctggtgccgacaagaaagccgaggctggggctgggtcagcaaccgaattccagtttagaggcggatttggtcgtggacgtggtcagccacctcagtaaaattggagaggattcttttgcattgaataaacttacagccaaaaaaaaccttaaaaaaaaaaaacaaaaaaaaaaacaccaacaccgaaaaaccaggggggcccaatctcccgggggcac

SEQ ID NO: 395111 - DNA, 3237 bp, Homo sapiens
  misc_feature (2381)..(2381): n is a, c, g, or t
  misc_feature (2384)..(2384): n is a, c, g, or t
  misc_feature (2389)..(2389): n is a, c, g, or t
  misc_feature (2391)..(2391): n is a, c, g, or t
  misc_feature (3196)..(3196): n is a, c, g, or t
  misc_feature (3198)..(3198): n is a, c, g, or t
ttttcatttaaatattcttcttttgcttctcttaagcagaagctggtctctgcttttcaccacctggaatcccagtcccaacagctgctcttctaacccttccggcctaattgtggaataatcgtttaaatcattaagagacagaatctgatgttggtagctctgacagacctctctagcttctttcataagccagggctcttgcccagctcctgcacacagcctgccagttctccatcttagcacagttccacttttccatagtagccagaaacatctggctgaagacaaacagttacaaagcagaagccaaggtgatgggatctgttgtcacatatggggctggcagctcaaggaatgtggttctctgctgaggagatgtggcaatccagtcagcccctggctgtcctgccaagggtctcaaggcagctagccagcagctgcatgcttggtgactggagctactactactgccaggctgcctggtgaaccttttttgattctcagtaggtaccatctgccaccaagcactaagaaagggagctgaagtacctagaaagttcccatttgggaagtgttcctgtcacccaagagacaggatcaaggcatctcaacaaggtttaggtcaaccaagtgtccacccagtctgactttaaacccccatgctacagaaaggtttctggttttccaggtcttggttgccccttacgtccaaaggcaccagatcactcagcaaatgtccctgaattcagtgattggtggaagggaagacaccagcttttttggatagctgtgctgtatcaccgtttaaggcaagaagtgaatttttgtctgagaacagggagcaagggtttaatgggacagtacagcatctccctctttgcacaggtaagtataggtgggtgtctccatctctaatgtcaagctctgaccataaaggaatgctttagtgggtaatgggcctgtcctagagctttgctacccagaattccccttctgtctggtgttacctcttggaattcactgtggtaatgttcagagaggcaaatgtgttgggccaatagacattcccaggagaacatcctccagagcattgatttattttaagatggcactaagtgacatctctccccaagagatgatctctgacacaatcccatatgaaaactcttctgaaaatgaattgctaattgctattagccttgatgcacttactctaagcagttcttcagacttctggatcagtgcttctcaaactgtggttcttggacaacttacagtagaactacatgggtccttattaaaatacagatccatttcagacctaaaatcagaataagaatgggagtcagagggacccaggattagtatttttaaaacaagatttcttcattttaggtgtctgccctcagcctcctcagcaaggcagagtcagtctcaggtctacttgccattgtggttttgtgcatggtgctttgattctttgctaattatgttgcaggcacagtggtgtttgtcttctgtttcctaccaaactcagcttttttggctgtctgcgcctcacctcccatcttttctaggctgttgctgctttccaggtttctcccttgaatagctgtatgtgctggagtcttttctttatgttgaatcattttaatttttgtccttatttctaggatctagggtccttttgatctttcccttctctgtttatcgtgctagtcctcccagttttaatgatgggtaagtcaggaaagtaagactgggcacatattttctctctcccttcccactgtccatttgcgattcctccagactggatatgctactctctatgactcagaatcttattttctgtctgattcccttctgcttgagccagagagggctttttgttaatttttgttttgtttttaggttaagcttttagagactgctgagctgaagttttgctgaattctcaaaacactaaactgcctgtgttccctctcggctttcattttctaattggaacaaggcacagtattgtaacagagaactgcaattaattttctaaaatagtggcaacttgcacagtataataactttggttgtaaccaagtgaaagcataataacaaaaatacaaaattactaatgaaaccagaaagagtcatataccacattcttcctttagtttgtatctcagtaagtgctgtgttacttaggaataggggcagaagcctgcaactgggcagggaggttcagggacatgaggacgaagctagggcattttgagctagaaagcaagaataaggattagtgctttcaacactggaattaacatggaccacccccccacctcccaataagtggggattgtaggcacataagtggtttactnagncgagncncagaggtgagtttctgtggcgttcgagttccatcggctcccatccgggctatcctgccgccttagcggctgcttctccccaggatgcgggcagggggcctctctcccactccccacacaccgatttctgagtagcgataggggctggaggcttattttatggggtagggggccgctggtaggcgaagattgtccgagggagagggggaggatgaagccagtgcgtggcggagacttgcccggaccctgcagccgcagagatgttgatgcctaagaagaaccggattgccatttatgaactcctttttaaggagggagtcatggtggccaagaaggatgtccacatgcctaagcacccggagctggcagacaagaatgtgcccaaccttcatgtcatgaaggccatgcagtctctcaagtcccgaggctacgtgaaggaacagtttgcctggagacatttctactggtaccttaccaatgagggtatccagtatctccgtgattaccttcatctgcccccggagattgtgcctgccaccctacgccgtagccgtccagagactggcaggcctcggcctaaaggtctggagggtgagcgacctgcgagactcacaagaggggaagctgacagagatacctacagacggagtgctgtgccacctggtgccgacaagaaagccgaggctggggctgggtcagcaaccgaattccagtttagaggcggatttggtcgtggacgtggtcagccacctcagtaaaattggagaggattcttttgcattgaataaacttggatgcgcgcagancnggggatccgagtccaaccatttctcaattctcagcaacc

SEQ ID NO: 395112 - DNA, 3824 bp, Homo sapiens
  misc_feature (2381)..(2381): n is a, c, g, or t
  misc_feature (2384)..(2384): n is a, c, g, or t
  misc_feature (2389)..(2389): n is a, c, g, or t
  misc_feature (2391)..(2391): n is a, c, g, or t
ttttcatttaaatattcttcttttgcttctcttaagcagaagctggtctctgcttttcaccacctggaatcccagtcccaacagctgctcttctaacccttccggcctaattgtggaataatcgtttaaatcattaagagacagaatctgatgttggtagctctgacagacctctctagcttctttcataagccagggctcttgcccagctcctgcacacagcctgccagttctccatcttagcacagttccacttttccatagtagccagaaacatctggctgaagacaaacagttacaaagcagaagccaaggtgatgggatctgttgtcacatatggggctggcagctcaaggaatgtggttctctgctgaggagatgtggcaatccagtcagcccctggctgtcctgccaagggtctcaaggcagctagccagcagctgcatgcttggtgactggagctactactactgccaggctgcctggtgaaccttttttgattctcagtaggtaccatctgccaccaagcactaagaaagggagctgaagtacctagaaagttcccatttgggaagtgttcctgtcacccaagagacaggatcaaggcatctcaacaaggtttaggtcaaccaagtgtccacccagtctgactttaaacccccatgctacagaaaggtttctggttttccaggtcttggttgccccttacgtccaaaggcaccagatcactcagcaaatgtccctgaattcagtgattggtggaagggaagacaccagcttttttggatagctgtgctgtatcaccgtttaaggcaagaagtgaatttttgtctgagaacagggagcaagggtttaatgggacagtacagcatctccctctttgcacaggtaagtataggtgggtgtctccatctctaatgtcaagctctgaccataaaggaatgctttagtgggtaatgggcctgtcctagagctttgctacccagaattccccttctgtctggtgttacctcttggaattcactgtggtaatgttcagagaggcaaatgtgttgggccaatagacattcccaggagaacatcctccagagcattgatttattttaagatggcactaagtgacatctctccccaagagatgatctctgacacaatcccatatgaaaactcttctgaaaatgaattgctaattgctattagccttgatgcacttactctaagcagttcttcagacttctggatcagtgcttctcaaactgtggttcttggacaacttacagtagaactacatgggtccttattaaaatacagatccatttcagacctaaaatcagaataagaatgggagtcagagggacccaggattagtatttttaaaacaagatttcttcattttaggtgtctgccctcagcctcctcagcaaggcagagtcagtctcaggtctacttgccattgtggttttgtgcatggtgctttgattctttgctaattatgttgcaggcacagtggtgtttgtcttctgtttcctaccaaactcagcttttttggctgtctgcgcctcacctcccatcttttctaggctgttgctgctttccaggtttctcccttgaatagctgtatgtgctggagtcttttctttatgttgaatcattttaatttttgtccttatttctaggatctagggtccttttgatctttcccttctctgtttatcgtgctagtcctcccagttttaatgatgggtaagtcaggaaagtaagactgggcacatattttctctctcccttcccactgtccatttgcgattcctccagactggatatgctactctctatgactcagaatcttattttctgtctgattcccttctgcttgagccagagagggctttttgttaatttttgttttgtttttaggttaagcttttagagactgctgagctgaagttttgctgaattctcaaaacactaaactgcctgtgttccctctcggctttcattttctaattggaacaaggcacagtattgtaacagagaactgcaattaattttctaaaatagtggcaacttgcacagtataataactttggttgtaaccaagtgaaagcataataacaaaaatacaaaattactaatgaaaccagaaagagtcatataccacattcttcctttagtttgtatctcagtaagtgctgtgttacttaggaataggggcagaagcctgcaactgggcagggaggttcagggacatgaggacgaagctagggcattttgagctagaaagcaagaataaggattagtgctttcaacactggaattaacatggaccacccccccacctcccaataagtggggattgtaggcacataagtggtttactnagncgagncncagaggtgagtttctgtggcgttcgagttccatcggctcccatccgggctatcctgccgccttagcggctgcttctccccaggatgcgggcagggggcctctctcccactccccacacaccgatttctgagtagcgataggggctggaggcttattttatggggtagggggccgctggtaggcgaagattgtccgagggagagggggaggatgaagccagtgcgtggcggagacttgcccggaccctgcagccgcagagatgttgatgcctaagaagaaccggattgccatttatgaactcctttttaaggagggagtcatggtggccaagaaggatgtccacatgcctaagcacccggagctggcagacaagaatgtgcccaaccttcatgtcatgaaggccatgcagtctctcaagtcccgaggctacgtgaaggaacagtttgcctggagacatttctactggtaccttaccaatgagggtatccagtatctccgtgattaccttcatctgcccccggagattgtgcctgccaccctacgccgtagccgtccagagactggcaggcctcggcctaaaggtctggagggtgagcgacctgcgagactcacaagaggggaagctgacagagatacctacagacggagtgctgtgccacctggtgccgacaagaaagccgaggctggggctgggtcagcaaccgaattccagtttagaggcggatttggtcgtggacgtggtcagccacctcagtaaaattggagaggattcttttgcattgaataaacttacagccaaaaaaaaaaaacttcaataaatacgtgtctaactgaaatcactaaaaactaaaaaatcatggtgcgggccgaccgtcccactctatcaagatgttttcacatactcaactgagtgtggggcggctaggctctcctagtggtaagtctacacctaggaatactctgcgctgtgtctttactagagcagtatcaccaggggccacagcaaccataaggtgcagtagtgtttactacatcctactaacgaaaaaccgccgcgcgtgtgagtacacaccagcgcgttgtgttcttattacaatacaaacccgcaatggaaggggccatatctccaagagcgaggcaaactgccggtggaaatcgtctttcgacagcagtgacggtttcccatgagtgtgcttaccgaccacattatgcttagatgtcattcccctctcccgccattggtgttgcgaatccggcaccatataactatttagctacatcaaccaatacaacgccataaggactccaacttataaagcagttgcttaacatagcttcaaccttcctgcattcttggcccataacgaaacttaattcagaaaagcttactcttgaaagacctatacccaaacccttttaagtagtaggaccta

SEQ ID NO: 395113 - DNA, 3920 bp, Homo sapiens
  misc_feature (2381)..(2381): n is a, c, g, or t
  misc_feature (2384)..(2384): n is a, c, g, or t
  misc_feature (2389)..(2389): n is a, c, g, or t
  misc_feature (2391)..(2391): n is a, c, g, or t
  misc_feature (3212)..(3213): n is a, c, g, or t
  misc_feature (3216)..(3216): n is a, c, g, or t
  misc_feature (3838)..(3838): n is a, c, g, or t
  misc_feature (3918)..(3920): n is a, c, g, or t
ttttcatttaaatattcttcttttgcttctcttaagcagaagctggtctctgcttttcaccacctggaatcccagtcccaacagctgctcttctaacccttccggcctaattgtggaataatcgtttaaatcattaagagacagaatctgatgttggtagctctgacagacctctctagcttctttcataagccagggctcttgcccagctcctgcacacagcctgccagttctccatcttagcacagttccacttttccatagtagccagaaacatctggctgaagacaaacagttacaaagcagaagccaaggtgatgggatctgttgtcacatatggggctggcagctcaaggaatgtggttctctgctgaggagatgtggcaatccagtcagcccctggctgtcctgccaagggtctcaaggcagctagccagcagctgcatgcttggtgactggagctactactactgccaggctgcctggtgaaccttttttgattctcagtaggtaccatctgccaccaagcactaagaaagggagctgaagtacctagaaagttcccatttgggaagtgttcctgtcacccaagagacaggatcaaggcatctcaacaaggtttaggtcaaccaagtgtccacccagtctgactttaaacccccatgctacagaaaggtttctggttttccaggtcttggttgccccttacgtccaaaggcaccagatcactcagcaaatgtccctgaattcagtgattggtggaagggaagacaccagcttttttggatagctgtgctgtatcaccgtttaaggcaagaagtgaatttttgtctgagaacagggagcaagggtttaatgggacagtacagcatctccctctttgcacaggtaagtataggtgggtgtctccatctctaatgtcaagctctgaccataaaggaatgctttagtgggtaatgggcctgtcctagagctttgctacccagaattccccttctgtctggtgttacctcttggaattcactgtggtaatgttcagagaggcaaatgtgttgggccaatagacattcccaggagaacatcctccagagcattgatttattttaagatggcactaagtgacatctctccccaagagatgatctctgacacaatcccatatgaaaactcttctgaaaatgaattgctaattgctattagccttgatgcacttactctaagcagttcttcagacttctggatcagtgcttctcaaactgtggttcttggacaacttacagtagaactacatgggtccttattaaaatacagatccatttcagacctaaaatcagaataagaatgggagtcagagggacccaggattagtatttttaaaacaagatttcttcattttaggtgtctgccctcagcctcctcagcaaggcagagtcagtctcaggtctacttgccattgtggttttgtgcatggtgctttgattctttgctaattatgttgcaggcacagtggtgtttgtcttctgtttcctaccaaactcagcttttttggctgtctgcgcctcacctcccatcttttctaggctgttgctgctttccaggtttctcccttgaatagctgtatgtgctggagtcttttctttatgttgaatcattttaatttttgtccttatttctaggatctagggtccttttgatctttcccttctctgtttatcgtgctagtcctcccagttttaatgatgggtaagtcaggaaagtaagactgggcacatattttctctctcccttcccactgtccatttgcgattcctccagactggatatgctactctctatgactcagaatcttattttctgtctgattcccttctgcttgagccagagagggctttttgttaatttttgttttgtttttaggttaagcttttagagactgctgagctgaagttttgctgaattctcaaaacactaaactgcctgtgttccctctcggctttcattttctaattggaacaaggcacagtattgtaacagagaactgcaattaattttctaaaatagtggcaacttgcacagtataataactttggttgtaaccaagtgaaagcataataacaaaaatacaaaattactaatgaaaccagaaagagtcatataccacattcttcctttagtttgtatctcagtaagtgctgtgttacttaggaataggggcagaagcctgcaactgggcagggaggttcagggacatgaggacgaagctagggcattttgagctagaaagcaagaataaggattagtgctttcaacactggaattaacatggaccacccccccacctcccaataagtggggattgtaggcacataagtggtttactnagncgagncncagaggtgagtttctgtggcgttcgagttccatcggctcccatccgggctatcctgccgccttagcggctgcttctccccaggatgcgggcagggggcctctctcccactccccacacaccgatttctgagtagcgataggggctggaggcttattttatggggtagggggccgctggtaggcgaagattgtccgagggagagggggaggatgaagccagtgcgtggcggagacttgcccggaccctgcagccgcagagatgttgatgcctaagaagaaccggattgccatttatgaactcctttttaaggagggagtcatggtggccaagaaggatgtccacatgcctaagcacccggagctggcagacaagaatgtgcccaaccttcatgtcatgaaggccatgcagtctctcaagtcccgaggctacgtgaaggaacagtttgcctggagacatttctactggtaccttaccaatgagggtatccagtatctccgtgattaccttcatctgcccccggagattgtgcctgccaccctacgccgtagccgtccagagactggcaggcctcggcctaaaggtctggagggtgagcgacctgcgagactcacaagaggggaagctgacagagatacctacagacggagtgctgtgccacctggtgccgacaagaaagccgaggctggggctgggtcagcaaccgaattccagtttagaggcggatttggtcgtggacgtggtcagccacctcagtaaaattggagaggattcttttgcattgaataaacttacagccaaaaaaccttaaaaaaaaaagcannganatttcggggcattttgggagggggggggaaacaggggtgaggaacggggcctgggccgatacctggtgtctctgacccagcttttccttggtcgcaaacgtggcgcaaaaatcaggcggggagtaccctataaggggaggccgcatcaaatttcgcgaaaaagccgaggtgtacctgcgtagagattggacagaaaaaacaaaaaaacacaaacacgggacttatccgggggggtgggaaccacaagggggaggagccaccaacaccccagcggtcggctcacacaacagagcccggcgtccaacaacacacactttctacaaacaaaaggggagcacaatcagagaggcaccatccaacaacagcaaagcaagccaactaattattccacacaacgaagagggagggatacgtgtaaaacacagactaagggacgagctagggcggtgtgttgagggcgcacacatcgctccccgcggcgagatagcaaggagtaagaaaacactaagtcagtcagatcagcggtaataatagagtactctaacaacaacacacaagaagatagtacgacagcagcagaagcacagctaagaatagtgacagacgaaaacagtcagagcancgacataaaatgcaacgtagctcgaggaagtcaagtacacatagcagagtattaggtcgcagcacaagattgagtatacnnn

SEQ ID NO: 395114 - DNA, 3241 bp, Homo sapiens
  misc_feature (2381)..(2381): n is a, c, g, or t
  misc_feature (2384)..(2384): n is a, c, g, or t
  misc_feature (2389)..(2389): n is a, c, g, or t
  misc_feature (2391)..(2391): n is a, c, g, or t
ttttcatttaaatattcttcttttgcttctcttaagcagaagctggtctctgcttttcaccacctggaatcccagtcccaacagctgctcttctaacccttccggcctaattgtggaataatcgtttaaatcattaagagacagaatctgatgttggtagctctgacagacctctctagcttctttcataagccagggctcttgcccagctcctgcacacagcctgccagttctccatcttagcacagttccacttttccatagtagccagaaacatctggctgaagacaaacagttacaaagcagaagccaaggtgatgggatctgttgtcacatatggggctggcagctcaaggaatgtggttctctgctgaggagatgtggcaatccagtcagcccctggctgtcctgccaagggtctcaaggcagctagccagcagctgcatgcttggtgactggagctactactactgccaggctgcctggtgaaccttttttgattctcagtaggtaccatctgccaccaagcactaagaaagggagctgaagtacctagaaagttcccatttgggaagtgttcctgtcacccaagagacaggatcaaggcatctcaacaaggtttaggtcaaccaagtgtccacccagtctgactttaaacccccatgctacagaaaggtttctggttttccaggtcttggttgccccttacgtccaaaggcaccagatcactcagcaaatgtccctgaattcagtgattggtggaagggaagacaccagcttttttggatagctgtgctgtatcaccgtttaaggcaagaagtgaatttttgtctgagaacagggagcaagggtttaatgggacagtacagcatctccctctttgcacaggtaagtataggtgggtgtctccatctctaatgtcaagctctgaccataaaggaatgctttagtgggtaatgggcctgtcctagagctttgctacccagaattccccttctgtctggtgttacctcttggaattcactgtggtaatgttcagagaggcaaatgtgttgggccaatagacattcccaggagaacatcctccagagcattgatttattttaagatggcactaagtgacatctctccccaagagatgatctctgacacaatcccatatgaaaactcttctgaaaatgaattgctaattgctattagccttgatgcacttactctaagcagttcttcagacttctggatcagtgcttctcaaactgtggttcttggacaacttacagtagaactacatgggtccttattaaaatacagatccatttcagacctaaaatcagaataagaatgggagtcagagggacccaggattagtatttttaaaacaagatttcttcattttaggtgtctgccctcagcctcctcagcaaggcagagtcagtctcaggtctacttgccattgtggttttgtgcatggtgctttgattctttgctaattatgttgcaggcacagtggtgtttgtcttctgtttcctaccaaactcagcttttttggctgtctgcgcctcacctcccatcttttctaggctgttgctgctttccaggtttctcccttgaatagctgtatgtgctggagtcttttctttatgttgaatcattttaatttttgtccttatttctaggatctagggtccttttgatctttcccttctctgtttatcgtgctagtcctcccagttttaatgatgggtaagtcaggaaagtaagactgggcacatattttctctctcccttcccactgtccatttgcgattcctccagactggatatgctactctctatgactcagaatcttattttctgtctgattcccttctgcttgagccagagagggctttttgttaatttttgttttgtttttaggttaagcttttagagactgctgagctgaagttttgctgaattctcaaaacactaaactgcctgtgttccctctcggctttcattttctaattggaacaaggcacagtattgtaacagagaactgcaattaattttctaaaatagtggcaacttgcacagtataataactttggttgtaaccaagtgaaagcataataacaaaaatacaaaattactaatgaaaccagaaagagtcatataccacattcttcctttagtttgtatctcagtaagtgctgtgttacttaggaataggggcagaagcctgcaactgggcagggaggttcagggacatgaggacgaagctagggcattttgagctagaaagcaagaataaggattagtgctttcaacactggaattaacatggaccacccccccacctcccaataagtggggattgtaggcacataagtggtttactnagncgagncncagaggtgagtttctgtggcgttcgagttccatcggctcccatccgggctatcctgccgccttagcggctgcttctccccaggatgcgggcagggggcctctctcccactccccacacaccgatttctgagtagcgataggggctggaggcttattttatggggtagggggccgctggtaggcgaagattgtccgagggagagggggaggatgaagccagtgcgtggcggagacttgcccggaccctgcagccgcagagatgttgatgcctaagaagaaccggattgccatttatgaactcctttttaaggagggagtcatggtggccaagaaggatgtccacatgcctaagcacccggagctggcagacaagaatgtgcccaaccttcatgtcatgaaggccatgcagtctctcaagtcccgaggctacgtgaaggaacagtttgcctggagacatttctactggtaccttaccaatgagggtatccagtatctccgtgattaccttcatctgcccccggagattgtgcctgccaccctacgccgtagccgtccagagactggcaggcctcggcctaaaggtctggagggtgagcgacctgcgagactcacaagaggggaagctgacagagatacctacagacggagtgctgtgccacctggtgccgacaagaaagccgaggctggggctgggtcagcaaccgaattccagtttagaggcggatttggtcgtggacgtggtcagccacctcagtaaaattggagaggattcttttgcattgaataaacttcgatagcgacaaggatcgctcatgtttgttgcaacctcaagggacatgtttgtagtatg

SEQ ID NO: 395115 - DNA, 781 bp, Homo sapiens
  misc_feature (26)..(26): n is a, c, g, or t
  misc_feature (703)..(703): n is a, c, g, or t
  misc_feature (708)..(708): n is a, c, g, or t
  misc_feature (711)..(711): n is a, c, g, or t
  misc_feature (715)..(716): n is a, c, g, or t
  misc_feature (722)..(722): n is a, c, g, or t
  misc_feature (727)..(727): n is a, c, g, or t
  misc_feature (729)..(729): n is a, c, g, or t
  misc_feature (733)..(733): n is a, c, g, or t
  misc_feature (740)..(740): n is a, c, g, or t
  misc_feature (760)..(760): n is a, c, g, or t
  misc_feature (764)..(764): n is a, c, g, or t
  misc_feature (767)..(767): n is a, c, g, or t
aataggctagtacgaggctggtgtanatcggccgaggcggaccctgcagccgcagagatgttgatgcctaagaagaaccggattgccatttatgaactcctttttaaggagggagtcatggtggccaagaaggatgtccacatgcctaagcacccggagctggcagacaagaatgtgcccaaccttcatgtcatgaaggccatgcagtctctcaagtcccgaggctacgtgaaggaacagtttgcctggagacatttctactggtaccttaccaatgagggtatccagtatctccgtgattaccttcatctgcccccggagattgtgcctgccaccctacgccgtagccgtccagagactggcaggcctcggcctaaaggtctggagggtgagcgacctgcgagactcacaagaggggaagctgacagagatacctacagacggagtgctgtgccacctggtgccgacaagaaagccgaggctggggctgggtcagcaaccgaattccagtttagaggcggatttggtcgtggacgtggtcagccacctcagtaaaattggagaggattcttttgcattgaataaacttacagccaaaaaaccttaaaaaaaaaaaaaaaaacaaaaaaaacaaaacaaacaaaaaaaaaaccccggggcgttcttttgggggggggggaaaaaggggtttcaaagggccggnggcangtnttcnnggcccnttttngnccangggggancgcgggcccccaaggggggntaantcnaaccggggacggta

SEQ ID NO: 395116 - DNA, 922 bp, Homo sapiens
aattcgcggccgcgtcgacgacagaagggtcctttccagccccggtaccggaccctgcagccgcagagatgttgatgcctaagaagaaccggattgccatttatgaactcctttttaaggagggagtcatggtggccaagaaggatgtccacatgcctaagcacccggagctggcagatgtcatgaaggccatgcagtctctcaagtcccgaggctacgtgaaggaacagtttgcctggagacatttctactggtaccttaccaatgagggtatccagtatctccgtgattaccttcatctgcccccggagattgtgcctgccaccctacgccgtagccgtccagagactggcaggcctcggcctaaaggtctggagggtgagcgacctgcgagactcacaagaggggaagctgacagagatacctacagacggagtgctgtgccacctggtgccgacaagaaagccgaggctggggctgggtcagcaaccgaattccagtttagaggcggatttggtcgtggacgtggtcagccacctcagtaaaattggagaggattcttttgcattgaataaacttacagccaaaaaaccttaaaaaaaaaaaaaaaaaaaaaaaaaaaaaaaaaaaaaaaaaaaaaaaccccggggcctaaatggggggggggaaaaaggggaaaaaaaggggccggggcacaaaaggaggtgcacagacccaccgtattttttgcacaacaagggggaaaaaatcagcggcgggccaccccataaaaggagggggcggaaataaaatttgcgaaacaccccagggtaaccagcgatataaaagacagccgagaagaacacgcggagtagagcccacccagacacacagaggagagcataatggacgaagacacaccagaacgagaacatcctcacac

SEQ ID NO: 395117 - DNA, 3504 bp, Homo sapiens
  misc_feature (2381)..(2381): n is a, c, g, or t
  misc_feature (2384)..(2384): n is a, c, g, or t
  misc_feature (2389)..(2389): n is a, c, g, or t
  misc_feature (2391)..(2391): n is a, c, g, or t
ttttcatttaaatattcttcttttgcttctcttaagcagaagctggtctctgcttttcaccacctggaatcccagtcccaacagctgctcttctaacccttccggcctaattgtggaataatcgtttaaatcattaagagacagaatctgatgttggtagctctgacagacctctctagcttctttcataagccagggctcttgcccagctcctgcacacagcctgccagttctccatcttagcacagttccacttttccatagtagccagaaacatctggctgaagacaaacagttacaaagcagaagccaaggtgatgggatctgttgtcacatatggggctggcagctcaaggaatgtggttctctgctgaggagatgtggcaatccagtcagcccctggctgtcctgccaagggtctcaaggcagctagccagcagctgcatgcttggtgactggagctactactactgccaggctgcctggtgaaccttttttgattctcagtaggtaccatctgccaccaagcactaagaaagggagctgaagtacctagaaagttcccatttgggaagtgttcctgtcacccaagagacaggatcaaggcatctcaacaaggtttaggtcaaccaagtgtccacccagtctgactttaaacccccatgctacagaaaggtttctggttttccaggtcttggttgccccttacgtccaaaggcaccagatcactcagcaaatgtccctgaattcagtgattggtggaagggaagacaccagcttttttggatagctgtgctgtatcaccgtttaaggcaagaagtgaatttttgtctgagaacagggagcaagggtttaatgggacagtacagcatctccctctttgcacaggtaagtataggtgggtgtctccatctctaatgtcaagctctgaccataaaggaatgctttagtgggtaatgggcctgtcctagagctttgctacccagaattccccttctgtctggtgttacctcttggaattcactgtggtaatgttcagagaggcaaatgtgttgggccaatagacattcccaggagaacatcctccagagcattgatttattttaagatggcactaagtgacatctctccccaagagatgatctctgacacaatcccatatgaaaactcttctgaaaatgaattgctaattgctattagccttgatgcacttactctaagcagttcttcagacttctggatcagtgcttctcaaactgtggttcttggacaacttacagtagaactacatgggtccttattaaaatacagatccatttcagacctaaaatcagaataagaatgggagtcagagggacccaggattagtatttttaaaacaagatttcttcattttaggtgtctgccctcagcctcctcagcaaggcagagtcagtctcaggtctacttgccattgtggttttgtgcatggtgctttgattctttgctaattatgttgcaggcacagtggtgtttgtcttctgtttcctaccaaactcagcttttttggctgtctgcgcctcacctcccatcttttctaggctgttgctgctttccaggtttctcccttgaatagctgtatgtgctggagtcttttctttatgttgaatcattttaatttttgtccttatttctaggatctagggtccttttgatctttcccttctctgtttatcgtgctagtcctcccagttttaatgatgggtaagtcaggaaagtaagactgggcacatattttctctctcccttcccactgtccatttgcgattcctccagactggatatgctactctctatgactcagaatcttattttctgtctgattcccttctgcttgagccagagagggctttttgttaatttttgttttgtttttaggttaagcttttagagactgctgagctgaagttttgctgaattctcaaaacactaaactgcctgtgttccctctcggctttcattttctaattggaacaaggcacagtattgtaacagagaactgcaattaattttctaaaatagtggcaacttgcacagtataataactttggttgtaaccaagtgaaagcataataacaaaaatacaaaattactaatgaaaccagaaagagtcatataccacattcttcctttagtttgtatctcagtaagtgctgtgttacttaggaataggggcagaagcctgcaactgggcagggaggttcagggacatgaggacgaagctagggcattttgagctagaaagcaagaataaggattagtgctttcaacactggaattaacatggaccacccccccacctcccaataagtggggattgtaggcacataagtggtttactnagncgagncncagaggtgagtttctgtggcgttcgagttccatcggctcccatccgggctatcctgccgccttagcggctgcttctccccaggatgcgggcagggggcctctctcccactccccacacaccgatttctgagtagcgataggggctggaggcttattttatggggtagggggccgctggtaggcgaagattgtccgagggagagggggaggatgaagccagtgcgtggcggagacttgcccggaccctgcagccgcagagatgttgatgcctaagaagaaccggattgccatttatgaactcctttttaaggagggagtcatggtggccaagaaggatgtccacatgcctaagcacccggagctggcagatgtcatgaaggccatgcagtctctcaagtcccgaggctacgtgaaggaacagtttgcctggagacatttctactggtaccttaccaatgagggtatccagtatctccgtgattaccttcatctgcccccggagattgtgcctgccaccctacgccgtagccgtccagagactggcaggcctcggcctaaaggtctggagggtgagcgacctgcgagactcacaagaggggaagctgacagagatacctacagacggagtgctgtgccacctggtgccgacaagaaagccgaggctggggctgggtcagcaaccgaattccagtttagaggcggatttggtcgtggacgtggtcagccacctcagtaaaattggagaggattcttttgcattgaataaacttacagccaaaaaaccttaaaaaaaaaaaaaaaaaaaaaaaaaaaaaaaaaaaaaaaaaaaaaaaccccggggcctaaatggggggggggaaaaaggggaaaaaaaggggccggggcacaaaaggaggtgcacagacccaccgtattttttgcacaacaagggggaaaaaatcagcggcgggccaccccataaaaggagggggcggaaataaaatttgcgaaacaccccagggtaaccagcgatataaaagacagccgagaagaacacgcggagtagagcccacccagacacacagaggagagcataatggacgaagacacaccagaacgagaacatcctcacac

SEQ ID NO: 395118 - DNA, 1063 bp, Homo sapiens
  misc_feature (185)..(185): n is a, c, g, or t
  misc_feature (187)..(188): n is a, c, g, or t
ctgagattactgccagtgcactccagcctggacgacagagcgagacggtctcaaaacatggtgctggagaaactggatatgtacatgcaaatgaaatgaaagttggaccactactacatgcaaaaattaactcaaaacacatcaaagacctctacataagaatgaaaactagctgtccagccccngnnccggaccctgcagccgcagagatgttgatgcctaagaagaaccggattgccatttatgaactcctttttaaggagggagtcatggtggccaagaaggatgtccacatgcctaagcacccggagctggcagatgtcatgaaggccatgcagtctctcaagtcccgaggctacgtgaaggaacagtttgcctggagacatttctactggtaccttaccaatgagggtatccagtatctccgtgattaccttcatctgcccccggagattgtgcctgccaccctacgccgtagccgtccagagactggcaggcctcggcctaaaggtctggagggtgagcgacctgcgagactcacaagaggggaagctgacagagatacctacagacggagtgctgtgccacctggtgccgacaagaaagccgaggctggggctgggtcagcaaccgaattccagtttagaggcggatttggtcgtggacgtggtcagccacctcagtaaaattggagaggattcttttgcattgaataaacttacagccaaaaaaccttaaaaaaaaaaaaaaaaaaaaaaaaaaaaaaaaaaaaaaaaaaaaaaaccccggggcctaaatggggggggggaaaaaggggaaaaaaaggggccggggcacaaaaggaggtgcacagacccaccgtattttttgcacaacaagggggaaaaaatcagcggcgggccaccccataaaaggagggggcggaaataaaatttgcgaaacaccccagggtaaccagcgatataaaagacagccgagaagaacacgcggagtagagcccacccagacacacagaggagagcataatggacgaagacacaccagaacgagaacatcctcacac

SEQ ID NO: 395119 - DNA, 955 bp, Homo sapiens
  misc_feature (7)..(7): n is a, c, g, or t
  misc_feature (9)..(9): n is a, c, g, or t
  misc_feature (12)..(12): n is a, c, g, or t
  misc_feature (93)..(93): n is a, c, g, or t
gcaaagncngcntcccacagcgctggtccacctgatcgtggagcacgacaggttgtaccatggaagagccgctcgttggtctcggaatgcagntgctggggccgacccacccgcaaatgcgccggcctcgtgccgaattcggcacgagtaaggagggagtcatggtggccaagaaggatgtccacatgcctaagcacccggagctggcagatgtcatgaaggccatgcagtctctcaagtcccgaggctacgtgaaggaacagtttgcctggagacatttctactggtaccttaccaatgagggtatccagtatctccgtgattaccttcatctgcccccggagattgtgcctgccaccctacgccgtagccgtccagagactggcaggcctcggcctaaaggtctggagggtgagcgacctgcgagactcacaagaggggaagctgacagagatacctacagacggagtgctgtgccacctggtgccgacaagaaagccgaggctggggctgggtcagcaaccgaattccagtttagaggcggatttggtcgtggacgtggtcagccacctcagtaaaattggagaggattcttttgcattgaataaacttacagccaaaaaaccttaaaaaaaaaaaaaaaaaaaaaaaaaaaaaaaaaaaaaaaaaaaaaaaccccggggcctaaatggggggggggaaaaaggggaaaaaaaggggccggggcacaaaaggaggtgcacagacccaccgtattttttgcacaacaagggggaaaaaatcagcggcgggccaccccataaaaggagggggcggaaataaaatttgcgaaacaccccagggtaaccagcgatataaaagacagccgagaagaacacgcggagtagagcccacccagacacacagaggagagcataatggacgaagacacaccagaacgagaacatcctcacac

SEQ ID NO: 395120 - DNA, 917 bp, Homo sapiens
tccgtgattaccttcatctgcccccggagatacctggataccctcattggtaaggtaccaatgagggtatccagtatctccgtgattaccttcatctgcccccggagattgtgcctgccaccctacgccgtagccgtccagagactggcaggcctcggcctaaaggtctggagggtgagcgacctgcgagactcacaagaggggaagctgacagagatacctacagacggagtgctgtgccacctggtgccgacaagaaagccgaggctggggctgggtcagcaaccgaattccagtttagaggcggatttggtcgtggacgtggtcagccacctcagtaaaattggagaggattcttttgcattgaataaacttacagccaaaaaaccttaaaaaaaaaaaaaaaaaaaaaaaaaaaaaaaaaaaaaaaaaaaaaaaaaaaaaaaaaaaaaaaaaaaaaaaaaaaagagagcgagggggggcgcgcggcgcgcccagaataatatctcccccgcggggggcgccccacagttgagcgggccgccccccgcttttttgggtacagggggggcccccatgaggggggcgcgtttataaaaacagcgggggggtgggggcgcgccgggtaaaaccagcgctccggaggcggcgaaaaacccgcgggccggcgggcaatcgtggggggagaaggaccccccactcgttgcggggcgcgcggccttgtggggcgaccacccccccccaaagcgaatataaggacgcgggagaaaaacaaaacagaagggcgtctcgggcgacacccccgaggcaatgtgtgcggccggccaaaaaatgggacaaggaaataataataaaaacaaatttgagcggcccgcactctaaacataacaggcagaagaaaacgccagccaataaac

SEQ ID NO: 395121 - DNA, 909 bp, Homo sapiens
ggacgcgtgggtcgacccacgcgtcgccggaccctgcagccgcagagatgttgatgcctaagaagaaccggattgccatttatgaactcctttttaaggagggagtcatggtggccaagaaggatgtccacatgcctaagcacccggagctggcagatgtcatgaaggccatgcagtctctcaagtcccgaggctacgtgaaggaacagtttgcctggagacatttctactggtaccttaccaatgagggtatccagtatctccgtgattaccttcatctgcccccggagattgtgcctgccaccctacgccgtagccgtccagagactggcaggcctcggcctaaaggtctggagggtgagcgacctgcgagactcacaagaggggaagctgacagagatacctacagacggagtgctgtgccacctggtgccgacaagaaagccgaggctggggctgggtcagcaaccgaattccagtttagaggcggatttggtcgtggacgtggtcagccacctcagtaaaattggagaggattcttttgcattgaataaacttacagccaaaaaaccttaaaaaaaaaaaaaacctcgaaactagttctcttctctccccggtagggggtggaggctcacacctgtaatccagccatttagggaggcccaaggctgcaggatgcgtgagatcgggagtccaagaaccaagcgtgggcaacatagttgagaccttgtctctattcttacaaacttttaacaagccacggttggcacaggtcttaaggtcacagctgctcaggaggctgaagggcagggtcctttggaacacaaaagttggagggttgcgcaagccatgataccccatgatcccactggtggaagaataaacctgtccaacttcttaatggagacc

SEQ ID NO: 395122 - DNA, 802 bp, Homo sapiens
ggacgcgtgggtcgacccacgcgtcgccggaccctgcagccgcagagatgttgatgcctaagaagaaccggattgccatttatgaactcctttttaaggagggagtcatggtggccaagaaggatgtccacatgcctaagcacccggagctggcagatgtcatgaaggccatgcagtctctcaagtcccgaggctacgtgaaggaacagtttgcctggagacatttctactggtaccttaccaatgagggtatccagtatctccgtgattaccttcatctgcccccggagattgtgcctgccaccctacgccgtagccgtccagagactggcaggcctcggcctaaaggtctggagggtgagcgacctgcgagactcacaagaggggaagctgacagagatacctacagacggagtgctgtgccacctggtgccgacaagaaagccgaggctggggctgggtcagcaaccgaattccagtttagaggcggatttggtcgtggacgtggtcagccacctcagtaaaattggagaggattcttttgcattgaataaacttacagccaaaaaaccttaaaaaaaaaaaaaaaaacaaaaaaaacaaaacaaacaaaaaaaaaagaaaaaaaaaaaaaaaaaaaaaaacctgcgggggtatatatttggggtgggagaaaagaggtgtaaaaggggcgaagggacaacaaggccacagagcacgggatgtgtaaacacaagggagaaaccaggggccaccaaaaagagagggcgaaaacacgagagagcgggcgagacacgcgata

SEQ ID NO: 395123 - DNA, 1242 bp, Homo sapiens
ggacgcgtgggtcgacccacgcgtcgccggaccctgcagccgcagagatgttgatgcctaagaagaaccggattgccatttatgaactcctttttaaggagggagtcatggtggccaagaaggatgtccacatgcctaagcacccggagctggcagatgtcatgaaggccatgcagtctctcaagtcccgaggctacgtgaaggaacagtttgcctggagacatttctactggtaccttaccaatgagggtatccagtatctccgtgattaccttcatctgcccccggagattgtgcctgccaccctacgccgtagccgtccagagactggcaggcctcggcctaaaggtctggagggtgagcgacctgcgagactcacaagaggggaagctgacagagatacctacagacggagtgctgtgccacctggtgccgacaagaaagccgaggctggggctgggtcagcaaccgaattccagtttagaggcggatttggtcgtggacgtggtcagccacctcagtaaaattggagaggattcttttgcattgaataaacttacagccaaaaaaccttaaaaaaaaaaaaaaaaacaaaacaaaaaacaaaaacaacccacaccacccaacaaaacacaaacgaagacaaacgaaaaacacacgcgaccaacaccgcggcgaacacaacagccacacagagcagagctacacgaaccccgaccacatacacagagagcgacacggccacccacagaagggaacacaccacgcagcgcccagtaccacaccgcagaaaccacaaaacacacgagcgaacacacagcacacacacacagcagatgacgagccaaaaccgagcgcagcacagacaaacacagccacaacacaacgaacaacacctcccgccgccgccgtcgctagccgcagcacagaaaaaaaaacacaacacaaaagaaagaaaagaagcacacaaaaacagcaagaaacaaaaacgagaaagagaggcacacgggagagacagcgtgagaaagaaaagacaaggcaagaaacgagagaaccagcaacacgaacacgacacaccagaacaaccacgacgaaggacaccagagaaggaacaccaacacgacggaagaaagaacgaagaaagaaaccaaacacgaggaagcaggacaacaaaaagcccccaaaaagaccacgaaaacacaacaccaacaacaaccaaagaaaagacacacacgacacaca

SEQ ID NO: 395124 - DNA, 829 bp, Homo sapiens
  misc_feature (563)..(563): n is a, c, g, or t
ggacgcgtgggtcgacccacgcgtcgccggaccctgcagccgcagagatgttgatgcctaagaagaaccggattgccatttatgaactcctttttaaggagggagtcatggtggccaagaaggatgtccacatgcctaagcacccggagctggcagatgtcatgaaggccatgcagtctctcaagtcccgaggctacgtgaaggaacagtttgcctggagacatttctactggtaccttaccaatgagggtatccagtatctccgtgattaccttcatctgcccccggagattgtgcctgccaccctacgccgtagccgtccagagactggcaggcctcggcctaaaggtctggagggtgagcgacctgcgagactcacaagaggggaagctgacagagatacctacagacggagtgctgtgccacctggtgccgacaagaaagccgaggctggggctgggtcagcaaccgaattccagtttagaggcggatttggtcgtggacgtggtcagccacctcagtaaaattggagaggattcttttgcattgaataaacttacagncaaagaaacaaaaaaaaaaacttcgagaaataagttctctcgacctcggggaagttcgacatcgtcttttaaaaccctgtcggtgtggaaatcccttgaggcaaccggccgttgtatgcccgagggaaagcacggggcgaccgtggaaggtcaattacttcccgttaagatccatccacctatggactgattatccgaagagtgttcacctggtggagcacgcacagatgtgcgtccaagggaattccgaaaatcggaatgtaccg

SEQ ID NO: 395125 - DNA, 3685 bp, Homo sapiens
  misc_feature (2381)..(2381): n is a, c, g, or t
  misc_feature (2384)..(2384): n is a, c, g, or t
  misc_feature (2389)..(2389): n is a, c, g, or t
  misc_feature (2391)..(2391): n is a, c, g, or t
ttttcatttaaatattcttcttttgcttctcttaagcagaagctggtctctgcttttcaccacctggaatcccagtcccaacagctgctcttctaacccttccggcctaattgtggaataatcgtttaaatcattaagagacagaatctgatgttggtagctctgacagacctctctagcttctttcataagccagggctcttgcccagctcctgcacacagcctgccagttctccatcttagcacagttccacttttccatagtagccagaaacatctggctgaagacaaacagttacaaagcagaagccaaggtgatgggatctgttgtcacatatggggctggcagctcaaggaatgtggttctctgctgaggagatgtggcaatccagtcagcccctggctgtcctgccaagggtctcaaggcagctagccagcagctgcatgcttggtgactggagctactactactgccaggctgcctggtgaaccttttttgattctcagtaggtaccatctgccaccaagcactaagaaagggagctgaagtacctagaaagttcccatttgggaagtgttcctgtcacccaagagacaggatcaaggcatctcaacaaggtttaggtcaaccaagtgtccacccagtctgactttaaacccccatgctacagaaaggtttctggttttccaggtcttggttgccccttacgtccaaaggcaccagatcactcagcaaatgtccctgaattcagtgattggtggaagggaagacaccagcttttttggatagctgtgctgtatcaccgtttaaggcaagaagtgaatttttgtctgagaacagggagcaagggtttaatgggacagtacagcatctccctctttgcacaggtaagtataggtgggtgtctccatctctaatgtcaagctctgaccataaaggaatgctttagtgggtaatgggcctgtcctagagctttgctacccagaattccccttctgtctggtgttacctcttggaattcactgtggtaatgttcagagaggcaaatgtgttgggccaatagacattcccaggagaacatcctccagagcattgatttattttaagatggcactaagtgacatctctccccaagagatgatctctgacacaatcccatatgaaaactcttctgaaaatgaattgctaattgctattagccttgatgcacttactctaagcagttcttcagacttctggatcagtgcttctcaaactgtggttcttggacaacttacagtagaactacatgggtccttattaaaatacagatccatttcagacctaaaatcagaataagaatgggagtcagagggacccaggattagtatttttaaaacaagatttcttcattttaggtgtctgccctcagcctcctcagcaaggcagagtcagtctcaggtctacttgccattgtggttttgtgcatggtgctttgattctttgctaattatgttgcaggcacagtggtgtttgtcttctgtttcctaccaaactcagcttttttggctgtctgcgcctcacctcccatcttttctaggctgttgctgctttccaggtttctcccttgaatagctgtatgtgctggagtcttttctttatgttgaatcattttaatttttgtccttatttctaggatctagggtccttttgatctttcccttctctgtttatcgtgctagtcctcccagttttaatgatgggtaagtcaggaaagtaagactgggcacatattttctctctcccttcccactgtccatttgcgattcctccagactggatatgctactctctatgactcagaatcttattttctgtctgattcccttctgcttgagccagagagggctttttgttaatttttgttttgtttttaggttaagcttttagagactgctgagctgaagttttgctgaattctcaaaacactaaactgcctgtgttccctctcggctttcattttctaattggaacaaggcacagtattgtaacagagaactgcaattaattttctaaaatagtggcaacttgcacagtataataactttggttgtaaccaagtgaaagcataataacaaaaatacaaaattactaatgaaaccagaaagagtcatataccacattcttcctttagtttgtatctcagtaagtgctgtgttacttaggaataggggcagaagcctgcaactgggcagggaggttcagggacatgaggacgaagctagggcattttgagctagaaagcaagaataaggattagtgctttcaacactggaattaacatggaccacccccccacctcccaataagtggggattgtaggcacataagtggtttactnagncgagncncagaggtgagtttctgtggcgttcgagttccatcggctcccatccgggctatcctgccgccttagcggctgcttctccccaggatgcgggcagggggcctctctcccactccccacacaccgatttctgagtagcgataggggctggaggcttattttatggggtagggggccgctggtaggcgaagattgtccgagggagagggggaggatgaagccagtgcgtggcggagacttgcccggaccctgcagccgcagagatgttgatgcctaagaagaaccggattgccatttatgaactcctttttaaggagggagtcatggtggccaagaaggatgtccacatgcctaagcacccggagctggcagacaagaatgtgcccaaccttcatgtcatgaaggccatgcagtctctcaagtcccgaggctacgtgaaggaacagtttgcctggagacatttctactggtaccttctgcccccggagattgtgcctgccaccctacgccgtagccgtccagagactggcaggcctcggcctaaaggtctggagggtgagcgacctgcgagactcacaagaggggaagctgacagagatacctacagacggagtgctgtgccacctggtgccgacaagaaagccgaggctggggctgggtcagcaaccgaattccagtttagaggcggatttggtcgtggacgtggtcagccacctcagtaaaattggagaggattcttttgcattgaataaacttacagccaaaaaaccttaaaaaaaaaaaaaaaaaaaaaaaaaaaaaaaaaaaaaaaaaaaaaaaaaaaaaaaaaaaaaaaaaaaaaaaaaaaagagagcgagggggggcgcgcggcgcgcccagaataatatctcccccgcggggggcgccccacagttgagcgggccgccccccgcttttttgggtacagggggggcccccatgaggggggcgcgtttataaaaacagcgggggggtgggggcgcgccgggtaaaaccagcgctccggaggcggcgaaaaacccgcgggccggcgggcaatcgtggggggagaaggaccccccactcgttgcggggcgcgcggccttgtggggcgaccacccccccccaaagcgaatataaggacgcgggagaaaaacaaaacagaagggcgtctcgggcgacacccccgaggcaatgtgtgcggccggccaaaaaatgggacaaggaaataataataaaaacaaatttgagcggcccgcactctaaacataacaggcagaagaaaacgccagccaataaac

SEQ ID NO: 395126 - DNA, 887 bp, Homo sapiens
ttttaatgtcttttgttcagggtggtatggccgtagacggcagaagcaggaagcgcttcctgcttctgcccccggagattgtgcctgccaccctacgccgtagccgtccagagactggcaggcctcggcctaaaggtctggagggtgagcgacctgcgagactcacaagaggggaagctgacagagatacctacagacggagtgctgtgccacctggtgccgacaagaaagccgaggctggggctgggtcagcaaccgaattccagtttagaggcggatttggtcgtggacgtggtcagccacctcagtaaaattggagaggattcttttgcattgaataaacttacagccaaaaaaccttaaaaaaaaaaaaaaaaaaaaaaaaaaaaaaaaaaaaaaaaaaaaaaaaaaaaaaaaaaaaaaaaaaaaaaaaaaaagagagcgagggggggcgcgcggcgcgcccagaataatatctcccccgcggggggcgccccacagttgagcgggccgccccccgcttttttgggtacagggggggcccccatgaggggggcgcgtttataaaaacagcgggggggtgggggcgcgccgggtaaaaccagcgctccggaggcggcgaaaaacccgcgggccggcgggcaatcgtggggggagaaggaccccccactcgttgcggggcgcgcggccttgtggggcgaccacccccccccaaagcgaatataaggacgcgggagaaaaacaaaacagaagggcgtctcgggcgacacccccgaggcaatgtgtgcggccggccaaaaaatgggacaaggaaataataataaaaacaaatttgagcggcccgcactctaaacataacaggcagaagaaaacgccagccaataaac

SEQ ID NO: 395127 - DNA, 921 bp, Homo sapiens
cctcgctattcatcggcacctcgctattcatcggcacctcgctattcatcggcacctcgctattcatcggcaccccagtatctccgtgattaccttcatctgcccccggagattgtgcctgccaccctacgccgtagccgtccagagactggcaggcctcggcctaaaggtctggagggtgagcgacctgcgagactcacaagaggggaagctgacagagatacctacagacggagtgctgtgccacctggtgccgacaagaaagccgaggctggggctgggtcagcaaccgaattccagtttagaggcggatttggtcgtggacgtggtcagccacctcagtaaaattggagaggattcttttgcattgaataaacttacagccaaaaaaccttaaaaaaaaaaaaaaaaaaaaaaaaaaaaaaaaaaaaaaaaaaaaaaaaaaaaaaaaaaaaaaaaaaaaaaaaaaaagagagcgagggggggcgcgcggcgcgcccagaataatatctcccccgcggggggcgccccacagttgagcgggccgccccccgcttttttgggtacagggggggcccccatgaggggggcgcgtttataaaaacagcgggggggtgggggcgcgccgggtaaaaccagcgctccggaggcggcgaaaaacccgcgggccggcgggcaatcgtggggggagaaggaccccccactcgttgcggggcgcgcggccttgtggggcgaccacccccccccaaagcgaatataaggacgcgggagaaaaacaaaacagaagggcgtctcgggcgacacccccgaggcaatgtgtgcggccggccaaaaaatgggacaaggaaataataataaaaacaaatttgagcggcccgcactctaaacataacaggcagaagaaaacgccagccaataaac

SEQ ID NO: 395128 - DNA, 980 bp, Homo sapiens
ggcccccaccccggccctgaagaggacactggattccatgaacagcaagggctgcaaggtgggacgtggcccagcccagggcagaagcgggtggacagcctgccatcggggtgggagccacagacggaaagggtgcagggtggacagccccagccagagagcgaggcaggcttggacacaggaaggaggcgtgataggacacccagaactatggacctcggcctaaaggtctggagggtgagcgacctgcgagactcacaagaggggaagctgacagagatacctacagacggagtgctgtgccacctggtgccgacaagaaagccgaggctggggctgggtcagcaaccgaattccagtttagaggcggatttggtcgtggacgtggtcagccacctcagtaaaattggagaggattcttttgcattgaataaacttacagccaaaaaaccttaaaaaaaaaaaaaaaaaaaaaaaaaaaaaaaaaaaaaaaaaaaaaaaaaaaaaaaaaaaaaaaaaaaaaaaaaaaagagagcgagggggggcgcgcggcgcgcccagaataatatctcccccgcggggggcgccccacagttgagcgggccgccccccgcttttttgggtacagggggggcccccatgaggggggcgcgtttataaaaacagcgggggggtgggggcgcgccgggtaaaaccagcgctccggaggcggcgaaaaacccgcgggccggcgggcaatcgtggggggagaaggaccccccactcgttgcggggcgcgcggccttgtggggcgaccacccccccccaaagcgaatataaggacgcgggagaaaaacaaaacagaagggcgtctcgggcgacacccccgaggcaatgtgtgcggccggccaaaaaatgggacaaggaaataataataaaaacaaatttgagcggcccgcactctaaacataacaggcagaagaaaacgccagccaataaac

SEQ ID NO: 395129 - DNA, 3873 bp, Homo sapiens
  misc_feature (2381)..(2381): n is a, c, g, or t
  misc_feature (2384)..(2384): n is a, c, g, or t
  misc_feature (2389)..(2389): n is a, c, g, or t
  misc_feature (2391)..(2391): n is a, c, g, or t
ttttcatttaaatattcttcttttgcttctcttaagcagaagctggtctctgcttttcaccacctggaatcccagtcccaacagctgctcttctaacccttccggcctaattgtggaataatcgtttaaatcattaagagacagaatctgatgttggtagctctgacagacctctctagcttctttcataagccagggctcttgcccagctcctgcacacagcctgccagttctccatcttagcacagttccacttttccatagtagccagaaacatctggctgaagacaaacagttacaaagcagaagccaaggtgatgggatctgttgtcacatatggggctggcagctcaaggaatgtggttctctgctgaggagatgtggcaatccagtcagcccctggctgtcctgccaagggtctcaaggcagctagccagcagctgcatgcttggtgactggagctactactactgccaggctgcctggtgaaccttttttgattctcagtaggtaccatctgccaccaagcactaagaaagggagctgaagtacctagaaagttcccatttgggaagtgttcctgtcacccaagagacaggatcaaggcatctcaacaaggtttaggtcaaccaagtgtccacccagtctgactttaaacccccatgctacagaaaggtttctggttttccaggtcttggttgccccttacgtccaaaggcaccagatcactcagcaaatgtccctgaattcagtgattggtggaagggaagacaccagcttttttggatagctgtgctgtatcaccgtttaaggcaagaagtgaatttttgtctgagaacagggagcaagggtttaatgggacagtacagcatctccctctttgcacaggtaagtataggtgggtgtctccatctctaatgtcaagctctgaccataaaggaatgctttagtgggtaatgggcctgtcctagagctttgctacccagaattccccttctgtctggtgttacctcttggaattcactgtggtaatgttcagagaggcaaatgtgttgggccaatagacattcccaggagaacatcctccagagcattgatttattttaagatggcactaagtgacatctctccccaagagatgatctctgacacaatcccatatgaaaactcttctgaaaatgaattgctaattgctattagccttgatgcacttactctaagcagttcttcagacttctggatcagtgcttctcaaactgtggttcttggacaacttacagtagaactacatgggtccttattaaaatacagatccatttcagacctaaaatcagaataagaatgggagtcagagggacccaggattagtatttttaaaacaagatttcttcattttaggtgtctgccctcagcctcctcagcaaggcagagtcagtctcaggtctacttgccattgtggttttgtgcatggtgctttgattctttgctaattatgttgcaggcacagtggtgtttgtcttctgtttcctaccaaactcagcttttttggctgtctgcgcctcacctcccatcttttctaggctgttgctgctttccaggtttctcccttgaatagctgtatgtgctggagtcttttctttatgttgaatcattttaatttttgtccttatttctaggatctagggtccttttgatctttcccttctctgtttatcgtgctagtcctcccagttttaatgatgggtaagtcaggaaagtaagactgggcacatattttctctctcccttcccactgtccatttgcgattcctccagactggatatgctactctctatgactcagaatcttattttctgtctgattcccttctgcttgagccagagagggctttttgttaatttttgttttgtttttaggttaagcttttagagactgctgagctgaagttttgctgaattctcaaaacactaaactgcctgtgttccctctcggctttcattttctaattggaacaaggcacagtattgtaacagagaactgcaattaattttctaaaatagtggcaacttgcacagtataataactttggttgtaaccaagtgaaagcataataacaaaaatacaaaattactaatgaaaccagaaagagtcatataccacattcttcctttagtttgtatctcagtaagtgctgtgttacttaggaataggggcagaagcctgcaactgggcagggaggttcagggacatgaggacgaagctagggcattttgagctagaaagcaagaataaggattagtgctttcaacactggaattaacatggaccacccccccacctcccaataagtggggattgtaggcacataagtggtttactnagncgagncncagaggtgagtttctgtggcgttcgagttccatcggctcccatccgggctatcctgccgccttagcggctgcttctccccaggatgcgggcagggggcctctctcccactccccacacaccgatttctgagtagcgataggggctggaggcttattttatggggtagggggccgctggtaggcgaagattgtccgagggagagggggaggatgaagccagtgcgtggcggagacttgcccggaccctgcagccgcagagatgttgatgcctaagaagaaccggattgccatttatgaactcctttttaaggagggagtcatggtggccaagaaggatgtccacatgcctaagcacccggagctggcagacaagaatgtgcccaaccttcatgtcatgaaggccatgcagtctctcaagtcccgaggctacgtgaaggaacagtttgcctggagacatttctactggtaccttaccaatgagggtatccagtatctccgtgattaccttcatctgcccccggagattgtgcctgccaccctacgccgtagccgtccagagactggcaggcctcggcctaaaggtctggagggtgagcgacctgcgagactcacaagaggggaagctgacagagatacctacagacggagtgctgtgccacctggtgccgacaagaaagccgaggctggggctgggtcagcaaccgaattccagtttcctcatagcacacgattgctctcagataatgtcatttgtaaaaaggaagcatgtacagtagaaacggtccaatcctggtgctggatgctttcataggagtatgtatgaacacactctgggtgggtggccatactcccactttaccaatgaagaaatgggcctagatgttagatatggccccacatccagtaaggggcagtgctgggatttatagcctgtactcagctctctcccagctgtttacatttgggggcctctggagttataatgaggcctgaaagttagcaaaacctccaaagatcaaaccagagtgccgctcatgctgatgtgatgtgctttctcttacagagaggcggatttggtcgtggacgtggtcagccacctcagtaaaattggagaggattcttttgcattgaataaacttacagccaaaaaaccttaaaaaaaaaaaaaaaaaaaaaaaaaaaaaaaaaaaaaaaaaaaaaaaccccggggcctaaatggggggggggaaaaaggggaaaaaaaggggccggggcacaaaaggaggtgcacagacccaccgtattttttgcacaacaagggggaaaaaatcagcggcgggccaccccataaaaggagggggcggaaataaaatttgcgaaacaccccagggtaaccagcgatataaaagacagccgagaagaacacgcggagtagagcccacccagacacacagaggagagcataatggacgaagacacaccagaacgagaacatcctcacac

SEQ ID NO: 395130 - DNA, 3472 bp, Homo sapiens
  misc_feature (2381)..(2381): n is a, c, g, or t
  misc_feature (2384)..(2384): n is a, c, g, or t
  misc_feature (2389)..(2389): n is a, c, g, or t
  misc_feature (2391)..(2391): n is a, c, g, or t
  misc_feature (3394)..(3394): n is a, c, g, or t
  misc_feature (3399)..(3399): n is a, c, g, or t
  misc_feature (3402)..(3402): n is a, c, g, or t
  misc_feature (3406)..(3407): n is a, c, g, or t
  misc_feature (3413)..(3413): n is a, c, g, or t
  misc_feature (3418)..(3418): n is a, c, g, or t
  misc_feature (3420)..(3420): n is a, c, g, or t
  misc_feature (3424)..(3424): n is a, c, g, or t
  misc_feature (3431)..(3431): n is a, c, g, or t
  misc_feature (3451)..(3451): n is a, c, g, or t
  misc_feature (3455)..(3455): n is a, c, g, or t
  misc_feature (3458)..(3458): n is a, c, g, or t
ttttcatttaaatattcttcttttgcttctcttaagcagaagctggtctctgcttttcaccacctggaatcccagtcccaacagctgctcttctaacccttccggcctaattgtggaataatcgtttaaatcattaagagacagaatctgatgttggtagctctgacagacctctctagcttctttcataagccagggctcttgcccagctcctgcacacagcctgccagttctccatcttagcacagttccacttttccatagtagccagaaacatctggctgaagacaaacagttacaaagcagaagccaaggtgatgggatctgttgtcacatatggggctggcagctcaaggaatgtggttctctgctgaggagatgtggcaatccagtcagcccctggctgtcctgccaagggtctcaaggcagctagccagcagctgcatgcttggtgactggagctactactactgccaggctgcctggtgaaccttttttgattctcagtaggtaccatctgccaccaagcactaagaaagggagctgaagtacctagaaagttcccatttgggaagtgttcctgtcacccaagagacaggatcaaggcatctcaacaaggtttaggtcaaccaagtgtccacccagtctgactttaaacccccatgctacagaaaggtttctggttttccaggtcttggttgccccttacgtccaaaggcaccagatcactcagcaaatgtccctgaattcagtgattggtggaagggaagacaccagcttttttggatagctgtgctgtatcaccgtttaaggcaagaagtgaatttttgtctgagaacagggagcaagggtttaatgggacagtacagcatctccctctttgcacaggtaagtataggtgggtgtctccatctctaatgtcaagctctgaccataaaggaatgctttagtgggtaatgggcctgtcctagagctttgctacccagaattccccttctgtctggtgttacctcttggaattcactgtggtaatgttcagagaggcaaatgtgttgggccaatagacattcccaggagaacatcctccagagcattgatttattttaagatggcactaagtgacatctctccccaagagatgatctctgacacaatcccatatgaaaactcttctgaaaatgaattgctaattgctattagccttgatgcacttactctaagcagttcttcagacttctggatcagtgcttctcaaactgtggttcttggacaacttacagtagaactacatgggtccttattaaaatacagatccatttcagacctaaaatcagaataagaatgggagtcagagggacccaggattagtatttttaaaacaagatttcttcattttaggtgtctgccctcagcctcctcagcaaggcagagtcagtctcaggtctacttgccattgtggttttgtgcatggtgctttgattctttgctaattatgttgcaggcacagtggtgtttgtcttctgtttcctaccaaactcagcttttttggctgtctgcgcctcacctcccatcttttctaggctgttgctgctttccaggtttctcccttgaatagctgtatgtgctggagtcttttctttatgttgaatcattttaatttttgtccttatttctaggatctagggtccttttgatctttcccttctctgtttatcgtgctagtcctcccagttttaatgatgggtaagtcaggaaagtaagactgggcacatattttctctctcccttcccactgtccatttgcgattcctccagactggatatgctactctctatgactcagaatcttattttctgtctgattcccttctgcttgagccagagagggctttttgttaatttttgttttgtttttaggttaagcttttagagactgctgagctgaagttttgctgaattctcaaaacactaaactgcctgtgttccctctcggctttcattttctaattggaacaaggcacagtattgtaacagagaactgcaattaattttctaaaatagtggcaacttgcacagtataataactttggttgtaaccaagtgaaagcataataacaaaaatacaaaattactaatgaaaccagaaagagtcatataccacattcttcctttagtttgtatctcagtaagtgctgtgttacttaggaataggggcagaagcctgcaactgggcagggaggttcagggacatgaggacgaagctagggcattttgagctagaaagcaagaataaggattagtgctttcaacactggaattaacatggaccacccccccacctcccaataagtggggattgtaggcacataagtggtttactnagncgagncncagaggtgagtttctgtggcgttcgagttccatcggctcccatccgggctatcctgccgccttagcggctgcttctccccaggatgcgggcagggggcctctctcccactccccacacaccgatttctgagtagcgataggggctggaggcttattttatggggtagggggccgctggtaggcgaagattgtccgagggagagggggaggatgaagccagtgcgtggcggagacttgcccggaccctgcagccgcagagatgttgatgcctaagaagaaccggattgccatttatgaactcctttttaaggagggagtcatggtggccaagaaggatgtccacatgcctaagcacccggagctggcagacaagaatgtgcccaaccttcatgtcatgaaggccatgcagtctctcaagtcccgaggctacgtgaaggaacagtttgcctggagacatttctactggtaccttaccaatgagggtatccagtatctccgtgattaccttcatctgcccccggagattgtgcctgccaccctacgccgtagccgtccagagactggcaggcctcggcctaaaggtctggagggtgagcgacctgcgagactcacaagaggggaagctgacagagatacctacagacggagtgctgtgccacctggtgccgacaagaaagccgaggctggggctgggtcagcaaccgaattccagtttcctcatagcacacgattgctctcagataatgtcatttgtaaaaaggaagcatgtacagtagaaacggtccaatcctggtgctggatgctttcataggaagaggcggatttggtcgtggacgtggtcagccacctcagtaaaattggagaggattcttttgcattgaataaacttacagccaaaaaaccttaaaaaaaaaaaaaaaaacaaaaaaaacaaaacaaacaaaaaaaaaaccccggggcgttcttttgggggggggggaaaaaggggtttcaaagggccggnggcangtnttcnnggcccnttttngnccangggggancgcgggcccccaaggggggntaantcnaaccggggacggta

SEQ ID NO: 395131 - DNA, 3662 bp, Homo sapiens
  misc_feature (2381)..(2381): n is a, c, g, or t
  misc_feature (2384)..(2384): n is a, c, g, or t
  misc_feature (2389)..(2389): n is a, c, g, or t
  misc_feature (2391)..(2391): n is a, c, g, or t
ttttcatttaaatattcttcttttgcttctcttaagcagaagctggtctctgcttttcaccacctggaatcccagtcccaacagctgctcttctaacccttccggcctaattgtggaataatcgtttaaatcattaagagacagaatctgatgttggtagctctgacagacctctctagcttctttcataagccagggctcttgcccagctcctgcacacagcctgccagttctccatcttagcacagttccacttttccatagtagccagaaacatctggctgaagacaaacagttacaaagcagaagccaaggtgatgggatctgttgtcacatatggggctggcagctcaaggaatgtggttctctgctgaggagatgtggcaatccagtcagcccctggctgtcctgccaagggtctcaaggcagctagccagcagctgcatgcttggtgactggagctactactactgccaggctgcctggtgaaccttttttgattctcagtaggtaccatctgccaccaagcactaagaaagggagctgaagtacctagaaagttcccatttgggaagtgttcctgtcacccaagagacaggatcaaggcatctcaacaaggtttaggtcaaccaagtgtccacccagtctgactttaaacccccatgctacagaaaggtttctggttttccaggtcttggttgccccttacgtccaaaggcaccagatcactcagcaaatgtccctgaattcagtgattggtggaagggaagacaccagcttttttggatagctgtgctgtatcaccgtttaaggcaagaagtgaatttttgtctgagaacagggagcaagggtttaatgggacagtacagcatctccctctttgcacaggtaagtataggtgggtgtctccatctctaatgtcaagctctgaccataaaggaatgctttagtgggtaatgggcctgtcctagagctttgctacccagaattccccttctgtctggtgttacctcttggaattcactgtggtaatgttcagagaggcaaatgtgttgggccaatagacattcccaggagaacatcctccagagcattgatttattttaagatggcactaagtgacatctctccccaagagatgatctctgacacaatcccatatgaaaactcttctgaaaatgaattgctaattgctattagccttgatgcacttactctaagcagttcttcagacttctggatcagtgcttctcaaactgtggttcttggacaacttacagtagaactacatgggtccttattaaaatacagatccatttcagacctaaaatcagaataagaatgggagtcagagggacccaggattagtatttttaaaacaagatttcttcattttaggtgtctgccctcagcctcctcagcaaggcagagtcagtctcaggtctacttgccattgtggttttgtgcatggtgctttgattctttgctaattatgttgcaggcacagtggtgtttgtcttctgtttcctaccaaactcagcttttttggctgtctgcgcctcacctcccatcttttctaggctgttgctgctttccaggtttctcccttgaatagctgtatgtgctggagtcttttctttatgttgaatcattttaatttttgtccttatttctaggatctagggtccttttgatctttcccttctctgtttatcgtgctagtcctcccagttttaatgatgggtaagtcaggaaagtaagactgggcacatattttctctctcccttcccactgtccatttgcgattcctccagactggatatgctactctctatgactcagaatcttattttctgtctgattcccttctgcttgagccagagagggctttttgttaatttttgttttgtttttaggttaagcttttagagactgctgagctgaagttttgctgaattctcaaaacactaaactgcctgtgttccctctcggctttcattttctaattggaacaaggcacagtattgtaacagagaactgcaattaattttctaaaatagtggcaacttgcacagtataataactttggttgtaaccaagtgaaagcataataacaaaaatacaaaattactaatgaaaccagaaagagtcatataccacattcttcctttagtttgtatctcagtaagtgctgtgttacttaggaataggggcagaagcctgcaactgggcagggaggttcagggacatgaggacgaagctagggcattttgagctagaaagcaagaataaggattagtgctttcaacactggaattaacatggaccacccccccacctcccaataagtggggattgtaggcacataagtggtttactnagncgagncncagaggtgagtttctgtggcgttcgagttccatcggctcccatccgggctatcctgccgccttagcggctgcttctccccaggatgcgggcagggggcctctctcccactccccacacaccgatttctgagtagcgataggggctggaggcttattttatggggtagggggccgctggtaggcgaagattgtccgagggagagggggaggatgaagccagtgcgtggcggagacttgcccggaccctgcagccgcagagatgttgatgcctaagaagaaccggattgccatttatgaactcctttttaaggagggagtcatggtggccaagaaggatgtccacatgcctaagcacccggagctggcagatgccaccctacgccgtagccgtccagagactggcaggcctcggcctaaaggtctggagggtgagcgacctgcgagactcacaagaggggaagctgacagagatacctacagacggagtgctgtgccacctggtgccgacaagaaagccgaggctggggctgggtcagcaaccgaattccagtttagaggcggatttggtcgtggacgtggtcagccacctcagtaaaattggagaggattcttttgcattgaataaacttacagccaaaaaaaaaaaacttcaataaatacgtgtctaactgaaatcactaaaaactaaaaaatcatggtgcgggccgaccgtcccactctatcaagatgttttcacatactcaactgagtgtggggcggctaggctctcctagtggtaagtctacacctaggaatactctgcgctgtgtctttactagagcagtatcaccaggggccacagcaaccataaggtgcagtagtgtttactacatcctactaacgaaaaaccgccgcgcgtgtgagtacacaccagcgcgttgtgttcttattacaatacaaacccgcaatggaaggggccatatctccaagagcgaggcaaactgccggtggaaatcgtctttcgacagcagtgacggtttcccatgagtgtgcttaccgaccacattatgcttagatgtcattcccctctcccgccattggtgttgcgaatccggcaccatataactatttagctacatcaaccaatacaacgccataaggactccaacttataaagcagttgcttaacatagcttcaaccttcctgcattcttggcccataacgaaacttaattcagaaaagcttactcttgaaagacctatacccaaacccttttaagtagtaggaccta

SEQ ID NO: 395132 - DNA, 3451 bp, Homo sapiens
  misc_feature (2381)..(2381): n is a, c, g, or t
  misc_feature (2384)..(2384): n is a, c, g, or t
  misc_feature (2389)..(2389): n is a, c, g, or t
  misc_feature (2391)..(2391): n is a, c, g, or t
  misc_feature (3373)..(3373): n is a, c, g, or t
  misc_feature (3378)..(3378): n is a, c, g, or t
  misc_feature (3381)..(3381): n is a, c, g, or t
  misc_feature (3385)..(3386): n is a, c, g, or t
  misc_feature (3392)..(3392): n is a, c, g, or t
  misc_feature (3397)..(3397): n is a, c, g, or t
  misc_feature (3399)..(3399): n is a, c, g, or t
  misc_feature (3403)..(3403): n is a, c, g, or t
  misc_feature (3410)..(3410): n is a, c, g, or t
  misc_feature (3430)..(3430): n is a, c, g, or t
  misc_feature (3434)..(3434): n is a, c, g, or t
  misc_feature (3437)..(3437): n is a, c, g, or t
ttttcatttaaatattcttcttttgcttctcttaagcagaagctggtctctgcttttcaccacctggaatcccagtcccaacagctgctcttctaacccttccggcctaattgtggaataatcgtttaaatcattaagagacagaatctgatgttggtagctctgacagacctctctagcttctttcataagccagggctcttgcccagctcctgcacacagcctgccagttctccatcttagcacagttccacttttccatagtagccagaaacatctggctgaagacaaacagttacaaagcagaagccaaggtgatgggatctgttgtcacatatggggctggcagctcaaggaatgtggttctctgctgaggagatgtggcaatccagtcagcccctggctgtcctgccaagggtctcaaggcagctagccagcagctgcatgcttggtgactggagctactactactgccaggctgcctggtgaaccttttttgattctcagtaggtaccatctgccaccaagcactaagaaagggagctgaagtacctagaaagttcccatttgggaagtgttcctgtcacccaagagacaggatcaaggcatctcaacaaggtttaggtcaaccaagtgtccacccagtctgactttaaacccccatgctacagaaaggtttctggttttccaggtcttggttgccccttacgtccaaaggcaccagatcactcagcaaatgtccctgaattcagtgattggtggaagggaagacaccagcttttttggatagctgtgctgtatcaccgtttaaggcaagaagtgaatttttgtctgagaacagggagcaagggtttaatgggacagtacagcatctccctctttgcacaggtaagtataggtgggtgtctccatctctaatgtcaagctctgaccataaaggaatgctttagtgggtaatgggcctgtcctagagctttgctacccagaattccccttctgtctggtgttacctcttggaattcactgtggtaatgttcagagaggcaaatgtgttgggccaatagacattcccaggagaacatcctccagagcattgatttattttaagatggcactaagtgacatctctccccaagagatgatctctgacacaatcccatatgaaaactcttctgaaaatgaattgctaattgctattagccttgatgcacttactctaagcagttcttcagacttctggatcagtgcttctcaaactgtggttcttggacaacttacagtagaactacatgggtccttattaaaatacagatccatttcagacctaaaatcagaataagaatgggagtcagagggacccaggattagtatttttaaaacaagatttcttcattttaggtgtctgccctcagcctcctcagcaaggcagagtcagtctcaggtctacttgccattgtggttttgtgcatggtgctttgattctttgctaattatgttgcaggcacagtggtgtttgtcttctgtttcctaccaaactcagcttttttggctgtctgcgcctcacctcccatcttttctaggctgttgctgctttccaggtttctcccttgaatagctgtatgtgctggagtcttttctttatgttgaatcattttaatttttgtccttatttctaggatctagggtccttttgatctttcccttctctgtttatcgtgctagtcctcccagttttaatgatgggtaagtcaggaaagtaagactgggcacatattttctctctcccttcccactgtccatttgcgattcctccagactggatatgctactctctatgactcagaatcttattttctgtctgattcccttctgcttgagccagagagggctttttgttaatttttgttttgtttttaggttaagcttttagagactgctgagctgaagttttgctgaattctcaaaacactaaactgcctgtgttccctctcggctttcattttctaattggaacaaggcacagtattgtaacagagaactgcaattaattttctaaaatagtggcaacttgcacagtataataactttggttgtaaccaagtgaaagcataataacaaaaatacaaaattactaatgaaaccagaaagagtcatataccacattcttcctttagtttgtatctcagtaagtgctgtgttacttaggaataggggcagaagcctgcaactgggcagggaggttcagggacatgaggacgaagctagggcattttgagctagaaagcaagaataaggattagtgctttcaacactggaattaacatggaccacccccccacctcccaataagtggggattgtaggcacataagtggtttactnagncgagncncagaggtgagtttctgtggcgttcgagttccatcggctcccatccgggctatcctgccgccttagcggctgcttctccccaggatgcgggcagggggcctctctcccactccccacacaccgatttctgagtagcgataggggctggaggcttattttatggggtagggggccgctggtaggcgaagattgtccgagggagagggggaggatgaagccagtgcgtggcggagacttgcccggaccctgcagccgcagagatgttgatgcctaagaagaaccggattgccatttatgaactcctttttaaggagggagtcatggtggccaagaaggatgtccacatgcctaagcacccggagctggcagatgtcatgaaggccatgcagtctctcaagtcccgaggctacgtgaaggaacagtttgcctggagacatttctactggtaccttaccaatgagggtatccagtatctccgtgattaccttcatctgcccccggagattgtgcctgccaccctacgccgtagccgtccagagactggcaggcctcggcctaaaggtctggagggtgagcgacctgcgagactcacaagaggggaagctgacagagatacctacagacggagtgctgtgccacctggtgccgacaagaaagccgaggctggggctgggtcagcaaccgaattccagtttcctcatagcacacgattgctctcagataatgtcatttgtaaaaaggaagcatgtacagtagaaacggtccaatcctggtgctggatgctttcataggaagaggcggatttggtcgtggacgtggtcagccacctcagtaaaattggagaggattcttttgcattgaataaacttacagccaaaaaaccttaaaaaaaaaaaaaaaaacaaaaaaaacaaaacaaacaaaaaaaaaaccccggggcgttcttttgggggggggggaaaaaggggtttcaaagggccggnggcangtnttcnnggcccnttttngnccangggggancgcgggcccccaaggggggntaantcnaaccggggacggta

SEQ ID NO: 395133 - DNA, 2902 bp, Homo sapiens
  misc_feature (2381)..(2381): n is a, c, g, or t
  misc_feature (2384)..(2384): n is a, c, g, or t
  misc_feature (2389)..(2389): n is a, c, g, or t
  misc_feature (2391)..(2391): n is a, c, g, or t
  misc_feature (2841)..(2841): n is a, c, g, or t
  misc_feature (2888)..(2888): n is a, c, g, or t
ttttcatttaaatattcttcttttgcttctcttaagcagaagctggtctctgcttttcaccacctggaatcccagtcccaacagctgctcttctaacccttccggcctaattgtggaataatcgtttaaatcattaagagacagaatctgatgttggtagctctgacagacctctctagcttctttcataagccagggctcttgcccagctcctgcacacagcctgccagttctccatcttagcacagttccacttttccatagtagccagaaacatctggctgaagacaaacagttacaaagcagaagccaaggtgatgggatctgttgtcacatatggggctggcagctcaaggaatgtggttctctgctgaggagatgtggcaatccagtcagcccctggctgtcctgccaagggtctcaaggcagctagccagcagctgcatgcttggtgactggagctactactactgccaggctgcctggtgaaccttttttgattctcagtaggtaccatctgccaccaagcactaagaaagggagctgaagtacctagaaagttcccatttgggaagtgttcctgtcacccaagagacaggatcaaggcatctcaacaaggtttaggtcaaccaagtgtccacccagtctgactttaaacccccatgctacagaaaggtttctggttttccaggtcttggttgccccttacgtccaaaggcaccagatcactcagcaaatgtccctgaattcagtgattggtggaagggaagacaccagcttttttggatagctgtgctgtatcaccgtttaaggcaagaagtgaatttttgtctgagaacagggagcaagggtttaatgggacagtacagcatctccctctttgcacaggtaagtataggtgggtgtctccatctctaatgtcaagctctgaccataaaggaatgctttagtgggtaatgggcctgtcctagagctttgctacccagaattccccttctgtctggtgttacctcttggaattcactgtggtaatgttcagagaggcaaatgtgttgggccaatagacattcccaggagaacatcctccagagcattgatttattttaagatggcactaagtgacatctctccccaagagatgatctctgacacaatcccatatgaaaactcttctgaaaatgaattgctaattgctattagccttgatgcacttactctaagcagttcttcagacttctggatcagtgcttctcaaactgtggttcttggacaacttacagtagaactacatgggtccttattaaaatacagatccatttcagacctaaaatcagaataagaatgggagtcagagggacccaggattagtatttttaaaacaagatttcttcattttaggtgtctgccctcagcctcctcagcaaggcagagtcagtctcaggtctacttgccattgtggttttgtgcatggtgctttgattctttgctaattatgttgcaggcacagtggtgtttgtcttctgtttcctaccaaactcagcttttttggctgtctgcgcctcacctcccatcttttctaggctgttgctgctttccaggtttctcccttgaatagctgtatgtgctggagtcttttctttatgttgaatcattttaatttttgtccttatttctaggatctagggtccttttgatctttcccttctctgtttatcgtgctagtcctcccagttttaatgatgggtaagtcaggaaagtaagactgggcacatattttctctctcccttcccactgtccatttgcgattcctccagactggatatgctactctctatgactcagaatcttattttctgtctgattcccttctgcttgagccagagagggctttttgttaatttttgttttgtttttaggttaagcttttagagactgctgagctgaagttttgctgaattctcaaaacactaaactgcctgtgttccctctcggctttcattttctaattggaacaaggcacagtattgtaacagagaactgcaattaattttctaaaatagtggcaacttgcacagtataataactttggttgtaaccaagtgaaagcataataacaaaaatacaaaattactaatgaaaccagaaagagtcatataccacattcttcctttagtttgtatctcagtaagtgctgtgttacttaggaataggggcagaagcctgcaactgggcagggaggttcagggacatgaggacgaagctagggcattttgagctagaaagcaagaataaggattagtgctttcaacactggaattaacatggaccacccccccacctcccaataagtggggattgtaggcacataagtggtttactnagncgagncncagaggtgagtttctgtggcgttcgagttccatcggctcccatccgggctatcctgccgccttagcggctgcttctccccaggatgcgggcagggggcctctctcccactccccacacaccgatttctgagtagcgataggggctggaggcttattttatggggtagggggccgctggtaggcgaagattgtccgagggagagggggaggatgaagccagtgcgtggcggagacttgccatgttgatgcctaagaagaaccggattgccatttatgaactcctttttaaggagggagtcatggtggccaagaaggatgtccacatgcctaagcacccggagctggcagatgtcatgaaggccatgcagtctctcaagtcccgaggctacgtgaaggaacagtttgcctggagacatttctactggtacctacccctgacgggctcccgcngcccccggatccccctctcgccgccccgcgatcggccccgccccccncccgcccccggccc

SEQ ID NO: 395134 - DNA, 572 bp, Homo sapiens
catcttaaccaagtggttgctgagagtgacaacaggagagcaatgccagttttcttggctttaagggacagagttctcacattgccctgtgttcacagtgtggtttgatttacatcctcggcctaaaggtctggagggtgagcgacctgcgagactcacaagaggggaagctgacagagatacctacagacggagtgctgtgccacgtgagtaaatgcatcacctatattaggggtgttggggtgaaatgtctggattctcacagctggctctggctgggtggggctcagcccttgatgatgacaaaatgaccaggaaagattcttggtttcactctgcagagcatcagaacagctggagtcctttgtgcttctttcttcatgcagtgatttcatagatgagaattaggaggaggctgggattttttaaaaaacaaaactcaggccgggctcagtggctcatgtctgtaatcccagcactttggttggagggggggggtcgaagtgggcagattacttgaggtcaggagttcgagaccagcctggccaacatgacgaaaccctgtctctatt

SEQ ID NO: 395135 - DNA, 936 bp, Homo sapiens
  misc_feature (26)..(26): n is a, c, g, or t
aataggctagtacgaggctggtgtanatcggccgaggggcgttcgagttccatcggctcccatccgggctatcctgccgccttagcggctgcttctccccaggatgcgggcagggggcctctctcccactccccacacaccgatttctgagtagcgataggggctggaggcttattttatggggtagggggccgctggtaggcgaagattgtccgagggagagggggaggatgaagccagtgcgtggcggagacttgcccggaccctgcagccgcagagatgttgatgcctaagaagaaccggattgccatttatgaactcctttttaaggagggagtcatggtggccaagaaggatgtccacatgcctaagcacccggagctggcagacaagaatgtgcccaaccttcatgtcatgaaggccatgcagtctctcaagtcccgaggctacgtgaaggaacagtttgcctggagacatttctactggtaccttaccaatgagggtatccagtatctccgtgattaccttcatctgcccccggagattgtgcctgccaccctacgccgtagccgtccagagactggcaggcctcggcctaaaggtctggagggtgagcgacctgcgagactcacaagaggggaagctgacagagatacctacagacggagtgctgtgccacctggtgccgacaagaaagccgaggctggggctgggtcagcaaccgaattccagtttagaggcggatttggtcgtggacgtggtcagccacctcagtaaaattggagaggattcttttgcattgaataaacttacagcaaaaacttaaaaaaaaaaaaattcggggttagtgggtgggaaaaggggtatgatggcatggtctagtgttctgaccagttttgtaagggagttggggcccaagggggttatgaagcgacg

SEQ ID NO: 395136 - DNA, 613 bp, Homo sapiens
gatgtctgccagctccgggtgcttaggcatgtggacatccttcttggccaccatgactccctccttaaaaaggagttcataaatggcaatccggttcttcttaggcaagaatgtgcccaaccttcatgtcatgaaggccatgcagtctctcaagtcccgaggctacgtgaaggaacagtttgcctggagacatttctactggtaccttaccaatgagggtatccagtatctccgtgattaccttcatctgcccccggagattgtgcctgccaccctacgccgtagccgtccagagactggcaggcctcggcctaaaggtctggagggtgagcgacctgcgagactcacaagaggggaagctgacagagatacctacagacggagtgctgtgccacctggtgccgacaagaaagccgaggctggggctgggtcagcaaccgaattccagtttagaggcggatttggtcgtggacgtggtcagccacctcagtaaaattggagaggattcttttgcattgaataaacttacagccaaaaaaaaccttaaaaaaaaaaaacaaaaaaaaaaacaccaacaccgaaaaaccaggggggcccaatctcccgggggcac

SEQ ID NO: 395137 - DNA, 842 bp, Homo sapiens
gagacggtgtcccaccgacacgcttttttcttgggaacaggactcccccgactgcctccttgcctggcactggagctctagtttgggggagaagtggtaggtaggagacgagggtgcgaaggccttagccctttggtttggggtctgccgccttcaagaagccggggctttacccctccgggccttccctgcgtaccttatggtacagccgcgagattccgcgctggatgttgatgcctaagaagaaccggattgccatttatgaactcctttttaaggagggagtcatggtggccaagaaggatgtccacatgcctaagcacccggagctggcagatgtcatgaaggccatgcagtctctcaagtcccgaggctacgtgaaggaacagtttgcctggagacatttctactggtaccttaccaatgagggtatccagtatctccgtgattaccttcatctgcccccggagattgtgcctgccaccctacgccgtagccgtccagagactggcaggcctcggcctaaaggtctggagggtgagcgacctgcgagactcacaagaggggaagctgacagagatacctacagacggagtgctgtgccacctggtgccgacaagaaagccgaggctggggctgggtcagcaaccgaattccagtttagaggcggatttggtcgtggacgtggtcagccacctcagtaaaattggagaggattcttttgcattgaataaacttacagcaaaaaaaaaaataagagagaaaaaaaaggagaaaaaacgggggcattaagaggggggaaaaaggttataaaaagggcatgggtaaaaggttttgggcga

SEQ ID NO: 395138 - DNA, 795 bp, Homo sapiens
  misc_feature (648)..(648): n is a, c, g, or t
  misc_feature (655)..(655): n is a, c, g, or t
ggagagaactagtctcgagctttttttttttccagccccggtaccggaccctgcagccgcagagatgttgatgcctaagaagaaccggattgccatttatgaactcctttttaaggagggagtcatggtggccaagaaggatgtccacatgcctaagcacccggagctggcagacaagaatgtgcccaaccttcatgtcatgaaggccatgcagtctctcaagtcccgaggctacgtgaaggaacagtttgcctggagacatttctactggtaccttaccaatgagggtatccagtatctccgtgattaccttcatctgcccccggagattgtgcctgccaccctacgccgtagccgtccagagactggcaggcctcggcctaaaggtctggagggtgagcgacctgcgagactcacaagaggggaagctgacagagatacctacagacggagtgctgtgccacctggtgccgacaagaaagccgaggctggggctgggtcagcaaccgaattccagtttagaggcggatttggtcgtggacgtggtcagccacctcagtaaaattggagaggattcttttgcattgaataaacttacagccaaaaaaccttaaaaaaaaaaaaaaaaaaaaaaaaaaaaaaaaaaanggggggnattaagggggggggggaaaaaggggtaggaaggggccaggggccaataggtgtccgggaccacgtttctgggcaccagggggaaaactccgcaggaccccataaaggagacgaataattccgaaaacccggtacccggta

SEQ ID NO: 395139 - DNA, 899 bp, Homo sapiens
  misc_feature (7)..(7): n is a, c, g, or t
  misc_feature (9)..(9): n is a, c, g, or t
  misc_feature (12)..(12): n is a, c, g, or t
  misc_feature (93)..(93): n is a, c, g, or t
  misc_feature (752)..(752): n is a, c, g, or t
  misc_feature (759)..(759): n is a, c, g, or t
gcaaagncngcntcccacagcgctggtccacctgatcgtggagcacgacaggttgtaccatggaagagccgctcgttggtctcggaatgcagntgctggggccgacccacccgcaaatgcgccggcctcgtgccgaattcggcacgagcggaccctgcagccgcagagatgttgatgcctaagaagaaccggattgccatttatgaactcctttttaaggagggagtcatggtggccaagaaggatgtccacatgcctaagcacccggagctggcagacaagaatgtgcccaaccttcatgtcatgaaggccatgcagtctctcaagtcccgaggctacgtgaaggaacagtttgcctggagacatttctactggtaccttaccaatgagggtatccagtatctccgtgattaccttcatctgcccccggagattgtgcctgccaccctacgccgtagccgtccagagactggcaggcctcggcctaaaggtctggagggtgagcgacctgcgagactcacaagaggggaagctgacagagatacctacagacggagtgctgtgccacctggtgccgacaagaaagccgaggctggggctgggtcagcaaccgaattccagtttagaggcggatttggtcgtggacgtggtcagccacctcagtaaaattggagaggattcttttgcattgaataaacttacagccaaaaaaccttaaaaaaaaaaaaaaaaaaaaaaaaaaaaaaaaaaanggggggnattaagggggggggggaaaaaggggtaggaaggggccaggggccaataggtgtccgggaccacgtttctgggcaccagggggaaaactccgcaggaccccataaaggagacgaataattccgaaaacccggtacccggta

SEQ ID NO: 395140 - DNA, 901 bp, Homo sapiens
ggacgcgtgggtcgacccacgcgtcgccggaccctgcagccgcagagatgttgatgcctaagaagaaccggattgccatttatgaactcctttttaaggagggagtcatggtggccaagaaggatgtccacatgcctaagcacccggagctggcagatgtcatgaaggccatgcagtctctcaagtcccgaggctacgtgaaggaacagtttgcctggagacatttctactggtaccttaccaatgagggtatccagtatctccgtgattaccttcatctgcccccggagattgtgcctgccaccctacgccgtagccgtccagagactggcaggcctcggcctaaaggtctggagggtgagcgacctgcgagactcacaagaggggaagctgacagagatacctacagacggagtgctgtgccacctggtgccgacaagaaagccgaggctggggctgggtcagcaaccgaattccagtttagaggcggatttggtcgtggacgtggtcagccacctcagtaaaattggagaggattcttttgcattgaataaacttacagccaaaaaaccttaaaaaaaaaaaaaaaaaaaaaaaaaaaaaaaaaaaaaaaaaaaaaaaccccggggcctaaatggggggggggaaaaaggggaaaaaaaggggccggggcacaaaaggaggtgcacagacccaccgtattttttgcacaacaagggggaaaaaatcagcggcgggccaccccataaaaggagggggcggaaataaaatttgcgaaacaccccagggtaaccagcgatataaaagacagccgagaagaacacgcggagtagagcccacccagacacacagaggagagcataatggacgaagacacaccagaacgagaacatcctcacac

SEQ ID NO: 395141 - DNA, 1115 bp, Homo sapiens
ccacaaaatgatgtatagtacgatactctggtgtatttcagtacggggctgagtcttcttctatttgactgtacctggcgtcataagtgacagcttctccccaggatgcgggcagggggcctctctcccactccccacacaccgatttctgagtagcgataggggctggaggcttattttatggggtagggggccgctggtaggcgaagattgtccgagggagagggggaggatgaagccagtgcgtggcggagacttgccatgttgatgcctaagaagaaccggattgccatttatgaactcctttttaaggagggagtcatggtggccaagaaggatgtccacatgcctaagcacccggagctggcagatgtcatgaaggccatgcagtctctcaagtcccgaggctacgtgaaggaacagtttgcctggagacatttctactggtaccttaccaatgagggtatccagtatctccgtgattaccttcatctgcccccggagattgtgcctgccaccctacgccgtagccgtccagagactggcaggcctcggcctaaaggtctggagggtgagcgacctgcgagactcacaagaggggaagctgacagagatacctacagacggagtgctgtgccacctggtgccgacaagaaagccgaggctggggctgggtcagcaaccgaattccagtttagaggcggatttggtcgtggacgtggtcagccacctcagtaaaattggagaggattcttttgcattgaataaacttacagccaaaaaaccttaaaaaaaaaaaaaaaaaaaaaaaaaaaaaaaaaaaaaaaaaaaaaaaccccggggcctaaatggggggggggaaaaaggggaaaaaaaggggccggggcacaaaaggaggtgcacagacccaccgtattttttgcacaacaagggggaaaaaatcagcggcgggccaccccataaaaggagggggcggaaataaaatttgcgaaacaccccagggtaaccagcgatataaaagacagccgagaagaacacgcggagtagagcccacccagacacacagaggagagcataatggacgaagacacaccagaacgagaacatcctcacac

SEQ ID NO: 395142 - DNA, 921 bp, Homo sapiens
attctagaggccgaggcggttgacatgttcccgtttctctgtttctcttgtttttctgttgggccgtaaaaaaaataggcattatatctgtatttgttttttaatgaactcctttaaggagggagtcatggtggccaagaaggatgtccacatgcctaagcacccggagctggcagatgtcatgaaggccatgcagtctctcaagtcccgaggctacgtgaaggaacagtttgcctggagacatttctactggtaccttaccaatgagggtatccagtatctccgtgattaccttcatctgcccccggagattgtgcctgccaccctacgccgtagccgtccagagactggcaggcctcggcctaaaggtctggagggtgagcgacctgcgagactcacaagaggggaagctgacagagatacctacagacggagtgctgtgccacctggtgccgacaagaaagccgaggctggggctgggtcagcaaccgaattccagtttagaggcggatttggtcgtggacgtggtcagccacctcagtaaaattggagaggattcttttgcattgaataaacttacagccaaaaaaccttaaaaaaaaaaaaaaaaaaaaaaaaaaaaaaaaaaaaaaaaaaaaaaaccccggggcctaaatggggggggggaaaaaggggaaaaaaaggggccggggcacaaaaggaggtgcacagacccaccgtattttttgcacaacaagggggaaaaaatcagcggcgggccaccccataaaaggagggggcggaaataaaatttgcgaaacaccccagggtaaccagcgatataaaagacagccgagaagaacacgcggagtagagcccacccagacacacagaggagagcataatggacgaagacacaccagaacgagaacatcctcacac

SEQ ID NO: 395143 - DNA, 1296 bp, Homo sapiens
  misc_feature (588)..(589): n is a, c, g, or t
  misc_feature (592)..(592): n is a, c, g, or t
  misc_feature (1214)..(1214): n is a, c, g, or t
  misc_feature (1294)..(1296): n is a, c, g, or t
ggacgcgtgggtcgacccacgcgtcgccggaccctgcagccgcagagatgttgatgcctaagaagaaccggattgccatttatgaactcctttttaaggagggagtcatggtggccaagaaggatgtccacatgcctaagcacccggagctggcagatgtcatgaaggccatgcagtctctcaagtcccgaggctacgtgaaggaacagtttgcctggagacatttctactggtaccttaccaatgagggtatccagtatctccgtgattaccttcatctgcccccggagattgtgcctgccaccctacgccgtagccgtccagagactggcaggcctcggcctaaaggtctggagggtgagcgacctgcgagactcacaagaggggaagctgacagagatacctacagacggagtgctgtgccacctggtgccgacaagaaagccgaggctggggctgggtcagcaaccgaattccagtttagaggcggatttggtcgtggacgtggtcagccacctcagtaaaattggagaggattcttttgcattgaataaacttacagccaaaaaaccttaaaaaaaaaagcannganatttcggggcattttgggagggggggggaaacaggggtgaggaacggggcctgggccgatacctggtgtctctgacccagcttttccttggtcgcaaacgtggcgcaaaaatcaggcggggagtaccctataaggggaggccgcatcaaatttcgcgaaaaagccgaggtgtacctgcgtagagattggacagaaaaaacaaaaaaacacaaacacgggacttatccgggggggtgggaaccacaagggggaggagccaccaacaccccagcggtcggctcacacaacagagcccggcgtccaacaacacacactttctacaaacaaaaggggagcacaatcagagaggcaccatccaacaacagcaaagcaagccaactaattattccacacaacgaagagggagggatacgtgtaaaacacagactaagggacgagctagggcggtgtgttgagggcgcacacatcgctccccgcggcgagatagcaaggagtaagaaaacactaagtcagtcagatcagcggtaataatagagtactctaacaacaacacacaagaagatagtacgacagcagcagaagcacagctaagaatagtgacagacgaaaacagtcagagcancgacataaaatgcaacgtagctcgaggaagtcaagtacacatagcagagtattaggtcgcagcacaagattgagtatacnnn

SEQ ID NO: 395144 - DNA, 630 bp, Homo sapiens
ggacgcgtgggtcgacccacgcgtcgccggaccctgcagccgcagagatgttgatgcctaagaagaaccggattgccatttatgaactcctttttaaggagggagtcatggtggccaagaaggatgtccacatgcctaagcacccggagctggcagatgtcatgaaggccatgcagtctctcaagtcccgaggctacgtgaaggaacagtttgcctggagacatttctactggtaccttaccaatgagggtatccagtatctccgtgattaccttcatctgcccccggagattgtgcctgccaccctacgccgtagccgtccagagactggcaggcctcggcctaaaggtctggagggtgagcgacctgcgagactcacaagaggggaagctgacagagatacctacagacggagtgctgtgccacctggtgccgacaagaaagccgaggctggggctgggtcagcaaccgaattccagtttagaggcggatttggtcgtggacgtggtcagccacctcagtaaaattggagaggattcttttgcattgaataaacttacagccaaaacattatttttctattcttctctattcttactctattatatttatagatatatccttcttatt

SEQ ID NO: 395145 - DNA, 1009 bp, Homo sapiens
  misc_feature (48)..(48): n is a, c, g, or t
  misc_feature (119)..(120): n is a, c, g, or t
caggcttctcattacggactccactattagggaaagcctgttacgccntgccaggtacccgttcccgaatttccccggttccgcctactacttactagcccgctctcttcctatccagnnccggtaccggaccctgcagccgcagagatgttgatgcctaagaagaaccggattgccatttatgaactcctttttaaggagggagtcatggtggccaagaaggatgtccacatgcctaagcacccggagctggcagatgtcatgaaggccatgcagtctctcaagtcccgaggctacgtgaaggaacagtttgcctggagacatttctactggtaccttaccaatgagggtatccagtatctccgtgattaccttcatctgcccccggagattgtgcctgccaccctacgccgtagccgtccagagactggcaggcctcggcctaaaggtctggagggtgagcgacctgcgagactcacaagaggggaagctgacagagatacctacagacggagtgctgtgccacctggtgccgacaagaaagccgaggctggggctgggtcagcaaccgaattccagtttagaggcggatttggtcgtggacgtggtcagccacctcagtaaaattggagaggattcttttgcattgaataaacttacagccaaaaaaccttaaaaaaaaaaaaaacctcgaaactagttctcttctctccccggtagggggtggaggctcacacctgtaatccagccatttagggaggcccaaggctgcaggatgcgtgagatcgggagtccaagaaccaagcgtgggcaacatagttgagaccttgtctctattcttacaaacttttaacaagccacggttggcacaggtcttaaggtcacagctgctcaggaggctgaagggcagggtcctttggaacacaaaagttggagggttgcgcaagccatgataccccatgatcccactggtggaagaataaacctgtccaacttcttaatggagacc

SEQ ID NO: 395146 - DNA, 1201 bp, Homo sapiens
  misc_feature (23)..(23): n is a, c, g, or t
  misc_feature (25)..(25): n is a, c, g, or t
tcaaaggggtctcgggtggaccncntgagattagcgcacacacgcggggtttttaaggagggagtcatggtggccaagaaggatgtccacatgcctaagcacccggagctggcagatgtcatgaaggccatgcagtctctcaagtcccgaggctacgtgaaggaacagtttgcctggagacatttctactggtaccttaccaatgagggtatccagtatctccgtgattaccttcatctgcccccggagattgtgcctgccaccctacgccgtagccgtccagagactggcaggcctcggcctaaaggtctggagggtgagcgacctgcgagactcacaagaggggaagctgacagagatacctacagacggagtgctgtgccacctggtgccgacaagaaagccgaggctggggctgggtcagcaaccgaattccagtttagaggcggatttggtcgtggacgtggtcagccacctcagtaaaattggagaggattcttttgcattgaataaacttacagccaaaaaaccttaaaaaaaaaaaaaaaaacaaaacaaaaaacaaaaacaacccacaccacccaacaaaacacaaacgaagacaaacgaaaaacacacgcgaccaacaccgcggcgaacacaacagccacacagagcagagctacacgaaccccgaccacatacacagagagcgacacggccacccacagaagggaacacaccacgcagcgcccagtaccacaccgcagaaaccacaaaacacacgagcgaacacacagcacacacacacagcagatgacgagccaaaaccgagcgcagcacagacaaacacagccacaacacaacgaacaacacctcccgccgccgccgtcgctagccgcagcacagaaaaaaaaacacaacacaaaagaaagaaaagaagcacacaaaaacagcaagaaacaaaaacgagaaagagaggcacacgggagagacagcgtgagaaagaaaagacaaggcaagaaacgagagaaccagcaacacgaacacgacacaccagaacaaccacgacgaaggacaccagagaaggaacaccaacacgacggaagaaagaacgaagaaagaaaccaaacacgaggaagcaggacaacaaaaagcccccaaaaagaccacgaaaacacaacaccaacaacaaccaaagaaaagacacacacgacacaca

SEQ ID NO: 395147 - DNA, 804 bp, Homo sapiens
  misc_feature (7)..(7): n is a, c, g, or t
  misc_feature (9)..(9): n is a, c, g, or t
  misc_feature (12)..(12): n is a, c, g, or t
  misc_feature (93)..(93): n is a, c, g, or t
  misc_feature (726)..(726): n is a, c, g, or t
  misc_feature (731)..(731): n is a, c, g, or t
  misc_feature (734)..(734): n is a, c, g, or t
  misc_feature (738)..(739): n is a, c, g, or t
  misc_feature (745)..(745): n is a, c, g, or t
  misc_feature (750)..(750): n is a, c, g, or t
  misc_feature (752)..(752): n is a, c, g, or t
  misc_feature (756)..(756): n is a, c, g, or t
  misc_feature (763)..(763): n is a, c, g, or t
  misc_feature (783)..(783): n is a, c, g, or t
  misc_feature (787)..(787): n is a, c, g, or t
  misc_feature (790)..(790): n is a, c, g, or t
gcaaagncngcntcccacagcgctggtccacctgatcgtggagcacgacaggttgtaccatggaagagccgctcgttggtctcggaatgcagntgctggggccgacccacccgcaaatgcgccggcctcgtgccgaattcggcacgagtaaggagggagtcatggtggccaagaaggatgtccacatgcctaagcacccggagctggcagatgtcatgaaggccatgcagtctctcaagtcccgaggctacgtgaaggaacagtttgcctggagacatttctactggtaccttaccaatgagggtatccagtatctccgtgattaccttcatctgcccccggagattgtgcctgccaccctacgccgtagccgtccagagactggcaggcctcggcctaaaggtctggagggtgagcgacctgcgagactcacaagaggggaagctgacagagatacctacagacggagtgctgtgccacctggtgccgacaagaaagccgaggctggggctgggtcagcaaccgaattccagtttagaggcggatttggtcgtggacgtggtcagccacctcagtaaaattggagaggattcttttgcattgaataaacttacagccaaaaaaccttaaaaaaaaaaaaaaaaacaaaaaaaacaaaacaaacaaaaaaaaaaccccggggcgttcttttgggggggggggaaaaaggggtttcaaagggccggnggcangtnttcnnggcccnttttngnccangggggancgcgggcccccaaggggggntaantcnaaccggggacggta

SEQ ID NO: 395148 - DNA, 166 bp, Homo sapiens
tgcatgtactgcttccacagactctgtacatgctgcagtggactttttgctgttccccaaacatatctcagggcctctgaacgggctgttgtgttatgcatgaagcattctctcccttccccagatattcacatggctctcactctcatgcttctctgcttcttcc

SEQ ID NO: 395149 - DNA, 144 bp, Homo sapiens
atgagtcttaaccacaagaacaaagacaggggtggtatgcacacttactaattctcccaggcccagatgcacactttctccaggtagtccctctgctgtcacctaaaaccacaatgcaatgggagctgagcacagtggaagccc

SEQ ID NO: 395150 - DNA, 392 bp, Homo sapiens
ggagaacaggaattagggagaggtatggaagaggagttggtgaacaggaagcaggtggtcagttaggcagtcatgataggtgaggggtgtggcttctctttgtccagatggtgatctggaaagtttcagttccttgatactatctaggaggcccaatggttggtttcctgaaaaaggaactcagataagacaaatgtaactttctcaagttttaagactgggagagtcaacttctatgtttatttaaaagaaaccataaacatctgttctataggacagctgggtccatttcatagttatcagagatcatgaaggaagttttgactaactttatggagatgggaagaatggggccaggtaaaagacatttgacctgaattctgtgagatgaa

SEQ ID NO: 395151 - DNA, 254 bp, Homo sapiens
aaatggtagaatactaacagtaataataagctgacatctgccatatatatcagtactgtgcacagggttaatgggagtctgctccagagagcgggatttgggattttgctgaacctgcatagccagtccggcccgtggactagagaagtttgcctgctggcctcatgcagctggctgtgtgatggttcccaccattgtcatccaaaccaagtctgtctgagctgagttgtgtgctgggtgacttgcctcccaaa

SEQ ID NO: 395152 - DNA, 493 bp, Homo sapiens
aaactactatagatgaaagaggaaacctttttttttttcttttagacagggtctcattctgtctcctaactggagtgcaaatggcacattctcagagctcagtgcagcctcgaactcctgggctcaagcaaccctcccacctcagccttctgagtagctgagactacaggtgtgtaccaccaggcccagttaaattttttttagaggtaggggtctcactatgtttcccaggatggtctcgaggttctggcctcaagcaattctcccatcttggcctcccagagtcctggattacaggcacgagccaccatgcctagcttaggaaaaaaatttaaagcaaagatggaatcttaaaaaataaaaataaactttaaaagttaatgtgataagaattcctcttgatcttatttatcatttttaattcatttggaaaacatgttcttcccagataatgcaaagacagatggtaatctgtctagagtgtatcacacat

SEQ ID NO: 395153 - DNA, 356 bp, Homo sapiens
ggaagatgtctgttctccatggtgggcggccaatgcaataccagaacaaagtagtggtcatgagaaaaaaacccacgttagatcacatcagtgcctgagacgccgtgatgttcaaagtcaagcgtcctgactgcttctctctgtggtcaatttccttgtttctgacatcagcccagaggcacatcagctgaaacagaaccacttgaaatgacatgactcgagaaagtctgttcagaaacgctgtaattttttgaaaaacagtaggtttctccttttcctaacagaaatcagtttcgctctaatcgagagaaattttttttccccagcatttaaaacccatgcacagctcaataact

SEQ ID NO: 395154 - DNA, 435 bp, Homo sapiens
agttagcgtcccagttttacagatgaggaaactgaaatccaggaattttaagtatttctgaggtcccacaacaaatggcagagccaaaattcaaacccgatgagagtccagccctcattaccgtctcttctggggcagccaggcctgactccaagtgggccatagcttctcctcttttgagacttacacaagaagtacagtggaacaaatggcttagtgatggaagaaaatacaacccccacacccagtttctttccaaagggctcacttaaactgaatagagggtaagcacctgcagaggtgagtactgatttaatgcaaacaaatgtgcatatgatgctgtcatctgtgtttgggaggatgaatctcataatttctgacttatgggcgcgggtgtacttgtgcctcgcctagtcatacctgccattaggggac

SEQ ID NO: 395155 - DNA, 506 bp, Homo sapiens
caataaaatattcgccctttagatccaggttgttccaggaccaatgggagtgcgagccttctctcagaagtggcatttctgagtggcatttcagtatcacggcctgtccttcttgtgatccactctgatcactgatcaaaaataagtcactatggcctggcatggtggctcatgcctgtaatcccagcacttgggagaaccaggtgggcagatgacttgaggccaggagttcaagaccagcctggccaaaatagtaaaaccctctctctactaaaaaataaaaaaaaaaaaaaaaggccaggcacagtggcttacgcctgtaatcccagcactttgggaggccgaggcaggcggatcacgaggtcaggagatcaagaccatactggctaatgcggtgaaacaccgtctctactaaaaatacaaaaaattagctgggcttggtggtgggtgcctgtaatcccagctactcgggaggctgaggcaggagaatggcatgaacccgggag

SEQ ID NO: 395156 - DNA, 461 bp, Homo sapiens
catggccctgggagtgaaaagaaagaagggagacagaggacatggtgagtgggtcctgaatttctacacttgctttattcccatgaacctgttcttcccacaagaagtctaagcccttatttcccagttacagcaatagctatgttaaatgatgtatagccaaagaggtttcaacgtttctagtttttcttaaatttctttattttaggtggggttatttagtatgtgattgcactagaatgtttccttgtgataactggattccttcctgcattctcacttcccagggtgtatgatggcatttctcacaggctgatcagctgcaatttcacaactggctgcacagcagcccctgcctttgctgttagaaggcgggactttttgaagagacgtttactatccagaggacaaggctgataagtcaaagccacctcctctcggtagccctcccagtactgagg

SEQ ID NO: 395157 - DNA, 559 bp, Homo sapiens
ctgttgggaaattccgacgggaattgaaacaggttcctaatctcacggtctcacctgagggaaaagtggctaagaagatggaagcaggctgggcacggtggctcacgcctataatcccagcactttgggaggccaaggtgagtctccttttctgataacatccttcatttctgctcccttctgcttccttctctgaacatattcgaatcacaaagccccagctctgttgggaaattccgacgggaattgaaacagaaaaggtcgatcttgccttgaaagcgggcagtggctattttcttctctctgccaaagcaggacacgttattcttaacacagagggccacatcggtatccctcacaaatacttcagacagttgtcttcaacatcctgtggttcttcgtccgataccttgtttattgcgagatggagtctcgctctgtcccccaggctggagagtgagaatccgtcttaaaaagatatcactcgaggactgctagagaaagagaaccggctcaggggtgcaaccgggatgggggcgacgaagaagcatcggaggga

SEQ ID NO: 395158 - DNA, 442 bp, Homo sapiens
gacgcaaaagcagggctgcctgcggtgccgccatgggggtgagggtggagcttcagataagggcaggaacctcgttggggcactgctgaaaggtctcagaatgtggggacaattcccagagtgaatgagacaagagagggggacaggatcggttacagaatcagaaaccagtgcaaagtgaaaatgtggggtccattgttcaattacaaggattcaagactgtgatagcaaagtgttaaacaaggaatgaggccctgggggggtgatgagagggcccttctgaacctgccagccctaaaagccactgagggacattcaaggatcagatctcaccccacaccaggctggctgagttcttggatggattctagctgattcaccaacacaatgtttcactggacgtcctacacaggtccacttgcacccattgctgattcttgca

SEQ ID NO: 395159 - DNA, 157 bp, Homo sapiens
actcctttcctcctaactggtctccctggttctgcccttgccactgctttcaccactccccaaccttcaactactctcatcacagcagccaagtaattatattaaatctacattagatcatgccatcaactgcccaaaaccttccaatgaccatctg

SEQ ID NO: 395160 - DNA, 393 bp, Homo sapiens
gcactacaccacagtgatcttcctgaagcctaaatttgatgctctccctcctgtctagaaccctccaaggttctccagtgcccccaaggcagagtccaagcccttcagcaggtatttgagtttcatgatgtggcaaagcctggccgattcccagggcccacagtagagagtatctttcctcctggaggcccctccaacactctcgctccaaggcttcctcctccgcctgctctagcttcaccctagcggtgctttcctctgggactgggactgggcctacctctccatgtgcacagaacaggcccagctcagcaagtgcagacgagcagcgtgatcagacaagctgggcctgaatcctgaccccatcccatccctgccctgtgaccttgatca

SEQ ID NO: 395161 - DNA, 334 bp, Homo sapiens
aatcgtctcagctctccctggtctgagctggagataatggtatcagctctcctgagcagtaccgaagtcacgaacttcctcacgtacgtgcgtccatatgctatgatcctgtgtgtaaaacatctcctccccgagtctgcagctgcatgcccctcaatgtagaacatcagctcctctccaggtctgcagctgcacgaccctcaatgtagaacatcagctcctcttcaggtctgcagctgcaagaccctcaaactagaacatcaggtcctctccaggtctgcagctgcaagaccctcaaactagaacatcaggtcctctccaggtctgcagctgc

SEQ ID NO: 395162 - DNA, 519 bp, Homo sapiens
tttcctgggagtgcactgattacacagagaaccaaggcatttctatgttgggcctcactcccttatctgtgcctgtagcttgatttttccaagctgctctttatgtgcctgcagcttgattttttccagactgctgttttgtttgaaagaattccaccaaggacctgccctaactgtctgcctgctttttttctttctccttcctcacttgggaggctgaggcaggaggatcacctgggcttggggaggtcgaggctacagtgagctgtgattgcaccactggactccagcctgggtgacagagtgagatcctgtctcaaaaaacaaacaaacaaaaaaaaaacaacaaagaaacatacacaaaaaaaacccaaaaaaccagcaatgagaaaactggaaacaaccaggttttttccatcagtaagagaatggtgatactgactgtggtatactcttacattaggcaagcacggggtgcatcttctcttgcctgagcaactatgggaacactattcagcc

SEQ ID NO: 395163 - DNA, 414 bp, Homo sapiens
aacagaaattaaacgtgaaggaatgataaaagatatttagtggaaatggcaaccaaaatatagcaggattggctgtacctatttcagacaaaatagactttaagtccaaagctctcacaggagaaaaggacattttataaagataaaagggtcaacctactaaaaagttttaacctttataaatatatatgcacccaaaatcagaacacctaaatatataaacattgaaagaacttatgggggaaacagcaatagaataatagtaggagactccaataccctacttctaataatggacagaacattcagacagaagatccatttggaaacagaggactttaataacattatggatcaaatgaacctaatgaaacatttcattcaatgatagcagatacccattcttctcaaggg

SEQ ID NO: 395164 - DNA, 662 bp, Homo sapiens
aggtgtgctgttgggagtagacaaagaggaatcccatggatctctttacaaaaaaaaaataagactccaagaatgtgtgttcaccatccaaacttgccatgcatgcactctgctgcccactatggaacatatgcaggtcatttgggtgtgtttcctcctagaaaatgaggacagcctttgagtggctcatactaggtcggtaagactgccttctccacctcccaccatgggccgcctcaccctgatgtgcagcaccagccagattaccccaactccactggcaacagcacatgaaaaggtataagcaagtgtgctgctgtagccagccctgcagcctacagatgactgaagaagtattaggttggtgcacaagtaatggcagtttttgccattagaagttttagttaaagggttttctttcactacgtgtacagaattccttcattctcagcgaagctggccactgctcaagtgcaaacctgggcaccacaggacccatgagcactgtctccttagggtgttagccctgggactttacgttcctgttagtacaaatcagccactgaggctcttcaattcaccccctaaattctccagtcactttctatcaccactgccttatttttaaacccttatcacttgccctaattgttgctatagcc

SEQ ID NO: 395165 - DNA, 690 bp, Homo sapiens
ggagtctcactctgttgcccaggctggagtgcagtggcatgatctcggctcactgcaacctccgcttcctgagttcaagcaattctccttcctcagcctcccaagtaggtgggattacaggcatgcgccaccatgcctggctaatttttgtatatttagtagaggcggggtttcaccatgttggccaggctggtctcgaacttctggcatcaagtgatccacctgcctccgcctcccaaagtgctgggattacaggcatgagccaccgtgtccagccaacaactaaatagaatttaagttgtatttatactcaggttctctcgtccttcttcatcccttcaatatgtatcacaggtgcatttcctcattcataaaggacacttagattactatcttgcattcctaccatctgattcaccataaatatacctacattgtccctaggttttataataaagttttctacaacataatctctgtgggcatttccaaacatctcaagttttcttctataatgactcatcctgtggatgctccatcatatagattcttattgatttgcaatgtacctaaatcatctttgccttccattggtattacttttttttaattccttttgtttttgtttttgaaagagtcagcggaaagtacaaagtattaaaacatttattcttctctccactaataata

SEQ ID NO: 395166 - DNA, 501 bp, Homo sapiens
  misc_feature (400)..(400): n is a, c, g, or t
  misc_feature (404)..(404): n is a, c, g, or t
  misc_feature (430)..(430): n is a, c, g, or t
  misc_feature (432)..(432): n is a, c, g, or t
  misc_feature (435)..(435): n is a, c, g, or t
cccaaggccacgctcgcggcctgtcggcaatccaggctgtcggctcaggacagagggaagggttaagcccccagcagggccagggaggggcaaggtggcaccggctccccagctgctcccaggccctgctctgtggtgctggggacctggctttagttcctcggggtggagggggcaccgcgctgcctgcctccgagctgtctggagcagccagtcctgcagatgtgggcagctcagggcccgtgggagggagggggctttgtgcccagggcagcagctgaaggagccccgggcctcgcagcccctcctgggtgaccaggtgctgcttcgtggcagctgccccctcccgtccagcgggtatgggcctgctccccgtggtggggcggcgcaggagagtgancgancctcatgaagttacctctaccgggtntnagnccccggacagacacccccgccccgacctggttacagcgcccttccccggttcggtctccggtgtgc

SEQ ID NO: 395167 - DNA, 360 bp, Homo sapiens
ctagagcaggcatatgtgcagttggtagagagggtatcaggcattggaagggaactgatgagctgggtgatgcctccgctttcaaaatgcaggtgacacaggtagtcactcttcactcggctgcaatagcttaatagacttgcggtttgaaacattttacttctttaagtgcatcctgtgtgaaatgacaaaccccatccctgttgcagttcacatgttcatctgcagactcagcgcccttgggtggactccagcaatgtgccccacccgtctcagctgatgtccctggctgggcaggaggggtttgggaaactgcctgcaggaaggccccagggagctctgggacccggatggtgggtc

SEQ ID NO: 395168 - DNA, 355 bp, Homo sapiens
actggcagtcccaggagagggaccaagtagaacagaaatgttggccctgcaatatctcctagccgggccggcccggggtagagccagtttgcccactcaccaatgcagagagcttgctgctacagcctttgctctcttgccaatacgatgtatctgtttgcttttctaaggatttaggtttcatcgtctttcaaataaaatcactaaatacactctttaaaaaaactcctcttcctggctgggcgcaagggctcatgcccgtaatcccagcactatgggaggccatggtgggtggatcgcttaagctcaggagttcgagagcagcctgggcaacgtggcaaaaccccatgtctac

SEQ ID NO: 395169 - DNA, 429 bp, Homo sapiens
taacgtgccggggagggcttcctcctgtctaaccagtgggattctgtaaacagagtagtgaacaatcatcctatagatcctgaagtttcactgaggagaagtaggaggtggggtggctgccagccatgccttctgttctcttctctcaggggaccaccagctcttcgcctgcgagggtaaggagggctcccagtctcagccaggccctccccattcattcttcagcacgcggcagttctgatacctccacctgtcactcattctccgcagtgcaggtgtgcactgcaacaccggcccaagccggctcctcggggcctgcactgctccacacagatctttcccactgtctcgactgtctggctgcctccctgcgccccggcataccagctttgctctctggagggcctccatggtgcccagcacatctca

SEQ ID NO: 395170 - DNA, 598 bp, Homo sapiens
gcctttcggccggaaccgccatcttccagtaattcgccaaaatgacgaacacaaagggaaagaggagaggcacccgatatatgttctctaggccttttagaaaacatggagttgttcctttggccacatatatgcgaatctataagaaaggtgatattgtagacatcaagggaatgggtactgttcaaaaaggaatgccccacaagtgttaccatggcaaaactggaagagtctacaatgttacccagcatgctgttggcattgttgtaaacaaacaagttaagggcaagattcttgccaagagaattaatgtgcgtattgagcacattaagcactctaagagccgagatagcttcctgaaacgtgtgaaggaaaatgatcagaaaaagaaagaagccaaagagaaaggtacctgggttcaactaaagcgccagcctgctccacccagagaagcacactttgtgagaaccaatgggaaggagcctgagctgctggaacctattccctatgaattcatggcataataggtgttaaaaaaaaaaataaaggacctctgggctacaaaaaaaaaaaaaaaaattaaaaaaagaaaaaagaa

SEQ ID NO: 395171 - DNA, 611 bp, Homo sapiens
ggcttatataggtataaacatggtgaaggtgatagaccatggatgcttagtcccttttaagttccatcttccgtttaacacattttgaaagaatttattgtgtcttattttcccctgatttgtgtagctgtgccaccctagataacagtttttctttttgctcttgccaccttcttgataaaggcaagtacagttagaatcgtaggtacttaataatgcttcggcatgaatatgcttcacaactttgagatgtgtaccctttattttctttctgttataaatcttaatttctttgtgccctacttttcatatctgtaaaatggatgaaatagtagtatctgcctcatataattgctgtaaagattaaatgctaatacacataaagctcttagaacaggtctggtgtatagtaaacacacaaagctgctattattattgttactggtattaactgatatattcatactttttataactgctcatcctattaattaaatgtattttttcactatatattctttttcaatgtatattccttttaatcttccttcttagcctccactatagttcagatgccttctccaatttcaaacaatttaatgaaaagaaaa

SEQ ID NO: 395172 - DNA, 212 bp, Homo sapiens
tgccattggatggatgcttttagctttctgtagctgtgatttttaccccctaattttgtagatgaagcttttaaaacactccactcatttgaaataaaaataacaaaggaaaggctgaacaaattcaagtgtctttcctcttttctgtctccttgcaggaaaaaatcatatttcttgggcagagtgtatatactgtatctttttcaatgact

SEQ ID NO: 395173 - DNA, 371 bp, Homo sapiens
ttgtgaatctccagatgagggtcaggccgaggggtagcatcagagaggagtgtttggaagggagtgtaccagtcttggtttgttgtggcaggggaccctaggaggagttagtcatctagtgcccacagtgttctaggtactcagagcttttttgcgtttcaaagattaaacaaagtcttttggatttttccttacaaatctgcagagtgaattttctgcctcttgaatttaaatgtgaagtgtcacgctgggtgaaaatatgaacatgtgaacacaaagcctttcttagcctttcttctttgagagttcgattattaaatgtcttgattagtgtcactagggttatattgtacttggccttgccatatgca

SEQ ID NO: 395174 - DNA, 355 bp, Homo sapiens
atttcctgctcctgattatataattatactctggggtgaggaatataaaggaattctgctatatttttgcaactcttctgtacatctaaaattagttcaaaagaaaagtttaaaataaaaggaaatggttaagcaaactaagatacagccatggctgggtgcagtggctcatgcctgtaatcccagcactttggtaagccaaggcgggtagatcacctgaggtcgagtttgagatcagtctggccaacatggcgaaaccccacctctactaaaaacacaaaaattagccgggcatggtggtgcatgcctgtaatcccagctattattagggggcgctgaggcaggagaattgctt

SEQ ID NO: 395175 - DNA, 1013 bp, Homo sapiens
gctgagctcgccgggccggcccctccgtggggccgcgctgggacgcacgcgggtggacgaggggaccgatcccgggcgcccatggccggggccgccatggccgagcggggccgcgtgcctccccccgcacccgcgcccagcacggaggggctgccgcgcgccttcctgcagagcctgcgcaccctgttcgacatcctggacgaccggcggcgcggctgcgtgcacctgcgcgagatcgagtcccgctggcagggcaccgacgcgcgggagctgccccgcggggtgctggagggcttgcgccaggtggccccggccagcggctacctgaccttcgagcgcttcgtggccggcctgcgcacctccctgctgagcgccgacggggcccccgggaccccacgcgcgccccggcccggcccggggatcagccgccgccgccgccgcagcgcctggtgttcgctccggccgacgagccgcggacggtcctggagaggaagcccctgcccctgggcgtgcgcgcccctctggccggtcccagcgccgccgcccgcagcccggagcagctgtgcgccccggctgaggcggcgccctgccccgcggagcccgagcggtcccagagcgcggcgctggaaccgagctccagcgcggacgcaggtgcagtggcgtgcagggccctggaggcggactcaggggatgcccggcgggctccccgtgcccgaggggaacgtcggaggcacaccatcgccagcggcgtggactgcggcctgctgaagcagatgaaggagctggagcaggagaaggaggtgctgctgcagggtttggagatgatggcgcggggccgcgactggtaccagcagcagctgcaacgagtgcaggagcgccagcgccgcctgggccagagcagagccagcgccgactttggggctgcagggagcccccgcccactggggcggctactgcccaaggtacaagaggtggcccggtgcctgggggagctgctggctgcagcctgtgcc

SEQ ID NO: 395176 - DNA, 270 bp, Homo sapiens
cagcggagcactaaaataatttacaatatgtaaattatttccttttatggtttgtgctttctgtggtctaataaactttgcatatctccaagttacaaagattttctcctatgtcttcttctggaaattttataggtataagtgtatttgtttttaagagacagggtcttgctatgttgcccaggctggagtgcagtggctattcacaggcacactaccactactgatctacatgggagttttgacctcctctgtttctgacctggacca

SEQ ID NO: 395177 - DNA, 383 bp, Homo sapiens
aatgctaaaatatatttcagttcagtatcattttcccatgttttaaggctgtacatgctctaaaatataaatctaagagctcagaggagaaggaagtttttagtttttcatgtttattctgctgcaatttcattagcattacttatttgaaatcaacctaagaattcacttgaaaaaaggaattcggtaacaaaacaatatgtgatactaacttatctagctaccgccctcatttttataagtgagatacctcaggtcaacacatttcttgaaataatttgttatagatcttataacaagttagaggtcagaacctcagtccagtgttctttcatattccccaaactacagtgaatatgtccagtaaagcttggatataacaa

SEQ ID NO: 395178 - DNA, 424 bp, Homo sapiens
tttttggaagggtctaattttcatacacagtggatttgccatggaaacaccgagtatgtgcacaagagtcctgttggatctggaaaagtgaggaactttgaaaatgcatcacactgcctgcgtactgatgctgccccaaattctatatccccctggaatcagcatggctgcaggaacatcttctctctgccggtcaaggacactcctcagcagagtggccctttccgaagctgaaacaacttctgcctctacttgcatggcttcccaaaggctggatccttgtgggaatgcatttcaaaagggaagaatcaactgatttcggggcatgcaatcaagaccctaggtatcagtatgaaggagttcttcatataatctggatatgagcctcagttaggtatatgtatagtaaagagtttctcccaat

SEQ ID NO: 395179 - DNA, 369 bp, Homo sapiens
cgtgtaagtggggtgaggaaggcaggaggcccagagcgtatcctggcagtgggttgctcttgagttgggagaggtgtctttcctttcatatacaagttaagccttctcctcaagggattgtgtggagaagcccagcttcccacagattcagcaatataaacaaagaagaggccatgtgactggaaagaattctttgctgggtgcttcatgctctgcccaccagagggcagcagaggtctgtcatagaccatttccaggcaagagactcaaaagggcaaaagggcattctaaaagataaagtgaaagcttgctatcagctgtctaagctcctggatcccgactgaactgcacttaataaattaagaccta

SEQ ID NO: 395180 - DNA, 486 bp, Homo sapiens
caaaatgataagctgatttttctaaaagataaataaaatgaataaactgctaaccaacccagccaagaaaagaattcgcaaataaacacaatcagaaatgaaaaaggcaacattacagctgataccacaagaacacagaataccatcagatactattatgaacacctatacaacagactgaaaaacatagaggaaatggatgaattcctggacatatataacctaccaacaatgaatcaggaataaatagaaaacctgagaagactaataacaaataacaagattgaatcagtaacaaaaagtctcttaacaaaaaaaagtccagaaccagatggcttcactgccaaattctaccaaacttacacagaagaattaacactaattgttatcaaaatattccaagaaattgaagaggagggaattcttcccaactcattttacaaggccagcattactctgatacacaaaccagacaagggcacaaca

SEQ ID NO: 395181 - DNA, 328 bp, Homo sapiens
atccatatatccactctgcagaatactttttctcctagaatcagagatccctgagtactaggactgagtcccccattaagagatcaataactagcctgcctccaagcaaccaaaaagcttcttcagagatatttcaatcacccacttgccctagatgtggaagttcatgttctatataaaaggagtttggacgaggcccagtggctcacacctgtaatcccagcactttggaggacaaggcaggcagatcacttgaggtcaggagttcacgaccagcctggccaacatggtgaaacccccatctctactaaaaatacaaaaattagcc

SEQ ID NO: 395182 - DNA, 231 bp, Homo sapiens
tgggaggatcacttcaggccaggagtttgagaccagcctgggcaacattgagagaccctgtctctacaaaaaataaaaatattagctgggcatggtggcatgtgcctataggcccacctgctcaaaatgaagggagtaggggcgtaaccttctaatgcatttggtctttaacattttttagctgttgagcttaaagaaaaggattttttttccctaaagggaaaaaagcta

SEQ ID NO: 395183 - DNA, 655 bp, Homo sapiens
gccagagcatctttggctgaggctggtgaggtagcaaatctcatagattatatatattttaaagagagagagaaagtgacagagaaagagagtgagaaagagagagagagagagaggagattaaggaagtggttcacatgactgtggaggccagcaagtccaaattctgcatggcagtgctgtaggctggagactcagagaatgatgttgcagctctagtctagaagccatctccaggcagaattctctcttcctatggggaggtcagttggttttctgtttagggcttcaactgattggatgagatttgctcccatgatggagcataatctgctttattcaggctactaatttaaatgttaatctcattttaaaaatgccttctcagtggcatccaaactaatgtttgaccaaatatctgtatgcagtggcccagccaagttgacctataaaattaaaccactagaaccccaaaacagagaatcagatttttccacttcccttattctctttggggcttctgcaaatccctggagtgagacagaggggagcaataaaataaactgattgtctgccttccagtgggtgcaggttcacttgatcttagccaaaaggccaagaaatgatagtgaatacaagttcaaggaaaaattaa

SEQ ID NO: 395184 - DNA, 344 bp, Homo sapiens
gttgtgccaagccaggcctattcttagctagccaacaacattctttcaaaggatattttttggttttcatcaaatgtaaatagtgtttaagagtctgtaatatcatttagaaggaacaaatggaagtattaaacctttattgactacctacagtatatagaggatctataacttatgatggttttattatagtttctcaaccttacaatgggtttattgggcattgggtacattttaaacttatgatatattctatttacaaggggttcatcaggatatgacctcactgtaagcccaggagcatccgtacgtacaagcactgtgcttagcgctggagttacagg

SEQ ID NO: 395185 - DNA, 380 bp, Homo sapiens
gggtcgttaggttagatatatggctattttattttaaatcacagcaaagttatttgtgttcacccttggggtttatttagaaaatacaaggttacaaagggcttccaaagatcattattagcagtaagaagattaccgaggaaaggaaaagtggtaaggaagtgggaagaaaaccgaagactgatgactgaataagatcttacatatttgcatagctcagaaatttgaatactatatccaggagtctatttttttttcaacttgagaaatgggcttttcctgaatatgtttaaaaatatatttcctactaactctctaaaaaattttctgctaactcaacttttcaacctttgttttattcagtaagagagttagcagga

SEQ ID NO: 395186 - DNA, 721 bp, Homo sapiens
ggacctggcgcttttactactgagacacctatgatatagtgactcacagcgaaaacctcccggcatttttacaggctgaaagtgggcagatcacttgaggtcagaagttcgagaccagcctgaccaacatggagaaaccctgtctctattaaaaatacaaaattagcaaggcatgatgacgcatgcctgtaatcccagctacttgggaggctgaggcaggagaatcgtttgaacctgggaggcaaaagttgcggtgagcttagattgtgccactgcactccagcctgggtgacagagtgagactctgtctcaaaaaaagaaaaaaaaaattatcaaatagcagaagtttttctttatgttctgcacacttactatttaagtaccttgttaattgtggtggctttgaactatcattagctaatagctgtgggcacattatatacttgatatgtttggatattttgtccccaccaaatctcatgttgaaaggtgacctccaatgttggaggtgggcctagtgggaggtgtttgagtcatgggggtggatcctcatgaatgcttggtgctgtcctccccataacaagtgagttctcactctgtgatcactcgagatctaccagatcgacttgatcgtgcagctgctgggcacgcccagtgagaacatctggccggtgggcgtcctgggcagacccgcagcccccgcccgtgcccacgccctctg

SEQ ID NO: 395187 - DNA, 975 bp, Homo sapiens
ggcttgagtggtgactgccttgttttctgtggacctggaggccctgcatgtgatctccaccatggcaggtccttggcaagtttggtttttgtgatgccaggttcacttcaagtcagatcccaactctatttttacagagcagactgtacatttttaagagggaataattttctgtttcatggttccatggtcagttgctactgactttgccacttcaagttggcatcatattttttttagagctggaactcaattcttcataagcatggtaagttctgctgctgtgcggtgctgaaatgggcctgtaacccatctcaccagagtaagcggctttcttcagctcgtgtcccttattccatttccatacaagcatttgatgaaaattccttctttaaaaggatacagggaaggctatttttaaaaaaggtatatgaaaatgaatgtgggaaatataagcaaattatgtgtcatgcaataagattcaattgaagatcaaagttaattatcaggaaatatgttttagcaatttgacagcagttaacatcatccttagacacactgcttacacgttccacatataacagaaacatcaaataggataaaaatgcctcagcacctttgatttctacaaaagtcatgaaatcagcaagatcaacatcttgaccagaccaaaaacttctagactcactttcttctcctgtgtctgtaaagttacattcacgggcatcccgtgtgactgtgcttcattagaggaccacaaatctaagaggaaggaatcaatgtagcaaggaagcagagatcctcataaaattgaaaacaggattgtggtaccatttctgtattttccaatatagagcaaatcattaattttagtgactgaaagtcattcctttttatctaactggcctaaaacagccttgctttggaaataatattaataacatgaataaagagatattttttcttactacaaat

SEQ ID NO: 395188 - DNA, 238 bp, Homo sapiens
agcctctgacagggagacggccaagagtcacaggacccaagaaaaacacaccttagaaagctggtctagtttgcttgcccattctgggtggagggccatgtccttcaccaaatattgtgggtggaccagagcaggtgttttaggatgctcacatgttttagtgggacctcccttctttgcctttggtggggaccatcaagttctctctgattcctgggttcctaaaagggactttcca

SEQ ID NO: 395189 - DNA, 350 bp, Homo sapiens
ttgttttggtggtgaggcaggagttgaaggacacatacaactcctgcgtgtccttgaattttttggttttattttgtcttgcagggtcctagaaatttcctttttgcctcttttcttcttcactcccaattgctgaagggcagatttcccttcctgtttgtcttttgtctcccccagaagctttatatagagaaaactgctcctgtaaaatatgcatacttttaggcccttttttgtagtttgtgtctatctgaaaaaatctgtagtatttttcagacttagggcagacaatttttctggtggtggttttagatcaatcttaggacccactgctagttcatttcttccat

SEQ ID NO: 395190 - DNA, 436 bp, Homo sapiens
ctgtctccccagcctttttatagcatgaactatgtccttcaccactgtatccctagcaactagcacagagcctggcacctagctcacaatcaataaatatttgtggaattgatggatgaattcaggcactggaagcaagaaaagggccagcaccaccgctatctacgtaagtcatccataccaagagtatcaagttgagctcttccatagtaaagaattaaacctcgcccaaaaagaagtctggtctttacccttggtgtcttactaagccctgggaatgtcatgcctggataggagtgtttttttgcttgtgggggccttgggtcacaccagagagtctaacagtgtgatttagagtgggggcttagaatcacatagcatgagctcaacctccagaggacctggaagccaaggtcacccatataagaactcaaca

SEQ ID NO: 395191 - DNA, 438 bp, Homo sapiens
aacgggtgatgcggttgccatattgcccaggctggtctcaaactcccgggctcaagcaatccacgcacccaggcctcgttctcctgctgttcccctctcgtagcctggaatttttagggcccatgacctattccggtaggttcttctaggcagaactgacaaagtgcccaaccactactttaactttgaattctgctccaggtcttgagaatcatgcccccaggacccagcatcccctctcctggttgaatgtggggcatttcctcccaagcgtggcaggagattgcctttcccccaactctgctactgcttcaacactgctctctcctgtcatccaggcttccctgggtaggaatcagactcccctccagggtgttccccaagactctcatgctcatgcttcccctggctgaagcccctcaggagacaggagtgaaa

SEQ ID NO: 395192 - DNA, 274 bp, Homo sapiens
aatcacttgagcctgggaggcggaggctgcagtaaaccgagatcccgccaccgaactccagcctgggcgacaaagctgagctctgccttgaaagaggcaaagagaaggaagggagaaaaaggaagaaagatggggagccacagaaagcggctttgctgtagggctggttgtagggctgcattcactaaggctccatgggtctaaggccaactccgaggatggaggtcagcacagctggcgtcccctggggctggagggctgtgagccaccggca

SEQ ID NO: 395193 - DNA, 326 bp, Homo sapiens
caattgctacttaaattctctaatctttctgcctgaattctttaaataaagttaacactgcttggtataaccccagcacaacacaggataatgctcccagtactcccagtgacacaaacctgctagagaaaggaaaacgattatccatgatagtatgaggcaggaataaaattaggccatcttgccatagcaggcggtcttcttttggttctatgacacagaaggtggcttgatcacagcacaatttctttatcccaacttcctagcaatcaaagagtttttctcttggtggagcacaggggctcacacttggaatcccagcacgt

SEQ ID NO: 395194 - DNA, 761 bp, Homo sapiens
tattaataacaatgctttgttaatataatatcatttgtttgttttttttgggtttttttattgttggtaacttttttttttttcgaggcagggtctcactctgttgcccaggctgggatgcagtggtatgatcacagctcactgcagcctcgaccacccaggctcaggtgaacctcctacctcagcctcccaggtagctgggactacaggcgcttgccaccatgcctagctaatttttttgtattttttgtagagacagagttttgccatgttgcccaaggtggtctcaaactcctgggctcaagcaattttcctgcctcggcctcccagcactttgggaggctgaggtgtacagatcacctgaggtcaggcagtcccagagcagcctggcggcatgttgaagccctgtcactgctgaaactgcacaaattggccgggcatggtggtgcatgcctgtagtcccaattctgctgaggaggagcgacggcggcagcgatcgttgaacccctggaaggcggtaggtttgtcggttgtgcccgagcatccatgcacacagctgaagcattgagtgagattctcctcctaaaacacgccttctcgtgatcgtggacaactttttcacttgtcagcgccaatcttgccaacagtccccctctatcaccatcatatggggggtgggcccccatcacaaattgtggcgtctgccgcaaccaaaaaacaacacaacaaaatttcccactgctcaaacattaacaccttcg

SEQ ID NO: 395195 - DNA, 342 bp, Homo sapiens
tgcactgtcacccgggctgcagtgcaatggcacgatcttggctcactgcaacctccacttcccaggttcaggcgattctcctgcctcagcctcccgagtagctgggattacaggtgcacaccagcacacctggctaattttttgtttttttagtagagatggggtttcactatgttggccagactagtcttgaactcctgacctcgtgatccacctgctttagcctcccaaagtgctgggattacaagcatgagccaccgcatccggcctggaattgctttcttaattttacttccagattgttcactgctagggtatggaagtgcagttgatttttatata

SEQ ID NO: 395196 - DNA, 310 bp, Homo sapiens
ccagaatcctaaaccttaccattacataatatatacatgtaacgaaccgggcacggtggcctgtaatctcagcactttgggaggctgaggcaggcggatcacctgaggtagggagttcaagaccagcctgaccagcatggagaaaccctgtctctactaaaaatacaaaattagccgggcgtggtggcacatgcctgtaatcccagctatttgggaggctgaggcaggagagtcgcttgaatccggaggtggaggttgtagtgagccaagatcatgtcattacactccagcctgggcaacaagaacgaaa

SEQ ID NO: 395197 - DNA, 813 bp, Homo sapiens
gttaagtgactgaatttgggttttaactctggtgttctcgtgaccctttatgaggcagcactttcatttttctccagagtctcctggtcgtaggtgttaactttgggtccaatctgccttcccttggctctttctagatccgatttctttaccttctccaggccaacctcggggtgtggtcctgttcatcaaaacaatgaacatggagtttagagtccagtgagtcaataaagcttttttttgtgcaacctgatctaacatggagatgttttctcttgagtaaactcactgagttttccatcttaaattactcagcagtgactgagagctacctgcatggaagcaggaagttactccagtgttataaacaaacttcttagactcacgacatcactattctccatccctttttttttcctgtagagtccaaaaacctcaaccgtctcatttttaaattatccaattggagttacctttttaaaaaagttattcttaaggactttccaatacctctcctgaggaagacatgtcaggtcttctaaaagtttacattatgaccaaagaaagatgctggtcctcaggcattctacccagggggctgttctccaggccattcccacctcctgctaagaccatggggagccctctctgtaaggaggggcatatgcagggacctgcccatccccttggtaagctggatggcaaaaaggcatgttgtctgcaccactggctgcctgctaatgtcgctgtcagtggggaaggagaagtgacaacacgtttgagtgcatttgctttgactcttagaaacccaag

SEQ ID NO: 395198 - DNA, 329 bp, Homo sapiens
agcatcacgtgggaatgttacaaatgcagactcttaaggtccacctcagaggtacagaatcagaatctataaggagtgagcctagcaatctatttgtgatggggcagggagagcaatataagatgtatcactttcaccattttcaagtgtccagttctatggcattaagtacattttcattattctgcaaccatcaccaccatccacctccagaacctttcatcttccgcacctgaaatgctgtacccaccacccatgatctgtttaaacaagcccttcaggtgattctatgccaccctagtgtaagaaccactctacaatcacatgag

SEQ ID NO: 395199 - DNA, 387 bp, Homo sapiens
gtgaagagcccaggagtccctgaacacacacttctgcctctagcttttcagtatgtgtaaagcccatttccttacaaaagcttgccaggatcctgcattttggttccgaaaaatcaactcttcacaatattaattgtacaagttaaagatgggaactatttggctcatcaggagaaaaaaatatttttgggggttgtttttttcctcaaatcatagcaagtaaaatgtcagttaagtgttggttctgacagccaaggaagctcacatgatcttagaattaatcagtaagagtacagaatgaaagataagcaagaattgcttcactctgtactaatcagaatatacctaaaagattgagtcctggccaggtgcagtggctcacgcttg

SEQ ID NO: 395200 - DNA, 424 bp, Homo sapiens
ctctgatcgctggggcccggacatctgcattttgaacgaccccctgggcgtggtgtgtgggacggtgagcgttctacggcgtgcgcaagtttgggacctgtggcccctttcctgccgcgctgctccaggagcgaaatggctccccagggctggagccacgtgctctgccgcccgaggcagtctgggcggggattgagggaggaggagcccgccggtgtggcacaggctggtggacgctagcgcctgcagaatccggcctggagggaaggttgctgcacacgtgtagacactcctgcccaaccctctgccccgggggtccccaccttaaggctactctgaagttcccagtcaatacctagacttgggccagttgatgggtttggcagctggcagggatgccccgagggctggcccttgcacgagg

SEQ ID NO: 395201 - DNA, 661 bp, Homo sapiens
tttttctcatgacagtgtctaaatccctttggtttgttaggcactaatgtgatacattattgcactaactgctattttttcaatgaaaacacagcaatcctaatgactaacttagacaaataatgattgccacactttgaaaagaaagcaaagatatttaattctctctgcttcattattttactatgcctgagaaaccagcgtgaagattcattaataatgttagaaataacatgatttcatgacaacattctgcaagttgcttttaactccatccagtttcacagttctggcccacaaaaaggccaaattaaaacatgacatagagaaattatgtttataaactatggaaaagtagcaattaagaagagtactcagacccagtcatatccatgttagaatgactttgaaggaattatatgtgtatactatataggtacttttagaacatgttcaattcttgatctcattagcaagtgcactgtggcttgtaagaacaagcaagcctcttttgactcaatctctctctcttttcctcccccgccccgccgtctctctctctccctccctcccttattcccttcctccctttcccaacccctccttttgaaatgaggacaccagaagtctactttttcataggaggtctttctatgtcatt

SEQ ID NO: 395202 - DNA, 301 bp, Homo sapiens
tactaagtcctggaaatgtagctaatgggaatgagaaactgaattttcaatttacctctaattaatttaaatggaaatagccacacagggataagagctagcagcctggactgcagagcctgagaatcagaggacacatcttgtgagggaaaggcatcaagttgcaagaaaagaaaacccacgttattcatctaacaaagtacaacaacaaaaagaagtgtgtttgctctggtttgaatccttggaagaagtagtcaggatcagagctatgagaaagagaaggaaaaaaagcaatcaatct

SEQ ID NO: 395203 - DNA, 374 bp, Homo sapiens
ttctgggggtccgggtgggtagcggcgagcgctgtgcggccgaggcggggctcaggtgcgctgtcgggggtgcggggagtggacgcggcccgttcccgccacacctcaaccctgcttccacgtctcttttcagtcctcctcgggatcgctcatcacccgccccctgcattttctggtcttgtcctgcactttctctcctctcctctcctccgtctcctctcacttttcggacaaaccagtctttctgaggcccctgggttcctgggctgctcctgtgaatggcattcgagggcccttccagcgcggccgctgaggcagccacctcccccggtgctgggggcggccctaaggtccctgaagccctgtcctctccc

SEQ ID NO: 395204 - DNA, 540 bp, Homo sapiens
tttcaaggttgtgcattggcaaaacttggaattattccctcaaagttttgatcctgtaagtttagtctgtgtttagctccactgtactgtctggtgaatacaaaccaaactgaatcaaataacccagtgcaaccagctaactaaccacctccccaggtgaaaactaggaggggcagggaagcggtggaaagaaatgggtttgtggttttctggtttgtggttttctcatttatatgagtagttgttatgcttgaatgtgaagttcttacacttgagtgtgaaggtcaccccttcacattgcatagtgcaatgcagattctcaggccccgccatggaaagtctgacagtgtgtctaggctgtagccccagaatatgcatttcttttctttttcttaaagaggcaggttctcattctgtcacccaggcatgtgcagtggaatgataatggctcactgcagcctcgacctcccaggttcaagtgatcctccagcctcagcctccttagtagccacaggcacatgccaccatgcctggctaatt

SEQ ID NO: 395205 - DNA, 229 bp, Homo sapiens
catccagtgatctccagtgtggtcctaagctcactcgttcagcatcatctagcgtgtggagtcctggatctcatccttggatttgcagggatggtcctaagaagctaacggctctctgtatttgacaattattgtactgtaatgtgctgcctcctaggggaagatctagaggtgaacatactcaggttaaagggctccccggggggtacccggagctccgaattccgga

SEQ ID NO: 395206 - DNA, 412 bp, Homo sapiens
gtggcgtgcacctgtagccccagcaacttgggaggctgtggtgggaggattgcttgagcctgggagttagaggctgcattgagctgtggttgtgctcctgcaccccagcctgtatgacagagtgagaccctgtctcaaaaataaataaataaataaataaataaataaataaataaataaaaaagagtagagtgctcaattcgtcatcctctcctgggatgactgctgccatttgtgctttggactaggcattctgctaagtgctttctacacgtcatgtcagttaattcttacaaccaccttgtgaatcaggcaacactgtacccatggttcagatgagaacactgaggtgaagttacctccccaggccaagtggttgctgcatgctggtggttaggcccacacttgggcg

SEQ ID NO: 395207 - DNA, 588 bp, Homo sapiens
catggttacacttcaaaccaagcacaatccattcgctaacataccatcgtaatgatcttacaaggaaaaagggagatgagagttcttcagcccaagacctttctctagtgttgaaaccggaggcttcttcgcagtgagcagaggtatctcccttagcaccatctccaaaggatggggactccttcaaacaaaccaaacttccccaaatcaccttaaaacagtagtagtgaaggttcttacgacatatgggcaatcaggacttagtaatgtcatgcttaggttaagactgacataagattctctttgtatgcaaagacattcagcaacacctgagcagcccagacaagataagggggcacagctactgccagaggtgacaatgctcaaaaaggttccaaacatatacaggaaatggaggtttgtattccctttagttcagtgagatgaagaagctagtgaggcaggtgaagtccatcacttctcccaacccacccttcctttgacaatctgcgtgtgaacctaggtgtgacttgggcacgtgccttcataactaccatacagaaccctgtccccaatagctggaaggtc

SEQ ID NO: 395208 - DNA, 368 bp, Homo sapiens
ttagatttccaagtagcttctcatgacttacaggagaaaataattttcaattaagaattcaataaaaaacatcagaatacaattacaattgtggttgttacattaataaaaagtgcactttcctgacttgcagggacaaacatttatggagtgtctactatgcagccttgctgaagcaacagagagacatggttgtcattctggaggtcacaccttctgcaaagacagcaaatgtgtctagtttctggggcctaaaatgagagctagagagaaagagagagagagagagagagcaagagaaagctacacatttacatattcagagcctcagagccaggccttggtcctccctgccagacatatcctta

SEQ ID NO: 395209 - DNA, 467 bp, Homo sapiens
tggtggaatgtcatcagttaaggcaggaaccggccattttcacttcttttgtgattcttcacttgcttcaggccatctggatgtatacgtgcaggtcacaggggttacgatggcttagcttgggctcagaggcctgatactaaccataacagatagaatttaaaaagcagaggaaccaaaaacagcccaccactctcctgagctgggagaatttgcccagaattccagggataggtgtgtcctaagcttccgctaggtagggtcaatgcccagcagccaagccagaaggaagatttgggcagacactgtcattggtgaacacgtaagctccagagctagaatactactgatgatggtgactggctttggttcttccgtctggtctgacacccagaaagccgatcagactcaccgctatgaaccttctagtgccacagcaggccagaaaccacagccctgcctcccct

SEQ ID NO: 395210 - DNA, 343 bp, Homo sapiens
tgctatggactacacccattttaaggaggtgcagactgaagccacacagctcataagcagcagtgtccagctggacctgagctctccgattccaaagcctgtacatttttcaggagcctcatgaggctgagccacgtcacactggcagcccacactctggaatgagtcagtccccagggagcagaacagcatccgtcttaactgtttgtggaggtgaggccagatgaatttctcatgctacttttttttttctttttcttttttcactctctttttttttttttttgagacaaagtcttgctctgttgccatctcggctcactgcaacctctgcctcctgggt

SEQ ID NO: 395211 - DNA, 468 bp, Homo sapiens
aaccacccaatagaaaaaaaatggccaagtacacagacaggataattcatagggggaaaaatacaaacatcttctaacataggaaaaatcaaagcccctcctaagaagaaaagtgcattattaaaagtacactgcatttttaaaagtacactgctttttctcacctatcagattggtaagtaccaaaacgtttgctaacacatagtgctggtgagggtgtagggaaatagacactctcattcactgctggcaagaacatgaactgtaaccctatgatagcccacatccaggaagttttcctatgtgcattattaccctatgtctaaaacaacgtccgggatgttcattaagggactgctgatggtagcaagaccagcaacagtctaactgttgatcagcagttaacttaggatatatatcccaacaactggatattacgcagccttgggggaaaaggaggccataggt

SEQ ID NO: 395212 - DNA, 220 bp, Homo sapiens
atattttcccttcaggaacactcttctctttgattttacttaaacattaaaactgcgtaagtggaatctgttcattcctagtgaggtagtgtctttaagttttattgtaagaatattgtaagaactgtgcaggatcctatacaaagagtattttttaggagcctgtgtagttaaaaacgtcatgttacttttggttactttttgacaacggtgagtattt

SEQ ID NO: 395213 - DNA, 245 bp, Homo sapiens
agaactatttcatcactagtattacaaatcaacatttacattcaataatgaacttcggtggggaacaatgtttacagatacacaaactttggtaaaaggaagggagattcaactagaagccagaacccctaaatgctcacaaaatagagatgaggtgggatataggtatcagagcaggaagccagctgacagctcagataaggttgttgtgaggtggcactgccatggtgagagtcagtcttcta

SEQ ID NO: 395214 - DNA, 468 bp, Homo sapiens
aatttcacagaaaacaaaagacatacttaaatctgagttgttcagaaatcatagaaaatccagacattcaagcattagaaattaactgagtttaaagccacgcagaatcattttatctaagtgccagaggtacttcaatatttataactgctttggaaagatcagaaagactagctccagcctcggaaaaaggtttcctgacttttgttcttttgactatttccaaggtctacctttgggaaattaacagaaggcaaattcttgcacactcattcatgtcctgcttcttgctctcagttaacctctggtgaagaggaaagaagttaactacaattcctcctgttctccccgacaccttgccccaaatcagtgtcttcaatagcaatgcctaaatcaaatggaaataaaagatattctagaaattcatacttccttggaagtatggaaacttaaattttcctaattata

SEQ ID NO: 395215 - DNA, 433 bp, Homo sapiens
gtatcctgaaactgctgaagttgtttatgaaatctatgagctcttgggcagagattatggggttttatagatccagaatcatgtcatttgccaacagggatagtttgacatcccctcttcctatttgaatggcttttatttctttctcttccctgatgactctgaccagaatttccagtactgtgttgaataggagtggtgagaatgggcatgctcatacactgccagtttttatggaaatgcttccagctgttagtcattcagtataatattagctgtaggtttatcatagatggttattattctcaaatatgttccctgaggaacattttgagggttattgagggtttaaggttttaaacatgaagggatgctaaattttatagaaagccttttcagcatctattgagatgatcatatggtttttgttttt

SEQ ID NO: 395216 - DNA, 322 bp, Homo sapiens
gcactaaagaaacatcaaatacatgttgaggaaaaccacagatcagtctaaaactgagtaaagcaatgaacaacatgtattaaaacatgcttctattaaacaaagtaaatctcagggaccatctttggtttcactaagtccactcaggaagagacacagcatgttcctaaggcaatgtaaggttcatttcctcatgcatagcttgacagagcacttatggcccatcgcagaatgtgagcacccttttatcatcacagactctcaattcagagctttgctaatttgaaaaaatgtgttttaggttgtgatttggcagacataa

SEQ ID NO: 395217 - DNA, 573 bp, Homo sapiens
gcacacagaatgcacacgtacacctacccacacacaggcacgcacatgcacatactcccacacatcatgcttgctcacccatcacgtacacacacacatacacacacacacaccccaacgtgaatctgttttgttttaccatggcctagtcccaacccccttcccagttatgtggtagccttgacaacaaatagcccacaatcatggtgaatgcatgtctgacagccactagaggaaagaaaaatgaagttggagctccttcaaagcctgattcccacagaactgtcattctttggcctctctggtagtttccaggaagatcccacttacaatactatgtttatttgacctgactcagacctcacctagcatgaactgcctttttcctggggagtttctcaaaaatactcagaggcatctgtttaacattgtagctgtcttgggggtaaataacagttgggggaaccaacaagctaactgaaagcttaaaaggaaaaggtaggtaattacatgtccatatggtgcactgaagctccaaaattactggtaggaatctagaaggccgtgtgcatg

SEQ ID NO: 395218 - DNA, 553 bp, Homo sapiens
aatccagttttgcaacatggcaaagtgaaatgtgaaaggcagattaaagttccagtactggctgagataattaatggtttatgattttggataagttactttaagtttttcagctttagtctcttcatctgtaaataaataggagttatttactttaaaaaatgtgtgaaagtaaaatagaatcacatattcaaaaatgcctatctcagtatttggttcatggcatacctccaataaatgtttctttgtccccttcccacttaatattattgagattgtttatctagatgtgatggatcacatctggcataagtatatcatgggagaatttcttttccaagaagattaaatccttagtatatttgaatgaaactttattaaatagttattataaaatctaatctctattgaacactttctatgtacattagatattctgcatgaaatattacatttaattctgactgcaattttatgttatttctatcattctgttttgtagatttggtcattcatataaagaataaatggttatgcagaaatgaaaactaag

SEQ ID NO: 395219 - DNA, 1336 bp, Homo sapiens
acttccgggaagttttcggcgacctggataccatcttcgacacggggacaaatcccgggatggagtccagggtttcccgcggcttcggcgcttcctgacctggcgtgactgccgacttgtcggcaccacccaggcctcaggctccctgtctgtagtggtgaatcgaccttcctcatggcagtccaggcttcccaagccccatgtcctgttgatccgggacaaactcttccttgaacgttcttcactacgagccgctgctgatctgtactgcctggaggagcatttccatagcgcccgcaaaaatacaataaagctcacccaaggaaataaccatggattctcacgcctgggtgccagtgtttggaatcgactgggcttttttatgttagtaggcaatttaaaacaattacttatttgaaatcagaagcgcaataggcataacttcaggtacgtgctccaccaccacgttttgtggatttttctttttaaacatcagttctgttctctacaactctccgccttcagggttatactttccaggaacaatagcttcccaattcggctttgtgcatccatttttcatacagcatcgttgtagtcttcaaatacaaatatgatcacggcaatctgctgaaaaatctttggtggctttcccttgctcttggacaatccctgattgtccaagttttcggcttcatctcgttcgcccaccatacactgaactataaactgtagtggctttttttcctcaggtcttcccacagactaagtaccaagatttttccaccctaccctcatccgtgctcattccgacacactttttgcctgtttgacacctcatttattgtcagatttcaagaatcgttttcttcggggaaccatttcttgactcccttactggatgaaacaagcctccctgttaaacagtgttggaggcgcagaaacatacccccaaataatggcgttttgacatctgaactgaagaagcctcaaggtcccactcccctaaatccccacgccatctctgccaaagcaaaggataaagtttagacacatcacaaggaacataattgtttttgttgcctccctgtaagaccaagaatgtagtaatcacacctgagcagaccctttcacaagatgttgtacaaattaatgtgttcctgatacattcattctcctttgtaatccctcaacagaattcctcttctccctatcataacctgtgtcgctgggattgtatccacaagcttctgaagccctctgaggggtgggtaatcacgctgtgattcttcctgtgtatacacgttaagtaaatttgtatgttttttctattaat

SEQ ID NO: 395220 - DNA, 1335 bp, Homo sapiens
acttccgggaagttttcggcgacctggataccatcttcgacacggggacaaatcccgggatggagtccagggtttcccgcggcttcggcgcttcctgacctggcgtgactgccgacttgtcggcaccacccaggcctcaggctccctgtctgtagtggtgaatcgaccttcctcatggcagtccaggcttcccaagccccatgtcctgttgatccgggacaaactcttccttgaacgttcttcactacgagccgctgctgatctgtactgcctggaggagcatttccatagcgcccgcaaaaatacaataaagctcacccaaggaaataaccatggattctcacgcctgggtgccagtgtttggaatcgactgggcttttttatgttagtaggcaatttaaaacaattacttatttgaaatcagaagcgcaataggcataacttcaggtacgtgctccaccaccacgttttgtggatttttctttttaaacatcagttctgttctctacaactctccgccttcagggttatactttccaggaacaatagcttcccaattcggctttgtgcatccatttttcatacagcatcgttgtagtcttcaaatacaaatatgatcacggcaatctgctgaaaaatctttggtggctttcccttgctcttggacaatccctgattgtccaagttttcggcttcatctcgttcgcccaccatacactgaactataaactgtagtggctttttttcctcaggtcttcccacagactaagtaccaagatttttccaccctaccctcatccgtgctcattccgacacactttttgcctgtttgacacctcatttattgtcagatttcaagaatcgttttcttcggggaaccatttcttgactcccttactggatgaaacaagcctccctgttaaacagtgttggaggcgcagaaacatacccccaaataatggcgttttgacatctgaactgaagaagcctcaaggtcccactcccctaaatccccacgccatctctgccaaagcaaaggataaagtttagacacatcacaaggaacataattgtttttgttgcctccctgtaagaccaagaatgtagtaatcacacctgagcagaccctttcacaagatgttgtacaaattaatgtgttcctgatacattcaatttcttgcggtatggcgacccctaacccttgttttaaaaacttccgtcccccttgggagagtttatttttttgatggttaagccctctgaggggtgggtaatcacgctgtgattcttcctgtgtatacacgttaagtaaatttgtatgttttttctattaat

SEQ ID NO: 395221 - DNA, 235 bp, Homo sapiens
tacataaaagtaataaaagtttgttgattacttatatatgagatgcaaaaggtagcaacagtattattaaataatatgggtactgttatgcatatactgagatctgttggcaaaggtagatcacttcaacagaagaccaatttacaaatgtgcctctgtttagaagatagatgttatataaataaaatactttatattagtattacagtagaggtattcattctcattgaccaaa

SEQ ID NO: 395222 - DNA, 430 bp, Homo sapiens
gtgattaagtcatgaggcccttgtgaatggactagtgccttataaaagggctggagggaactagcttaggcccttttctgctccttctctcctccaccgtgtgaagacacctagacagcatcctctatgaggaacagcccctaaacctgctggcactttgatcttgaatttcccagcctccagaactgtgagaaataaatctctattgtttatgaatcaccctgtctcaggtactttgttctagtagaccagctaagacaaaatatccaaagaatgttggtaagagaagagggagggggggtaagagagctaaattattacctaacacaccaaaagtccatagagaaggactaaagcatgaagtcacgtatgtgcatattatttggaaacagtatgtgccagtcaatgccagaagaaaggattaagagag

SEQ ID NO: 395223 - DNA, 387 bp, Homo sapiens
tgcagggattataggcgggagcccccacacctggcctagcatacaaatacttccaagcagctattacaaatatgttcacacaactcttagttggttcaggctgctatgacaaattaccatagactgggtggcttaaacaacagaaatttatttctcatagctatggaggctaggaagtctgagattttggtgccagcatgttcatgttctggtgagggccctcttctgattgcagactactatgttcttactgtatctcatatggcagaaacagacactctctgggatccctttcttcttattattattttttttgagatggactctcgctctgtcacccaggctggagtgcagtggcacgatctcggctgactgcaaactccgcct

SEQ ID NO: 395224 - DNA, 217 bp, Homo sapiens
ttctcacagtggagagcgggacattgtaaagagacattcagtgactcagtttttgagtggatgcttttgttttttgttcttagtttgcatctgcttgaatggggtagcattttaacatgggtctaatattaagcaaacaagtatttttaaaccaattctttgtaaagccatggttacatgagtaaatcacttagcttctataaatgtctattaagat

SEQ ID NO: 395225 - DNA, 453 bp, Homo sapiens
agtgagaatccatagctgagaaagactggccctgggtgaaggtttagtggctggagaggggcacagatgctgatgggcaaagatggaggtgtatctgtcatctcatctcttggcattccaccagggacacagacctatttctgaatggttccactcccatgggatctgggttgacctcctgggagaggatcaggcttggagcaatggccctgatgttaacctctcttgccattgggtccacactagtgcctcttccattcactcaactctccaagtatggggagtccatgtcactgtgcccaccgttagccacaacatcctccagtgcactcaggtggaccaaaactatcaggaagggtcagggcagtctcgctcagtgaaagggacagagactgagtggcagaaaaagaggtcagggctccacgaggcatcttctccaggtggggttgttgg

SEQ ID NO: 395226 - DNA, 407 bp, Homo sapiens
tggaaatgcaaataaaaaaggaggtcactattttatgaaaggatgattttattctacctgatgtagccagctgcaagcttcagaaggcagcacatacaataatgatgggctggtgagatgagagctaatggagagatgtacaaagtgccatgggatcaccaagcagtggtcaggtgaaggcatctgattttctttaagatcttgctcaaatgtcatctcctctagaagaaaatgtagggcttcatcagtcagacaacatggggaaattgatctcagttcaagaaacatgtacatgtattgattatctaatacattcaagcagttgtgcactggggatagaaaaatatcatcatcatcatcatcatcaacaacaacaatcttgctgtatgccaggcacataattttac

SEQ ID NO: 395227 - DNA, 427 bp, Homo sapiens
aataaccccttgggcaagaagaagagtctgatgtaaattctatttttctgccttattgttcctgttccaaatttagaactgatgaatgtagtttatgatgaagaaaacccattttgttgctgtgagctagggaattagtgtggaaagagttgtcagagacacaaaaagtggcccatattttaccttgacagtgctttttgaagggaaaagtgaatttagatactaaactgggataatacttcctttataaatacaaattatataagagtagcttaaacttttcattattaacagattattttttgtatatcttgtttagggtagtaaagattaacagtgggtcaaatattttggctagtgtcttgtcctgggatggctcacgagaactgttctactaaatataaggtgaccttgctttttgcttatg

SEQ ID NO: 395228 - DNA, 133 bp, Homo sapiens
cctagtcctggacattctgcccccgcttggacacctccatgacagcactctcggctggacagctctcaatgcccaaaagtttggtcaagtcttccccaactggtctcttctcaagctaataaacaaaaccacc

SEQ ID NO: 395229 - DNA, 422 bp, Homo sapiens
cgctcccctaattgattcaatgtaatctttatcaaatcgtagctagcttttttgcagaaactgagaagctcatcctaaaattcataaggaaatgccagggatccagaatagccaaactatcttgaaaaaaaaaaaatagaaccaagttagaagactcacacttcccattttcaaaacttaccacaaagctacagtaatcaagactatatggtgctggcataaaaacagacatatagatcaaggggatataattgagagtctagaaatgaactcatatatttatggtcaatagatttttttacaaaggagccaaggcaagtcaagggggaaagaacattgttttcaacaaatgatgctaggacaacgggatagtcgcacaaaaaaaaaccaaagttagatcccgacctcacatcacgtacaaa

SEQ ID NO: 395230 - DNA, 406 bp, Homo sapiens
ctacatgtatgctgccagtgataaaagcagtggattaaccattcaccttgctaatgttaagccatcagtatgttttacatcactttttaatatctctttcaagagtaccaagagtgaaaaattgtactttggatcagaatcagtaagaaaataattggcttaataattactgtataaatcaatcttttgtggttttagactgtgaccttgaaacaaaggttaaagattgtaccctaaatcagaccacagcgactgaaggttacttcttatgtaagtatctgattccagttcaggtttcagtctgcatggaggacaagctaagattccgtttttaaaaaataacttttttgcttatgacattggggaacatctgaggcttttatagaaagtaagtttttcattagtt

SEQ ID NO: 395231 - DNA, 276 bp, Homo sapiens
ggatttagctcccctggaatgatttatttcacatcaagccttcttaactctttggctgcagaggggaagtgcctgcatctttctctgcagagttgcctagggctggccaggtgaacagacacgctccctcctccccatcgtgccagccaggacacggtgtgtgcttatgatggagggagttagaatactagccttttcatcacaacagtcataaatcctcacatagggaaatacagataatatacaagtaggaaaaaaagaaaaagaagcagtctt

SEQ ID NO: 395232 - DNA, 485 bp, Homo sapiens
ataaaggacgatgttacacaatcttaaaaaatcagaaaataagagtttgtcatttaatatggttcttttaaagtgaacaatagttaacatgttttaaaatgaacccactcaagatagaaactcctggcttgtacaccaattgatattagcttacgctagcatgaaaaatttgtaggaggtgggcatggcagattaacaagctacgtatttaatattaaaactgatgtctcagaaaaaaacagtaaatcttttagacggatttataactattttctttttgtattaagctttccataaaaataaattttaactaatgaaccaacaggaaatgttttttaatcatttagtgaggtgattcatttgtttcatgggcaaacactatccaggaaaagccttgcttgcctgtttcccaaagagctctaagaaatagaatcaagtgtaaaatggttcagaccattcaggatttcttgtcactcttctcaacc

SEQ ID NO: 395233 - DNA, 180 bp, Homo sapiens
agcaaattagtcacagctggaaaaaaaagtattgaactagatgacagatctgaggaaattacctaccatgcaacaaagagatgaaaagattcaaaacatgaaagagaagtttagagacatagaagagagaacataaaggtccaagctacacataagtgggttctcagccaggcgcagtgg

SEQ ID NO: 395234 - DNA, 291 bp, Homo sapiens
ttagtttactgtagtctaaatatagtcttagtttaccatattctaagttaatagggattttagtgaatttgtaatgaacctgttttgacagctgaatttaatttgttttattacatgatggaagatgacaatagaactagttatttctagatcagatgggaacatatatatgggctctttcaggtgcattgaggcatcagaaatgtttatatgtggtgtcaactggttggctaataaattcagctcttacaattaaattggaaaacaggtttaaaaataataggcatttgg

SEQ ID NO: 395235 - DNA, 172 bp, Homo sapiens
actaaacaataaagagaaaaacagctgaaaaaagatgtacagaggcaatgttatttttaggacaatatcaaaatatctaaaaacgtgtaactggaattccagaaagagagaaggagggtagaaaaaacagaaacagatgtagaattagcaaacaataactttaagacagtcc

SEQ ID NO: 395236 - DNA, 475 bp, Homo sapiens
acagacagaaatcactgccccctgcacaaaacgctctctgtgttcaaacaaagcagctgtgtggccttccagcagagttctcgctcctcagctgagacctgaggcgggctgaggatgcagaacaaagacctggcatctggaggcccaactgggtgaaagggccctggcttttcaacaacccgacagttcccttttatcacagcatatccctcccagtcagcaactttctcctcacctttgggcctgagtgtgcacccaaagcctggagtttatccactagaatgaggactccaagaaccaagtctcctatctggggctgtggcccactcccttaggactcggcttccctgaaggccaggcccaagggacccctgctgcctgcctctcttctgccctccattgctcagtcctcatgtcagtgagaagggcaagccaggcccttctccttcccctccaaagcccaacctcttaggct

SEQ ID NO: 395237 - DNA, 244 bp, Homo sapiens
atagtactttatatgtcctctgtttaaaaacaaaaggaactacaaagtaatcttgaaatctactgtgaaaggaaaataaaaacgcaggacttcaattcactatgcaaaaggtagaaaagtaagctgaaagctgagtccctgaaagctgagtccctttgttcctaagcagggagctacaaataaaaggtcaaacacctctacaggctactttatgttccattttatcttatgtaaagtgccgact

SEQ ID NO: 395238 - DNA, 528 bp, Homo sapiens
tgcgcaatatataaacatatttagtattaaaattttaataataaaagtccaaagtgttctttggaactttaaccaaactaaaatctgttgttctagaatgctcagccggacacagtggctcactgcaacgtctgcctcccaggttcaagcaattctcctgcctcagcctcccaagtagctgggactatataggcgcatgccgacacgcctggctgatttcttgtatttcaatagagatggggtttaaccgtgttgcctaggctggtctcaaactcctgagctcagccaaggcaggtggatcacctgaggtcaggagttcgagaccaacctggcctacatggtgaaaccccgtctctactaaaaatacaaaaattagccaggcatgttggcatgtgcctgtaatcccaactacttgggagactcccgaagtgctgagattacaagcatgaactgtgcccggccatagatctgtttttattcactatggctgggttctcagtgcgcccttcctatctgaaaattcatatt

SEQ ID NO: 395239 - DNA, 824 bp, Homo sapiens
caacacaggctgcacctgagcatcttctgggggagcttttaaagaaatactaatgtttgttctcatccccagagattttcatttaattattcaaagcaaaatttcaaggaataatgtgagacaacagctttcaagaagggctcagcagaggtactcagagtggagagttggactgaaagagggttctcaggagctggcatcactaagtggaagtgggagtgaggatgatgggacagcagttcaccagcagccaaaggcctggactggggccctggtggagtaggcggatgggaggagccataccttcaggcatagcttggtcctagactggagataagagggctaatggaggagcccaaagtcggggagctcagaagatggtagtctgaggccagaccccagaggaaatgctcttgagaataatatgggagaggctagattctctggagattccagggaatcgacacagaggtcgtttgtaccttgtaaaattctacagaacaatgtgataccaggtgagtgttattaggtaagtcatttaagctcagtgaaaacaagtcctcaattctggaggtagtcaaagatatctcttgcatagatctgtgaggatcagatgctacttggcataaacctaagccaggctcaataaatatcagtttcctctccttccctaaaaacaacgtatcccttggcaactccacaaagctttgacttgtactaactgtatacaaatgtgaatcctctcacataatgataaaatatggttgaggatttgaaacagccaggtgtgtgaattgctatgggcaagaggggaagaaaatttg

SEQ ID NO: 395240 - DNA, 337 bp, Homo sapiens
agaagaaaaaactcacttgacactctaaaagcatttcttactaggtctgtacatcttgggtacagcctttggggacagagaaaggtgggggctgtgaggagagcccagggctctgatagggtggagtatgcagacagaggagctgtatttacactttcacttgctgcaggtatgccacagtgggctttttcccttatgaaaaataaagactgaacaacagaagtgctgttctctgtagctatctgtgatttaaaaggagtacaggagaagctaagtccttagaactctagatgcagctgctccttggagatcttcttagtcgagaaagacttctgaa

SEQ ID NO: 395241 - DNA, 738 bp, Homo sapiens
aaatctgaataaagtatggaacttatgtatccacatggtttccttaactgtgataaaggcaccacattattgtaagaagttaacaggagaatctgagtaaggagtttatgtgaactctctgtactatctgatgatttattctataaatctaaaactattctaaaacaaaaatttcatttaaaaaaggcaaatataactttctcactttatatctgactttttaaaagtaatatcatactgaaaataatatttacttttatcgaagtaatacatgtatgtaattaaaagatacgtgatctgcaagactcatagaacccctttttacttgatttcccccatgggcaaagatattaaggaattttccatttctctattcctttgaagactttccccattgtccctctgttctccttcaatctgaacacccagttatcaaggctgctgattgtctctcactctggaaatcttttttaatagcatccaggatgtctttctattgatgttctttgtagaatatgttttctcaatcctgcgtcctcttcttcagtggcttacttcattctttatttctaggacccaagtttcaatatatttctgcaaagaaatacatgggaggtaaatcttgagagactgtgtctgtgaaatgtctgttttatcctcatacttgtttgaaaatttggctgattgcaggattgttataaatagtttttttctcagaaatttgttatgacactgtta

SEQ ID NO: 395242 - DNA, 320 bp, Homo sapiens
ttcactagcaaatatgtgcattccaatgaaccttggtttaaaatgaccattaaataggaaagatacataccgacttttgagaataaagactgtgcatttatgtagaggagattaaagagaacacggaacaagcctggcataaaagaacttcagacaaattgataacaggtaatattagattttagaagccagtgtaggccgggtgtggtggctcatgcctgtaatcctagcactttgggaggccgacaagggcggatcacctgaggtcaggagtttgagaccagcctggccaacatggtgaaaccctgtctctatgaaaa

SEQ ID NO: 395243 - DNA, 480 bp, Homo sapiens
tggtggttccggtttttgcaggcttagagaaaactgtccatcaggattgtgctgtcttgattttatttgatcattcccacccttttccctttgctgtagccccttgacctgtctcctgggcagttctttcctttgctaaatgtgagtacaacaagtaggctttcctttcctcctagagagggggaccttggagcccctccactgggtcagagaaacttccatagctgcagcagatcagtaacaggagagccgagctttactctgaaagcctctattttcaataatgttgtgtttgctctttggataatcatttaaataaataaacctcagtataggtcatgttcttacctaggtttgcacttaaatagaaggaaaaacatctcaaaccattttgttagttttatagttctcgtaactacactttaagctgtggttttccacccacagggatgtcatctacattatatgctggactgttgc

SEQ ID NO: 395244 - DNA, 274 bp, Homo sapiens
tgtgctttgcttaaaaatgtttatttttatttaaataaatttccttttgttctgttcttagtagtcaccctgatgaattgatcagaaatatccaggccaaagcttcatagcatgtgaaagggttagcatctttaatgtacaaaaacattcttgcacgtcagcatggaaaaaagacattttgcttatttttctagccacatggccgattgtgttaatatagtccctctcccacccctagcaggcccctttttctgaaacacacatagaaacactg

SEQ ID NO: 395245 - DNA, 422 bp, Homo sapiens
cagggacccaggcccccatcttgctgctctgccatgcaacaccagcattcccaaggttgcttatgacccaagatggctgctgcagcaccagccatcacattgacgtttcaaccagtagtaatgaggaaagggtgatgcagagccagttacctcctgtaaggactcttaccaagcacatgtgcacaattccacacttatatcccattgtctggggcttcgttacatgaccactcccaactataaaggagtcttattccaagtggccctgtgccctgccaaaactcaggaattctattactatagaagaaatagaggatgggggataagtaaccatctgtgccacattggggagagtgaaggagataaggtctaataaggtatcaaaaggccaggcgcagtggctcacaactgtaatcccagca

SEQ ID NO: 395246 - DNA, 225 bp, Homo sapiens
agggaattctgcccgtagggacaaagtgtacatcctgggctaggtcatcttggtggtgagaaccccttgccagcgctccaggcccttcagtgtctcagtaggggagaggagggtcaggcagggtgggcaatgtgcggatgtaattaatgctgttttcttttttttttttctttcttgagacagagtctcgctctgtcgcccaggctggagtgcagtggcgcgatc

SEQ ID NO: 395247 - DNA, 250 bp, Homo sapiens
ggctcaatagagtggcaatggcaggctgagaatcagtgaacttgaagacagaaaattagaatctgcccaatgtgaaaaaaatagactggaaaaaaaaagtctcatagacctctggagtgatgataaaagagataacacttgtgttgttgcagtttcagaaggaaagaatagagtgggaccaaaaaaaaaaaatctgaagaaataatctgactataatttctcaaatttggtgaaagacagaaagctgtag

SEQ ID NO: 395248 - DNA, 252 bp, Homo sapiens
tgtgattctttactgaaaataaaacaaaacatcctactgtttgttcctgcaaggaacacaggtccagaattgggaagggtgttggaaatgggtcagaaggaggggagaagagttgagggaatgcattaaaataattttgacacttcattttacctacttttttctataatgaatgtatattttttggataactacaaagttatttcttaaaagttaggactctccaaatgagaaagatgcttgtagaatgcg

SEQ ID NO: 395249 - DNA, 364 bp, Homo sapiens
tgcctcagcctcctgagtagccgggattacaggcaggtgccaccgtgcccagctaatttttgtatttttagtagcgatgaggtttcaccatgttggccaggctggtcttgaactgctgacctcaggtgatccacccatctcggcctcccaaagtgctaggattacaggtgtaagccaccatgcctggcctgttttaatttttttagtacacctctgctgaaaggaagcatccttatttgtaacacaccactcattaggctgtgttacaacttattttgtgttatgattagttctatgctgttactagattttgagttacacaaggtcagggactttgtcttattcatgtttgtatcatcagtgc

SEQ ID NO: 395250 - DNA, 178 bp, Homo sapiens
cataaatccagattgctgcagtttcacactggagcatgtgccagaagatacacgcaggctcttggtgtcttgtgctatcacacattagcaccttgtccatctcccctcacaacgcatttcaaggacaagttcccttctctgctatggccggagcagtcgtgaattgtttgggtcagaa

SEQ ID NO: 395251 - DNA, 189 bp, Homo sapiens
taccaaattttatccattcattagttgatggacatttgggttgttcccactttttggctattgtgaatatcaagatatagtgcacttctgccttcaaatcttgagaatgcctggtactgtcaagctgccaatttatagcatgtgaaataactatatcattgtggttttaatttgcactttttttttttt

SEQ ID NO: 395252 - DNA, 492 bp, Homo sapiens
  misc_feature (335)..(335): n is a, c, g, or t
tacgccatggctgactctagaggatacacttcctctcctcccactctctctttcggaccttctctagtcaggctttttccgccttcaacttcatgcagccaaaactactctcgatgaggtccccccaggacagtagtcaatcttcaggccacatcctgattgactgccagttatgtctgacacagccctgtccctcccttctccatgagacactcttcccaatttccaagaccccacattctcccggttctcctccagccatgcgtccccatcagcccacacgctaaacactggagtgcccagggctcagcctgccctcctctcctccccacctnggcctcccagagcactgggattacagacatgagccaccgcacccggtcaggtaaaattcttaagaggaaaagtaggagaagattggcgtgtttccatcagaaagcctgggtgagtgcccaggaatgggtgaaggtggggaggagaggagtgcagtgc

SEQ ID NO: 395253 - DNA, 540 bp, Homo sapiens
catggtggcatgcgcctgtggtcccagctactctggaggccgaggtaggaggatcacctgagcctgggaggtcaaggctgcagtgagctgtgtttgcaccaccatactccagcttgggtaataaagcaagaccctgtcaacaaaaaaaagttagattttttgtttgtttgtttgaaaagtgttaacctaggcacaatctacaaactggccaatttttgacttttgtaactgttgtatatacatctataaatatattctaagtagttttcttatacagaacagcatagaaaaaacacattaaaagtcctcagaattatgagtaatttgtataaaaatttgtaatgacatttcaaggtaattgtttctattggaattgtaataacatctgattgcagcttccttgaagattactaaatatatgcagtgctatgatcctttgctgggtaagcattgcagtttcgttgctgcttagctagtatgaaatgttggattgtaaaatgtcaatcgtgtaatatatttgcttataaatagttacactct

SEQ ID NO: 395254 - DNA, 168 bp, Homo sapiens
cacaaattcagtttgcgcttaatcattcaggcaggtatgtattctgtggctcaccagaatggaactaaaatgtgagtatgatagtcacatacatgcttttgtcttggggtagatggaaggtgctcaaatagtttcgactgttctctgtcattctgggtatacggagag

SEQ ID NO: 395255 - DNA, 407 bp, Homo sapiens
aagaaaagcatagtccttctgaaagctccaacatccctcttggacctcagtgggggcctgtgtgctgaggatgggggagcaagaagtcagaaggagcctgggtccctgacacatgaaccgtcattccagccctgggctccacaccaacagacttctttacaggaggaagaaattaactttgatctggggatgtttgtttcatgcatctgaatcatatccctccagctctaggcacttctccaggtttctaccccctccatttcatctgagagcagtttgccttagcttttcatttagtaaaggtgaaagatcattgtgattttgatggttgtctcaatgactggtattggacatggcagaaaacccaggtggctaatacgctgagagctgctcacacccactgggaa

SEQ ID NO: 395256 - DNA, 484 bp, Homo sapiens
caagcagttaatacagactcagcaggacaaatttctctaggtttcagggcctgagaataatcctctgtggcttgatcctctgccctctgggcccatggaggctctgtctgcagctggtgtgggcctgtttctcccctacccccaacccccactatgctgctcgccttcagtcatttttacttttccctgaagggttgcacatgtttgtagttgagtaactgtattagcccatttcttgcctataaaatcccagaagtaagacactttaaaaaattttgtcccatctctgttcctttcagtacaggctgacagcatttttgttggtatgatattctttaaaaccttgtcagtctccttacatatcaagggggtccatatcattagacgagaggattcttcacagttccttactgataaccccatctccattcctcgtttctgttgagatgattgatgggatccatgagtctgtattaactgctag

SEQ ID NO: 395257 - DNA, 382 bp, Homo sapiens
cccaacccagtcccacagatctatgggactatctctctttttctctttccttgctcctcttcccctttcttcttaggattgatggactgacagcagtttggcaaggcttccctaagcctgtaatagggagctgtggacccagccctgacttctcaagtagggggaaacagctctattcccgggcccttgagattgagtctcaagttgacaggagttgagaaagaaatgcatgaaggatggctgggcttacgcaggacaaaaacctctactggggaggggccagttttgtgccttgtgcctactgctgagagggaatttagaaacaaaggaagataagaagaaggcctagggaaacagcataaaggactggaaaaattcagaa

SEQ ID NO: 395258 - DNA, 443 bp, Homo sapiens
acttttgttatcaaataaaaacaaacacatttttaggtaaagagagactttattcacaaggatcattgcaacaagaggaaggagagtattgcaatagagaaaaccatccaaccacaagagctacaagcatctcaaagaccagagagaaaaagatttccttttatggtgaaggatcaacaaagctagaaagatatcagtatggggacaggaagatcaccatgaaatgttttacccaaggtcagctgattcttaggagggttgtatgctgggtcagaagaaggatagatcaaaactcacgagcatggaagaggaagagaaatttaactgatattcggtcaagttaataatcactttgtttctactgtccagtgaggataaacagttcagctaatcttttatgaagctgagaatgagaatttaaagagtctgtgtctggcctatca

SEQ ID NO: 395259 - DNA, 399 bp, Homo sapiens
ctattcgtacactccctcaccttttgaaaatcactaataaaaacttgttggttttgcggcttggggggcatcacggaacctgccgacgtgtgatgtctcccctggacatccagctttaaaatttctctcttttgtactctttccctttatttctcagactggctgacactcagggaaaatagaaaagaacctacatgaaatatcaggggtgaatttcccccgatatcacactggctcttctctcacctgtctacctgcttaacttaataggagaggcaatgcatggtgctcatgaacaaggcaagcattaaagtcagaccagactaacatttgactcagtcctaatattcaggtgagcttgggcaaatcgctcattaaccccaagtcttcatcattttg

SEQ ID NO: 395260 - DNA, 370 bp, Homo sapiens
attatagtgtaggtttacgtcctttataaggtcccacaatcagctgataaacatctgaatcaaatttactacgaggtggtttctgactgccctatttctagctagtttattttttacccagtcaacagttttcaagctcatataatgtgccaggaattggggaattgaggccagagatggaagataaagtcactctcctgacagagctctggttggggaaacaatcaggggaatgccaacatgatggaacaggtgctgtgacagaggcaagggcaggacacggacagcctggccaggaaaggctgccgcagacagcatgggaggtctccagagtcctcatttccaaaggagacagaagatcaagggtctg

SEQ ID NO: 395261 - DNA, 466 bp, Homo sapiens
cagcggaacaagcaaggcatccatcctttattgtattaaaactgctcactcaattccttgttcattagttccacaacagccacccatataacagacatggagcagtttccaccggatgaacttagacaagtcatcagctgctaacgaggcaccagggaagtcccagtcatatctacatttgccttcagataacctttacgggtttggaaattgccatgatgaaaatagcagagtcgtactgaggttgggagtttgacctgtctattcaggtgaaaaccacaatgtcaagaaggaaatgttggcagctatgtgaaagcaccaaaaaccaatgagttgcgcgtcttcaatggatgaagtatacagtatgtcaattttatctctataaagctgctaccaaaaaaagaaggaagtgtttttaaggcaaagatctggtgacacagaggctatgcagtagctaagagacttt

SEQ ID NO: 395262 - DNA, 581 bp, Homo sapiens
  misc_feature (581)..(581): n is a, c, g, or t
cttggttacctatgtacctgttaccactttcaaaaatctacagacagtcagtgtggatgagaactaatcgctgatcgtcaaatacatcaaataaagttacaaaattgcaaaaaaaaaaaaaaaaacaaaaaaaaaaacacgtgtgtgggcgccgcgcccgcgggccccgcacgaaaaagttttaaaaaacattcgcgttgggggccgcccgggcccccacgagggggaacagggaaccaggggctcccacagcggtctctccacggggagaaaaccggggccctccgcaacaggggtggttgcggacaatctcccaccacaaccaaaaaaagagcgcccggggggaaaacgggagattcgttcggaaacacaactctcagagagggacagcttccgaggcggaccacctaggcggcatccatgcaacgaggggaagtctcaccagggagtccgtgcataaacaaaaattaatcgcccccacggggaagacacacaaccgacacagcaccatgatcacacaaagtagcacatcacagagagcgacagagtgaaaatagatgcacgcgagcggaacagcaaan

SEQ ID NO: 395263 - DNA, 183 bp, Homo sapiens
cacaccacctgagtctatctttgaactagccaagttcaaagttaaaagtagggcaacttgggttctggagaaatgaggtcaatggatgaggcaggttataggaaaaatttgggagctcctgagagaatggattcagggagcaaggcaggttacaggggtggtttaaggggttctggggaaatg

SEQ ID NO: 395264 - DNA, 204 bp, Homo sapiens
gggagtggacacgtgcccaggctggttcagtgagccccttccctgggcgggggactgggaagcggagagagctagaccagtgtggaactatggtagcacgatgtgtacttgggggctggtctgcagagaaaatgggagacagcctccgtggaaatgaggcagaaataggctgcagagggtgccagccagggacgggggaaggcg

SEQ ID NO: 395265 - DNA, 819 bp, Homo sapiens
caacaccacgcctggctaatttttgtatttttagtagagaggggtttcatcatgttgggcaggctggtctcgaactcctgacctcaggagatccacccacctcacctcccaaagtgctgggattagaggtgtgagccactgcgccatgtgacttggtatttttttctgaaaggactcatttttctggtgcatgaccatgacacttcacctctctctgggggttgccactcatgttgttttctacatgaatggggcctcctggcatcgtgccatgaggcagtctaacatctaggttgtgtagtttgaaagagacacaccagatcttgcccccaggctacatcttaatattagaaatagttttagatttttaactaactgactttgactccgcctgccttctcgtttttctaaatgtgtttgtatactttctggcaccccctccttatctgcctcgtgtgggcagaggtaagagaggcttagtgtggggatattcgttatgatattgtatccagtgcctctccggcccagggaatacaaggatctggaatgcatgggccttgccttgatggtcccgagcctggtcgaagagtcaggagatagatatggaagggtgaatcactcccttggaaggcagagcaggccaggtgcccaaagggaggcaggcagacagcgtctgagttcagggaggaagcggatgggaaatctctggtgggaggtagaatctgatccatcctccaaaggatgggcaggatttaagtcaatacaggcaacggggaggagaatattccctgtgacctaaggtaagggtagaacaaggca

SEQ ID NO: 395266 - DNA, 516 bp, Homo sapiens
ccttagaggatctccgaatcatcatctgctaatcatcatcctgctgcgcgtattcatcatcctgcttcctccctgactttgactccgcctgccttctcgtttttctaaatgtgtttgtatactttctggcaccccctccttatctgcctcgtgtgggcagaggtaagagaggcttagtgtggggatattcgttatgatattgtatccagtgcctctccggcccagggaatacaaggatctggaatgcatgggccttgccttgatggtcccgagcctggtcgaagagtcaggagatagatatggaagggtgaatcactcccttggaaggcagagcaggccaggtgcccaaagggaggcaggcagacagcgtctgagttcagggaggaagcggatgggaaatctctggtgggaggtagaatctgatccatcctccaaaggatgggcaggatttaagtcaatacaggcaacggggaggagaatattccctgtgacctaaggtaagggtagaacaaggca

SEQ ID NO: 395267 - DNA, 256 bp, Homo sapiens
ttacttatctttccagacttttttgtgcttgtacaaatagttttcttattcttttaaacaaaagcagtatcgtattttacaggttacagaattctcttcgttttactgtgtcttgcggatgtgtcccttggacctgtctatatacataagtcgtgctttccttcaagttctcctcttcgttagcttaggagagccaagaaataaagactttcttacaaatgactgtttgagtttggctgatgtgtcctacagaaac

SEQ ID NO: 395268 - DNA, 4715 bp, Homo sapiens
  misc_feature (2972)..(2972): n is a, c, g, or t
tggcttccttgtggttcctcagtggtgcctgcaacccctggttcacctccttccaggttctggctccttccagccatggctctcagagtccttctgttaacagccttgaccttatgtcatgggttcaacttggacactgaaaacgcaatgaccttccaagagaacgcaaggggcttcgggcagagcgtggtccagcttcagggatccagggtggtggttggagccccccaggagatagtggctgccaaccaaaggggcagcctctaccagtgcgactacagcacaggctcatgcgagcccatccgcctgcaggtccccgtggaggccgtgaacatgtccctgggcctgtccctggcagccaccaccagcccccctcagctgctggcctgtggtcccaccgtgcaccagacttgcagtgagaacacgtatgtgaaagggctctgcttcctgtttggatccaacctacggcagcagccccagaagttcccagaggccctccgagggtgtcctcaagaggatagtgacattgccttcttgattgatggctctggtagcatcatcccacatgactttcggcggatgaaggagtttgtctcaactgtgatggagcaattaaaaaagtccaaaaccttgttctctttgatgcagtactctgaagaattccggattcactttaccttcaaagagttccagaacaaccctaacccaagatcactggtgaagccaataacgcagctgcttgggcggacacacacggccacgggcatccgcaaagtggtacgagagctgtttaacatcaccaacggagcccgaaagaatgcctttaagatcctagttgtcatcacggatggagaaaagtttggcgatcccttgggatatgaggatgtcatccctgaggcagacagagagggagtcattcgctacgtcattggggtgggagatgccttccgcagtgagaaatcccgccaagagcttaataccatcgcatccaagccgcctcgtgatcacgtgttccaggtgaataactttgaggctctgaagaccattcagaaccagcttcgggagaagatctttgcgatcgagggtactcagacaggaagtagcagctcctttgagcatgagatgtctcaggaaggcttcagcgctgccatcacctctaatggccccttgctgagcactgtggggagctatgactgggctggtggagtctttctatatacatcaaaggagaaaagcaccttcatcaacatgaccagagtggattcagacatgaatgatgcttacttgggttatgctgccgccatcatcttacggaaccgggtgcaaagcctggttctgggggcacctcgatatcagcacatcggcctggtagcgatgttcaggcagaacactggcatgtgggagtccaacgctaatgtcaagggcacccagatcggcgcctacttcggggcctccctctgctccgtggacgtggacagcaacggcagcaccgacctggtcctcatcggggccccccattactacgagcagacccgagggggccaggtgtccgtgtgccccttgcccagggggcagagggctcggtggcagtgtgatgctgttctctacggggagcagggccaaccctggggccgctttggggcagccctaacagtgctgggggacgtaaatggggacaagctgacggacgtggccattggggccccaggagaggaggacaaccggggtgctgtttacctgtttcacggaacctcaggatctggcatcagcccctcccatagccagcggatagcaggctccaagctctctcccaggctccagtattttggtcagtcactgagtgggggccaggacctcacaatggatggactggtagacctgactgtaggagcccaggggcacgtgctgctgctcaggtcccagccagtactgagagtcaaggcaatcatggagttcaatcccagggaagtggcaaggaatgtatttgagtgtaatgatcaggtggtgaaaggcaaggaagccggagaggtcagagtctgcctccatgtccagaagagcacacgggatcggctaagagaaggacagatccagagtgttgtgacttatgacctggctctggactccggccgcccacattcccgcgccgtcttcaatgagacaaagaacagcacacgcagacagacacaggtcttggggctgacccagacttgtgagaccctgaaactacagttgccgaattgcatcgaggacccagtgagccccattgtgctgcgcctgaacttctctctggtgggaacgccattgtctgctttcgggaacctccggccagtgctggcggaggatgctcagagactcttcacagccttgtttccctttgagaagaattgtggcaatgacaacatctgccaggatgacctcagcatcaccttcagtttcatgagcctggactgcctcgtggtgggtgggccccgggagttcaacgtgacagtgactgtgagaaatgatggtgaggactcctacaggacacaggtcaccttcttcttcccgcttgacctgtcctaccggaaggtgtccacactccagaaccagcgctcacagcgatcctggcgcctggcctgtgagtctgcctcctccaccgaagtgtctggggccttgaagagcaccagctgcagcataaaccaccccatcttcccggaaaactcagaggtcacctttaatatcacgtttgatgtagactctaaggcttcccttggaaacaaactgctcctcaaggccaatgtgaccagtgagaacaacatgcccagaaccaacaaaaccgaattccaactggagctgccggtgaaatatgctgtctacatggtggtcaccagccatggggtctccactaaatatctcaacttcacggcctcagagaataccagtcgggtcatgcagcatcaatatcaggtcagcaacctggggcagaggagccnccccatcagcctggtgttcttggtgcccgtccggctgaaccagactgtcatatgggaccgcccccaggtcaccttctccgagaacctctcgagtacgtgccacaccaaggagcgcttgccctctcactccgactttctggctgagcttcggaaggcccccgtggtgaactgctccatcgctgtctgccagagaatccagtgtgacatcccgttctttggcatccaggaagaattcaatgctaccctcaaaggcaacctctcgtttgactggtacatcaagacctcgcataaccacctcctgatcgtgagcacagctgagatcttgtttaacgattccgtgttcaccctgctgccgggacagggggcgtttgtgaggtcccagacggagaccaaagtggagccgttcgaggtccccaaccccctgccgctcatcgtgggcagctctgtcgggggactgctgctcctggccctcatcaccgccgcgctgtacaagctcggcttcttcaagcggcaatacaaggacatgatgagtgaagggggtcccccgggggccgaaccccagtagcggctccttcccgacagagctgcctctcggtggccagcaggactctgcccagaccacacgtagcccccaggctgctggacacgtcggacagcgaagtatccccgacaggacgggcttgggcttccatttgtgtgtgtgcaagtgtgtatgtgcgtgtgtgcgagtgtgtgcaagtgtctgtgtgcaagtgtgtgcacgtgtgcgtgtgcgtgcatgtgcactcgcacgcccatgtgtgagtgtgtgcaagtatgtgagtgtgtccagtgtgtgtgcgtgtgtccatgtgtgtgcagtgtgtgcatgtgtgcgagtgtgtgcatgtgtgtgctcaggggctgtggctcacgtgtgtgactcagagtgtctctggcgtgtgggtaggtgacggcagcgtagcctctccggcagaagggaactgcctgggctcccttgtgcgtgggtgaagccgctgctgggttttcctccgggagaggggacggtcaatcctgtgggtgaagacagagggaaacacagcagcttctctccactgaaagaagtgggacttcccgtcgcctgcgagcctgcggcctgctggagcctgcgcagcttggatggagactccatgagaagccgtgggtggaaccaggagcctcctccacaccagcgctgatgcccaataaagatgcccactgaggaatgatgaagcttcctttctggattcatttattatttcaatgtgactttaattttttggatggataagcctgtctatggtacaaaaatcacaaggcattcaagtgtacagtgaaaagtctccctttccagatattcaagtcacctccttaaaggtagtcaagattgtgttttgaggtttccttcagacagattccaggcgatgtgcaagtgtatgcacgtgtgcacacacaccacacatacacacacacaagcttttttacacaaatggtagcatactttatattggtctgtatcttgctttttttcaccaatatttctcagacatcggttcatattaagacataaattactttttcattcttttataccgctgcatagtattccattgtgtgagtgtaccataatgtatttaaccagtcttcttttgatatactattttcattctcttgttattgcatcaatgctgagttaataaatcaaatatatgtcatttttgcaaa

SEQ ID NO: 395269 - DNA, 4221 bp, Homo sapiens
  misc_feature (2972)..(2972): n is a, c, g, or t
tggcttccttgtggttcctcagtggtgcctgcaacccctggttcacctccttccaggttctggctccttccagccatggctctcagagtccttctgttaacagccttgaccttatgtcatgggttcaacttggacactgaaaacgcaatgaccttccaagagaacgcaaggggcttcgggcagagcgtggtccagcttcagggatccagggtggtggttggagccccccaggagatagtggctgccaaccaaaggggcagcctctaccagtgcgactacagcacaggctcatgcgagcccatccgcctgcaggtccccgtggaggccgtgaacatgtccctgggcctgtccctggcagccaccaccagcccccctcagctgctggcctgtggtcccaccgtgcaccagacttgcagtgagaacacgtatgtgaaagggctctgcttcctgtttggatccaacctacggcagcagccccagaagttcccagaggccctccgagggtgtcctcaagaggatagtgacattgccttcttgattgatggctctggtagcatcatcccacatgactttcggcggatgaaggagtttgtctcaactgtgatggagcaattaaaaaagtccaaaaccttgttctctttgatgcagtactctgaagaattccggattcactttaccttcaaagagttccagaacaaccctaacccaagatcactggtgaagccaataacgcagctgcttgggcggacacacacggccacgggcatccgcaaagtggtacgagagctgtttaacatcaccaacggagcccgaaagaatgcctttaagatcctagttgtcatcacggatggagaaaagtttggcgatcccttgggatatgaggatgtcatccctgaggcagacagagagggagtcattcgctacgtcattggggtgggagatgccttccgcagtgagaaatcccgccaagagcttaataccatcgcatccaagccgcctcgtgatcacgtgttccaggtgaataactttgaggctctgaagaccattcagaaccagcttcgggagaagatctttgcgatcgagggtactcagacaggaagtagcagctcctttgagcatgagatgtctcaggaaggcttcagcgctgccatcacctctaatggccccttgctgagcactgtggggagctatgactgggctggtggagtctttctatatacatcaaaggagaaaagcaccttcatcaacatgaccagagtggattcagacatgaatgatgcttacttgggttatgctgccgccatcatcttacggaaccgggtgcaaagcctggttctgggggcacctcgatatcagcacatcggcctggtagcgatgttcaggcagaacactggcatgtgggagtccaacgctaatgtcaagggcacccagatcggcgcctacttcggggcctccctctgctccgtggacgtggacagcaacggcagcaccgacctggtcctcatcggggccccccattactacgagcagacccgagggggccaggtgtccgtgtgccccttgcccagggggcagagggctcggtggcagtgtgatgctgttctctacggggagcagggccaaccctggggccgctttggggcagccctaacagtgctgggggacgtaaatggggacaagctgacggacgtggccattggggccccaggagaggaggacaaccggggtgctgtttacctgtttcacggaacctcaggatctggcatcagcccctcccatagccagcggatagcaggctccaagctctctcccaggctccagtattttggtcagtcactgagtgggggccaggacctcacaatggatggactggtagacctgactgtaggagcccaggggcacgtgctgctgctcaggtcccagccagtactgagagtcaaggcaatcatggagttcaatcccagggaagtggcaaggaatgtatttgagtgtaatgatcaggtggtgaaaggcaaggaagccggagaggtcagagtctgcctccatgtccagaagagcacacgggatcggctaagagaaggacagatccagagtgttgtgacttatgacctggctctggactccggccgcccacattcccgcgccgtcttcaatgagacaaagaacagcacacgcagacagacacaggtcttggggctgacccagacttgtgagaccctgaaactacagttgccgaattgcatcgaggacccagtgagccccattgtgctgcgcctgaacttctctctggtgggaacgccattgtctgctttcgggaacctccggccagtgctggcggaggatgctcagagactcttcacagccttgtttccctttgagaagaattgtggcaatgacaacatctgccaggatgacctcagcatcaccttcagtttcatgagcctggactgcctcgtggtgggtgggccccgggagttcaacgtgacagtgactgtgagaaatgatggtgaggactcctacaggacacaggtcaccttcttcttcccgcttgacctgtcctaccggaaggtgtccacactccagaaccagcgctcacagcgatcctggcgcctggcctgtgagtctgcctcctccaccgaagtgtctggggccttgaagagcaccagctgcagcataaaccaccccatcttcccggaaaactcagaggtcacctttaatatcacgtttgatgtagactctaaggcttcccttggaaacaaactgctcctcaaggccaatgtgaccagtgagaacaacatgcccagaaccaacaaaaccgaattccaactggagctgccggtgaaatatgctgtctacatggtggtcaccagccatggggtctccactaaatatctcaacttcacggcctcagagaataccagtcgggtcatgcagcatcaatatcaggtcagcaacctggggcagaggagccnccccatcagcctggtgttcttggtgcccgtccggctgaaccagactgtcatatgggaccgcccccaggtcaccttctccgagaacctctcgagtacgtgccacaccaaggagcgcttgccctctcactccgactttctggctgagcttcggaaggcccccgtggtgaactgctccatcgctgtctgccagagaatccagtgtgacatcccgttctttggcatccaggaagaattcaatgctaccctcaaaggcaacctctcgtttgactggtacatcaagacctcgcataaccacctcctgatcgtgagcacagctgagatcttgtttaacgattccgtgttcaccctgctgccgggacagggggcgtttgtgaggtcccagacggagaccaaagtggagccgttcgaggtccccaaccccctgccgctcatcgtgggcagctctgtcgggggactgctgctcctggccctcatcaccgccgcgctgtacaagctcggcttcttcaagcggcaatacaaggacatgatgagtgaagggggtcccccgggggccgaaccccagtagcggctccttcccgacagagctgcctctcggtggccagcaggactctgcccagaccacacgtagcccccaggctgctggacacgtcggacagcgaagtatccccgacaggacgggcttgggcttccatttgtgtgtgtgcaagtgtgtatgtgcgtgtgtgcgagtgtgtgcaagtgtctgtgtgcaagtgtgtgcacgtgtgcgtgtgcgtgcatgtgcactcgcacgcccatgtgtgagtgtgtgcaagtatgtgagtgtgtccagtgtgtgtgcgtgtgtccatgtgtgtgcagtgtgtgcatgtgtgcgagtgtgtgcatgtgtgtgctcaggggctgtggctcacgtgtgtgactcagagtgtctctggcgtgtgggtaggtgacggcagcgtagcctctccggcagaagggaactgcctgggctcccttgtgcgtgggtgaagccgctgctgggttttcctccgggagaggggacggtcaatcctgtgggtgaagacagagggaaacacagcagcttctctccactgaaagaagtgggacttcccgtcgcctgcgagcctgcggcctgctggagcctgcgcagcttggatggagactccatgagaagccgtgggtggaaccaggagcctcctccacaccagcgctgatgcccaataaagatgcccactgaggaatgatg

SEQ ID NO: 395270 - DNA, 4737 bp, Homo sapiens
  misc_feature (492)..(492): n is a, c, g, or t
  misc_feature (497)..(497): n is a, c, g, or t
  misc_feature (586)..(586): n is a, c, g, or t
  misc_feature (610)..(610): n is a, c, g, or t
  misc_feature (637)..(637): n is a, c, g, or t
  misc_feature (2994)..(2994): n is a, c, g, or t
gcagacagcgatggagcagttcaccacgggggccttccgaagctcagccagaaagtcggagtgagagggcaagcgctccttggtgtggcacgtactcgagaggttctcggagaaggtgacctgggggcggtcccatatgacagtctggttcagccggacgggcaccaagaacaccaggctgatggggaggctcctctgccccaggttgctgacctgatattgatgctgcatgacccgactggtattctctgaggccgtgaagttgagatatttagtggagaccccatggctggtgaccaccatgtagacagcatatttcaccggcagctccagttggaattcggttttgttggttctgggcatgttgttctcactggtcacattggccttgaggagcagtttgtttccaagggaagccttagagtctacatcaaacgtgatattaaaggtgacctctgagttttccgggaagatggggtggtttatgctgcngctgntgctcttcaaggccccagacacttcggtggaggaggcagactcacaggccaggcgccaggatcgctgtgagcgctggttctggagtgtngacaccttccggtaggacaggtcnagcgggaagaagaaggtgacctgtgtnctgtaggagtcctcaccatcatttctcacagtcactgtcacgttgaactcccggggcccacccaccacgaggcagtccaggctcatgaaactgaaggtgatgctgaggtcatcctggcagatgttgtcattgccacaattcttctcaaagggaaacaaggctgtgaagagtctctgagcatcctccgccagcactggccggaggttcccgaaagcagacaatggcgttcccaccagagaaaagtttggcgatcccttgggatatgaggatgtcatccctgaggcagacagagagggagtcattcgctacgtcattggggtgggagatgccttccgcagtgagaaatcccgccaagagcttaataccatcgcatccaagccgcctcgtgatcacgtgttccaggtgaataactttgaggctctgaagaccattcagaaccagcttcgggagaagatctttgcgatcgagggtactcagacaggaagtagcagctcctttgagcatgagatgtctcaggaaggcttcagcgctgccatcacctctaatggccccttgctgagcactgtggggagctatgactgggctggtggagtctttctatatacatcaaaggagaaaagcaccttcatcaacatgaccagagtggattcagacatgaatgatgcttacttgggttatgctgccgccatcatcttacggaaccgggtgcaaagcctggttctgggggcacctcgatatcagcacatcggcctggtagcgatgttcaggcagaacactggcatgtgggagtccaacgctaatgtcaagggcacccagatcggcgcctacttcggggcctccctctgctccgtggacgtggacagcaacggcagcaccgacctggtcctcatcggggccccccattactacgagcagacccgagggggccaggtgtccgtgtgccccttgcccagggggcagagggctcggtggcagtgtgatgctgttctctacggggagcagggccaaccctggggccgctttggggcagccctaacagtgctgggggacgtaaatggggacaagctgacggacgtggccattggggccccaggagaggaggacaaccggggtgctgtttacctgtttcacggaacctcaggatctggcatcagcccctcccatagccagcggatagcaggctccaagctctctcccaggctccagtattttggtcagtcactgagtgggggccaggacctcacaatggatggactggtagacctgactgtaggagcccaggggcacgtgctgctgctcaggtcccagccagtactgagagtcaaggcaatcatggagttcaatcccagggaagtggcaaggaatgtatttgagtgtaatgatcaggtggtgaaaggcaaggaagccggagaggtcagagtctgcctccatgtccagaagagcacacgggatcggctaagagaaggacagatccagagtgttgtgacttatgacctggctctggactccggccgcccacattcccgcgccgtcttcaatgagacaaagaacagcacacgcagacagacacaggtcttggggctgacccagacttgtgagaccctgaaactacagttgccgaattgcatcgaggacccagtgagccccattgtgctgcgcctgaacttctctctggtgggaacgccattgtctgctttcgggaacctccggccagtgctggcggaggatgctcagagactcttcacagccttgtttccctttgagaagaattgtggcaatgacaacatctgccaggatgacctcagcatcaccttcagtttcatgagcctggactgcctcgtggtgggtgggccccgggagttcaacgtgacagtgactgtgagaaatgatggtgaggactcctacaggacacaggtcaccttcttcttcccgcttgacctgtcctaccggaaggtgtccacactccagaaccagcgctcacagcgatcctggcgcctggcctgtgagtctgcctcctccaccgaagtgtctggggccttgaagagcaccagctgcagcataaaccaccccatcttcccggaaaactcagaggtcacctttaatatcacgtttgatgtagactctaaggcttcccttggaaacaaactgctcctcaaggccaatgtgaccagtgagaacaacatgcccagaaccaacaaaaccgaattccaactggagctgccggtgaaatatgctgtctacatggtggtcaccagccatggggtctccactaaatatctcaacttcacggcctcagagaataccagtcgggtcatgcagcatcaatatcaggtcagcaacctggggcagaggagccnccccatcagcctggtgttcttggtgcccgtccggctgaaccagactgtcatatgggaccgcccccaggtcaccttctccgagaacctctcgagtacgtgccacaccaaggagcgcttgccctctcactccgactttctggctgagcttcggaaggcccccgtggtgaactgctccatcgctgtctgccagagaatccagtgtgacatcccgttctttggcatccaggaagaattcaatgctaccctcaaaggcaacctctcgtttgactggtacatcaagacctcgcataaccacctcctgatcgtgagcacagctgagatcttgtttaacgattccgtgttcaccctgctgccgggacagggggcgtttgtgaggtcccagacggagaccaaagtggagccgttcgaggtccccaaccccctgccgctcatcgtgggcagctctgtcgggggactgctgctcctggccctcatcaccgccgcgctgtacaagctcggcttcttcaagcggcaatacaaggacatgatgagtgaagggggtcccccgggggccgaaccccagtagcggctccttcccgacagagctgcctctcggtggccagcaggactctgcccagaccacacgtagcccccaggctgctggacacgtcggacagcgaagtatccccgacaggacgggcttgggcttccatttgtgtgtgtgcaagtgtgtatgtgcgtgtgtgcgagtgtgtgcaagtgtctgtgtgcaagtgtgtgcacgtgtgcgtgtgcgtgcatgtgcactcgcacgcccatgtgtgagtgtgtgcaagtatgtgagtgtgtccagtgtgtgtgcgtgtgtccatgtgtgtgcagtgtgtgcatgtgtgcgagtgtgtgcatgtgtgtgctcaggggctgtggctcacgtgtgtgactcagagtgtctctggcgtgtgggtaggtgacggcagcgtagcctctccggcagaagggaactgcctgggctcccttgtgcgtgggtgaagccgctgctgggttttcctccgggagaggggacggtcaatcctgtgggtgaagacagagggaaacacagcagcttctctccactgaaagaagtgggacttcccgtcgcctgcgagcctgcggcctgctggagcctgcgcagcttggatggagactccatgagaagccgtgggtggaaccaggagcctcctccacaccagcgctgatgcccaataaagatgcccactgaggaatgatgaagcttcctttctggattcatttattatttcaatgtgactttaattttttggatggataagcctgtctatggtacaaaaatcacaaggcattcaagtgtacagtgaaaagtctccctttccagatattcaagtcacctccttaaaggtagtcaagattgtgttttgaggtttccttcagacagattccaggcgatgtgcaagtgtatgcacgtgtgcacacacaccacacatacacacacacaagcttttttacacaaatggtagcatactttatattggtctgtatcttgctttttttcaccaatatttctcagacatcggttcatattaagacataaattactttttcattcttttataccgctgcatagtattccattgtgtgagtgtaccataatgtatttaaccagtcttcttttgatatactattttcattctcttgttattgcatcaatgctgagttaataaatcaaatatatgtcatttttgcaaa

SEQ ID NO: 395271 - DNA, 2059 bp, Homo sapiens
  misc_feature (492)..(492): n is a, c, g, or t
  misc_feature (497)..(497): n is a, c, g, or t
  misc_feature (586)..(586): n is a, c, g, or t
  misc_feature (610)..(610): n is a, c, g, or t
  misc_feature (637)..(637): n is a, c, g, or t
gcagacagcgatggagcagttcaccacgggggccttccgaagctcagccagaaagtcggagtgagagggcaagcgctccttggtgtggcacgtactcgagaggttctcggagaaggtgacctgggggcggtcccatatgacagtctggttcagccggacgggcaccaagaacaccaggctgatggggaggctcctctgccccaggttgctgacctgatattgatgctgcatgacccgactggtattctctgaggccgtgaagttgagatatttagtggagaccccatggctggtgaccaccatgtagacagcatatttcaccggcagctccagttggaattcggttttgttggttctgggcatgttgttctcactggtcacattggccttgaggagcagtttgtttccaagggaagccttagagtctacatcaaacgtgatattaaaggtgacctctgagttttccgggaagatggggtggtttatgctgcngctgntgctcttcaaggccccagacacttcggtggaggaggcagactcacaggccaggcgccaggatcgctgtgagcgctggttctggagtgtngacaccttccggtaggacaggtcnagcgggaagaagaaggtgacctgtgtnctgtaggagtcctcaccatcatttctcacagtcactgtcacgttgaactcccggggcccacccaccacgaggcagtccaggctcatgaaactgaaggtgatgctgaggtcatcctggcagatgttgtcattgccacaattcttctcaaagggaaacaaggctgtgaagagtctctgagcatcctccgccagcactggccggaggttcccgaaagcagacaatggcgttcccaccagagaaaagtttggcgatcccttgggatatgaggatgtcatccctgaggcagacagagagggagtcattcgctacgtcattggggtgggagatgccttccgcagtgagaaatcccgccaagagcttaataccatcgcatccaagccgcctcgtgatcacgtgttccaggtgaataactttgaggctctgaagaccattcagaaccagcttcgggagaagatctttgcgatcgagggtactcagacaggaagtagcagctcctttgagcatgagatgtctcaggaaggcttcagcgctgccatcacctctaatggccccttgctgagcactgtggggagctatgactgggctggtggagtctttctatatacatcaaaggagaaaagcaccttcatcaacatgaccagagtggattcagacatgaatgatgcttacttgggttatgctgccgccatcatcttacggaaccgggtgcaaagcctggttctgggggcacctcgatatcagcacatcggcctggtagcgatgttcaggcagaacactggcatgtgggagtccaacgctaatgtcaagggcacccagatcggcgcctacttcggggcctccctctgctccgtggacgtggacagcaacggcagcaccgacctggtcctcatcggggccccccattactacgagcagacccgagggggccaggtgtccgtgtgccccttgcccagggggcagagggctcggtggcagtgtgatgctgttctctacggggagcagggccaaccctggggccgctttggggcagccctaacagtgctgggggacgtaaatggggacaagctgacggacgtggccattggggccccaggagaggaggacaaccggggtgctgtttacctgtttcacggaacctcaggatctggcatcagcccctcccatagccaggtgagacctggtcactgtccttgtcatgacagtagcctctttgttgatctttctcctaattcagtgtgcccacagctgccagctcccggactcaagtgatccacctgccttggcctcccaaagtgctgggattacaggtgtgagccaccgcaccctgccagtttggctattttagataactcatataagtgaaaccacgccgtattcatcctttggtgactggcttatttcacttagaataacgtcctccag

SEQ ID NO: 395272 - DNA, 470 bp, Homo sapiens
gtgtaatgatcaggtggtgaaaggcaaggaagccggagaggtcagagtctgcctccatgtccagaagagcacacgggatcggctaagagaaggtgaggcttggtggatgagtctcaagaggttaaacgaccgaggacatgaatgggtgctgcaatccactctgcccagccttctggctgtcctgaactgagttctcacaggctctgacaaccttctccaagccttacctgagtgagcaggctattgtcctgctgggtagggaagtccagtggacctccctaaagaggtgagcatgtggcacttccttactcactcagttctccagagaactgaaggccccatgcctgtgaacaaactatgtttttgttttttaataaacggagagaaaacctatttggggagattgaattgatgaagctaaacagagatttacaaagcactcacatacgcattttatcaccagtgacttc

SEQ ID NO: 395273 - DNA, 498 bp, Homo sapiens
tccttgtgagccctctctacaccaaggagcgcttgccctctcactcgactttctggctgagcttcggaaggcccccgtggctggaggaatttaatgctaccctcaaaggcaacctctcgtttgactggtacatcaagacctcgcataaccacctcctgatcgtgagcacagctgagatcttgtttaacgattccgtgttcaccctgctgccgggacagggggcgtttgtgaggtcccagacggagaccaaagtggagccgttcgaggtccccaaccccctgccgctcatcgtgggcagctctgtcgggggactgctgctcctggccctcatcaccgccgcgctgtacaagctcggcttcttcaagcggcaatacaaggacatgatgagtgaagggggtcccccgggggccgaaccccagtagcggctccttcccgacagagctgcctctcggtggccagcaggactctgcccagaccacacgtagcccccaggctgct

SEQ ID NO: 395274 - DNA, 4483 bp, Homo sapiens
  misc_feature (2740)..(2740): n is a, c, g, or t
tagatcgagctcggtaccgattacgctcctgacggcagtgcgactacagcacaggctcatgcgagcccatccgcctgcaggtccccgtggaggccgtgaacatgtccctgggcctgtccctggcagccaccaccagcccccctcagctgctggcctgtggtcccaccgtgcaccagacttgcagtgagaacacgtatgtgaaagggctctgcttcctgtttggatccaacctacggcagcagccccagaagttcccagaggccctccgagggtgtcctcaagaggatagtgacattgccttcttgattgatggctctggtagcatcatcccacatgactttcggcggatgaaggagtttgtctcaactgtgatggagcaattaaaaaagtccaaaaccttgttctctttgatgcagtactctgaagaattccggattcactttaccttcaaagagttccagaacaaccctaacccaagatcactggtgaagccaataacgcagctgcttgggcggacacacacggccacgggcatccgcaaagtggtacgagagctgtttaacatcaccaacggagcccgaaagaatgcctttaagatcctagttgtcatcacggatggagaaaagtttggcgatcccttgggatatgaggatgtcatccctgaggcagacagagagggagtcattcgctacgtcattggggtgggagatgccttccgcagtgagaaatcccgccaagagcttaataccatcgcatccaagccgcctcgtgatcacgtgttccaggtgaataactttgaggctctgaagaccattcagaaccagcttcgggagaagatctttgcgatcgagggtactcagacaggaagtagcagctcctttgagcatgagatgtctcaggaaggcttcagcgctgccatcacctctaatggccccttgctgagcactgtggggagctatgactgggctggtggagtctttctatatacatcaaaggagaaaagcaccttcatcaacatgaccagagtggattcagacatgaatgatgcttacttgggttatgctgccgccatcatcttacggaaccgggtgcaaagcctggttctgggggcacctcgatatcagcacatcggcctggtagcgatgttcaggcagaacactggcatgtgggagtccaacgctaatgtcaagggcacccagatcggcgcctacttcggggcctccctctgctccgtggacgtggacagcaacggcagcaccgacctggtcctcatcggggccccccattactacgagcagacccgagggggccaggtgtccgtgtgccccttgcccagggggcagagggctcggtggcagtgtgatgctgttctctacggggagcagggccaaccctggggccgctttggggcagccctaacagtgctgggggacgtaaatggggacaagctgacggacgtggccattggggccccaggagaggaggacaaccggggtgctgtttacctgtttcacggaacctcaggatctggcatcagcccctcccatagccagcggatagcaggctccaagctctctcccaggctccagtattttggtcagtcactgagtgggggccaggacctcacaatggatggactggtagacctgactgtaggagcccaggggcacgtgctgctgctcaggtcccagccagtactgagagtcaaggcaatcatggagttcaatcccagggaagtggcaaggaatgtatttgagtgtaatgatcaggtggtgaaaggcaaggaagccggagaggtcagagtctgcctccatgtccagaagagcacacgggatcggctaagagaaggacagatccagagtgttgtgacttatgacctggctctggactccggccgcccacattcccgcgccgtcttcaatgagacaaagaacagcacacgcagacagacacaggtcttggggctgacccagacttgtgagaccctgaaactacagttgccgaattgcatcgaggacccagtgagccccattgtgctgcgcctgaacttctctctggtgggaacgccattgtctgctttcgggaacctccggccagtgctggcggaggatgctcagagactcttcacagccttgtttccctttgagaagaattgtggcaatgacaacatctgccaggatgacctcagcatcaccttcagtttcatgagcctggactgcctcgtggtgggtgggccccgggagttcaacgtgacagtgactgtgagaaatgatggtgaggactcctacaggacacaggtcaccttcttcttcccgcttgacctgtcctaccggaaggtgtccacactccagaaccagcgctcacagcgatcctggcgcctggcctgtgagtctgcctcctccaccgaagtgtctggggccttgaagagcaccagctgcagcataaaccaccccatcttcccggaaaactcagaggtcacctttaatatcacgtttgatgtagactctaaggcttcccttggaaacaaactgctcctcaaggccaatgtgaccagtgagaacaacatgcccagaaccaacaaaaccgaattccaactggagctgccggtgaaatatgctgtctacatggtggtcaccagccatggggtctccactaaatatctcaacttcacggcctcagagaataccagtcgggtcatgcagcatcaatatcaggtcagcaacctggggcagaggagccnccccatcagcctggtgttcttggtgcccgtccggctgaaccagactgtcatatgggaccgcccccaggtcaccttctccgagaacctctcgagtacgtgccacaccaaggagcgcttgccctctcactccgactttctggctgagcttcggaaggcccccgtggtgaactgctccatcgctgtctgccagagaatccagtgtgacatcccgttctttggcatccaggaagaattcaatgctaccctcaaaggcaacctctcgtttgactggtacatcaagacctcgcataaccacctcctgatcgtgagcacagctgagatcttgtttaacgattccgtgttcaccctgctgccgggacagggggcgtttgtgaggtcccagacggagaccaaagtggagccgttcgaggtccccaaccccctgccgctcatcgtgggcagctctgtcgggggactgctgctcctggccctcatcaccgccgcgctgtacaagctcggcttcttcaagcggcaatacaaggacatgatgagtgaagggggtcccccgggggccgaaccccagtagcggctccttcccgacagagctgcctctcggtggccagcaggactctgcccagaccacacgtagcccccaggctgctggacacgtcggacagcgaagtatccccgacaggacgggcttgggcttccatttgtgtgtgtgcaagtgtgtatgtgcgtgtgtgcgagtgtgtgcaagtgtctgtgtgcaagtgtgtgcacgtgtgcgtgtgcgtgcatgtgcactcgcacgcccatgtgtgagtgtgtgcaagtatgtgagtgtgtccagtgtgtgtgcgtgtgtccatgtgtgtgcagtgtgtgcatgtgtgcgagtgtgtgcatgtgtgtgctcaggggctgtggctcacgtgtgtgactcagagtgtctctggcgtgtgggtaggtgacggcagcgtagcctctccggcagaagggaactgcctgggctcccttgtgcgtgggtgaagccgctgctgggttttcctccgggagaggggacggtcaatcctgtgggtgaagacagagggaaacacagcagcttctctccactgaaagaagtgggacttcccgtcgcctgcgagcctgcggcctgctggagcctgcgcagcttggatggagactccatgagaagccgtgggtggaaccaggagcctcctccacaccagcgctgatgcccaataaagatgcccactgaggaatgatgaagcttcctttctggattcatttattatttcaatgtgactttaattttttggatggataagcctgtctatggtacaaaaatcacaaggcattcaagtgtacagtgaaaagtctccctttccagatattcaagtcacctccttaaaggtagtcaagattgtgttttgaggtttccttcagacagattccaggcgatgtgcaagtgtatgcacgtgtgcacacacaccacacatacacacacacaagcttttttacacaaatggtagcatactttatattggtctgtatcttgctttttttcaccaatatttctcagacatcggttcatattaagacataaattactttttcattcttttataccgctgcatagtattccattgtgtgagtgtaccataatgtatttaaccagtcttcttttgatatactattttcattctcttgttattgcatcaatgctgagttaataaatcaaatatatgtcatttttgcaaa

SEQ ID NO: 395275 - DNA, 898 bp, Homo sapiens
tagatcgagctcggtaccgattacgctcctgacggcagtgcgactacagcacaggctcatgcgagcccatccgcctgcaggtccccgtggaggccgtgaacatgtccctgggcctgtccctggcagccaccaccagcccccctcagctgctggcctgtggtcccaccgtgcaccagacttgcagtgagaacacgtatgtgaaagggctctgcttcctgtttggatccaacctacggcagcagccccagaagttcccagaggccctccgagggtgtcctcaagaggatagtgacattgccttcttgattgatggctctggtagcatcatcccacatgactttcggcggatgaaggagtttgtctcaactgtgatggagcaattaaaaaagtccaaaaccttgttctctttgatgcagtactctgaagaattccggattcactttaccttcaaagagttccagaacaaccctaacccaagatcactggtgaagccaataacgcagctgcttgggcggacacacacggccacgggcatccgcaaagtggtacgagagctgtttaacatcaccaacggagcccgaaagaatgcctttaagatcctagttgtcatcacggatggagaaaagtttggcgatcccttgggatatgaggatgtcatccctgaggcagacagagagggagtcattcgctacgtcattggggtagggaatgcagctctcaggttgatgcttctgtggagggtttctatgtggatccatcctcccttcaatttgcaaatattattaaaatcaaagtgacatgagagctaatgctagctcatatacaccgtatcagctatctgttgccacatcaatgctgtgtaataaaaagtaacagctctccacaggccgcacacaaa

SEQ ID NO: 395276 - DNA, 360 bp, Homo sapiens
agttcgaaaccagcctggccaacatggcgaaaccccatctctactaaaaatagaaaaattagccaggtgtggtggtgtgtgcctgtaatctcagctacttgggaagctgaggcaggagaatcgcttgaacttgagaggcagaggttgcaatgagcgagatcgtgccactgcattccagcctggcaacagagtgagactctgcctcaaaaaaataaataaataagtaagtaaataaataaataaataaataaataaataaataaaatgaaatagaataaaacggtttttttttgctgggcatggtggctcatgctgtaagcccagttgggaggcttaggcaggtgcatcacttaagctcag

SEQ ID NO: 395277 - DNA, 236 bp, Homo sapiens
cagctgtcttgtagttgcattttgcagatggagataaagtgtcatcctgcacaagccttgaatatggtgcccagtggaggccatgttgtatctggaatgaaggaagaacatttgccagcaggagatgggaaggctggagggaatctttttgagaatattttcagatatgtatagtttgtacaattatatctactttgtaatattgaccagggctaaactacttggctaaaatatct

SEQ ID NO: 395278 - DNA, 405 bp, Homo sapiens
ggcataccctccaatccaaaatccctagcagggcctagccccacctgtacctcctctctgaagcttctgtgtccacccaggccctttgctgaactcagaaagcacctacctgtgcctgaccctctcccccaaccccatgctaaattctctaatcctcatcacagctgattaggatggtattatttactctattttgctcaaaaggagaacaaggaaaactcactcagcctagagagctccagctgtgattcaaaccctggtttgcctatttccaaagtccaaattctgtcccgtgaaatctcctctcaggcgggtgctagggctgacaggagaccaccagccccttggggacaggagccatgtcatgacgaagggggatgacacaagatcctctagagcactcca

SEQ ID NO: 395279 - DNA, 350 bp, Homo sapiens
ggcataccctccaatccaaaatccctagcagggcctagccccacctgtacctcctctctgaagcttctgtgtccacccaggccctttgctgaactcagaaagcacctacctgtgcctgaccctctcccccaaccccatgctaaattctctaatcctcatcacagctgattaggatggtattatttactctattttgctcaaaaggagaacaaggaaaactcactcagcctagagagctccagctgtgattcaaaccctggtttgcctatttccaaagtccaaattctgtcccgtgaaatctcctctcagccctagcacccgcctgagaggagatttagggggacagggat

SEQ ID NO: 395280 - DNA, 827 bp, Homo sapiens
gcttacacccgtaatcctagcactttgggaggccgaggcgggcagatcacgaggtcaggagttcaagaccagcccgggcaacacagtgaaaactggtccctagtaaaatacaaaaaattaggcaagcatggcagcatgcgcctatagtcccagctacttgggaggctgaggcaagagtgaggcaagagaattgcttgaacccaggaggcggaggttgcagtgagccgagattgtgccactgcactccagcctggtcgacagagtgagactccgtctccaaaaaaaaaaaacaagattgcataagatgtgaatactcagtcattttaatcagtgggaataattataattattataattgttttttgatctttacgaatcttgtcaaaatgttaaaaaaaaggctcttctttctgtcagttattaatgtttagagaaatgaaaaaatagtaaaaatatttagtatactataatttaaaacttacgaaatattgagaattattttcttttttaaaaacttagcaagaatagtttaaactgtgcttgccaccttcctctcatataatttataactaagtgagcatcttttctgtaccttgacagattgtcatgtttctaaatttggatccgctttacatttgtatattcattacattcttattgagcatccaccatagctgttccagtactgtgctaagaaaagatcatttcaatggatttgcagctaactttatggcttcaactcgagtcttgccttgaaatgtcacctttaaacatgcctagtcagattcaagggcttgcgtggatttcttagatataaggcattcaca

SEQ ID NO: 395281 - DNA, 361 bp, Homo sapiens
tctccaaagcagcctgtgcaaaatatctcttccgtattataccactaacaactaaaatgttgtcattactagaggctcatccagcactggtctttctcaaaaggcacacaggcctgggagggcagtgtggttttgaaacatgccagccagctgaatgcaagttgataagcaaagataatagtgcggtgagccaacatgggggaaatgcctggaggcagtatcacagggaggttctgacaagcacaagtgaagagaaagactggagcccagaaaggaagaggaaggagagaaggaggcactcaaagagaagcagagtatgaaacaacttcacaggtttgcctggggctggcagcaatccagt

SEQ ID NO: 395282 - DNA, 1050 bp, Homo sapiens
gactagtctagtgcgaggctggtgtcaatcggccgagggaagttggacgcatgcgccgtttctctgcatggtgtgcgttctcgttctagctgcggccgcaggagctgtggcggttttcctaatcctgcgaatatgggtagtgcttcgttccatggacgttacgccccgggagtctctcagtatcttggtagtggctgggtccggtgggcataccactgagatcctgaggctgcttgggagcttgtccaatgcctactcacctagacattatgtcattgctgacactgatgaaatgagtgccaataaaataaattcttttgaactagatcgagctgatagagaccctagtaacatgtataccaaatactacattcaccgaattccaagaagccgggaggttcagcagtcctggccctccaccgttttcaccaccttgcactccatgtggctctcctttcccctaattcacagggtgaagccagatttggtgttgtgtaacggaccaggaacatgtgttcctatctgtgtatctgcccttctccttgggatactaggaataaagaaagtgatcattgtctacgttgaaagcatctgccgtgtagaaacgttatccatgtccggaaagattctgtttcatctctcagattacttcattgttcagtggccggctctgaaagaaaagtatcccaaatcggtgtaccttgggcgaattgtttgacaaatggcaactgacttctttagaattttgcagttaacagtagtatgtactcaaattggggggaaaaaaaccctacatgtttcttgtaaaggcgtctgacagtcctgagaattattgatggtaaggaataaaaaatgtacagatgactcagtgaagaaactgaggcttctcttatgaaacaaacattgataaacgtaactactaaatgtttatgcctctgtaaaccaaatttcttttctagataaaaatatgtattactacctgcaaattttcttctggctgttttagtagtattttttttacagaactaaatatagagtttgtatgattag

SEQ ID NO: 395283 - DNA, 603 bp, Homo sapiens
  misc_feature (25)..(25): n is a, c, g, or t
ttctttcccccccaccaacaccacnccacaccttcttaaggtgttgtgtaacggaccaggaacatgtgttcctatctgtgtatctgcccttctccttgggatactaggaataaagaaagtgatcattgtctacgttgaaagcatctgccgtgtagaaacgttatccatgtccggaaagattctgtttcatctctcagattacttcattgttcagtggccggctctgaaagaaaagtatcccaaatcggtgtaccttgggcgaattgtttgacaaatggcaactgacttctttagaattttgcagttaacagtagtatgtactcaaattggggggaaaaaaaccctacatgtttcttgtaaaggcgtctgacagtcctgagaattattgatggtaaggaataaaaaatgtacagatgactcagtgaagaaactgaggcttctcttatgaaacaaacattgataaacgtaactactaaatgtttatgcctctgtaaaccaaatttcttttctagataaaaatatgtattactacctgcaaattttcttctggctgttttagtagtattttttttacagaactaaatatagagtttgtatgattag

SEQ ID NO: 395284 - DNA, 681 bp, Homo sapiens
  misc_feature (47)..(47): n is a, c, g, or t
  misc_feature (54)..(54): n is a, c, g, or t
aacacttaatataaatatctttcaaatctttaaagaaaaaagaaggngcttcgntgactataccaaatactacattcaccgaattccaagaagccgggaggttcagcagtcctggccctccaccgttttcaccaccttgcactccatgtggctctcctttcccctaattcacagggtgaagccagatttggtgttgtgtaacggaccaggaacatgtgttcctatctgtgtatctgcccttctccttgggatactaggaataaagaaagtgatcattgtctacgttgaaagcatctgccgtgtagaaacgttatccatgtccggaaagattctgtttcatctctcagattacttcattgttcagtggccggctctgaaagaaaagtatcccaaatcggtgtaccttgggcgaattgtttgacaaatggcaactgacttctttagaattttgcagttaacagtagtatgtactcaaattggggggaaaaaaaccctacatgtttcttgtaaaggcgtctgacagtcctgagaattattgatggtaaggaataaaaaatgtacagatgactcagtgaagaaactgaggcttctcttatgaaacaaacattgataaacgtaactactaaatgtttatgcctctgtaaaccaaatttcttttctagataaaaatatgtattacta

SEQ ID NO: 395285 - DNA, 667 bp, Homo sapiens
cgagcgtaggtattgaattatgattttagatggggagtacgtcttataccaaatactacattcaccgaattccaagaagccgggaggttcagcagtcctggccctccaccgttttcaccaccttgcactccatgtggctctcctttcccctaattcacagggtgaagccagatttggtgttgtgtaacggaccaggaacatgtgttcctatctgtgtatctgcccttctccttgggatactaggaataaagaaagtgatcattgtctacgttgaaagcatctgccgtgtagaaacgttatccatgtccggaaagattctgtttcatctctcagattacttcattgttcagtggccggctctgaaagaaaagtatcccaaatcggtgtaccttgggcgaattgtttgacaaatggcaactgacttctttagaattttgcagttaacagtagtatgtactcaaattggggggaaaaaaaccctacatgtttcttgtaaaggcgtctgacagtcctgagaattattgatggtaaggaataaaaaatgtacagatgactcagtgaagaaactgaggcttctcttatgaaacaaacattgataaacgtaactactaaatgtttatgcctctgtaaaccaaatttcttttctagataaaaatatgtattacta

SEQ ID NO: 395286 - DNA, 539 bp, Homo sapiens
  misc_feature (29)..(29): n is a, c, g, or t
  misc_feature (44)..(44): n is a, c, g, or t
gggagaggggcgcttaggggtgtgagttngttttggaaggcctngcgagtgttgtgtaacggaccaggaacatgtgttcctatctgtgtatctgcccttctccttgggatactaggaataaagaaagtgatcattgtctacgttgaaagcatctgccgtgtagaaacgttatccatgtccggaaagattctgtttcatctctcagattacttcattgttcagtggccggctctgaaagaaaagtatcccaaatcggtgtaccttgggcgaattgtttgacaaatggcaactgacttctttagaattttgcagttaacagtagtatgtactcaaattggggggaaaaaaaccctacatgtttcttgtaaaggcgtctgacagtcctgagaattattgatggtaaggaataaaaaatgtacagatgactcagtgaagaaactgaggcttctcttatgaaacaaacattgataaacgtaactactaaatgtttatgcctctgtaaaccaaatttcttttctagataaaaatatgtattacta

SEQ ID NO: 395287 - DNA, 535 bp, Homo sapiens
tattttttcccacttttttttctgacacggcgaagccagcttcggtgttgtgtaacggaccaggaacatgtgttcctatctgtgtatctgcccttctccttgggatactaggaataaagaaagtgatcattgtctacgttgaaagcatctgccgtgtagaaacgttatccatgtccggaaagattctgtttcatctctcagattacttcattgttcagtggccggctctgaaagaaaagtatcccaaatcggtgtaccttgggcgaattgtttgacaaatggcaactgacttctttagaattttgcagttaacagtagtatgtactcaaattggggggaaaaaaaccctacatgtttcttgtaaaggcgtctgacagtcctgagaattattgatggtaaggaataaaaaatgtacagatgactcagtgaagaaactgaggcttctcttatgaaacaaacattgataaacgtaactactaaatgtttatgcctctgtaaaccaaatttcttttctagataaaaatatgtattacta

SEQ ID NO: 395288 - DNA, 548 bp, Homo sapiens
  misc_feature (24)..(24): n is a, c, g, or t
  misc_feature (30)..(30): n is a, c, g, or t
  misc_feature (44)..(44): n is a, c, g, or t
ttgatgttgagttaagaggaaaanaagaanttttcaaaaaaaanttgacaaactgaggtgttgtgtaacggaccaggaacatgtgttcctatctgtgtatctgcccttctccttgggatactaggaataaagaaagtgatcattgtctacgttgaaagcatctgccgtgtagaaacgttatccatgtccggaaagattctgtttcatctctcagattacttcattgttcagtggccggctctgaaagaaaagtatcccaaatcggtgtaccttgggcgaattgtttgacaaatggcaactgacttctttagaattttgcagttaacagtagtatgtactcaaattggggggaaaaaaaccctacatgtttcttgtaaaggcgtctgacagtcctgagaattattgatggtaaggaataaaaaatgtacagatgactcagtgaagaaactgaggcttctcttatgaaacaaacattgataaacgtaactactaaatgtttatgcctctgtaaaccaaatttcttttctagataaaaatatgtattacta

SEQ ID NO: 395289 - DNA, 545 bp, Homo sapiens
  misc_feature (35)..(35): n is a, c, g, or t
  misc_feature (38)..(38): n is a, c, g, or t
  misc_feature (40)..(40): n is a, c, g, or t
atatgaatagatgacgagaagaaggattaaaaaanacnanttttgaaaaacaaggtgttgtgtaacggaccaggaacatgtgttcctatctgtgtatctgcccttctccttgggatactaggaataaagaaagtgatcattgtctacgttgaaagcatctgccgtgtagaaacgttatccatgtccggaaagattctgtttcatctctcagattacttcattgttcagtggccggctctgaaagaaaagtatcccaaatcggtgtaccttgggcgaattgtttgacaaatggcaactgacttctttagaattttgcagttaacagtagtatgtactcaaattggggggaaaaaaaccctacatgtttcttgtaaaggcgtctgacagtcctgagaattattgatggtaaggaataaaaaatgtacagatgactcagtgaagaaactgaggcttctcttatgaaacaaacattgataaacgtaactactaaatgtttatgcctctgtaaaccaaatttcttttctagataaaaatatgtattacta

SEQ ID NO: 395290 - DNA, 524 bp, Homo sapiens
tcaccgcccctataaccaacaccacacacttaggtgttgtgtaacggaccaggaacatgtgttcctatctgtgtatctgcccttctccttgggatactaggaataaagaaagtgatcattgtctacgttgaaagcatctgccgtgtagaaacgttatccatgtccggaaagattctgtttcatctctcagattacttcattgttcagtggccggctctgaaagaaaagtatcccaaatcggtgtaccttgggcgaattgtttgacaaatggcaactgacttctttagaattttgcagttaacagtagtatgtactcaaattggggggaaaaaaaccctacatgtttcttgtaaaggcgtctgacagtcctgagaattattgatggtaaggaataaaaaatgtacagatgactcagtgaagaaactgaggcttctcttatgaaacaaacattgataaacgtaactactaaatgtttatgcctctgtaaaccaaatttcttttctagataaaaatatgtattacta

SEQ ID NO: 395291 - DNA, 649 bp, Homo sapiens
  misc_feature (1)..(1): n is a, c, g, or t
  misc_feature (30)..(30): n is a, c, g, or t
nttccgagcagtccttcagtagtattccanaaaaggcattgttctcataggagatgacagctccatgcgtgttagtggccctgaagacctttcagtgggacaagatgtggaggtggaagacagtgatattgatgattctgatgctgtgtaggcctagggtgttgtgtaacggaccaggaacatgtgttcctatctgtgtatctgcccttctccttgggatactaggaataaagaaagtgatcattgtctacgttgaaagcatctgccgtgtagaaacgttatccatgtccggaaagattctgtttcatctctcagattacttcattgttcagtggccggctctgaaagaaaagtatcccaaatcggtgtaccttgggcgaattgtttgacaaatggcaactgacttctttagaattttgcagttaacagtagtatgtactcaaattggggggaaaaaaaccctacatgtttcttgtaaaggcgtctgacagtcctgagaattattgatggtaaggaataaaaaatgtacagatgactcagtgaagaaactgaggcttctcttatgaaacaaacattgataaacgtaactactaaatgtttatgcctctgtaaaccaaatttcttttctagataaaaatatgtattacta

SEQ ID NO: 395292 - DNA, 559 bp, Homo sapiens
  misc_feature (61)..(61): n is a, c, g, or t
ctcagcattatcccatcctacctcacctcttaaaacaaagaagttcggtgtaacgtacggnccattacgtgttgtgtaacggaccaggaacatgtgttcctatctgtgtatctgcccttctccttgggatactaggaataaagaaagtgatcattgtctacgttgaaagcatctgccgtgtagaaacgttatccatgtccggaaagattctgtttcatctctcagattacttcattgttcagtggccggctctgaaagaaaagtatcccaaatcggtgtaccttgggcgaattgtttgacaaatggcaactgacttctttagaattttgcagttaacagtagtatgtactcaaattggggggaaaaaaaccctacatgtttcttgtaaaggcgtctgacagtcctgagaattattgatggtaaggaataaaaaatgtacagatgactcagtgaagaaactgaggcttctcttatgaaacaaacattgataaacgtaactactaaatgtttatgcctctgtaaaccaaatttcttttctagataaaaatatgtattacta

SEQ ID NO: 395293 - DNA, 539 bp, Homo sapiens
tcgaactggcacaaccagatggtcgcttcagggtaccgtaacggacctgtgttgtgtaacggaccaggaacatgtgttcctatctgtgtatctgcccttctccttgggatactaggaataaagaaagtgatcattgtctacgttgaaagcatctgccgtgtagaaacgttatccatgtccggaaagattctgtttcatctctcagattacttcattgttcagtggccggctctgaaagaaaagtatcccaaatcggtgtaccttgggcgaattgtttgacaaatggcaactgacttctttagaattttgcagttaacagtagtatgtactcaaattggggggaaaaaaaccctacatgtttcttgtaaaggcgtctgacagtcctgagaattattgatggtaaggaataaaaaatgtacagatgactcagtgaagaaactgaggcttctcttatgaaacaaacattgataaacgtaactactaaatgtttatgcctctgtaaaccaaatttcttttctagataaaaatatgtattacta

SEQ ID NO: 395294 - DNA, 536 bp, Homo sapiens
cctcgctaggcccgccaggtcgcggggaagcagagaggagcttgagtgttgtgtaacggaccaggaacatgtgttcctatctgtgtatctgcccttctccttgggatactaggaataaagaaagtgatcattgtctacgttgaaagcatctgccgtgtagaaacgttatccatgtccggaaagattctgtttcatctctcagattacttcattgttcagtggccggctctgaaagaaaagtatcccaaatcggtgtaccttgggcgaattgtttgacaaatggcaactgacttctttagaattttgcagttaacagtagtatgtactcaaattggggggaaaaaaaccctacatgtttcttgtaaaggcgtctgacagtcctgagaattattgatggtaaggaataaaaaatgtacagatgactcagtgaagaaactgaggcttctcttatgaaacaaacattgataaacgtaactactaaatgtttatgcctctgtaaaccaaatttcttttctagataaaaatatgtattacta

SEQ ID NO: 395295 - DNA, 555 bp, Homo sapiens
  misc_feature (55)..(55): n is a, c, g, or t
  misc_feature (60)..(61): n is a, c, g, or t
acacgtcactttcactagatttattccttaacacacaagtactcccttttggcgntaacnnaacgtgttgtgtaacggaccaggaacatgtgttcctatctgtgtatctgcccttctccttgggatactaggaataaagaaagtgatcattgtctacgttgaaagcatctgccgtgtagaaacgttatccatgtccggaaagattctgtttcatctctcagattacttcattgttcagtggccggctctgaaagaaaagtatcccaaatcggtgtaccttgggcgaattgtttgacaaatggcaactgacttctttagaattttgcagttaacagtagtatgtactcaaattggggggaaaaaaaccctacatgtttcttgtaaaggcgtctgacagtcctgagaattattgatggtaaggaataaaaaatgtacagatgactcagtgaagaaactgaggcttctcttatgaaacaaacattgataaacgtaactactaaatgtttatgcctctgtaaaccaaatttcttttctagataaaaatatgtattacta

SEQ ID NO: 395296 - DNA, 916 bp, Homo sapiens
  misc_feature (47)..(47): n is a, c, g, or t
  misc_feature (54)..(54): n is a, c, g, or t
aacacttaatataaatatctttcaaatctttaaagaaaaaagaaggngcttcgntgactataccaaatactacattcaccgaattccaagaagccgggaggttcagcagtcctggccctccaccgttttcaccaccttgcactccatgtggctctcctttcccctaattcacagggtgaagccagatttggtgttgtgtaacggaccaggaacatgtgttcctatctgtgtatctgcccttctccttgggatactaggaataaagaaagtgatcattgtctacgttgaaagcatctgccgtgtagaaacgttatccatgtccggaaagattctgtttcatctctcagattacttcattgttcagtggccggctctgaaagaaaagtatcccaaatcggtgtaccttgggcgaattgtttgacaaatggcaactgacttctttagaattttgcagttaacagtagtatgtactcaaattggggggaaaaaaaccctacatgtttcttgtaaaggcgtctgacagtcctgagaattattgatggtaaggaataaaaaatgtacagatgactcagtgaagaaactgaggcttctcttatgaaacaaacattgataaacgtaactactaaatgtttatgcctctgtaaaccaaatttcttttctagataaaaatatgtattactaaaaaaaaaaaaatggcctcgttggcctcaaggggaaccttgcgccgtttccttaaggaggttaattatatcccccttactgctcctgccttgtcttcggctgcgaaagcgtctacctacttaaggcggatacggtatcccacatcgggttccccggaagatctgtgccatcgcccccaaggccgaaccgaaaggccgggtgtgggtttcaaagcccaccccctataacaaaaaat

SEQ ID NO: 395297 - DNA, 424 bp, Homo sapiens
  misc_feature (25)..(25): n is a, c, g, or t
ttctttcccccccaccaacaccacnccacaccttcttaaggtgttgtgtaacggaccaggaacatgtgttcctatctgtgtatctgcccttctccttgggatactaggaataaagaaagtgatcattgtctacgttgaaagcatctgccgtgtagaaacgttatccatgtccggaaagattctgtttcatctctcagattacttcattgttcagtggccggctctgaaagaaaagtatcccaaatcggtgtaccttgggcgaattgtttgacaaatggcaactgacttctttagaattttgcagttaacagtagtatgtactcaaattggggggaaaaaaaccctacatgtttcttgtaaaggcgtctgacagtcctgagaattattgatggtaaggaataaaaaatgtacagatgactcagtg

SEQ ID NO: 395298 - DNA, 770 bp, Homo sapiens
tattttttcccacttttttttctgacacggcgaagccagcttcggtgttgtgtaacggaccaggaacatgtgttcctatctgtgtatctgcccttctccttgggatactaggaataaagaaagtgatcattgtctacgttgaaagcatctgccgtgtagaaacgttatccatgtccggaaagattctgtttcatctctcagattacttcattgttcagtggccggctctgaaagaaaagtatcccaaatcggtgtaccttgggcgaattgtttgacaaatggcaactgacttctttagaattttgcagttaacagtagtatgtactcaaattggggggaaaaaaaccctacatgtttcttgtaaaggcgtctgacagtcctgagaattattgatggtaaggaataaaaaatgtacagatgactcagtgaagaaactgaggcttctcttatgaaacaaacattgataaacgtaactactaaatgtttatgcctctgtaaaccaaatttcttttctagataaaaatatgtattactaaaaaaaaaaaaatggcctcgttggcctcaaggggaaccttgcgccgtttccttaaggaggttaattatatcccccttactgctcctgccttgtcttcggctgcgaaagcgtctacctacttaaggcggatacggtatcccacatcgggttccccggaagatctgtgccatcgcccccaaggccgaaccgaaaggccgggtgtgggtttcaaagcccaccccctataacaaaaaat

SEQ ID NO: 395299 - DNA, 577 bp, Homo sapiens
  misc_feature (35)..(35): n is a, c, g, or t
  misc_feature (38)..(38): n is a, c, g, or t
  misc_feature (40)..(40): n is a, c, g, or t
atatgaatagatgacgagaagaaggattaaaaaanacnanttttgaaaaacaaggtgttgtgtaacggaccaggaacatgtgttcctatctgtgtatctgcccttctccttgggatactaggaataaagaaagtgatcattgtctacgttgaaagcatctgccgtgtagaaacgttatccatgtccggaaagattctgtttcatctctcagattacttcattgttcagtggccggctctgaaagaaaagtatcccaaatcggtgtaccttgggcgaattgtttgacaaatggcaactgacttctttagaattttgcagttaacagtagtatgtactcaaattggggggaaaaaaaccctacatgtttcttgtaaaggcgtctgacagtcctgagaattattgatggtaaggaataaaaaatgtacagatgactcagtgaagaaactgaggcttctcttatgaaacaaacattgataaacgtaactactaaatgtttatgcctctgtaaaccaaatttcttttctagataaaaatatgtattactaaccaaaacaaaaatggccttcctggcctcagg

SEQ ID NO: 395300 - DNA, 595 bp, Homo sapiens
atattttatcccccatgtgttgcccctctaaaaccgatatcataacttcggtgtaacagtacgtgttgtgtaacggaccaggaacatgtgttcctatctgtgtatctgcccttctccttgggatactaggaataaagaaagtgatcattgtctacgttgaaagcatctgccgtgtagaaacgttatccatgtccggaaagattctgtttcatctctcagattacttcattgttcagtggccggctctgaaagaaaagtatcccaaatcggtgtaccttgggcgaattgtttgacaaatggcaactgacttctttagaattttgcagttaacagtagtatgtactcaaattggggggaaaaaaaccctacatgtttcttgtaaaggcgtctgacagtcctgagaattattgatggtaaggaataaaaaatgtacagatgactcagtgaagaaactgaggcttctcttatgaaacaaacattgataaacgtaactactaaatgtttatgcctctgtaaaccaaatttcttttctagataaaaatatgtattactaaccaagaaaaaaacacccggccctccttgccctacccgtcga

SEQ ID NO: 395301 - DNA, 594 bp, Homo sapiens
  misc_feature (55)..(55): n is a, c, g, or t
  misc_feature (60)..(61): n is a, c, g, or t
acacgtcactttcactagatttattccttaacacacaagtactcccttttggcgntaacnnaacgtgttgtgtaacggaccaggaacatgtgttcctatctgtgtatctgcccttctccttgggatactaggaataaagaaagtgatcattgtctacgttgaaagcatctgccgtgtagaaacgttatccatgtccggaaagattctgtttcatctctcagattacttcattgttcagtggccggctctgaaagaaaagtatcccaaatcggtgtaccttgggcgaattgtttgacaaatggcaactgacttctttagaattttgcagttaacagtagtatgtactcaaattggggggaaaaaaaccctacatgtttcttgtaaaggcgtctgacagtcctgagaattattgatggtaaggaataaaaaatgtacagatgactcagtgaagaaactgaggcttctcttatgaaacaaacattgataaacgtaactactaaatgtttatgcctctgtaaaccaaatttcttttctagataaaaatatgtattactactgcgaaaaataaaaaaatggccttgttgggccttatat

SEQ ID NO: 395302 - DNA, 425 bp, Homo sapiens
  misc_feature (12)..(12): n is a, c, g, or t
  misc_feature (41)..(41): n is a, c, g, or t
ccctcggcccangctagtctcgctgtgaacgtgccccaggngtgttgtgtaacggaccaggaacatgtgttcctatctgtgtatctgcccttctccttgggatactaggaataaagaaagtgatcattgtctacgttgaaagcatctgccgtgtagaaacgttatccatgtccggaaagattctgtttcatctctcagattacttcattgttcagtggccggctctgaaagaaaagtatcccaaatcggtgtaccttgggcgaattgtttgacaaatggcaactgacttctttagaattttgcagttaacagtagtatgtactcaaattggggggaaaaaaaccctacatgtttcttgtaaaggcgtctgacagtcctgagaattattgatggtaaggaataaaaaatgtacagatgactcagtg

SEQ ID NO: 395303 - DNA, 605 bp, Homo sapiens
  misc_feature (59)..(59): n is a, c, g, or t
  misc_feature (67)..(67): n is a, c, g, or t
ttccctactcttcttgcattggagccgcacccgcgtgacgaataggtttggtgccacanagcatcangttgtacacacatgcctgtccgatgagtgctgactgagcaccaggaactgtgctagaagttagaagttaagtgatttgccctgagtcacacagttggtgttgtgtaacggaccaggaacatgtgttcctatctgtgtatctgcccttctccttgggatactaggaataaagaaagtgatcattgtctacgttgaaagcatctgccgtgtagaaacgttatccatgtccggaaagattctgtttcatctctcagattacttcattgttcagtggccggctctgaaagaaaagtatcccaaatcggtgtaccttgggcgaattgtttgacaaatggcaactgacttctttagaattttgcagttaacagtagtatgtactcaaattggggggaaaaaaaccctacatgtttcttgtaaaggcgtctgacagtcctgagaattattgatggtaaggaataaaaaatgtacagatgactcagtgaagaaactgaggcttctcttatgaaaaaagaaatatcggccttcttggcctcagccgc

SEQ ID NO: 395304 - DNA, 978 bp, Homo sapiens
gactagtctagtgcgaggctggtgtcaatcggccgagggaagttggacgcatgcgccgtttctctgcatggtgtgcgttctcgttctagctgcggccgcaggagctgtggcggttttcctaatcctgcgaatatgggtagtgcttcgttccatggacgttacgccccgggagtctctcagtatcttggtagtggctgggtccggtgggcataccactgagatcctgaggctgcttgggagcttgtccaatgcctactcacctagacattatgtcattgctgacactgatgaaatgagtgccaataaaataaattcttttgaactagatcgagctgatagagaccctagtaacatgtataccaaatactacattcaccgaattccaagaagccgggaggttcagcagtcctggccctccaccgttttcaccaccttgcactccatgtggctctcctttcccctaattcacagggtgaagccagatttggtgttgtgtaacggaccaggaacatgtgttcctatctgtgtatctgcccttctccttgggatactaggaataaagaaagtgatcattgtctacgttgaaagcatctgccgtgtagaaacgttatccatgtccggaaagattctgtttcatctctcagattacttcattgttcagtggccggctctgaaagaaaagtatcccaaatcggtgtaccttgggcgaattgtttgacaaatggcaactgacttctttagaattttgcagttaacagtagtatgtactcaaattggggggaaaaaaaccctacatgtttcttgtaaaggcgtctgacagtcctgagaattattgatggtaaggaataaaaaatgtacagatgactcagtgaagaaactgaggcttctcttatgaaacaaacattgataaacgtaactactaaatgtttatgcctctgtaaaccaaatttcttttctagataaaaatatgtattacta

SEQ ID NO: 395305 - DNA, 1155 bp, Homo sapiens
gactagtctagtgcgaggctggtgtcaatcggccgagggaagttggacgcatgcgccgtttctctgcatggtgtgcgttctcgttctagctgcggccgcaggagctgtggcggttttcctaatcctgcgaatatgggtagtgcttcgttccatggacgttacgccccgggagtctctcagtatcttggtagtggctgggtccggtgggcataccactgagatcctgaggctgcttgggagcttgtccaatgcctactcacctagacattatgtcattgctgacactgatgaaatgagtgccaataaaataaattcttttgaactagatcgagctgatagagaccctagtaacatgtataccaaatactacattcaccgaattccaagaagccgggaggttcagcagtcctggccctccaccgttttcaccaccttgcactccatgtggctctcctttcccctaattcacagggtgaagccagatttggtgttgtgtaacggaccaggaacatgtgttcctatctgtgtatctgcccttctccttgggatactaggaataaagaaagtgatcattgtctacgttgaaagcatctgccgtgtagaaacgttatccatgtccggaaagattctgtttcatctctcagattacttcattgttcagtggccggctctgaaagaaaagtatcccaaatcggtgtaccttgggcgaattgtttgacaaatggcaactgacttctttagaattttgcagttaacagtagtatgtactcaaattggggggaaaaaaaccctacatgtttcttgtaaaggcgtctgacagtcctgagaattattgatggtaaggaataaaaaatgtacagatgactcagtgaagaaactgaggcttctcttatgaaacaaacattgataaacgtaactacaaaaaaaaaaaatggcctcgttggcctcaaggggaaccttgcgccgtttccttaaggaggttaattatatcccccttactgctcctgccttgtcttcggctgcgaaagcgtctacctacttaaggcggatacggtatcccacatcgggttccccggaagatctgtgccatcgcccccaaggccgaaccgaaaggccgggtgtgggtttcaaagcccaccccctataacaaaaaat

SEQ ID NO: 395306 - DNA, 871 bp, Homo sapiens
gactagtctagtgcgaggctggtgtcaatcggccgagggaagttggacgcatgcgccgtttctctgcatggtgtgcgttctcgttctagctgcggccgcaggagctgtggcggttttcctaatcctgcgaatatgggtagtgcttcgttccatggacgttacgccccgggagtctctcagtatcttggtagtggctgggtccggtgggcataccactgagatcctgaggctgcttgggagcttgtccaatgcctactcacctagacattatgtcattgctgacactgatgaaatgagtgccaataaaataaattcttttgaactagatcgagctgatagagaccctagtaacatgtataccaaatactacattcaccgaattccaagaagccgggaggttcagcagtcctggccctccaccgttttcaccaccttgcactccatgtggctctcctttcccctaattcacagggtgaagccagatttggtgttgtgtaacggaccaggaacatgtgttcctatctgtgtatctgcccttctccttgggatactaggaataaagaaagtgatcattgtctacgttgaaagcatctgccgtgtagaaacgttatccatgtccggaaagattctgtttcatctctcagattacttcattgttcagtggccggctctgaaagaaaagtatcccaaatcggtgtaccttgggcgaattgtttgacaaatggcaactgacttctttagaattttgcagttaacagtagtatgtactcaaattggggggaaaaaaaccctacatgtttcttgtaaaggcgtctgacagtcctgagaattattgatggtaaggaataaaaaatgtacagatgactcagtg

SEQ ID NO: 395307 - DNA, 1050 bp, Homo sapiens
gctcagttccagggatctgggcctcagtccaggagagaagggaagggaattctcaggacagcagtgaagggagttccagtgtgaagacttcataggtggtcctagagaacaaacagttgggaacagagcaaagtgacagagaactccagaagacatggtgccaagaaagtaacaggaatgataaataacgcgaagagtctgacgaaactgagaagaccagaagaactttcaaactagacggggtctcactgtctgcccaggctggggtgcagtggtgcaatcatagctcactgcatctttgaattcctgggctcaagcagtcctgcctcagcctcccaagtaactggaactacagtataccaaatactacattcaccgaattccaagaagccgggaggttcagcagtcctggccctccaccgttttcaccaccttgcactccatgtggctctcctttcccctaattcacagggtgaagccagatttggtgttgtgtaacggaccaggaacatgtgttcctatctgtgtatctgcccttctccttgggatactaggaataaagaaagtgatcattgtctacgttgaaagcatctgccgtgtagaaacgttatccatgtccggaaagattctgtttcatctctcagattacttcattgttcagtggccggctctgaaagaaaagtatcccaaatcggtgtaccttgggcgaattgtttgacaaatggcaactgacttctttagaattttgcagttaacagtagtatgtactcaaattggggggaaaaaaaccctacatgtttcttgtaaaggcgtctgacagtcctgagaattattgatggtaaggaataaaaaatgtacagatgactcagtgaagaaactgaggcttctcttatgaaacaaacattgataaacgtaactactaaatgtttatgcctctgtaaaccaaatttcttttctagataaaaatatgtattactacctgcaaattttcttctggctgttttagtagtattttttttacagaactaaatatagagtttgtatgattag

SEQ ID NO: 395308 - DNA, 759 bp, Homo sapiens
agcccgtctctaatatgatccacgttgttacctcccattaccgtcagacgcggcacggagtctgtataccaaatactacattcaccgaattccaagaagccgggaggttcagcagtcctggccctccaccgttttcaccaccttgcactccatgtggctctcctttcccctaattcacagggtgaagccagatttggtgttgtgtaacggaccaggaacatgtgttcctatctgtgtatctgcccttctccttgggatactaggaataaagaaagtgatcattgtctacgttgaaagcatctgccgtgtagaaacgttatccatgtccggaaagattctgtttcatctctcagattacttcattgttcagtggccggctctgaaagaaaagtatcccaaatcggtgtaccttgggcgaattgtttgacaaatggcaactgacttctttagaattttgcagttaacagtagtatgtactcaaattggggggaaaaaaaccctacatgtttcttgtaaaggcgtctgacagtcctgagaattattgatggtaaggaataaaaaatgtacagatgactcagtgaagaaactgaggcttctcttatgaaacaaacattgataaacgtaactactaaatgtttatgcctctgtaaaccaaatttcttttctagataaaaatatgtattactacctgcaaattttcttctggctgttttagtagtattttttttacagaactaaatatagagtttgtatgattag

SEQ ID NO: 395309 - DNA, 1087 bp, Homo sapiens
gactagtctagtgcgaggctggtgtcaatcggccgagggaagttggacgcatgcgccgtttctctgcatggtgtgcgttctcgttctagctgcggccgcaggagctgtggcggttttcctaatcctgcgaatatgggtagtgcttcgttccatggacgttacgccccgggagtctctcagtatcttggtagtggctgggtccggtgggcataccactgagatcctgaggctgcttgggagcttgtccaatgcctactcacctagacattatgtcattgctgacactgatgaaatgagtgccaataaaataaattcttttgaactagatcgagctgatagagaccctagtaacatgtcagttgatttggattccatctgtttccttctagtattataccaaatactacattcaccgaattccaagaagccgggaggttcagcagtcctggccctccaccgttttcaccaccttgcactccatgtggctctcctttcccctaattcacagggtgaagccagatttggtgttgtgtaacggaccaggaacatgtgttcctatctgtgtatctgcccttctccttgggatactaggaataaagaaagtgatcattgtctacgttgaaagcatctgccgtgtagaaacgttatccatgtccggaaagattctgtttcatctctcagattacttcattgttcagtggccggctctgaaagaaaagtatcccaaatcggtgtaccttgggcgaattgtttgacaaatggcaactgacttctttagaattttgcagttaacagtagtatgtactcaaattggggggaaaaaaaccctacatgtttcttgtaaaggcgtctgacagtcctgagaattattgatggtaaggaataaaaaatgtacagatgactcagtgaagaaactgaggcttctcttatgaaacaaacattgataaacgtaactactaaatgtttatgcctctgtaaaccaaatttcttttctagataaaaatatgtattactacctgcaaattttcttctggctgttttagtagtattttttttacagaactaaatatagagtttgtatgattag

SEQ ID NO: 395310 - DNA, 795 bp, Homo sapiens
  misc_feature (25)..(25): n is a, c, g, or t
  misc_feature (53)..(53): n is a, c, g, or t
  misc_feature (64)..(65): n is a, c, g, or t
tgtattaggtttgaatggagggttnggagcacgacagccaagaatcgtgtgcnttgcaacgcgnnggggaaaggttgtctaacctcatggtgcataaatttataccaaatactacattcaccgaattccaagaagccgggaggttcagcagtcctggccctccaccgttttcaccaccttgcactccatgtggctctcctttcccctaattcacagggtgaagccagatttggtgttgtgtaacggaccaggaacatgtgttcctatctgtgtatctgcccttctccttgggatactaggaataaagaaagtgatcattgtctacgttgaaagcatctgccgtgtagaaacgttatccatgtccggaaagattctgtttcatctctcagattacttcattgttcagtggccggctctgaaagaaaagtatcccaaatcggtgtaccttgggcgaattgtttgacaaatggcaactgacttctttagaattttgcagttaacagtagtatgtactcaaattggggggaaaaaaaccctacatgtttcttgtaaaggcgtctgacagtcctgagaattattgatggtaaggaataaaaaatgtacagatgactcagtgaagaaactgaggcttctcttatgaaacaaacattgataaacgtaactactaaatgtttatgcctctgtaaaccaaatttcttttctagataaaaatatgtattactacctgcaaattttcttctggctgttttagtagtattttttttacagaactaaatatagagtttgtatgattag

SEQ ID NO: 395311 - DNA, 754 bp, Homo sapiens
cccaagttagcaacgagggattgcaaagcgtaaaggggagtggggggggcctgaggtgctataccaaatactacattcaccgaattccaagaagccgggaggttcagcagtcctggccctccaccgttttcaccaccttgcactccatgtggctctcctttcccctaattcacagggtgaagccagatttggtgttgtgtaacggaccaggaacatgtgttcctatctgtgtatctgcccttctccttgggatactaggaataaagaaagtgatcattgtctacgttgaaagcatctgccgtgtagaaacgttatccatgtccggaaagattctgtttcatctctcagattacttcattgttcagtggccggctctgaaagaaaagtatcccaaatcggtgtaccttgggcgaattgtttgacaaatggcaactgacttctttagaattttgcagttaacagtagtatgtactcaaattggggggaaaaaaaccctacatgtttcttgtaaaggcgtctgacagtcctgagaattattgatggtaaggaataaaaaatgtacagatgactcagtgaagaaactgaggcttctcttatgaaacaaacattgataaacgtaactactaaatgtttatgcctctgtaaaccaaatttcttttctagataaaaatatgtattactacctgcaaattttcttctggctgttttagtagtattttttttacagaactaaatatagagtttgtatgattag

SEQ ID NO: 395312 - DNA, 1133 bp, Homo sapiens
gactagtctagtgcgaggctggtgtcaatcggccgagggaagttggacgcatgcgccgtttctctgcatggtgtgcgttctcgttctagctgcggccgcaggagctgtggcggttttcctaatcctgcgaatatgggtagtgcttcgttccatggacgttacgccccgggagtctctcagtatcttggtagtggctgggtccggtgggcataccactgagatcctgaggctgcttgggagcttgtccaatgcctactcacctagacattatgtcattgctgacactgatgaaatgagtgccaataaaataaattcttttgaactagatcgagctgatagagaccctagtaacatgtataccaaatactacattcaccgaattccaagaagccgggaggttcagcagtcctggccctccaccgttttcaccaccttgcactccatgtggctctcctttcccctaattcacagggtgaagccagatttggtccacagagcagtcagagaagagcacacatgcctgtccgatgagtgctgactgagcaccaggaactgtgctagaagttagaagtgttgtgtaacggaccaggaacatgtgttcctatctgtgtatctgcccttctccttgggatactaggaataaagaaagtgatcattgtctacgttgaaagcatctgccgtgtagaaacgttatccatgtccggaaagattctgtttcatctctcagattacttcattgttcagtggccggctctgaaagaaaagtatcccaaatcggtgtaccttgggcgaattgtttgacaaatggcaactgacttctttagaattttgcagttaacagtagtatgtactcaaattggggggaaaaaaaccctacatgtttcttgtaaaggcgtctgacagtcctgagaattattgatggtaaggaataaaaaatgtacagatgactcagtgaagaaactgaggcttctcttatgaaacaaacattgataaacgtaactactaaatgtttatgcctctgtaaaccaaatttcttttctagataaaaatatgtattactacctgcaaattttcttctggctgttttagtagtattttttttacagaactaaatatagagtttgtatgattag

SEQ ID NO: 395313 - DNA, 618 bp, Homo sapiens
gtgatagttaggaaagtatttaatattatagaggaaaaacaaccggggctcttcggtgttgtgtaacggaccaggaacatgtgttcctatctgtgtatctgcccttctccttgggatactaggaataaagaaagtgatcattgtctacgttgaaagcatctgccgtgtagaaacgttatccatgtccggaaagattctgtttcatctctcagattacttcattgttcagtggccggctctgaaagaaaagtatcccaaatcggtgtaccttgggcgaattgtttgacaaatggcaactgacttctttagaattttgcagttaacagtagtatgtactcaaattggggggaaaaaaaccctacatgtttcttgtaaaggcgtctgacagtcctgagaattattgatggtaaggaataaaaaatgtacagatgactcagtgaagaaactgaggcttctcttatgaaacaaacattgataaacgtaactactaaatgtttatgcctctgtaaaccaaatttcttttctagataaaaatatgtattactacctgcaaattttcttctggctgttttagtagtattttttttacagaactaaatatagagtttgtatgattag

SEQ ID NO: 395314 - DNA, 609 bp, Homo sapiens
  misc_feature (38)..(38): n is a, c, g, or t
cgccaccccaccctccggccctacgccacccgcccganaagtttgagtgttgtgtaacggaccaggaacatgtgttcctatctgtgtatctgcccttctccttgggatactaggaataaagaaagtgatcattgtctacgttgaaagcatctgccgtgtagaaacgttatccatgtccggaaagattctgtttcatctctcagattacttcattgttcagtggccggctctgaaagaaaagtatcccaaatcggtgtaccttgggcgaattgtttgacaaatggcaactgacttctttagaattttgcagttaacagtagtatgtactcaaattggggggaaaaaaaccctacatgtttcttgtaaaggcgtctgacagtcctgagaattattgatggtaaggaataaaaaatgtacagatgactcagtgaagaaactgaggcttctcttatgaaacaaacattgataaacgtaactactaaatgtttatgcctctgtaaaccaaatttcttttctagataaaaatatgtattactacctgcaaattttcttctggctgttttagtagtattttttttacagaactaaatatagagtttgtatgattag

SEQ ID NO: 395315 - DNA, 648 bp, Homo sapiens
  misc_feature (67)..(67): n is a, c, g, or t
tttctttgttcagttcattccacagaacagaaacgaaagagtttagttgagtcggtaacttaacgtnaccttttactgcgtacacgtgttgtgtaacggaccaggaacatgtgttcctatctgtgtatctgcccttctccttgggatactaggaataaagaaagtgatcattgtctacgttgaaagcatctgccgtgtagaaacgttatccatgtccggaaagattctgtttcatctctcagattacttcattgttcagtggccggctctgaaagaaaagtatcccaaatcggtgtaccttgggcgaattgtttgacaaatggcaactgacttctttagaattttgcagttaacagtagtatgtactcaaattggggggaaaaaaaccctacatgtttcttgtaaaggcgtctgacagtcctgagaattattgatggtaaggaataaaaaatgtacagatgactcagtgaagaaactgaggcttctcttatgaaacaaacattgataaacgtaactactaaatgtttatgcctctgtaaaccaaatttcttttctagataaaaatatgtattactacctgcaaattttcttctggctgttttagtagtattttttttacagaactaaatatagagtttgtatgattag

SEQ ID NO: 395316 - DNA, 607 bp, Homo sapiens
tattttttcccacttttttttctgacacggcgaagccagcttcggtgttgtgtaacggaccaggaacatgtgttcctatctgtgtatctgcccttctccttgggatactaggaataaagaaagtgatcattgtctacgttgaaagcatctgccgtgtagaaacgttatccatgtccggaaagattctgtttcatctctcagattacttcattgttcagtggccggctctgaaagaaaagtatcccaaatcggtgtaccttgggcgaattgtttgacaaatggcaactgacttctttagaattttgcagttaacagtagtatgtactcaaattggggggaaaaaaaccctacatgtttcttgtaaaggcgtctgacagtcctgagaattattgatggtaaggaataaaaaatgtacagatgactcagtgaagaaactgaggcttctcttatgaaacaaacattgataaacgtaactactaaatgtttatgcctctgtaaaccaaatttcttttctagataaaaatatgtattactacctgcaaattttcttctggctgttttagtagtattttttttacagaactaaatatagagtttgtatgattag

SEQ ID NO: 395317 - DNA, 622 bp, Homo sapiens
  misc_feature (57)..(57): n is a, c, g, or t
gtatcacagatgtacctctccgacaacaccacgactcaagctgcaacttggttctgngagtgttgtgtaacggaccaggaacatgtgttcctatctgtgtatctgcccttctccttgggatactaggaataaagaaagtgatcattgtctacgttgaaagcatctgccgtgtagaaacgttatccatgtccggaaagattctgtttcatctctcagattacttcattgttcagtggccggctctgaaagaaaagtatcccaaatcggtgtaccttgggcgaattgtttgacaaatggcaactgacttctttagaattttgcagttaacagtagtatgtactcaaattggggggaaaaaaaccctacatgtttcttgtaaaggcgtctgacagtcctgagaattattgatggtaaggaataaaaaatgtacagatgactcagtgaagaaactgaggcttctcttatgaaacaaacattgataaacgtaactactaaatgtttatgcctctgtaaaccaaatttcttttctagataaaaatatgtattactacctgcaaattttcttctggctgttttagtagtattttttttacagaactaaatatagagtttgtatgattag

SEQ ID NO: 395318 - DNA, 620 bp, Homo sapiens
  misc_feature (24)..(24): n is a, c, g, or t
  misc_feature (30)..(30): n is a, c, g, or t
  misc_feature (44)..(44): n is a, c, g, or t
ttgatgttgagttaagaggaaaanaagaanttttcaaaaaaaanttgacaaactgaggtgttgtgtaacggaccaggaacatgtgttcctatctgtgtatctgcccttctccttgggatactaggaataaagaaagtgatcattgtctacgttgaaagcatctgccgtgtagaaacgttatccatgtccggaaagattctgtttcatctctcagattacttcattgttcagtggccggctctgaaagaaaagtatcccaaatcggtgtaccttgggcgaattgtttgacaaatggcaactgacttctttagaattttgcagttaacagtagtatgtactcaaattggggggaaaaaaaccctacatgtttcttgtaaaggcgtctgacagtcctgagaattattgatggtaaggaataaaaaatgtacagatgactcagtgaagaaactgaggcttctcttatgaaacaaacattgataaacgtaactactaaatgtttatgcctctgtaaaccaaatttcttttctagataaaaatatgtattactacctgcaaattttcttctggctgttttagtagtattttttttacagaactaaatatagagtttgtatgattag

SEQ ID NO: 395319 - DNA, 609 bp, Homo sapiens
gcactcggccttccccccccgcccccgccgaatgtacgtagctcgagtgttgtgtaacggaccaggaacatgtgttcctatctgtgtatctgcccttctccttgggatactaggaataaagaaagtgatcattgtctacgttgaaagcatctgccgtgtagaaacgttatccatgtccggaaagattctgtttcatctctcagattacttcattgttcagtggccggctctgaaagaaaagtatcccaaatcggtgtaccttgggcgaattgtttgacaaatggcaactgacttctttagaattttgcagttaacagtagtatgtactcaaattggggggaaaaaaaccctacatgtttcttgtaaaggcgtctgacagtcctgagaattattgatggtaaggaataaaaaatgtacagatgactcagtgaagaaactgaggcttctcttatgaaacaaacattgataaacgtaactactaaatgtttatgcctctgtaaaccaaatttcttttctagataaaaatatgtattactacctgcaaattttcttctggctgttttagtagtattttttttacagaactaaatatagagtttgtatgattag

SEQ ID NO: 395320 - DNA, 614 bp, Homo sapiens
tccccgccccacacaaacccccccccttaggggtactgtacggcccgtcacgtgttgtgtaacggaccaggaacatgtgttcctatctgtgtatctgcccttctccttgggatactaggaataaagaaagtgatcattgtctacgttgaaagcatctgccgtgtagaaacgttatccatgtccggaaagattctgtttcatctctcagattacttcattgttcagtggccggctctgaaagaaaagtatcccaaatcggtgtaccttgggcgaattgtttgacaaatggcaactgacttctttagaattttgcagttaacagtagtatgtactcaaattggggggaaaaaaaccctacatgtttcttgtaaaggcgtctgacagtcctgagaattattgatggtaaggaataaaaaatgtacagatgactcagtgaagaaactgaggcttctcttatgaaacaaacattgataaacgtaactactaaatgtttatgcctctgtaaaccaaatttcttttctagataaaaatatgtattactacctgcaaattttcttctggctgttttagtagtattttttttacagaactaaatatagagtttgtatgattag

SEQ ID NO: 395321 - DNA, 604 bp, Homo sapiens
tttctccatccccctcctccccacaaaacgtaaccacgctagtgttgtgtaacggaccaggaacatgtgttcctatctgtgtatctgcccttctccttgggatactaggaataaagaaagtgatcattgtctacgttgaaagcatctgccgtgtagaaacgttatccatgtccggaaagattctgtttcatctctcagattacttcattgttcagtggccggctctgaaagaaaagtatcccaaatcggtgtaccttgggcgaattgtttgacaaatggcaactgacttctttagaattttgcagttaacagtagtatgtactcaaattggggggaaaaaaaccctacatgtttcttgtaaaggcgtctgacagtcctgagaattattgatggtaaggaataaaaaatgtacagatgactcagtgaagaaactgaggcttctcttatgaaacaaacattgataaacgtaactactaaatgtttatgcctctgtaaaccaaatttcttttctagataaaaatatgtattactacctgcaaattttcttctggctgttttagtagtattttttttacagaactaaatatagagtttgtatgattag

SEQ ID NO: 395322 - DNA, 617 bp, Homo sapiens
  misc_feature (35)..(35): n is a, c, g, or t
  misc_feature (38)..(38): n is a, c, g, or t
  misc_feature (40)..(40): n is a, c, g, or t
atatgaatagatgacgagaagaaggattaaaaaanacnanttttgaaaaacaaggtgttgtgtaacggaccaggaacatgtgttcctatctgtgtatctgcccttctccttgggatactaggaataaagaaagtgatcattgtctacgttgaaagcatctgccgtgtagaaacgttatccatgtccggaaagattctgtttcatctctcagattacttcattgttcagtggccggctctgaaagaaaagtatcccaaatcggtgtaccttgggcgaattgtttgacaaatggcaactgacttctttagaattttgcagttaacagtagtatgtactcaaattggggggaaaaaaaccctacatgtttcttgtaaaggcgtctgacagtcctgagaattattgatggtaaggaataaaaaatgtacagatgactcagtgaagaaactgaggcttctcttatgaaacaaacattgataaacgtaactactaaatgtttatgcctctgtaaaccaaatttcttttctagataaaaatatgtattactacctgcaaattttcttctggctgttttagtagtattttttttacagaactaaatatagagtttgtatgattag

SEQ ID NO: 395323 - DNA, 596 bp, Homo sapiens
tcaccgcccctataaccaacaccacacacttaggtgttgtgtaacggaccaggaacatgtgttcctatctgtgtatctgcccttctccttgggatactaggaataaagaaagtgatcattgtctacgttgaaagcatctgccgtgtagaaacgttatccatgtccggaaagattctgtttcatctctcagattacttcattgttcagtggccggctctgaaagaaaagtatcccaaatcggtgtaccttgggcgaattgtttgacaaatggcaactgacttctttagaattttgcagttaacagtagtatgtactcaaattggggggaaaaaaaccctacatgtttcttgtaaaggcgtctgacagtcctgagaattattgatggtaaggaataaaaaatgtacagatgactcagtgaagaaactgaggcttctcttatgaaacaaacattgataaacgtaactactaaatgtttatgcctctgtaaaccaaatttcttttctagataaaaatatgtattactacctgcaaattttcttctggctgttttagtagtattttttttacagaactaaatatagagtttgtatgattag

SEQ ID NO: 395324 - DNA, 1092 bp, Homo sapiens
gactagtctagtgcgaggctggtgtcaatcggccgagggaagttggacgcatgcgccgtttctctgcatggtgtgcgttctcgttctagctgcggccgcaggagctgtggcggttttcctaatcctgcgaatatgggtagtgcttcgttccatggacgttacgccccgggagtctctcagtatcttggtagtggctgggtccggtgggcataccactgagatcctgaggctgcttgggagcttgtccaatgcctactcacctagacattatgtcattgctgacactgatgaaatgagtgccaataaaataaattcttttgaactagatcgagctgatagagaccctagtaacatgtataccaaatactacattcaccgaattccaagaagccgggaggttcagcagtcctggccctccaccgttttcaccaccttgcactccatgtggctctcctttcccctaattcacagggtgaagccagatttggtccacagagcagtcagagaagagcacacatgcctgtccgatgagtgctgactgagcaccaggaactgtgctagaagttagaagttaagtgatttgccctgagtcacacagttggtgttgtgtaacggaccaggaacatgtgttcctatctgtgtatctgcccttctccttgggatactaggaataaagaaagtgatcattgtctacgttgaaagcatctgccgtgtagaaacgttatccatgtccggaaagattctgtttcatctctcagattacttcattgttcagtggccggctctgaaagaaaagtatcccaaatcggtgtaccttgggcgaattgtttgacaaatggcaactgacttctttagaattttgcagttaacagtagtatgtactcaaattggggggaaaaaaaccctacatgtttcttgtaaaggcgtctgacagtcctgagaattattgatggtaaggaataaaaaatgtacagatgactcagtgaagaaactgaggcttctcttatgaaacaaacattgataaacgtaactactaaatgtttatgcctctgtaaaccaaatttcttttctagataaaaatatgtattacta

SEQ ID NO: 395325 - DNA, 536 bp, Homo sapiens
gactagtctagtgcgaggctggtgtcaatcggccgagggaagttggacgcatgcgccgtttctctgcatggtgtgcgttctcgttctagctgcggccgcaggagctgtggcggttttcctaatcctgcgaatatgggtagtgcttcgttccatggacgttacgccccgggagtctctcagtatcttggtagtggctgggtccggtgggcataccactgagatcctgaggctgcttgggagcttgtccaatgcctactcacctagacattatgtcattgctgacactgatgaaatgagtgccaataaaataaattcttttgaactagatcgagctgatagagaccctagtaacatgagacggggtctcactgtctgcccaggctggggtgcagtggtgcaatcatagctcactgcatctttgaattcctgggctcaagcagtcctgcctcagcctcccaagtaactggaactacagacttttcagtcgtgtggcattcactaaataataaaggtattgtatgtttcagtgtgtggta

SEQ ID NO: 395326 - DNA, 920 bp, Homo sapiens
gactagtctagtgcgaggctggtgtcaatcggccgagggaagttggacgcatgcgccgtttctctgcatggtgtgcgttctcgttctagctgcggccgcaggagctgtggcggttttcctaatcctgcgaatatgggtagtgcttcgttccatggacgttacgccccgggagtctctcagtatcttggtagtggctgggtccggtgggcataccactgagatcctgaggctgcttgggagcttgtccaatgcctactcacctagacattatgtcattgctgacactgatgaaatgagtgccaataaaataaattcttttgaactagatcgagctgatagagaccctagtaacatgtataccaaatactacattcaccgaattccaagaagccgggaggttcagcagtcctggccctccaccgttttcaccaccttgcactccatgtggctctcctttcccctaattcacagggtgaagccagatttggtgttgtgtaacggaccaggaacatgtgttcctatctgtgtatctgcccttctccttgggatactaggaataaagaaagtgatcattgtctacgttgaaagcatctgccgtgtagaaacgttatccatgtccggaaagattctgtttcatctctcagattacttcattgttcagtggccggctctgaaagaaaagtatcccaaatcggtgtaccttgggcgaattgtttgacaaatggcaactgacttctttagaattttgcagttaacagtagtatgtactcaaattggggggaaaaaaaccctacatgtttcttgtaaaggcgtctgacagtcctgagaattattgatggtaaggaataaaaaatgtacagatgactcagtgaagaaactgaggcttctcttatgaaacaaacattgataaacgtaactac

SEQ ID NO: 395327 - DNA, 682 bp, Homo sapiens
cccaagttagcaacgagggattgcaaagcgtaaaggggagtggggggggcctgaggtgctataccaaatactacattcaccgaattccaagaagccgggaggttcagcagtcctggccctccaccgttttcaccaccttgcactccatgtggctctcctttcccctaattcacagggtgaagccagatttggtgttgtgtaacggaccaggaacatgtgttcctatctgtgtatctgcccttctccttgggatactaggaataaagaaagtgatcattgtctacgttgaaagcatctgccgtgtagaaacgttatccatgtccggaaagattctgtttcatctctcagattacttcattgttcagtggccggctctgaaagaaaagtatcccaaatcggtgtaccttgggcgaattgtttgacaaatggcaactgacttctttagaattttgcagttaacagtagtatgtactcaaattggggggaaaaaaaccctacatgtttcttgtaaaggcgtctgacagtcctgagaattattgatggtaaggaataaaaaatgtacagatgactcagtgaagaaactgaggcttctcttatgaaacaaacattgataaacgtaactactaaatgtttatgcctctgtaaaccaaatttcttttctagataaaaatatgtattacta

SEQ ID NO: 395328 - DNA, 531 bp, Homo sapiens
  misc_feature (25)..(25): n is a, c, g, or t
ttctttcccccccaccaacaccacnccacaccttcttaaggtgttgtgtaacggaccaggaacatgtgttcctatctgtgtatctgcccttctccttgggatactaggaataaagaaagtgatcattgtctacgttgaaagcatctgccgtgtagaaacgttatccatgtccggaaagattctgtttcatctctcagattacttcattgttcagtggccggctctgaaagaaaagtatcccaaatcggtgtaccttgggcgaattgtttgacaaatggcaactgacttctttagaattttgcagttaacagtagtatgtactcaaattggggggaaaaaaaccctacatgtttcttgtaaaggcgtctgacagtcctgagaattattgatggtaaggaataaaaaatgtacagatgactcagtgaagaaactgaggcttctcttatgaaacaaacattgataaacgtaactactaaatgtttatgcctctgtaaaccaaatttcttttctagataaaaatatgtattacta

SEQ ID NO: 395329 - DNA, 555 bp, Homo sapiens
  misc_feature (37)..(37): n is a, c, g, or t
  misc_feature (46)..(46): n is a, c, g, or t
  misc_feature (49)..(49): n is a, c, g, or t
gggcgcgccccctgggcgagggttggtttttgaaagncgctccgtntgnttagccaagttccgggtgttgtgtaacggaccaggaacatgtgttcctatctgtgtatctgcccttctccttgggatactaggaataaagaaagtgatcattgtctacgttgaaagcatctgccgtgtagaaacgttatccatgtccggaaagattctgtttcatctctcagattacttcattgttcagtggccggctctgaaagaaaagtatcccaaatcggtgtaccttgggcgaattgtttgacaaatggcaactgacttctttagaattttgcagttaacagtagtatgtactcaaattggggggaaaaaaaccctacatgtttcttgtaaaggcgtctgacagtcctgagaattattgatggtaaggaataaaaaatgtacagatgactcagtgaagaaactgaggcttctcttatgaaacaaacattgataaacgtaactactaaatgtttatgcctctgtaaaccaaatttcttttctagataaaaatatgtattacta

SEQ ID NO: 395330 - DNA, 549 bp, Homo sapiens
tttcggcgtccattatcacattcatacgcaagcgagaggagggcttattgttacgaacgtgttgtgtaacggaccaggaacatgtgttcctatctgtgtatctgcccttctccttgggatactaggaataaagaaagtgatcattgtctacgttgaaagcatctgccgtgtagaaacgttatccatgtccggaaagattctgtttcatctctcagattacttcattgttcagtggccggctctgaaagaaaagtatcccaaatcggtgtaccttgggcgaattgtttgacaaatggcaactgacttctttagaattttgcagttaacagtagtatgtactcaaattggggggaaaaaaaccctacatgtttcttgtaaaggcgtctgacagtcctgagaattattgatggtaaggaataaaaaatgtacagatgactcagtgaagaaactgaggcttctcttatgaaacaaacattgataaacgtaactactaaatgtttatgcctctgtaaaccaaatttcttttctagataaaaatatgtattacta

SEQ ID NO: 395331 - DNA, 541 bp, Homo sapiens
  misc_feature (24)..(26): n is a, c, g, or t
  misc_feature (39)..(39): n is a, c, g, or t
tggggagagagttgagtctaggannngcactgggtggtngttgccgtactgtgttgtgtaacggaccaggaacatgtgttcctatctgtgtatctgcccttctccttgggatactaggaataaagaaagtgatcattgtctacgttgaaagcatctgccgtgtagaaacgttatccatgtccggaaagattctgtttcatctctcagattacttcattgttcagtggccggctctgaaagaaaagtatcccaaatcggtgtaccttgggcgaattgtttgacaaatggcaactgacttctttagaattttgcagttaacagtagtatgtactcaaattggggggaaaaaaaccctacatgtttcttgtaaaggcgtctgacagtcctgagaattattgatggtaaggaataaaaaatgtacagatgactcagtgaagaaactgaggcttctcttatgaaacaaacattgataaacgtaactactaaatgtttatgcctctgtaaaccaaatttcttttctagataaaaatatgtattacta

SEQ ID NO: 395332 - DNA, 776 bp, Homo sapiens
accatccaagaattcctctgcctactcgcctaaatattaaaaatacttcggtgttgtgtaacggaccaggaacatgtgttcctatctgtgtatctgcccttctccttgggatactaggaataaagaaagtgatcattgtctacgttgaaagcatctgccgtgtagaaacgttatccatgtccggaaagattctgtttcatctctcagattacttcattgttcagtggccggctctgaaagaaaagtatcccaaatcggtgtaccttgggcgaattgtttgacaaatggcaactgacttctttagaattttgcagttaacagtagtatgtactcaaattggggggaaaaaaaccctacatgtttcttgtaaaggcgtctgacagtcctgagaattattgatggtaaggaataaaaaatgtacagatgactcagtgaagaaactgaggcttctcttatgaaacaaacattgataaacgtaactactaaatgtttatgcctctgtaaaccaaatttcttttctagataaaaatatgtattactaaaaaaaaaaaaatggcctcgttggcctcaaggggaaccttgcgccgtttccttaaggaggttaattatatcccccttactgctcctgccttgtcttcggctgcgaaagcgtctacctacttaaggcggatacggtatcccacatcgggttccccggaagatctgtgccatcgcccccaaggccgaaccgaaaggccgggtgtgggtttcaaagcccaccccctataacaaaaaat

SEQ ID NO: 395333 - DNA, 1213 bp, Homo sapiens
gactagtctagtgcgaggctggtgtcaatcggccgagggaagttggacgcatgcgccgtttctctgcatggtgtgcgttctcgttctagctgcggccgcaggagctgtggcggttttcctaatcctgcgaatatgggtagtgcttcgttccatggacgttacgccccgggagtctctcagtatcttggtagtggctgggtccggtgggcataccactgagatcctgaggctgcttgggagcttgtccaatgcctactcacctagacattatgtcattgctgacactgatgaaatgagtgccaataaaataaattcttttgaactagatcgagctgatagagaccctagtaacatgtataccaaatactacattcaccgaattccaagaagccgggaggttcagcagtcctggccctccaccgttttcaccaccttgcactccatgtggctctcctttcccctaattcacagggtgaagccagatttggtgttgtgtaacggaccaggaacatgtgttcctatctgtgtatctgcccttctccttgggatactaggaataaagaaagtgatcattgtctacgttgaaagcatctgccgtgtagaaacgttatccatgtccggaaagattctgtttcatctctcagattacttcattgttcagtggccggctctgaaagaaaagtatcccaaatcggtgtaccttgggcgaattgtttgacaaatggcaactgacttctttagaattttgcagttaacagtagtatgtactcaaattggggggaaaaaaaccctacatgtttcttgtaaaggcgtctgacagtcctgagaattattgatggtaaggaataaaaaatgtacagatgactcagtgaagaaactgaggcttctcttatgaaacaaacattgataaacgtaactactaaatgtttatgcctctgtaaaccaaatttcttttctagataaaaatatgtattactaaaaaaaaaaaaatggcctcgttggcctcaaggggaaccttgcgccgtttccttaaggaggttaattatatcccccttactgctcctgccttgtcttcggctgcgaaagcgtctacctacttaaggcggatacggtatcccacatcgggttccccggaagatctgtgccatcgcccccaaggccgaaccgaaaggccgggtgtgggtttcaaagcccaccccctataacaaaaaat

SEQ ID NO: 395334 - DNA, 1170 bp, Homo sapiens
gactagtctagtgcgaggctggtgtcaatcggccgagggaagttggacgcatgcgccgtttctctgcatggtgtgcgttctcgttctagctgcggccgcaggagctgtggcggttttcctaatcctgcgaatatgggtagtgcttcgttccatggacgttacgccccgggagtctctcagtatcttggtagtggctgggtccggtgggcataccactgagatcctgaggctgcttgggagcttgtccaatgcctactcacctagacattatgtcattgctgacactgatgaaatgagtgccaataaaataaattcttttgaactagatcgagctgatagagaccctagtaacatgagacggggtctcactgtctgcccaggctggggtgcagtggtgcaatcatagctcactgcatctttgaattcctgggctcaagcagtcctgcctcagcctcccaagtaactggaactacagtataccaaatactacattcaccgaattccaagaagccgggaggttcagcagtcctggccctccaccgttttcaccaccttgcactccatgtggctctcctttcccctaattcacagggtgaagccagatttggtgttgtgtaacggaccaggaacatgtgttcctatctgtgtatctgcccttctccttgggatactaggaataaagaaagtgatcattgtctacgttgaaagcatctgccgtgtagaaacgttatccatgtccggaaagattctgtttcatctctcagattacttcattgttcagtggccggctctgaaagaaaagtatcccaaatcggtgtaccttgggcgaattgtttgacaaatggcaactgacttctttagaattttgcagttaacagtagtatgtactcaaattggggggaaaaaaaccctacatgtttcttgtaaaggcgtctgacagtcctgagaattattgatggtaaggaataaaaaatgtacagatgactcagtgaagaaactgaggcttctcttatgaaacaaacattgataaacgtaactactaaatgtttatgcctctgtaaaccaaatttcttttctagataaaaatatgtattactacctgcaaattttcttctggctgttttagtagtattttttttacagaactaaatatagagtttgtatgattag

SEQ ID NO: 395335 - DNA, 753 bp, Homo sapiens
  misc_feature (47)..(47): n is a, c, g, or t
  misc_feature (54)..(54): n is a, c, g, or t
aacacttaatataaatatctttcaaatctttaaagaaaaaagaaggngcttcgntgactataccaaatactacattcaccgaattccaagaagccgggaggttcagcagtcctggccctccaccgttttcaccaccttgcactccatgtggctctcctttcccctaattcacagggtgaagccagatttggtgttgtgtaacggaccaggaacatgtgttcctatctgtgtatctgcccttctccttgggatactaggaataaagaaagtgatcattgtctacgttgaaagcatctgccgtgtagaaacgttatccatgtccggaaagattctgtttcatctctcagattacttcattgttcagtggccggctctgaaagaaaagtatcccaaatcggtgtaccttgggcgaattgtttgacaaatggcaactgacttctttagaattttgcagttaacagtagtatgtactcaaattggggggaaaaaaaccctacatgtttcttgtaaaggcgtctgacagtcctgagaattattgatggtaaggaataaaaaatgtacagatgactcagtgaagaaactgaggcttctcttatgaaacaaacattgataaacgtaactactaaatgtttatgcctctgtaaaccaaatttcttttctagataaaaatatgtattactacctgcaaattttcttctggctgttttagtagtattttttttacagaactaaatatagagtttgtatgattag

SEQ ID NO: 395336 - DNA, 1164 bp, Homo sapiens
gactagtctagtgcgaggctggtgtcaatcggccgagggaagttggacgcatgcgccgtttctctgcatggtgtgcgttctcgttctagctgcggccgcaggagctgtggcggttttcctaatcctgcgaatatgggtagtgcttcgttccatggacgttacgccccgggagtctctcagtatcttggtagtggctgggtccggtgggcataccactgagatcctgaggctgcttgggagcttgtccaatgcctactcacctagacattatgtcattgctgacactgatgaaatgagtgccaataaaataaattcttttgaactagatcgagctgatagagaccctagtaacatgtataccaaatactacattcaccgaattccaagaagccgggaggttcagcagtcctggccctccaccgttttcaccaccttgcactccatgtggctctcctttcccctaattcacagggtgaagccagatttggtccacagagcagtcagagaagagcacacatgcctgtccgatgagtgctgactgagcaccaggaactgtgctagaagttagaagttaagtgatttgccctgagtcacacagttggtgttgtgtaacggaccaggaacatgtgttcctatctgtgtatctgcccttctccttgggatactaggaataaagaaagtgatcattgtctacgttgaaagcatctgccgtgtagaaacgttatccatgtccggaaagattctgtttcatctctcagattacttcattgttcagtggccggctctgaaagaaaagtatcccaaatcggtgtaccttgggcgaattgtttgacaaatggcaactgacttctttagaattttgcagttaacagtagtatgtactcaaattggggggaaaaaaaccctacatgtttcttgtaaaggcgtctgacagtcctgagaattattgatggtaaggaataaaaaatgtacagatgactcagtgaagaaactgaggcttctcttatgaaacaaacattgataaacgtaactactaaatgtttatgcctctgtaaaccaaatttcttttctagataaaaatatgtattactacctgcaaattttcttctggctgttttagtagtattttttttacagaactaaatatagagtttgtatgattag

SEQ ID NO: 395337 - DNA, 617 bp, Homo sapiens
tacccaaccccgggggaagagaaacctcctgatgggtacccgtaacggactattgtgttgtgtaacggaccaggaacatgtgttcctatctgtgtatctgcccttctccttgggatactaggaataaagaaagtgatcattgtctacgttgaaagcatctgccgtgtagaaacgttatccatgtccggaaagattctgtttcatctctcagattacttcattgttcagtggccggctctgaaagaaaagtatcccaaatcggtgtaccttgggcgaattgtttgacaaatggcaactgacttctttagaattttgcagttaacagtagtatgtactcaaattggggggaaaaaaaccctacatgtttcttgtaaaggcgtctgacagtcctgagaattattgatggtaaggaataaaaaatgtacagatgactcagtgaagaaactgaggcttctcttatgaaacaaacattgataaacgtaactactaaatgtttatgcctctgtaaaccaaatttcttttctagataaaaatatgtattactacctgcaaattttcttctggctgttttagtagtattttttttacagaactaaatatagagtttgtatgattag

SEQ ID NO: 395338 - DNA, 636 bp, Homo sapiens
tgggtgtgcgcctgatttcgtacaccgaggcacgggccagacgagcctgaggggttacagtaacggacccttggtgttgtgtaacggaccaggaacatgtgttcctatctgtgtatctgcccttctccttgggatactaggaataaagaaagtgatcattgtctacgttgaaagcatctgccgtgtagaaacgttatccatgtccggaaagattctgtttcatctctcagattacttcattgttcagtggccggctctgaaagaaaagtatcccaaatcggtgtaccttgggcgaattgtttgacaaatggcaactgacttctttagaattttgcagttaacagtagtatgtactcaaattggggggaaaaaaaccctacatgtttcttgtaaaggcgtctgacagtcctgagaattattgatggtaaggaataaaaaatgtacagatgactcagtgaagaaactgaggcttctcttatgaaacaaacattgataaacgtaactactaaatgtttatgcctctgtaaaccaaatttcttttctagataaaaatatgtattactacctgcaaattttcttctggctgttttagtagtattttttttacagaactaaatatagagtttgtatgattag

SEQ ID NO: 395339 - DNA, 607 bp, Homo sapiens
gttttcttccttcatccattcatctctatccgttgttatgcctagtgttgtgtaacggaccaggaacatgtgttcctatctgtgtatctgcccttctccttgggatactaggaataaagaaagtgatcattgtctacgttgaaagcatctgccgtgtagaaacgttatccatgtccggaaagattctgtttcatctctcagattacttcattgttcagtggccggctctgaaagaaaagtatcccaaatcggtgtaccttgggcgaattgtttgacaaatggcaactgacttctttagaattttgcagttaacagtagtatgtactcaaattggggggaaaaaaaccctacatgtttcttgtaaaggcgtctgacagtcctgagaattattgatggtaaggaataaaaaatgtacagatgactcagtgaagaaactgaggcttctcttatgaaacaaacattgataaacgtaactactaaatgtttatgcctctgtaaaccaaatttcttttctagataaaaatatgtattactacctgcaaattttcttctggctgttttagtagtattttttttacagaactaaatatagagtttgtatgattag

SEQ ID NO: 395340 - DNA, 690 bp, Homo sapiens
ggagccttagggagggggcaagaagcaggtcatcaagagcagagaagaccaatgacagaggtggccggggctggaagaagcagaatgcatcgcggatggacagaagatgacttttaagtttcttgtgaaattgacatttctgcaggatggacagcgaacaacactttcatccatattatttttctttgatctctcaagcagctctgggaagcaggcactaccatctttgttttatagatggggaatctgagtcatcatgagcaaatatgctttcctgaggacacacagtcactaactagatcaatctccaactttggattccaaattgcatggtcttcccctgtgtctttcactgtcttgcagctcctctctgccccagttttaagctaattacatgaatgacagagtaactaatttcttctttcattccaacgtttaggtgctgtttatatataaaaatctctgtatcgtgggaattactacatcagtaaaactttcatacttcttcttaaaatacagatacaatacaggacaggcatcctctgaggacttgtccactctgatcgtctctgcatgatttttattgttcttattacctctgttttttaagttctccccaactgtgaaggaaatgcgatgcccggggaacacagattactcgggcaaaacccgattccggctggcatactg

SEQ ID NO: 395341 - DNA, 519 bp, Homo sapiens
ctggccgcctctagaggttcccctctccctacaatatctattctcttctgtatcttcagcaacctccggcccagcccacacataaacccactcagcctaagctctcagtcgattccctgggaagccatcctcagctacccagactaagtgaggttgtgggtcgcatccatccagggtgctgcacttctcccctagtaactcattgctccatgtctatctgccagcactggatgctccttgagggcaggacggtgcctgtcttccagacctctgtgtcctgtccctagcacagtgattggcccagagtaatcccaagttcatgttgctgaatggctcagatgtgtaaatgaatgagattcagaagcaacccacacagagtgggctccagggctaaaggtgagatcacgccactgaactccagcctgggcaatggagtgagactccgtctcaaaaacaaaacagaaaccactagtagaatatgtaccatgcttgtaggatacagtagggagagggtaccga

SEQ ID NO: 395342 - DNA, 438 bp, Homo sapiens
ctggccgcctctagaggttcccctctccctacaatatctattctcttctgtatcttcagcaacctccggcccagcccacacataaacccactcagcctaagctctcagtcgattccctgggaagccatcctcagctacccagactaagtgaggttgtgggtcgcatccatccagggtgctgcacttctcccctagtaactcattgctccatgtctatctgccagcactggatgctccttgagggcaggacggtgcctgtcttccagacctctgtgtcctgtccctagcacagtgattggcccagagtaatcccaagttcatgttgctgaatggctcagatgtgtaaatgaatgagattcagaagcaacccacacagagtgggctccagggctaaaggtgagatcacccagtgtgccttctatgacaggttgagagccg

SEQ ID NO: 395343 - DNA, 365 bp, Homo sapiens
aagtgaagggaacacctcccaattcattgcatagggccagcataaccctgatactcaactcttgcaaaggaaaactgtagacccatattcatcatgaatatacatttcaaaaaatcccatcataataattaacaaactgaatcagcagtatataaaaaacttaattgggtttatcctgagaacataaggcttatttaactttttaaaatcaatcaatgtaattagctatagtaacagactaaagaaaagccatatgattaatatactggagaaaaaaaacatttaactggatttaacattgattcccaataaaaactcacagcagactatccacagaaagaacttcctcattctaataacggtac

SEQ ID NO: 395344 - DNA, 401 bp, Homo sapiens
caacatggcgaaaccccgtctctgaaaaaaataaaaaattagccaggtgtggtggcatgggcctgtagtcccagctacttgggaagctgaggcaggaggatcccttgagctcaggaggtagaggctacagtgagccatgatcacgccattatactccagccagggcgacagagtgagaccctatctcaacaacaacaacaacaaaacaacagtatttacatattatttagtaggcacgcagccaactcccacggcctggccagttttaaaggaatggatcccatttttgaaagcagcaagatcaccaagcagatgtttgccatgggttgaagagggcatcaaagcaagcagctctgaaccatttctcaaaaagctatctaagcagctgtaagactcccgtg

SEQ ID NO: 395345 - DNA, 231 bp, Homo sapiens
gcatgatccaatgtagagttatatctgtgttttcctctaagagttttatagtttaaacccttacatttaggtctttgattctaagtgtatggtttgaggtaggggtccagttttattcttttgcatgtggctatccattttccccagcaccatttaatgaaaagactatttttccatgtcagactgtcttggcaccttgtcagaaatcaattaaccttaactgtgaatgtc

SEQ ID NO: 395346 - DNA, 469 bp, Homo sapiens
agtgctacctccacaaacagtaacaacaaattccgcgacaaccagatcagtacggccaagtacagcgtgttgacatttctacctcgattcttgtatgagcagattagaagagctgctaatgccttctttctcttcattgccttattacagcaaattccagatgtatctccaacaggaagatataccaccctggtgccattgatcattattttaacaattgcaggcatcaaagagattgtagaagattttaagcgacacaaggcagacaatgcagttaacaaaaagaaaacaatagtgttaagaaatggtatgtggcataccattatgtggaaagaggtggcagtgggagacattgtgaaggtcgtcaatgggcagtatcttccagcagatgtggtcctgctgtcatccagtgaacctcagcagtgtgttatgttgaaacagctaatctgtttgtggagtaaactgtacc

SEQ ID NO: 395347 - DNA, 423 bp, Homo sapiens
cacacacacacacccgacaaccatggcttcagtacttctttcagggaactatagaaatgtccagatctttaacaattaatgaccaaattggaggcaagagtgtaactgggtagtcgtaatctattttaactgaaatgtaataaaattggtctcctgatacattctcaccctcctgaaatcatctagacctgaacgtccagagtcagctggacttacgacattatgcctaattgaaatatggtgttcctgaaataggtctaatgacaaattccagcgttcgattagtaaaaaataccaatggttcatctttaccaaagaccacacgtactgaccagggtacagcagccatctctgcattgtctcccctggaggcagcagaggagcctcgactgtagtctgtctgcacacattcttcttctgcct

SEQ ID NO: 395348 - DNA, 175 bp, Homo sapiens
ttgtatcagaggacatcataaaaagaataaaaatatgatggctcttattttcaaatttgactagtcttaactggacagacaggatatatgtatgaaataacaaggagacagctatgcaattgttcattagaaacttcttgttggatccatcaacgctaatatgcctgaagcctgt

SEQ ID NO: 395349 - DNA, 362 bp, Homo sapiens
ttatatatatatatatttgtgtgtgtgtatatatatatatatatatacatttctttgtctatttatagaacaggttaagtgacttgtccaaagtaacacagctaaaaagtgacagcaggggttcaaacccattctctttaactccacaaatgagtatggttctccaattcatgcttccttcagctaacagagtgttcaaaaatgcagattgtaaaggccaagtgaggtggcttatgcctgtaatttcagcactttggggagccagagtgtgaagatggctggtcttgaactcctggcctcaagcgatcctcccaacttggcctcgcaaagtgctgggactacaggtgtgagccactgtgcgc

SEQ ID NO: 395350 - DNA, 988 bp, Homo sapiens
actaaggggtgcccaggaagtgccaggaatgtgaacatcagctccaaatcagcaagagcctccaacccctcggccctgcccacagagagacagggcttaggagagacagggcctgcccagtctcagccggtcagtagcagagtctcgctgagaacccgggtggagctttggctgcccggctggccagccacgggccccaggccaggcctcttgggggccttccaaaaagtttgacactcaggaaaacactgtctccagaatacgaaaagaagacggcacaatcaaaatgcatggagatgtaattaaatgtttatataaccaaacataatgtcagcgttatttttaaatttaaaatcagataattctatttgtgaacaattggtggggtagattttttttctcactttaaaaggttttcccagcatgcagaagacccccagacaactcagacaactataagttaaatgaatttcctatggcccaaaatgtccaaaagcaaaagaggaaattttcctttcaaacacttttacaagagaaaaacaagtttatgaaagaggccgtggctgcagattcaaggcacttgctgtggtgtctgggggtggcctttaaaattcggagggccaggacctctgaagctggacaggccctgcctggccctgctgctgttccgggaccccctttcttccctgaggcctggggtagaagagcaggtcctcctctcgtgaatggtaggggtgctgctatctgggaaggcttcctggaggaggtgggtctatggggcctgggagcacctccaggactctggggcatgggggtagtgtgggcgggcactttgaggcctgcctgcctcccctgagctcccactgcagagtccagagggtgggaagagcagtggctgggtgctggtggagggaggcatcagtgcacagatgccataaagctgcctccccagggttctgccagctccccgcctagccctggtggtaca

SEQ ID NO: 395351 - DNA, 220 bp, Homo sapiens
gcacgcagtttgatgtgttttgacaaacgtacaggcccctgtaaccatgaccacaatcaggatacagaacgtttccaccacccccaaaagttcccgggccctttgcattcaatctccccatcccaccctcactggccccaggcaaccacagatctgctttctgtcactgtagattaggtttgcctgttgtaggattttatttaagtggtgtcatacatca

SEQ ID NO: 395352 - DNA, 298 bp, Homo sapiens
gggggtgtttattcaaattgggtttttaatacagcatttatgcttacagagatataaaaaatacagacattaagactctcaagtagcactgaccaatagttttatattgcttgccagataggtacttttacattttctggtattaaagaagtaaaaagaaatagatgaaattaattttaatgtacatttgcttaagccagtataaccaaatattaccatttcaataggtgatcaataccaaaaaaagtattaatgagatactttacattcttttttatcttcagtattctaaatcttg

SEQ ID NO: 395353 - DNA, 518 bp, Homo sapiens
gttgttgttgttgtttgtttgttttgagatggagtctcactctgttgaccaggctggagtgcagtggcacgattatggctcactgcaacctctgcctcctgcgttcaagcaattctcctgtctcagcctccagagtagctgggattacaggcatgcaccaccatacctgactaatttttgtatttttagtacagacagggtttcaccatgttggccaggctggtgttgaactcctgacctcaagtgatccaactgccttggcctcccaaagtgctgacattacaggtgtaagccactgcgcccagcccctcagcttctgtttctaaccaccaccaacgcctctctgctctaccattaaagtacattgcaaacccagccacttctttccaaggccaccatcctaagtcaggttcccatcattttctacaaaaataattatagctgattatagtgggttgcatggcgttctccaaaaagatatgtctatgtcctaatccccagaacttgtggtgacctta

SEQ ID NO: 395354 - DNA, 772 bp, Homo sapiens
aggatcccccttgggttggaactgaatgggaactataaatgtattgcgagggcacaacgaccaggtccaagaagaaaagcagcgagaaacaaatttctgggacagaggtgaaggtggaggggtgggagcagctttaccaataggtgggactaagtcaggttgaagagggaactgaactaagagctaggaagtcaaaggtcaggccaggagagaaaccatcaagcccccttgactcttccattccactcacttttttcttttaaccttaaactaaagttttatttgggaattttaacttcatttcttttccttcaacttttattttaggttcggggatacatgcacatatttgttacacaggtaaacccatttcacaggggtttattttacagatcatttcattacccaggtactatgcctagtacctaatagccagtagttacttttcctgcccctctccctcctctcaccctccacactccataggccccagggtgtgttgttcacctctgtgtgttcacgtgttctcatcattcagctctcacttacaagtgaaaacatgcggtatttggttttctgtttctgcattagtttgctatttgattccctttacctctaatattggtctaagtttaatctaaaatgagggtggtgtttaattctctaggtgtaaaaaataagtaaatgcttgttacttaaacgtttctttatgtaaatttgtgtttatctttatttgattatatcattaaagtttgtgggactaccgtacttc

SEQ ID NO: 395355 - DNA, 201 bp, Homo sapiens
ctcacaggcatttaccctaataaattctcttccatgtctaatccactattggctgcatctgaatgggttaaaaactaacattccaggcttgattctttgcacttagttttttctctctctcccacatgtagtcagtaacagtgtcctagtattttctgtgttacctctttttccatatttccatatgtgtgtgtgtgttgg

SEQ ID NO: 395356 - DNA, 553 bp, Homo sapiens
tcttaattccaagagcaatgggaaggcactgaagtagttcagactcaaggctgagctgatcaaatctaaatttcataaagatctaacggctcacagctaacagattgcataggaataatagaccaatgcaataaattagagaatctataacgacatatatgtaaaaatgtaatacagaacaaaataggtacaagggtcttaaaatcaaagttcattatcagacacagaagttgccagggaagcaaaagtattcttaacacaaaaatatccgctaatgaactaaacatttataatatcagtccccattaaacatccctcccaaagcagcattagcctctatgtcaggccatttcacctttgccctgtcagtctctcaatgattgacaggttatttcaattacaaagcaacacaatgcatatcatctacaaagtgaaagtgcaaacattccaaaagatgtaggcctttatgaagtcactgaaaatgatgaaaactctttacaaagcaactgaaaaaaatgagtatttggaaagatactgactgggaaggggcatg

SEQ ID NO: 395357 - DNA, 145 bp, Homo sapiens
gaaaaattttctgctgcatggactttttttctttttaacataaatgagagtcagtcaaggagcacttatggaacagctactaccaggggttgtgctaagtaacgtgtagcctaaggcaaagacaacacaagacttgctggtgtgg

SEQ ID NO: 395358 - DNA, 422 bp, Homo sapiens
cactatccaagtcctgggtattgtttgttggggaagccgtatctcactatcagagtcctggcagagtgtggttattgtttgttggggaagtcgtatctcactatgaggatcctgtgtattgtttgttggggaagctgtatctcactatcagagtcctgggtattgtttgttggagaagctgtatctcactatcagaatcctggcagagtgtggttattgtttgttgggaagccgtatctcactatccgagtcctgggtattgtttgttggggaagccatatctcactatccgagtcctgggtattgtttgttgggaagccatatctcactatccgagtcctgggtattatttgttgggaagccgtatctcactatcagagtcctggcagagtgtggttattgtttgttgggaagccatatct

SEQ ID NO: 395359 - DNA, 614 bp, Homo sapiens
aatttccactgggttgcaacaaaatagggtgaaagcaaagcaggatccagggacctctacaaagccggcccgattccatctacaatactgtcttttattgtgagaccgcgtccttccaaaatccggggcattaaaatgtcccctacctctgtgaagtggtgacgatatgagatggtggttgaatgggtgtctgttttttattttaatatcctcatcgggcaaatgaggatattttaagttggcaaagctccgtgaatagctggggatgaagtaaaggcatgtgatcagaagccagcctcaatttccttgatttcctctgctcaagctcaaaaactcagaggcagctgagggcgtcaggagtttttaaaagtgaatgggagcttgaggcttcatcctgtgtgcctcccggactcaccacacaaaaggatcatgcccccaccccacctgccccacagcattgtctaaagctacagcaaagagttggagtggcctccgtggtgtccagaaccaaggaaccgaaaagcctgaaatgcaacaagatgtcaaccacagagaccctgatggaaagttccaaccaaacaggactgggcgactccacccaacccccacctgca

SEQ ID NO: 395360 - DNA, 459 bp, Homo sapiens
cattgcgaccattcaactgtgggtcacgacccatttgtgagccataaatcaattcagtggattatgaccagcaatttttttttgaaagacaggatctcactctgtcatccaggctagagtacagtggtgcgatctcagctcacttcaacctccgtctcccgggttcagacaattctcacacctaagcctcccgagtagctgggattacaggcatgtaccaccaccccagctaatttttgtaattttagtaaagatggggtttttcctggccacaggctggtcttgaactcttggtctcaagtgatccagcccacctcagcctcccaaggtgctgggattacaggtgtgagccaccatgcccgaccttatttctctttaaaggaaacattctacataggactttagtctgaagtctttcagctggttaacaattgaaatgtcgccatccggtcactggta

SEQ ID NO: 395361 - DNA, 158 bp, Homo sapiens
atttgaattcctgtttctctacttatttgctttgcaatgtaggtagtttttaaatctctaagcctgagattccccatttacaaaatagggatgatatgctggaattattaatatgttgattaaattagacaatacatgtaatgattttagcacacaac

SEQ ID NO: 395362 - DNA, 276 bp, Homo sapiens
gtggtgatctagaggatcccaaccgtcaccaccttggagaagtccatgtggtaaggaactgaggcctccagccaacagccacatgagtgatctgggaaacagttcctctacctcagtcaagccttcagatgactgcagtcccaataacatttttactgcaacttcatgaccctgagctgcagattagccactcccagatctctgatcctcaggactctgtgagataataaacacttgttgttttaaaacaaaaaaaaaaaggggtaccggagctcg

SEQ ID NO: 395363 - DNA, 418 bp, Homo sapiens
cgctccccaagagggggtgacgacttggggcagggacggggaccctggcggcgagcttccgtcctccgctcgcacgccgcaccttccggccccaggccctcccctggctcctggagggttggctcctggctcaggaagcccacgcctgccttggaatgtcctggatcctgcccaccgccttccaggttccgcctaaatcgcgcctcctaatttgacttattcctactagtaacaatagttactgttattattgggaaatattgttattagatgttgccagcacccggtggatgccgagcagttttgcatacacgctctccaatccttgaagcaacctgttaggcagtttctctaaggagagatcccagaccacttgaccaaaaaaaagtctctggaaggcttactatgtttctactta

SEQ ID NO: 395364 - DNA, 190 bp, Homo sapiens
gggaataaccccatgccaccaaaagccctgtcttggaactggggaagatcttcagcatgaacaccttttccaggaacaaaaactgccacacatctgcgggacttcctgggcgcaattcggggtccaaaatgaagcgtggtaataaagtgacaagatcggctgtctcatgtgggccaaagagggcgcctac

SEQ ID NO: 395365 - DNA, 217 bp, Homo sapiens
tgacaggtagttctttgaaaaagtaggatgtggtgacagcctaggtatgacatatgccttcccattggttgccagtattgattgggctagtctcgctagtcataagggtttttctctccttattttttgctccatatgcattcttcatctcatgaagtcttcccagtgaagctgtgctttctgttgctgatgagagaaaaatcaggtatttctaggg

SEQ ID NO: 395366 - DNA, 705 bp, Homo sapiens
tatttaattttaattgtgggaagaaaggcagatacaagcccactgctctgaggttcctgggacatcctgtagcaaagattctccatgcttacaaccctagtagggacagcgaggttgtggtgaattcagtgtttgcagctgctggacatttccatgtaccgccagttccctgcagggtaattccagcaatggggaaaacttccttcagaattattttcttacctactgaagaaggaagcattgaaagttccttatttattaatacctcttcgtatggagtcctttcctatcatgtatctggaattggcactcgtagaatctctacagaagggtctgcaaagcagctaccaaatgcttattttctgcttccaaaggtccagagcattcagctgtctcaaatgcaggtcattttaatagatttactttgaatgctggtggccaccaaactttgtaaccttctcagaattggttattttactattttctgctttttgaaaaaattatatagaagtaatatacatatataaaatatcagtggattccacctaacttctttttaatggctgtggagttcacagtgttgatattccagagtttgcttaatcttattgttggtcttttgaaatgtttcctgtttttcactgttattaccgttaggccatatacctattttataagtttctttaattttccttctgaatcctc

SEQ ID NO: 395367 - DNA, 793 bp, Homo sapiens
tagaggatcccgtatgcatttagaccaggtgattctgaagagggtctggaggagccttctcaagaacagagcttctcggacaaactatttagtggaaaaggcttacattttcagccatcagttttagattttggaatacagttcctgggacatcctgtagcaaagattctccatgcttacaaccctagtagggacagcgaggttgtggtgaattcagtgtttgcagctgctggacatttccatgtaccgccagttccctgcagggtaattccagcaatggggaaaacttccttcagaattattttcttacctactgaagaaggaagcattgaaagttccttatttattaatacctcttcgtatggagtcctttcctatcatgtatctggaattggcactcgtagaatctctacagaagggtctgcaaagcagctaccaaatgcttattttctgcttccaaaggtccagagcattcagctgtctcaaatgcaggtcattttaatagatttactttgaatgctggtggccaccaaactttgtaaccttctcagaattggttattttactattttctgctttttgaaaaaattatatagaagtaatatacatatataaaatatcagtggattccacctaacttctttttaatggctgtggagttcacagtgttgatattccagagtttgcttaatcttattgttggtcttttgaaatgtttcctgtttttcactgttattaccgttaggccatatacctattttataagtttctttaattttccttctgaatcctc

SEQ ID NO: 395368 - DNA, 684 bp, Homo sapiens
  misc_feature (128)..(128): n is a, c, g, or t
  misc_feature (185)..(185): n is a, c, g, or t
ctccgacgcccgcagcccggctgctactgccgcaccgcggcggccgtgaacctcctgctgggcgtcttccaggtcctgctgccctgctgtcgcccgggaggggctcagggacaagcgattgagccgtngcgaacgtggtggagctgtggcaggcagaagaaggggaactcctgctgcccactcanggtgattctgaagagggtctggaggagccttctcaagaacagagcttctcggacaaactatttagtggaaaaggcttacattttcagccatcagttttagattttggaatacagttcctgggacatcctgtagcaaagattctccatgcttacaaccctagtagggacagcgaggttgtggtgaattcagtgtttgcagctgctggacatttccatgtaccgccagttccctgcagggtaattccagcaatggggaaaacttccttcagaattattttcttacctactgaagaaggaagcattgaaagttccttatttattaatacctcttcgtatggagtcctttcctatcatgtatctggaattggcactcgtagaatctctacagaagggtctgcaaagcagctaccaaatgcttattttctgcttccaaaggtccagagcattcagctgtctcaaatgcaggcagaaaccactaatactagcctcttgcaggtgc

SEQ ID NO: 395369 - DNA, 524 bp, Homo sapiens
aatattattattaaacccgttttacagttcaaaaaaactaaggctgagaaaggaaagaaactggtccaaagtcatactgcaagtaaatgatggagcagggatttcatgccacaactcagtaattaatcactgtgttgcaattctttctccttttcattaggctctgtaacttgtctggggacaaattaaggttgtaaagttcagtttactttccgtcagtcatatggcatcaccaagccacctctggtggagtgagaaaagcatggtacttcaacatcggaacccctgatactggtccctggctggatcttcacttcttgagttcctgtttccttatctgaaaaatgttattaatattcctacctcatagcaatgttgggaaaattccacgtggacgtgtagccaaccccaagtcatatgtagagtctgaaataccacataaatgtaaagtaacatctgttcatgtattggattttcttcatttatctttccccagatgctgtattgcatcccagttcgcaaaa

SEQ ID NO: 395370 - DNA, 1785 bp, Homo sapiens
  misc_feature (1729)..(1729): n is a, c, g, or t
gccaactgttagcattttacagtaggatcagagagtcaagtacattagttggctaaagtcacgaagctaatgtgtcctaaagatgagaattgaaggctccagagtccaaatatttacccacagccttactcactgcgtgtggattgggtgcaaatctcactttggcacccgatacctgtgtgacattggacaaactacttagcctgtctaatcttcagttttctcatctgtaaaataaggcagggaaccctcccttccagaatagctgcaggaatacagggaggtgtgatgtaagaaagtagttcatctaggactgacgtgtggtgagccctcagtgtgcgttgctactgtgttacccttcctgataacttcttagtacacatacagcatacagactgccgcaagtgttcatgacctttactgggacagtcagaataggggaggatcccagtgtggattctgtctcccagcctttatcagctgtacaacattgtataagttacttgaccttaagtcttagtttctccctttgaagtaaaagtgatacctgctcttttgtatcccatgggagtgaaatctcaagctcactaaaaatagtgcttttatttattttttcttagccagtttgcacagactacagataaaaagtgctttttttgagacagggtctcactcttcccaggctggagtgtagtgatgcaatcttggctcactgcaaccacaacctcttgggctcaggtgatcttcccacctcaggctcctgggtagctgggactacaggtacactccagtacatccggctaattcttgtgtttttaatacagacaagatttcaccatgttacccatgctgatcttgaactcctgggcttaagcgatcctcccgcctcagcctcccaaagtgctggggttataggcgtgagccactgcacccagacaaatagtacccttttaatgggaagattattgctctcaaggttgctttcctgtgtttaaaagttgtggtcgtgctgctttagggaggtagtgagtttccagccctctagaggtctagagaggctgaacaacttacttggtgggcattttgttgagaaggccttttttgtccagtgcttcagggaacactggtcaaggtctgggccacattgtctatcacaccccttcttggagggtttacaaccacctctggaaagttccatgagaataaatatacctaactttgttttattaaccatctcaaaaacttgcttgatcatgaaactcgtttttttaacctgttgacatcttacagaactatcagcgttactattggttcaggtcttttatatctactgtactttgtgtttttgtctttgaataattgtgtattgaagtctcccattgtgtggactctggtgtgtgatgtgcactgcacatgtgtgttacacaaaggctcctgtctgagggagcaaatggggcctaaaattaaacttaagacatcaaggctgggcacggtggcttacgcctgtaatcccagcactttgggaggccgaggcgggcagatcacgaagtcaggagatcgagaccatcctggctaacacagtgaaacccagtctctactaaaaatacaaaaaattagccagacatggtggcaggcgcctgtagtcccagctactcggaaagctgaggcaggagaatcgcttgaactgggaggcagaggttgcagtgagccgagatcgtgccactgtgcnaagcataatttaaagtggcgtggggcgaatccagagtccagatcatctgtctcaga

SEQ ID NO: 395371 - DNA, 574 bp, Homo sapiens
aagcatcaggagcctgtcagaggggacctggtggcgggcacctggatggcagagggaggcggacaacagttccgggacagcgcgctcccatctcctgctgttttgagagcctcttcccctgcttcctgccccagaaagccccatgccttcctcgggaaggtcactcacgggtaagctcagcatggctgtgacgggtctgggtccggtgatgctcagcttgggagactccagagaacccgcacgtggggcctagtgcccgcagacacccgtggggtcgggggtactgtttgctctccaagccaccagccaggttgtgcacaacgccaggacaactcttcagggctgagacacgtggcttccctgggcccagcacctgggcagcacgttccgtgtgtatgccctgaaatcacaccaacgcatgcagccaaccccgagactcaaccccaaggccaggacacggggccagtcctggagcagcacaacggggtgcccagctgtgaccctgcctacccggaaccctgagtctggtggcactggaggctcagcatcacaatgatcctttcttgtgttacca

SEQ ID NO: 395372 - DNA, 347 bp, Homo sapiens
agaccctcttccgaggcaaggagccacattcctgccgtcgggaccaccaaagcggatttctacaaactaaagtcgagaacttttcggcggcgaggcggcgcaccccgcgcgggagagggggcgcaggcgtcaccccgtcctcactcagcaacacccggcgccgcgccgggcgaaggctggcaaacttctcgcggccggcaggtgggctccgcgggccccatgggcgcaggcacaggtgtgcggggccacagccgggccttttgcagccggcgaccgcccccccttccccgcgggcttttgcacacgacgcgccgacggcagcttcacacgggttggcgagggccgga

SEQ ID NO: 395373 - DNA, 403 bp, Homo sapiens
gctgtttaactagtgttatacacatttcaaggtctttctagtatagtggcttctagacttttaaaaaagcagcagaagcgttttaaaggaatgcaaaatatgaaaacgagattaaaactattgtttccggttgaagccaatcacaatgttgctcaaaaggggtcctaggaaacaaatcacaattttagaatatcattcttttttttttgagactgagtttcgctcttgttgcccaggctagagtgcaagagtgcagtggcacgatctcggctcactgcaacctctgcctcccgggttcaagcaattctcctgcctcagcctcccaaatagttgggattacaggcatgcgtcaccacgcctggctaattttgtatttttagtagagatggggtttctccatgtt

SEQ ID NO: 395374 - DNA, 326 bp, Homo sapiens
gcagacacacacgtgcacacacacacacacaccacccaatcctagcacccactgggtacaggccctgagctagataatactccagtgggactcactgtgaaatggacttttacgttgcagtgcatcacgttctaattctttggaggagtgggaagcagcaaagctcttagagccaggctattcacacccacaccctctatcttcatgacacccagcagctctgttgaaggctgctctcttggggtgaaactcccagcagggctggtaggaaattactctcggcagagctcagggagcactggctgctctcacttcgctgtggtcat

SEQ ID NO: 395375 - DNA, 532 bp, Homo sapiens
cgtccccctgtggctgcacatttaggtcaactccagtgttctgcttctctgaataagaactttggtatctagatgtagcaacttttccctgaatcgagggtatgttctctgggctgcttctcgcactgggactgctaaaccaagtgggataaacatccttaagttcatgccagtttgtcaaactgctttcccccatggctatcaactgctcccagctcaactgcttccagctgtctatgaggtcagcccctgtgcaccatccctgcagcctcattcatcccacagacaccaagtggatgctatgggatgtgccaggaactgaggactcactgacagcaagatctttcccttccaccagggcgccaacccaaggtctccgcaaatatgatgggcaaaatatggagtcttgtttcactttgcatttgcttaactgctagtgagatgcagaatagcgagacacagcatatgtttgtagtcctttctgaattatgtttccccctacttccctaccggtatcatagagcacatataa

SEQ ID NO: 395376 - DNA, 236 bp, Homo sapiens
cggccaagggtgtgctttagagtaacttgaactttttctgaatgcaaatgtctgtaccccagccctagacatttttgttcaatatttctagaatggagcctgggggtttgtatttttgtttgtttgcttgcttgctggagtgcagtggcaccattgtaccttgctgcaggcctgaactcctgggctaaagtgattctctagcttcaacctcactagtagctggagcttcgtacagg

SEQ ID NO: 395377 - DNA, 257 bp, Homo sapiens
aggaatacacattgttaaaagaaaagatttcccagggccaccggacaccagcgcgtgagaatccggaggcagggaggcgacccggttcccgaaacctacgcggctgcgggaggcccaggagccccacgcgaacctgtccgcacagcccagcggctaggttcacagaacgcagacgctggagcctgtcgcccaagcaacggccccgccccgcccacgggaggcgccggtgattggccgcagcctcagtggccccgccc

SEQ ID NO: 395378 - DNA, 628 bp, Homo sapiens
ccacaaaaaagtctttgcctagggtctgcatatgtgactggaagctaaattattggaatgagcttgtttgtttaaggttattaaagttctgggttctttgacttctaaagtcactctgatatgtatttggaagagtaaatgtctagcaaattggctttatatttcctttagagatctagcaaagaccaaacctgctttggacctcatctgtgccacagtgcccttgggggatgggccacctgtagcagaggaataggagctgaggcatgagctgataagtggcatcactttagggccctctccaatctcacctggaatgtcactaatagtgacctatttctttgggttcaagcttttcattttctgggcctcctttatattgcagattcttttattttatagataggtctcactatgttgcccaggctggagtgtgggggctattcacagacataatcatagtacactactgcctcaaacttctgggctcaagcaagcctcctgcctcagccttcaggatagctgggattacagatgtgcaccactgtgctcggctgcagattccttttaggaggtgaatacataatcagtaatttgctaatgccttagtaaaaacttagtgatgtgc

SEQ ID NO: 395379 - DNA, 778 bp, Homo sapiens
cacaagccctcagtggcatagacagtgagtacacaatgctcctatgtctgggtggtcagggggccactctaatctggactgagcctgctcaatacctgtgggtcatctggctacctgctggggtgactggggccaccaggctctgctctgtgtgtctctcctccttcattacgctagcacaggcttgttttcatggtgatcctgaggtgcaagagaggacaagcttaattgcacaagcgctttttcaagcctctgcttgttccatgggtgctagcatctcattggccaaagcaagtcatgtggccacgtccaggtgtgaagaactgggggccttttgcaatgctcctggtagacacaggcacctgatgatctcagatctttaacagcacaatcatttcagtgctgatcactgtcatttacggagctggcactgtgcctggttagtttactttaactcaatggctcccagtggggggtgattttgtcccccaggagacatctggagatatttttggttatcacaactgaatggggaagatgcttctggcatagggtgggtagaggccacggttgctgctaaacactcttcagtacagaggacggccctcacagcaaagacttacctggccccaagtgtcagtattgccaaggctagccgagtacagtggcttatgcctgtggtcctagtattttgggaggccgagataggagggtcatggagccaaggagtacgagactagcctacacaacagaacgagacctcatctctacaaaaaaa

SEQ ID NO: 395380 - DNA, 1032 bp, Homo sapiens
agcagcatcatgcttagacttttcaaagagacaaactccattttcttatgaatggaaagtgaaaacccctgttccgcttaaattgggttccttcctgtcctgagaaacatagagacccccaaaagggaagcagaggagagaaagtcccacacccagaccccgcgagaagagatgaccatgaccaccatgccagaaagtctcaacagccccgtgtcgggcaaggcggtgtttatggagtttgggccgcccaaccagcaaatgtctccttctcccatgtcccacgggcactactccatgcactgtttacactcggcgggccattcgcagcccgacggcgcctacagctcagcctcgtccttctcccgaccgctgggctacccctacgtcaactcggtcagcagccacgcatccagcccctacatcagttcggtgcagtcctacccgggcagcgccagcctcgcccagagccgcctggaggacccaggggcggactcggagaagagcacggtggtggaaggcggtgaagtgcgcttcaatggcaagggaaaaaagatccgtaaacccaggacgatttattccagtttgcagttgcaggctttgaaccggaggttccagcaaactcagtacctagctctgccggagagggcggagctcgcggcctctttgggactcacacagactcaggtcaagatctggttccaaaacaagcgatccaagttcaagaagctgatgaagcagggtggggcggctctggagggtagtgcgttggccaacggtcgggccctgtctgctggctccccacccgtgccgcccggctggaaccctaactcttcatccgggaagggctcaggaggaaacgcgggctcctatatccccagctacacatcgtggtacccttcagcgcaccaagaagctatgcagcaaccccaacttatgtgaggttgcccgcccgtctccttcttgtctccccggcccaggtccctcccgcctccaggtccatccatcccgtccggaaaagaaggacccagaggg

SEQ ID NO: 395381 - DNA, 935 bp, Homo sapiens
gcggctcggtgtgcagagcacacaatgccccgctggaaaacagaaacccacatgtgcacgtattagtctcggtaattatttattgcgtagcgctataaacaatgtatgcaattaagggtaattaaacctcaactaccgcctgcaaaaatagcaaactttccctgcaaaggcaggagctgagctcctgggaacggctctatccctcctgcagcgtcccgggacaggccctcggattttgggggacccttccctggctttcagagtttcttgaacgttctctccctggtgctgcctccgccacccttcggtagccactcgctctcggctgttcgcactaaaggcggcccctcgtattaacaacgggccctacttctgctgtccctccaggggcggactcggagaagagcacggtggtggaaggcggtgaagtgcgcttcaatggcaagggaaaaaagatccgtaaacccaggacgatttattccagtttgcagttgcaggctttgaaccggaggttccagcaaactcagtacctagctctgccggagagggcggagctcgcggcctctttgggactcacacagactcaggtcaagatctggttccaaaacaagcgatccaagttcaagaagctgatgaagcagggtggggcggctctggagggtagtgcgttggccaacggtcgggccctgtctgctggctccccacccgtgccgcccggctggaaccctaactcttcatccgggaagggctcaggaggaaacgcgggctcctatatccccagctacacatcgtggtacccttcagcgcaccaagaagctatgcagcaaccccaacttatgtgaggttgcccgcccgtctccttcttgtctccccggcccaggtccctcccgcctccaggtccatccatcccgtccggaaaagaaggacccagaggg

SEQ ID NO: 395382 - DNA, 766 bp, Homo sapiens
caggctggtactggcctgggggttctggatgtcctgagaaacatagagacccccaaaagggaagcagaggagagaaagtcccacacccagaccccgcgagaagagatgaccatgaccaccatgccagaaagtctcaacagccccgtgtcgggcaaggcggtgtttatggagtttgggccgcccaaccagcaaatgtctccttctcccatgtcccacgggcactactccatgcactgtttacactcggcgggccattcgcagcccgacggcgcctacagctcagcctcgtccttctcccgaccgctgggctacccctacgtcaactcggtcagcagccacgcatccagcccctacatcagttcggtgcagtcctacccgggcagcgccagcctcgcccagagccgcctggaggacccaggtcaagatctggttccaaaacaagcgatccaagttcaagaagctgatgaagcagggtggggcggctctggagggtagtgcgttggccaacggtcgggccctgtctgctggctccccacccgtgccgcccggctggaaccctaactcttcatccgggaagggctcaggaggaaacgcgggctcctatatccccagctacacatcgtggtacccttcagcgcaccaagaagctatgcagcaaccccaacttatgtgaggttgcccgcccgtctccttcttgtctccccggcccaggtccctcccgcctccaggtccatccatcccgtccggaaaagaaggacccagaggg

SEQ ID NO: 395383 - DNA, 288 bp, Homo sapiens
tcttctcgaaaggcaacatgaactacatagttgaggaaaaccatgaactacatagttgaggaagacgggttttgtctgaaaggatttagagaccagccagggagacagccaagaaaatcaacaaccatcatgcagttatggtagaaatagaagctggatgctagctactgcagcatcccagcagactgaggaaggtttgttggaggagaagatgcctgcactgaatatagaaagactgaaggatgcaggaatgttgcctttcggagaagagaaagctacatcagacaa

SEQ ID NO: 395384 - DNA, 541 bp, Homo sapiens
tcaagggcctgacacatggaagctattatgattcagtgccttctttatgtgtaagtagatggtgtctatgtggtttgagttccccagtggctggaactgttgaagtgtgatcccagggagggatacctgggttggattcccactgctataacctcctagttttgcctcccagagttgttgtgagggtcaataatataaaacttataactcttgttgggggaagtatttatttcacatttatgtatccacatggagtgacttctggatgtgttccctatctcccacacaggggtgagaacaaacttatttgcctggtgaatttgggagaaggatctgagctcagccccttccttttccttttctggaaccaacctgctctcatgttacaaggtacgagggcctgcagtgtccagctataccatggactgagtgggcaagtctgtttaatttacaggcaaagaatacatcagcaagccccttggctgcttaatctcaaatcacaatctctgatcaacttttccggtaacaaaggaggtgatat

SEQ ID NO: 395385 - DNA, 256 bp, Homo sapiens
cttactgcagtgctggcctctgagtatgaagaaggactcctgattcatttagaaagtgaactgcgtgaggaagctcattttcatctaactgcagctgattttctctcactagttgtaataatcgtttccggtcaattacgggaaattcaattggcacatttttacgctccgataaaatgattttttcaagttctacatagcagtctggaatcagctgtccaacaacaagctgatctcggatctatgaaattacaaa

SEQ ID NO: 395386 - DNA, 547 bp, Homo sapiens
atcaggctgaattcccactcttcagcgtctttgtttagaaggctctatcttccactgtggccctgcagagatcccctgagccaagccgaggcagtttccacataagccacattcaatggtatcgcaaccatgagccttaacattgccatcagaaggaaggaatcaggcaggtgaaggcaacatgatgccagatttgagaaaggatctgcaaaataaagataccacaattcatcttaaaactgcagagatttaatgtgtcagggaatagatgtgaaacaagggatcataggaaaaggggaaagagaaatgatctgtttttcagttatgacatagaaaaccaaactgcaagtgtagactatgacaaaaaatacactaatacctttgcaatctgaatgagaatttgaccatttgtgtgtgccctctacccttaaattcagaaataaagacaataaaaaattaaaataattgcccagctgaaaactgctatgaggaatggattgtcaggttgctgaagtataaaaataaactcttggttgtcctgtgctta

SEQ ID NO: 395387 - DNA, 170 bp, Homo sapiens
tatttgaagggtagatttttttaaacgtagtttcaaagtagctaataaagagattgaacatttatcagaattataaaacttacttagagatgctattctgatattgaggataatatacaaattatttcagcacctccttcccccaacaaaatacttgatttactttagat

SEQ ID NO: 395388 - DNA, 356 bp, Homo sapiens
tcatggatattttattctatgggtccaacactattattatttattttgttactcaaattgtttcagccttagcaatcagaagtgccttcaggttggctcttacattcctttgaaaaacccttcctccccaccatcattttctttttaaaagtatttccttactttctggttccataagatgttccaggttcatcttgtattttcatttccccagccctggaatcagccacttctaacgagccctagttttttttctttttctttcttttttcttttttcaattggagaacagtgtttagaagccaagatctggatgctaggtgtgttcattaatactagggtgttggtatttctaa

SEQ ID NO: 395389 - DNA, 399 bp, Homo sapiens
ctagcttcttgaggttgctgtgtcctccgcatccctcgggaaatggagtcacagccactcctgagtatttgaagctctgtttggccagcttataacctttacaataaaaaacaaaatgcaggccgggcacggtggctcacgcctgtaatcccagcactttgggaggccaaggtgggcggatcacgaggtcaagagttcaagaccagcctgaccaacatggtgaaaccccatctctactaaaaaaaaaaaaaaaaaaaaatacaaaaattagccaggcatggtggtgcatgcctgtaatcccagctactcaggaggctgaggcctgggaagtggaggatgcagtgagccaagatcgcaccactgcactccagcctgggcgacagaacaagactctgtctc

SEQ ID NO: 395390 - DNA, 404 bp, Homo sapiens
tctgatgcctgcaacagtctgaactcatacacctatcatcgcgagtcagttcagaaccagctaaagaacactgggtttgcctcctcctgtacgtgggatgagtaagtcccatctgaaaatgcttcccaggagaagaccttcagcactaagactctgcaacagccccaaacctgtcccagctggtcccagaaccaaatatctcaccaagtgattccaggactggaaatattttgtgggttagcagattggaaaaaataataataaactacttgtagaatcatacttaatagtgtgaatgctcaaaactagattttagtaaaaaaaaaataagctacttgtggaatgaaaatgctcaaaactagatttgagtttctcaagtgaatccagccactgtcctctgcaaa

SEQ ID NO: 395391 - DNA, 323 bp, Homo sapiens
tgctaacctacttacattctgccaagacaaactacaactgaagtagtattcatttctataccaattaaagcattcaccttaaaaataacagaatatacactaataccaattctcccaatgacctaaccaattctgctgaaaattagttcttagaggtcctagtgaaccacatacggtaactatatgacagtctggtagcttgtataagctatttttctgtaggaagtgaaaagatctaggttgtaataaaacatatacctcagttcagtaacccagtgtcaacatcttataaagattcccagggttaaattattttatatggc

SEQ ID NO: 395392 - DNA, 412 bp, Homo sapiens
agctaggattacaggcatgtgccaccacgcctggctaattttgtatttttttttttagtagagacggggtttctccatgttggtcaggctggtgttgaaatcccaacctcaggtgatccgcctgcctcggcctcccaggtcactgcgattacaggcgtgagccaccccacccggcctcattcacagttttcagttgaaacataattatgtttttgccatgctaatgatggttaatactctggaggtggtgggtatgtgtcaatcactcagacaatttacctgtgtttactcactgaatcctcaagaaagagaggtgggaaatacatcacatctgtcttacaaaggaggaacttagggctcagaggttttggatttcaatacactgttgctgcaggagtgggaatttgaataa

SEQ ID NO: 395393 - DNA, 325 bp, Homo sapiens
caaagtttgggtctagtgaggaatggatttgtcaacttttaatagagtatgtcaataacaaaagtcctatctccctggaggaaatagactatgccctgtgttggtggcagaggcctgtcatcctctagtccataaaactacaggacacaagccagaaactacttcctctcaagaaattaatatccctcaccccaaaagtgtaacacgtgggctgccttagaccaacttcccccaccaaacttccttccccctcctacagaccaacttcctcctccaaacattactaacttccctccccctccagcagttgcaactgcctcaaact

SEQ ID NO: 395394 - DNA, 236 bp, Homo sapiens
agtgaaattgctcagagtctgagagacagaagcaaaatcaggacaaaaacttcaatttcctaatgctcagggctggctggtagtgctcactaaacccactaaacctgggttttaaaaacttgcctgattgtgagtacatctgagccagggtgtgggaatctatatattttgcaattgtccaggtaattcttaggatcaaagaagttttggacatacttgtcagtggtatggctcca

SEQ ID NO: 395395 - DNA, 563 bp, Homo sapiens
  misc_feature (31)..(31): n is a, c, g, or t
  misc_feature (74)..(74): n is a, c, g, or t
ggccagctccagttacaacagctcagggcangcttctaggcacatagaagcttgattttcaaagaagaataagngttatccagacaaagatgggaaggaagtattccaagctaaggaaacataggtaaaaaaagaccagagttgaacaacagctgcaaaacgaaaacaaataaacaaacaaaaaagcactcaggaatatacttaaccaaggaggcaaaatatctctataaggaaaactacgaaacactgctgaaagaaatcacagatgacacaaacacatggaaccacatcccatgctcatggaagggtagaaccaatattgtgaaaatgaccatgctgccaaacaggctggttcaatatacgcaagtcaataaatgtaatcgagcatataaacagaaccaaagacaaaaaccacatgattatctcaatagatgcagaaaaggcctttgacaaaattcaacaacacttcatgctaaaaactctcaataaattaggtactgatgggacttatctcaaaacaataagagctatctatgacaaacccacagccaatatcatactga

SEQ ID NO: 395396 - DNA, 1348 bp, Homo sapiens
gagatcatgcatctccattacagtattatgaaagaagtacttagtgtactgaggatcgtatcatttcccttacagaataaatgcactaataggcaaaaaccaatgtggactcaattttaagttaagtaattcagaaaaactattccattggtctctatgtaaacaaaactgggaactgtgagtatataggtaaagctcgtgctatgttatcagaggttatctttcccagtccctcactcagtcagcaaatatttgttttagaccacctagtacagtcgtctctcagtctatgcagggattggttccaggacccctgtttataccaaaatccacgcataatcaaggcctacattagtcctgtggaactctcatatgtgaaaagtcaatcttccgtatacagggcttcatatccctagaatagtgtattttcgatccatatttggttgaaaaaaatccacctaaaagtgtggacctgcacagctgaaacctgtgttgttcaagggtcagctgtatgttgaagaatatggctagagctagtttctgtgatagaacatatggagataactatggaaaacagtcttcagatagccttaacttttttcctgatatagaagtggggcctcttcaagaatgtatttactatcacgagggattcatatagcatttggactcttagcagatgtgggtttctttatctttctaatagcagctgccagtgactcatccagctgctaagaataagcagctccaaattcccccagtttctccttgtgccataaacaagacctagattttatgctggctgtttattgttatccttcttaatcagacagcctcagatttcttagactaaatgcaacatctgtgtctaggtgttcctaaaataattggttaagtagctttaatgtattctcagctttttctaggaaactccagaacatctttctaaaccagaatgtgtcaatctccaattttaatccggaattagtgaaaactcttggcggcaaggttctaaaggaaaggatttattaagccccattttatcaattataatgccaggtacctacctactcagtggaactcctactgcattattcttctgcagataacttccttagaatgtcatgtgcatactttagcattatcaagtggaaagtaactcttctgggaggtagcaaaacaagagcataacatatctaaaaatgaagccacctgtagaactctaaggacctggtcccttttgacaaaaaatattttattccagtttttagcaagtacaggatatgatatcttttctgcatgactgagtactgatgctaattatcttgtccaaattttagataatctc

SEQ ID NO: 395397 - DNA, 327 bp, Homo sapiens
agcacgagggagttcgagctttgccctaaggcttgggaagcctttggaggatttgaaggctggaagtaacaccatcagatgtgggttttgaaaagctccctctggctgccagggagaatggggtgggcacgggtttgagagcagggagcccaaggaccaagctttgctgttgtttaggagatgagatgacagtggctctgtccagagtagtgactgtggggatggatccaaagggtggatttgagtttagggggaattgacaggtcatggtggctcgatgtatgagagaagtgtcagggcaattttgtggcctgggcacctggctgg

SEQ ID NO: 395398 - DNA, 417 bp, Homo sapiens
tcttttaattccatatttataaacccatatcttattaactgtgacatgttttcagttttcacataagaatatacatcctcgaactagaactcaaatatgtactacttattttcacttgagtggaaactgacatcaagtcactaaatataataggagggtttaaatatggatttatttttcttgtgactgacttcacatttcttgaagcagtgaattcaatgtcaattcgcactttgagctatttttaatttgggggtcagaaaattgttttttattatcttagatcttattctcttgtacttctctggtaagtgaaaattggaaggacattttgaaagtctgcatggattataaaatcttgttgtagcgaagtctgattcttctttccattataaagtactatactactgatcagtt

SEQ ID NO: 395399 - DNA, 379 bp, Homo sapiens
gggtcaaaggcaggagagaaggaagggacagaggaattaggagatttgattggtatgaagattcaaatcatttttgggggtgagttaagtagacacctgaagcgggatgaccataaccaggtgggtctgtggaggttaggggtgagcgggcaggatgaactggaagagtcagcaggcactgaatgagggtcatggatattagctgacaggttgggcattctgctgagtgctgtggtttcagatgacaggtggagactctaatattatttggttttggaggagcaacaccttgagttctacagagaatgggtgactaataccagccaagaagcatgacctcattcatcccttttccctctggaagggcgtctatggtagg

SEQ ID NO: 395400 - DNA, 542 bp, Homo sapiens
aataagaagaaagaaaataagtttgtgttactcatttatttcaagggcatgatgtaaaactggcacacatcacttctactgctattctactgccaggaacttagtcataagggcacagctactgcaagtgaatgtgggaaatatagactccagctggaaagcagcatgcccagctatgactcaggagttttgatgctaaagaaaaaaggacagaacagatactggtagacaactcatagtctctcccacaatgaccagttctttctcatttatagccagctcttcatcatcccttccattattttcagtatattaccaagtccaagttcacaattgaaataaagtagaaaacgggaacttttgcaatccaggatcctgtctgacttgtaattaaggaactctatggctgcttctagaggcaagagtctgaagtacattccctcctcttactctagtatgttgatggcatttaccagttcctgttggtaagtgattgcacttcagggataaacaaaggaatatggataggaagatgaggaaaa

SEQ ID NO: 395401 - DNA, 123 bp, Homo sapiens
tacccagctccagctggagacagtcagtgcctgaggatttgggggaagcaggtggggaaaccttggcacagggctgacaccttcctctgtgccagagcccaggagctggggcagcgtgggtga

SEQ ID NO: 395402 - DNA, 324 bp, Homo sapiens
acctctgcctcccaggttcaagcaatccttttgcctcagcttcccaagtagctgggactacaggtgtgcgccactgcacctggctaatttttgtatttttagtagagatggggtttcactatgttggctaggctggtctcgaactcctggcctcaggtgatccaccctcctcggcctcccaaagggctgggattgcaggcatgagccaccgtgcccggccaaaccacaagattttatagtaaatattgcctgtgagtaaaccttgaataacaacattaaagcagaagactgctatcttgtgtcatttgataatcctaatttagg

SEQ ID NO: 395403 - DNA, 386 bp, Homo sapiens
gaaagaaaaaacttgcccagtgccatgtgtatatggggtgggagtaggtgggggtggcattggagggaagggggaggcaatgctcaatttcctaacaaagaaatagaaaaaaaaatattttctaggattgaaaaagcctgtctaattaaaataacacaacaacattacttaatctgcaattcttcttgacatgccttgggaccctgccttcaattttctttcattaatataggcagggagaaatgagaggcgggaaggtgatggaggcactttacagttcctttctacctaagggtctgtcccctccagaggcaagaaacaacaaagcatgtctcagtttccaccaaattaataagcaagataggggagaaattgtctgataaatc

SEQ ID NO: 395404 - DNA, 338 bp, Homo sapiens
agagttttacagttttacagcctactattttatagtttaaatttggttacattttttgttgtttttaatataacttacatggaaatctttttaaaatgtatatgatacgtatacagtggccttccctgccatcttatgtaatttaactcctctaggcatctaagcatcatctttgtcatcataaattattttactctgctggaaaagatcattgccttcaggacccactgaaatgtaccctaaatgtatccagattatatttaaaatatatttttctgcctctctgttaggtcatgtagttaatgcctaattatagttctttttcctctccttgttta

SEQ ID NO: 395405 - DNA, 477 bp, Homo sapiens
  misc_feature (18)..(18): n is a, c, g, or t
  misc_feature (20)..(20): n is a, c, g, or t
tgaggtgatctagaggancncaggctactccacaaacagagtgctacctccacaaacagcacgacctcctgagagcagggagacacacagggtagacacatcgtctgtgctcagtgctgaaccaatctgtgtcttcctcccagtgctatctgatgggactgcctttgaactgttatttccatcttgaggtcttgacttctaggctctgatcctagaactgtggctgccaccagctacagaagtcaccccaaatgtcttccatttcttaataaagtcatctttctgggcctcaggaatctcaaatcccttctgtagagcctcccagcacagggctgctaagagttaattaatccacttgggaagccagtctgccctggcagggttcagtccatggagacgatcacatttatcgtttagttaaaggcttcatttagcccctgtttgtggaggtagcactaagctcctgtagatcgaccg

SEQ ID NO: 395406 - DNA, 324 bp, Homo sapiens
gaataatgcttgtctcatgatactttatctcatataagggaaggagaggaaatccttagttacatcatataaggtagcaaaaaataaatacaataaatgctagagacaatatttattcagaaaacatcagtgagtccagtgaaacttggagactctgaaatgctgtgccagtcattagagccaggagtgtattatgatttaatggtacctctctgctgcatctcatgagctgtcctagaaaaacattttgaagcaataaagcatccatttggctcctaagtaatgagaggcattgttctttgcattaactatttattcaggaag

SEQ ID NO: 395407 - DNA, 372 bp, Homo sapiens
caggttcaagtgattcttctgcctcagcctcctgagtagctgggactgcaggcatgtaccaccatgcccggctaattttttgtattttagtagagacggggtttcaccatgttggccaggataatctctatctcctgaccttgtgattcgcctgcctcagcctcccaaagtgctgggattacaggcgtgaaccaccgcgcctggccaaactatagtattattataggaccaccgtcacatatacagttgttgagtgaaatgccgttaagtggcacaagtctgtatttgaccgtgagtctctttttacctagtaagagtagacttctgtaagtcaaggaatatgctttattcaggtgctcaaaacttgtctat

SEQ ID NO: 395408 - DNA, 607 bp, Homo sapiens
cacactccagctgccaattaactcatgggccaccatgaaacccacagaatgcctctatgccaagaaggttctcaagtatctgctatcataatataaacctaagtgcccagtgaatactgtttttctattacaaattgatctttggatacatttccccagaaaatgttacatcatttttaccacttagtgcctacctagcacgcgagctctctgagcttcacttgctgcaacacaaaataagcacagaattaggagataactaggggaattatcatagcactgaaatctgaggtcatttcctcatttttgaatactggaaaatgaaggatatttgaaactgttcaccacaactcaggtgacacgggcactccactatagaacatctcactattgctaaaaattacatacctgtgcttaaatgtgccaatgacatatgctggttgagactgatcaaaacaagtctggaagaagtctggttagaagaacaggtttttttacatacagataacatgttagcaacttgaatattaaatttggcacatgaacttttaaaagtattaggattgggatgtgattttcttttcttttttttttttttttttgagat

SEQ ID NO: 395409 - DNA, 585 bp, Homo sapiens
aaaatatgtacatatatatatatatatgtatatatcctcaaaaacttcacagaattaccaatgaaccagaaatgctactctgaggtatacacccctaaataattgaaacaaaacaaaccactcaaacaaacacttgttcatgaatgcccatagcaacttgattcaagtagccaaaaggtggaaacaactcaaatgtccatgactatgtaaacaagctgtagtatatacagacaacggaatattactcagccataaaaaggaatggagtactgatacctgctacaacctgcatgtcccttaaagacattatgctaagtgaaaggagccagacacagaatcccgtgttttttgacttattttatataaaatattcagaataggtaaatccttagagacagagtagattaatgattgccagagaattatagtgtgtacttctggagtaacaaaaaacttgaaaatagagagtggtggtggctgcacaacattgagaatatactaaatgccactgaattgtacactctaaaattgctaattgtatgttatgtggatttcatctcaataaaagaaacatcaaaaaaacca

SEQ ID NO: 395410 - DNA, 142 bp, Homo sapiens
tcgagtgctaattattagcatcatccctctactattttttaacctaacctccaaggtcaaacaacacaagtgagtctcaaactctcaactggaatgaaggtggagggggcatagagctcacctcgggattggaggcgtattg

SEQ ID NO: 395411 - DNA, 1234 bp, Homo sapiens
ctagcaatgttgatggatgttaaaaattagtaaacaaaaatgtgatgagaaataggatatttgcagagtctcagattatctccccacaagatactttttagttacaacagggaaaaaatcataaattccaggtggagaaacctggccaagaccacattaaccaaagtcaatattaccatttgtaatatgaggtttattgacatcacacacctcctgagatatacactgagaagggcacaatattgcttctggagtcttcttgccaaaaatgggtaacctctgttgaatcacgagaaaacatcaaacaaacccaaattgaaagactcttcataatatcaaggtcatagagagtaaagataaaggaattgatccagatagaggagaattaggagacatgaaaattacacacaatgtgggatcctgaattaaattttagagcataaaaaggataattggagaaatttgattaagttccacagattaggtaatagtattgcatcaatgttatcttctaaaataacattagggctgggcacggtggctcaggcctataatcccagcactttgggagtccgaggcaggtggatcacctgaggtcaggagttcaagacaagcctggccaacatggcaaaaccctgtctctactaaaaatacaaaaaaacattagccgggtgtggtggcgcacacctatagtcccagctacttgggaggctgaggcagaagaatcgcttgaacctgggaggtggaggttgcagtaagcctagattgtgccactccactccagcctgggcaacagagtgagactccgtatcaaaaaaataaaataaaataacattaggctgacagttagtaaaagttatttagaaaacgattattacatagaatactataaggaaatgtaatgattctaggaaaaggagaaaatgcttagaatatagaaattcaggccgggcacagtggctcacgcctgtaatcccagcactttgggaggctgaggtgggcagatcacgaggtcaggagatcaagaccatcctggctaacacggtgaaaccctgtctctactgaaaatacaaaaaaattagctgggtgtggtggcgggcgcctgtagtcccagctacttgggaggctgaggcaggagaatggcatgaacccaggaggtggagcttacagtgagcagagattgcaccactgcactccaactccagcctgggtgacagagcaagactccttctca

SEQ ID NO: 395412 - DNA, 398 bp, Homo sapiens
ctgcatcagcctcctgagtacctgggattactggtgcccgccaccacacccagctaatttttgtatttttagtagagatggggtttcaccatgttggccaggctggtctcgaactcctgacctcgtgatctgcccgcctcagcctcccaaagtattgggattacaggtgtcagccactgcacccggcctattttttatttatgtaaaattgaaagaaggaatcttgtctatttcctataatccttcatgctacatgaaagctcgatgaggacagtgtgtgttgtttactgtattctcataagtaaatagatgaagcaccaagcccatagtagatgcttaataaatcctgaattttctgacttctccattgcatgaaaatatttgtgtatatttgcttt

SEQ ID NO: 395413 - DNA, 549 bp, Homo sapiens
tatcctgccttcatcccaaagaagagaagaaaaaagaacccaaaccaggtctcttgtgtcaagccatctctgaatgattcagagccttaatagggggcctagaaatagccagtaaaatggccaaaaaaccccactccacaaccacattttgaccccaagacattcaagagcttcccttatgccagacaggggagaagaaaggatgtggagatcagggcttgtcagtagctgggactgcacatccactccatgttcaagggaacctggtctgaaatagccgcagataggggaatgaagcaatgactaaaaaggagacagtttaatactagggcttaagatggcacttcaaggttagtagaaggtcatttcccatcaaaacagcagaatcaaatctcatgagtaaggagaaggctttagagaccatgtctaatccaattagccaaatccccttcatttcttttctaagacagcagctatggctgagtgagaaagggtcttgaatcagtatggcttaatgaagaggagaaagggaagaagatactaaaatca

SEQ ID NO: 395414 - DNA, 330 bp, Homo sapiens
gtactactaacagagtcagttttttccacactacttgtactgctattgtacaagtgttaaaaaggcaatcagattcaatgtcttcacaccaacacattaaggaaaatccactccctttcatcttgccatgtaatctaaggaagtaggaattggatggttttaatagaaagtggaatgcctttccagatcctacaacagaagcaaggatgttgggtcacctataatcaggaagccttcacaagaacctcactatggttttcctactccaaccttctgtgattctggccaactcattcctaatctcagcctctgtacatcgtgttctgtttg

SEQ ID NO: 395415 - DNA, 589 bp, Homo sapiens
agaatgtagaaatatgcttccttggagttttatgttccccttttttttgttaaaataatttaaaataattttgattatgtgttagaaaagcattactataaaagtataaagcccaatagaatactacgcaagtagcagtttattgaggggataggttggggatctcctttttttttttttttttttttttgagaaagttataagttaccacaagagtataagaactattttgtttttcctttagctaagatgttgcctttgtttttggtttttgttgctgctgttcttgtttaattttctagctagttacttaatcttcatgtaaagcttcacacagggtctagtatgtagaagacattcaataaatgttggcatgaatgaatgaagcaagaagccattttagcaaataaaatttttaatttgcatgttttcaaattgcttaactgaaaatttaccaaacattactgagtaactttaggtgacagtgagtgatagaagtaatcttttaatctaatattttctaaatggttctttctatttagattattaaatattttgaaaacttctttgtcattcattgatcattaag

SEQ ID NO: 395416 - DNA, 554 bp, Homo sapiens
caagaaaaatcacatgctaaaattagtagaaagaaataagtcatgaagattagagaagaaattttagaaatagaaactaaaaaaaaaattacaaaaagacaaaggaacaaagagctgggggctttttgaaaaaaaaattgacaagctataatgagactaggaaaaagagaaagaaaactgcagtaaaatcatagatgaaaaaggagacattacaattgataacacagaaacacaaaggatcgtaagagattactaaaaacacctatatacaaacaaattgaaaaatccaggagaaatgaataaatgtctggaagcatagcaatttcacaagctagaataataaaaaaacctgaacagactaataatgagtaatgcaattaaggcagtaataaaaatctcccatcaaagaaaaacagaagaattatggttttactgctgaattctaccagacatttttaaaagaggtaataccaattttattcaaaatattccccgaaaaatgaagaggaaggagtacttccaaacttgttctatgaggtcagcattaccctgct

SEQ ID NO: 395417 - DNA, 539 bp, Homo sapiens
ctttaggctgtgcagggtcggtctatcacccaacaagaccgagatctccgagttgatttaggatttcgaggaatgccaatgactgaggaacagcgacgccagtttagcccaggtccacggactacaatgtttcgtattcctgagtttaaatggtctccaatgcaccagcggcttctcactgatttactatttgcattagaaactgatgtacatgtttggaggaggtagaaatatttcttttttataaattaaaagcaaatatttaaaatatgccattgcctattctatttggttttgacaaaaccaaaaatctgccttgattaaaggaatttccacatttttcttgtatcttgtttaaattaataccatgtactaaatttattagtgataataatatatactgtttaagtttaaaatcaccctgtgacatgtgtattcagagcctgtagtatttaagcagttagtggatatcagttcaaagatgataacttagacaacaaatctacataaagtaaaccatggcctttctaaattttcaa

SEQ ID NO: 395418 - DNA, 134 bp, Homo sapiens
tgttgttgaggtttaaatttaaaatgaagaatcacaaatcaatcagtaaaggaaagatggctatgactgtttaacatgatagcatgggagctcactgccctgcacgatcaaagtttcacatagacagaggagca

SEQ ID NO: 395419 - DNA, 642 bp, Homo sapiens
gtgaccttttatagctaaatgacaggctgaatttttgaatgagattatacagcttttgaatctttaaggagcatttaatctaaatcagtccgttactaggaaaaagtatgtaatcccatagcaacaaggccctgaaagttatttacattttttgtttttctggtcaggaaaaagaaagttgtataaccagtgatcattactgatagcaaaccagaagtgaaaacaatccagttattttggtgccagcttcatgctgtgtctcagcttttctgaccagtcgggtttcctgcaggggacttgagtagtgacgcttgttgtcaggctgcccacgtagatagtattattgtgctcaggcattatggcactgaactccatggtttgcactaatatttcaaacaactgactgcctcgtctctgtttggacttggatataagcaagcatcaagagggtgatgatttgttctccaaactagcctttgcaaagaggtgctcacaattgaaattacctaaaacatttcttttaaacatcaagccaggaacatccaagttacttgttctttacaatttaaggattagatcaaatcagcgatatcttcacaaatccatccataagaactttgccaaagacttgttggcttcatg

SEQ ID NO: 395420 - DNA, 317 bp, Homo sapiens
ctagaggatcccttatgctccctcttcaagtcctttctgggtatcacacagccacatgtgcaaacatactatcacacatgtacacatgcagtcacacctttacacatgtgcacacacatgcatataacacacatgcatataacacacatgcacacatgtacacatgcagtcacacctttacacatgtgcacacacatgcatataacacgtataaacacacatgcatataacacacatgcacacagatacacatgcacatgtgcacacacacatgcatttatgcccagctggacccaggattgatgtccctgagccca

SEQ ID NO: 395421 - DNA, 505 bp, Homo sapiens
ctgaaggtcacatgcctcattgctcttggagaataggttgacttcaagttcatgttcttctcttttactgaagttgcatttattggtcttagattatctgtcaagaaggatgggaaggaaaattaaaatgcaagctccaagagggtacacgctgttttgttcatcattttccaagtgtctagcatagcttgaagcataaataggaatttaataaatgcttattgaatgaacgaagatcagtggttttcaggttcataatttcattctttatacaggagattctttatgttcataatctcattcttaattacttcactaaatcacagagattaagaataagagttttggcatcaagcaggcctggattaattgttgactttggttaagttactaaatattcctttaaacctcaatctcttcttctgaaaaggtgaaaaatggggttgtgtatgtgaagtgctccgaagtatttggcacacaataaattcatgatagatgggcttta

SEQ ID NO: 395422 - DNA, 320 bp, Homo sapiens
atatcctatgcagagttacagctcagtaaatgtaatcttccaacctcattttgatgactgcatacaatcccactgtatggtgagttacatgttggttatttaagatacttataatttgggcctgggcacagtggctcatgcctgtaattccagcacattagaaggcggaggaggaaggattgcttgagcctaggagtttgagaccagcctgggcaacatagtgagactccatctctacaaaaaagaaaaagttagctgcgcttggtggcgcatgcctgtagtcccagctactcagaaggcagaggctggaagattggttg

SEQ ID NO: 395423 - DNA, 322 bp, Homo sapiens
ccggtaaatgtagatactgtgatacatcttcactacagtgttttcatagtctctttaaaagacatccaggtaaagggagaagagggcactaattcaggcaaataaaagaacataggtaagggcccaggtaaaagaaaggcaatggcctgacagtaactcaatgtggagagtgaattcctgtaggagaaaaggaagaaatgaggctaagaggttaataggtactagttcaagattgggctcgtaagccatgctgagataaatgatcaggaaagcaggtgggtgcagattccgaacaatcagtaactgggatgtacaaatgtgt

SEQ ID NO: 395424 - DNA, 561 bp, Homo sapiens
  misc_feature (532)..(532): n is a, c, g, or t
taaagttctgttgttattttagctgaattctatcattcggaattcttgaatgctatggttctgattctagaattctcaggttctacagttttagaattccatgctaagcacgttatgaatctaggattccaaggttctaaagactgaggttcagctgggcgcggtggctcacacctgtaatcccagcactttgggaggccgaggtaggaggattgcttgagcccaggagttcaagaccagcaccatggcggtgggcaagaacaagcgccttacgaaaggcggcaaaaagggagccaagaagaaagtggtggatccattttctaagaaagatcggtatgatgtgaaagcaccggctatgttcaatataagaaatatgggaaagacgctcgtgaccaggacccaaggaaccaaaatggcatctgatggtctcaagggtcgtgtgttggaagtgagtcttgctgatttgcagaatgatgaagttgcatttagaaaattcaagctgattactgaagatgtgcagggtaaaaactgnctgactaacttccatggcatggatcttac

SEQ ID NO: 395425 - DNA, 380 bp, Homo sapiens
gatgagtcagtaaaaatttgtgaaaaaggaatgctatgtggtcagaaaatacagagtacactgaaaattgaatgttttaatttgctactgtctccagtttgtaatgtgtcttgtcattttaaaattagattatttagatcagtttttttttctttttcatagtataaatgttgggaaattctgaatcttttttattcatcttgccagctcacgtgaaataatccttgatacggtactgaatattttgtctcttaggatgaaaagagcaacatttgtgtatgtgactatttgctgattttaaaagtatgttatattatttctttttggaaaaaatagagtcagattcagaataaagcacaagtaaaaatgagtgatgcaat

SEQ ID NO: 395426 - DNA, 127 bp, Homo sapiens
ctgtaaaatgagaataaaggtaatatctgcaccacgagtttgctgtgaggataaatgcacataaaaggactgtgcctggcatagaataaacacaaatggtggtatggtggtatagcctggtggatag

SEQ ID NO: 395427 - DNA, 726 bp, Homo sapiens
caatatcatattgaatgagcaaaagctggaagcattccccttgagaactggaacagacaaggattctcattcttgccactcttattcaacatagtactggagcagtcaggcaagagaaaaaatagaaggcatccaaattggaaaagaaggagtcaaactgtctttctttgccgatgataatgattctataccgagaaaaccctaaagactctgccaaagactccaggaattgataaacgacttcaggaagtttcaggatacaaaatcaatgtacagaaatcagtagcatttctatacaccaataacgttcaagctgagagccaaattaaaatgcagtcccatttacagtagctgcacacccacaaaatacttaggaatacatcaaattactttttgtgtgtagtattagacaaccagccacattctttgagctaaaaataaaaacatgcaagatattaaaaatacaaatagggactgaatagtacagtgaagaaaattacaagtagaacataagggaatagtcaagaattgtaggaaaaaataaaaatataagtacagactagatttctcatgtttaggaaattagactttttaaataaataaaaaattgccaggcatggtggcttgcaccaataattccagccacttgggaggctgaggtgggaggatctcttgaggccaagaatttaagaccagtctgggcaacatagtgagactctgtctcca

SEQ ID NO: 395428 - DNA, 406 bp, Homo sapiens
gattccattgtccttttgtggtatctcaacacagggctgccctcttactgttctgacctcagttatccttcccacagtctttgtatctatgtgacttagtgcttgttttttgtttgtttatttgttttgttggttggttttggatttttctttttaataagcttcctttcattgggtctcagaattcagttttatagttttcacaaatttttggacacttttgttcactggaaatgtgtgatttgggactgttgtttatacttggcctttttgccttgtgctgcccaagctatttcctgagtaggttgctgcttttttctgtttttcctgatttgcttctgtgaaaccaagttgtctagatcaaatagtttttttcatcatctattgcactgatgtacacctcatt

SEQ ID NO: 395429 - DNA, 360 bp, Homo sapiens
ccctaagccccagggtaagaacagctgccttcagctcatccttccctgaagctttgcaaaaccttctggccttccaagaaggcttgcatctttccctaaaactttttcttacaacttttcccaccaccctgactgaactcctgcatatgacttctcccagctcccttgggcatgtctctagacaggtaggactgccttggactgaagtagaatggagctggaagtcaggtcacagtactgcttcaggaacttcagttgggcctaaggtttgcaggccctgttactgcaggcatgaatgggcatggcgcatccctggatttttggtgaaaggggctcttggcaggactggggaggagtggg

SEQ ID NO: 395430 - DNA, 364 bp, Homo sapiens
atctgtgagggccctcttgctttgtcataatatgatggaaggcatcacatggtggaaaggaaaagagacggtgagagagagagtaagagggacaaaaccatgccctaaataacaaacacacccctgcaataacgacattagtccattcatgaggacagagccataatgacccaaacacctcttaaaggcgccaccccaataacattacattgacaattaaatttcatcatgagttttgaaggggacattcaaaccatagaccgtcctaatagatatgaagtagatatgcatactagatatgcatttccctaaaaattagaaatgtgttgagaatcttttcatgtgcttattggtcatttgtata

SEQ ID NO: 395431 - DNA, 716 bp, Homo sapiens
tgtgtgtgtttcctgtggttgatgctcataagcgttacctccgtggaagaggtttacctttttaggaaagagttggttttctgcttttgcaaatttgtaccaactgttgatcatctcaaggacagtggagaagggacaggcaaggagcctccctttcagtcttggcattcttcgaaaatagaaggtggcttccttaaatgatttcccgacttgactcatcaatgtaggaatgcctgtgttgacactctcttccccctctctctctccgtctctgtccccatcccttttactttttattataggacagttttcaaccattctgtggaacagttgagaggatgataaagtgaaccctgtatatattaaatcacctacattttacaattatttgctctgttgttttgtttttgtgggtatgtttgctaaattacagacaacatgatgttttaccacccaaatacttaatcatttcttttttaaaaaactgacatttttcttataaccaaattatcttaactttttaatgtcttttgaacccaaatggcagagcccttgcaattagccttgttcccgtggaaggtgtattccattgccggccaggctcatgcatccagcaggcgcctaaggggctcctccgatatccagccagctctgacaatggggccgtagcccagaacaaggcagatgggattggctcattatgtgggttggcagaa

SEQ ID NO: 395432 - DNA, 410 bp, Homo sapiens
tgtggaaagagctctgaacagggcagccacttctgagggctgacgaggcctccacacagggacgggaagggacaggaagggacgggaagctttggttacttttgtcttaaatgcacaatggcagaattcattggagcaggacggccctgtggtaccggtacatggaacaattttctctgacagtgatttgcaatctggttttctagcccacagttgctttaggaagtattttccaaaaataaatccatatatctaaatacaccaaaatgtgttattttccataattgctcaaattaatccttagctgctaactaaaaacagcagcatggaacaggtcaaggaaactattattgtggaattcacacaatggaaaaatgtttaattatttggtttgtgatttggtgttttta

SEQ ID NO: 395433 - DNA, 184 bp, Homo sapiens
tgctgggcttacaggtgtgagctactgtgcccaacccctaattttttccccgatgtatctaatctgttctttgatctgtttagtgagtttttaatgtatattttattgaagtatattaacacaagaaaattcacaaatcttaggtgtccagtttgatgatgatatgtgattgtgtgtactcctg

SEQ ID NO: 395434 - DNA, 473 bp, Homo sapiens
ctagtgcttactttattaatggaagctgtttgaattttcatttggttgtcttgggtttgagggcttctcatcagcccttttttattgtttcacttttcaaaaacattccactttgcttctcatcatctttgttcctcagttgaactgagagcaagtgtgattttaatgaagcactgatccttttttttaagagcttttcagcaggcctagatgattggcatttattatcattttgtgtctgccttctgctcagaatataaaggaatcttggaattattttctctcttctcttataggcccaaaggggtctcacttctctcccccttccttgctttttaaaattttacatctcctacaccttctagcatcccctggtacaatctcctacaggcccttcaaaatcttttgggcacaagtggctgggctgagtcagacagcttggaaatgcaaaaaggcaggccaggcagaaagat

SEQ ID NO: 395435 - DNA, 514 bp, Homo sapiens
aggtaatttgaaatcagactttaaagcatgtttgaaaagatggcaagcatttccatttgttttcatagctttttttaatgacttgactccaaataagaaggatgtcttattatttagcttgacaacatctatgttaaagagactaggatctaaaccccgaagagaaattcagaaactagaaaaaaagaaaatgaacccggggtgttaagctgggaaccaaaaagagcacatttcaattcttttccaccgtaatgccacaaaaccgtaccttaaaacttctaagattacaatcttaggtaagaaaaggaaatattttcagttacaaatagacatgtctttgcgccttcattctagactttttttttgagacggagtctccccgtcccccaggctggagtgcagtagctctatctcggctcactgcaacctccgcctcccgggttcaagcaattctcctgcctcagcctcccaagtagctgggattacaggcacctgccaccacgcccggctaatt

SEQ ID NO: 395436 - DNA, 200 bp, Homo sapiens
catgctctcaaggcagcaataaactgatcaagacacgagacagggttacaatatttttcagtcaggtttaatgcacacatttgcctccaccaataataaactttttgacaagttaacagtttttaagatgatcagtaaagtttttttttaaaaaaaaactctagttttaaaaactccagtgtatgctaacattctttaca

SEQ ID NO: 395437 - DNA, 253 bp, Homo sapiens
tgctgggattataggcgtgagccgctgtgcccggccgaatgcctgtttaacagacattcagtctactgccaaaataaagtaaaggcttgtcctcatggtagcctgcaagactgtttgcatcttcatgtgaagttgtatggcttgcttttctgcatttgttctgtcctcctctaggtgtgagtagtgaggtttcctctttggccaatatttttttaaattaaatttaattaattagttaatttttgagacacag

SEQ ID NO: 395438 - DNA, 203 bp, Homo sapiens
tttcacagggctcctttcctccagctgcccagccagcgcaatttagttattggcagaaaggaatagaactttacggcaggaatatggaccaacagtcaggcagtgatctccaccagctttcctcacaaaggctaaagcaactccattggatgctaatctgccatgttgactaatgactaaaccttttctgggaaggactctaa

SEQ ID NO: 395439 - DNA, 288 bp, Homo sapiens
aacagatccctgactgagcaatagccaatggccagcttgcgaatgctgcaggttgaggaagtcctgaagaggtaggtgaatctcagagcccagcgacactggcagaactcatacacacaagagctctccagctatgtggtggcttaggccatggctctgaacctggggtccttaatgggctacagaagctctgcatgccccctaaaatgacatcattttccagagaccgggtccttggcttttatctgatcccccaaaaggcttgcgagccatttgaccaacacactc

SEQ ID NO: 395440 - DNA, 302 bp, Homo sapiens
gagagaacctcctcctctggaaagctgtctaaattcaagacaaccagagccatctccttatggacggggaccgtaacttttcaatttacccagaattcacattcggcactctctgcctctcaatggctctctctctctctctgaacatgggtatctattctgctcaaacaaatctgtaagcacttctatttctaaaaaaacagctttggccgggcacggtggctcgcgtctgcaatcccagcactttgggaggccgaggtgggtggatcacgaggtcaggagttcgagaccatcctggctac

SEQ ID NO: 395441 - DNA, 452 bp, Homo sapiens
ttgttgttgagaccaaatacaaatcctacccagagtatgcagagaatctgaatgataatgttctggtcttgttaaatttgccatttgaaatttcataatgtaaatgtagcatgacacatctaccaatcatgtcttctctttgactttttaggccttaacccccacattcctagaatgtgatttctttcaatgttgacatacccctgccttccacacacagccatctgcaggccggctaggcaaaaggcctgtggatggagtgagaagagcaagatatgtccattgtgcaaggcatgcccaaacattttccaccatggcttaaaactgaagctggagagcatgatgtcaccatgtcagctggaggcaagaaaggacattggttggaagggaccactggtgttgcagagcaacagtctcgaaggctctcggaggctatggctgagaccaccccc

SEQ ID NO: 395442 - DNA, 248 bp, Homo sapiens
ggattgtttgaagattgaatgtgctgtgatgatagcctaggattattgtttttcaatttttgatgagcgtaagcattcttgttgactatatcttttgtaactactgacccatttagaatggcagaattagctggcagagagattgtcattcattttaagctttcaatctctgacatcttcatctttatttctcagtcttttttacttatcagtggtttactccattattttctccccttttaaaatgt

SEQ ID NO: 395443 - DNA, 319 bp, Homo sapiens
tcccccaacccctcaaacccccaatactgtactttctggaagcaagtcactataaacagccacacttagcgggtgaggagttatgttctaccttcttgaaggggcaatatctacataaattatttggaatttttctgcacaggagatgtgtttattttttcaggcatttatttctatgagtatacattcatggatattttatacttactgggttataatataattggatatttattaggttataattcaatgtcaccttatttattttgttactcaactctttatttttttaagttataaatacatatatatctcaaaa

SEQ ID NO: 395444 - DNA, 434 bp, Homo sapiens
cacagggtcctaaaggttccccaccccccgcccaaccaatgctgcgccaagttaccgttatacaagattaatgaccaattcaacttgataaggctgatttaaaaataaaaataaggctggccatggtggttcacacctgtaatctcagtgttttgggaggccaagacaggaggattgcttaaggccaggagttcaagaccagcccaagcaacaaagggagacgtcatctctacaaaaaactaacaaataaataaatagccagacatggcgatgcatgcctgtagtcccagctactcaggaggctgaggtggcaggatttcttgaacccaggaggtcaatcctgcactaagctgtgattgcactactgcactccagcttgagcaacagagcaagaccccgtctctaaaaaataaataaacaaataataaaaaata

SEQ ID NO: 395445 - DNA, 686 bp, Homo sapiens
atcccagctactcaggaggctgaggcaggagaatcgcctgaacccaggaggcagaggctgcagtgagctgaaatcacgccattgcgctccagcctaggcaacaagagtgaaactctgtcttaaaaaagaaagaaagaaagaaagaaacacccagaataggtaaatccatagagacagaaagccagaggtgatgattgcaaaacattttgaatatactaaataccactgaattgtgcacttctaaatgatcaatggttaattttctgttacacaaattttacctcaatttaaaacaattatatattaaaagacgtaaaaaccattcttattggatgggctgtacaaaatcaaatgacgagccagatttggtacatgggttgtagttcacctctattctattaatacactgagtgactaaagagtcaacagtcaaatataatgcataaacgtggactgaagtcaagtgagagctataaaattttatttaggacattggaaaattctaaatattagacattatggaatttgaattttcttcagtataaccgtaaatctgtggtaagatcatgttcttattcttaggagaggcagctaaaacatttaggaataatgtgtcatgatgtatgcaaattactttcaaataactcagccaaaaacaacagaaaattttaaatgtgacaattaaa

SEQ ID NO: 395446 - DNA, 504 bp, Homo sapiens
acggagtttcaccatgttggccaggatggtattgaactcctgacctcagatgatctgccctcttcagcctcccatagtgttgggattacaggcatgaggcaccacacctggtctcccccagatcaccttgaagatcatgcctggaacctcagcatggagtgagtctccttccccgcctttcattgtcagtgtcagcacttgaaattctcatcaccctgtgcttaaaccagctggaatcatttctgctttccgcaagtggatcctgacctatatagtcaattccttcctgcagcctgggcctggctgcaatatggctgccccacctacgtcaaccacttcctgggacttgaacaccgcatgaggccgagcagatgagaaccacacgttcaacctcctggaaacagtttcctgattttgtttttgtttattaccagaaaaggaagtgtctgaaaactatgtattttccagcagacaaactgcctgtaacctaaactagcctttaac

SEQ ID NO: 395447 - DNA, 285 bp, Homo sapiens
ccgccccccaccctctcccaggcacccagcattttgagcccagaatcatgggaaactcccgtcaggtccacacggtgctgagcccaagcctgcagggcttgggggaggtgggctgctctcagcttcccccagcctggcctggcatctcctggacccccgcaggggtggcagctcagccccttgtgggttttttctttggggggacagactctcgccctgtcacccaggctgagattgcgccattgcactccagcctgggcgacagagtgagacgccatctggaaa

SEQ ID NO: 395448 - DNA, 433 bp, Homo sapiens
aggaaatatggttatggtgagaaagaaaagatagctaaaaacagttaaaaatgtaaactagtctaggttaataaaatgtggaatccaggataaaattttatagtttcaaagatgatgactaagtggatattgacactattcgggacagtggggtgtaaatagttgggaaatagtaagttacatttaagacctactcagttacttggtcctgtggcttgtttcatactgaaaaatgtatgagatcacctacagtggagtttagtcagcatacacagtgagtacatggaggccagacaaacttttagttgaaatgcttgcttgctttggctcacggcaacagtacacttcttatggacttttattattaattttcatcattagatccctaaagcctgaaaaaatatagggcaaacgtatttcgctgtgtattccg

SEQ ID NO: 395449 - DNA, 736 bp, Homo sapiens
gaggggtatcttactgcctaacttttaattttaactattgtttatctgtatgcttaatttggctttttattttttttgttttcctagtgcatttggattttacttagcttttattatgaagccatgtgtttcagtttttttctgtatgtgtaggtgattgggcttatgaattgatcaggagcatggaggaataggtacatctggattagcgagtgtgtgaattcttgagctgatgggcctaagctctaaaggatagattagttgtcagcatattctggtctagatagtatggcatagtttttaccagtatgctttcttttccccatcttcccagtttgctttttactctaatggcttgaaaaagtataggttaggttggaagtgagagaacaaaaatctgctaatttaactctgaacaaggaaggctttaggctgatgtttgaaaagtgtgttccatggaatactggtctcctgaggtagtctgagaaaagaagggtcctgtagtccaggaagttctgcatactccttttgtgaattcaggatgtgttgccatattaagtctccaggatttgcagtcaagaaagttaacttggtttaactgagcattttctgaaattacttggttaaggaaatatggtttttctttcttttattcttggtactagttctgaggatatgttaagggaaattttaggggattgttaaagatctgtggatccttgggtggaggcaggtt

SEQ ID NO: 395450 - DNA, 609 bp, Homo sapiens
gtcgagaaataaaaatttcttttttccagagagaaatatagcagtagctacaagggaaagtgggcaatctaacctaacttaggatagagactgagcatgctttgggtgggggaagcagagattgagaaagaacacaatcaattcagttatagagacaagagtacagatggggtgatttgctttggaaggaaagaggagaatgttttctctgagacagaagggaagggactgagaacagatgaagagagatgtctccgtggtagggtgggaagccgaggagctgaggtgtggcagctttgattctctctgtaaagcagagggaacgcatcgcaaggacagagtgtggggagacagcaggtcactgatgagcctgcagtccgagcagagggacttggacagtgcgaagaggaggagtgtcattttgttggagctggaattgggtgccgctcctctctggagtccacctctcaatgggcactgagaacactgatgtccccagatacacttgtccctgcctaggttaacacaaagagagtgccaatgattgtactctccagctctttatgttttcattctatgcagatcctggcccaaggtgtctaggtcact

SEQ ID NO: 395451 - DNA, 608 bp, Homo sapiens
cgctgccatttgccacgtatttgccatagacccaggactattagcatctttaacccacgtaaccacactggggatggctggggaatgttcatgtccccattttacaggagtggtgattaaggctcaaaggatggaggtgatggatcaaagtcgtctgccaagtggtggcagcattggttctcagaccgaggcccgtctacacagtgctgtgcctcctcccaccacgaatgcacgtggcccactctgcccacgcgtccctgggtgtgattatgaggcacttggggaggggcttgcttgcctcaggtgaaagctgggcttgatgcttccagcggatgtaaagtttgcaccaggaatggatccccagttccagagggacctccaaacccagcagggaccctggtgaggccagtgagagccagagcagcccttcccctccttcctgctgcccctcccctccttcctgctgccccctctcccatcacaaccacttcagcccagaagcgttctatccaccccgcaccccaccccactccacctgccacccagctaaacataaccaccttggcgagcctgtcagaaacagatctggaccgctgtggtaaaacagg

SEQ ID NO: 395452 - DNA, 187 bp, Homo sapiens
gatttcagtcttgccagctgccacaatcaaaagagacaattgctttgaatgaatgaatgaatgtgtgtgtgtgtgtattctattggttgtatttccctggggaaccctgactaatacagttgtgcaaaggtggatgtgcaagaatgatctacttccggtcatgttgcattcctgtcactggagacag

SEQ ID NO: 395453 - DNA, 324 bp, Homo sapiens
aagtacgtataagaataattaaacaatttaagtgtacacttaaaaatggttaagatagtaaattttatgtgtttttttgtacaattaaaaagatttatatcaagttatgcaacgttttttaaagaaacaagaaaatatcagggtttaatcaattaagcaacattaataactttatcaatattaataactttatcataaaatacttaaaatgtggaatatagagaaaatatataaagaattacaaaaaactaatcccatcaacctggagaaaactactctattttggtacactgccctccagcttttggggacacatataaattg

SEQ ID NO: 395454 - DNA, 254 bp, Homo sapiens
aaagaataaaacaaagaataaaacaaacaatgtgaccagatttaggaggtatttaaggaaaacctcagagtcacttcagagtgacagtcattgaaatgggatactaaaagaggtacagaaatctccttatctggctgtgttcaaaatagaatgtatttttagtagagacggggtttcaccatgttggccaggctggagtgcagtggtgccatctcggctgactgcaacctctgcctcccgggttctctcatcat

SEQ ID NO: 395455 - DNA, 357 bp, Homo sapiens
aatgaaggttatgatgaagggagtggtgaagtcctcttgttgattttcctcctgaatatttcagaaatctatctgctcttcttcatctccattgtcaccactaagatactgtcatctctttccaagacgattgcagtggcctcctaataggtttccaacattcacgcgtgtattctctaatccagtgcttcccaggcttttttttttttttttttttaacagtacagctctcagaaaattgtatttgcacaattcactggggtaaccggacaaaggtgctcaaagctggaggcaactgctcaggggggttttggctgccctggaccacccagccactccagggactgagggatcaat

SEQ ID NO: 395456 - DNA, 257 bp, Homo sapiens
caatgaccaaggtcaggggagcctggggtgacttggaatgtttaaaagatccagagaggctgagggatgttctaagctgattaaggagtagttctgaatctcaggcaggacatgcaatgaatggaaggactcttcagaacagttctatctgagctgaggaccgtttgcagaggggcctctgtcctttggagatgcgcaggactcaagctagatgtccactccagcccagctccacctcaattcactgagtctgaccc

SEQ ID NO: 395457 - DNA, 388 bp, Homo sapiens
gtctctagaaccaaaagttatgaatgccaattaagtttcgatttggcttatatgatctcaaatcttcaggtttacaaaacatatcttgagccaccacccagctctgtcacccaggctggagtgcagtggcaccatctcagctcattgcagcctccgcctccgaggtttaagcgattctcatgcctcagcctcctgagtaactgggactacaggtgctcaccaccatacagggatgttttttctatttttttggagagacacggtttcaccatgttggccaggctgctctcgaactccttacctcatgatccgcccacctcggcctcccaaagtgctgggattacaggcgtgagccacggcgcccagcccattttttcttttcacccac

SEQ ID NO: 395458 - DNA, 218 bp, Homo sapiens
gaaatcattatctcatagcatttgtgttacattatttatcacacctatttcatttcccttaacggaaagagcagcaaaagctgtaccttgtctgatgttcaaactcaggaccttcagaatacgagattgacaggtggcctgctgctctaagagagcaactgttcctaagagctgagatccagattattaaatctcatttcccacacactgctgctttt

SEQ ID NO: 395459 - DNA, 527 bp, Homo sapiens
agaaaattccaagtaagtgagacatagaagatgcttaacagtaaagagactttctattaggaagttcaagtgatgcacagtgctacctaggaaactctcctatcagtttttggagtacacctggggcaaatggctaatattttcatctgctgtggagatttgaaattaatagcatcttaatagaattttacttctgattgttcctggcacccccaaatgtcaaaatttgacaccagaagagctggcaaatgtgtctgaaggaaatttttttaaatccccacactcagtttaataaggtcaccttattgtagtcccaatgcaactaaaacttaaattgaccacgctgtttaagaagaatttttctgggtacttctgtgaacgttttttggaactaggaaaaaaaaaaaaaccctagttattaaatttcgaaatgacttgagaacaaatttgatgtttagaaacctaacccaaaggcgataatttcatgtcatccaacatttacttctttttttattagcaaataaaat

SEQ ID NO: 395460 - DNA, 277 bp, Homo sapiens
cccaagtggctgggactacaggcgcccaccaccatgcccagctaatttttttgtatttttagtagagatggggtttcaccgtgttagccaagatggtctcgatctgctgacctcgtgatctgcccgcctcggcctcccaaagtgctgggattacaggcgtgagccactgcgcccggccctgttttcactcttatttacttccacatttctaaataatatgtttacattgctatttttttttttctttttgagacagtctggctctgtcgcccaggct

SEQ ID NO: 395461 - DNA, 522 bp, Homo sapiens
atataacagatgaaggaaagccaccgcagggccttttcgaactgagttcagcttgttcaacatgttccctgagttcgtactctttctgatacacatgtctgcataatctgggaccgacagagcttagcgaccagtggggaatgagacaaggacactctatcataattcagtaagatgacctacctagaagcaagtttctgaggtttctcagttgcttgtatataagcctagcagtgacagaacacaaggtcagattggctgaggcataaaagatgagggggaagtaattcaggaacagctgaagagccatgcagggaccacattcatttattctgtaacaactacttattgaattgctaaagttagtaatcaagatcccccctctttttgttgagacggaatttcactcttgttgcccaggctggagtgcaatggctattcacaggcgcgatcccactactgatcagcacgggagttttgacctgctccgtttccgacctgggccggttcacacctccttaa

SEQ ID NO: 395462 - DNA, 362 bp, Homo sapiens
atacattgactgatgacatttgacactatacaagttatattggatgggatgacaataatctagactgccaagcctctttgtagtatccccagcatttaaaaataaatgttgggtgggacttccaggctatagccaagtaaggaagtcaaccaatcttcttaggaaagcaaatataaggctggtcaaaatgaacaaaaacaatcacttcagtgctttggaaattgaataaggcatacgacaatcggggaagcatttatactagaaaaactgctgaacttttgttagaacagtgggaatctgtggaattgttgcctagggttgcatccatccctaatgcagttcagttgtcatggagattctag

SEQ ID NO: 395463 - DNA, 595 bp, Homo sapiens
gtcccaaggatgagaaactggcaagggcagggggaaacaaaatatgtatgatagccaaattatacagacagaaaagttatggacaactgattaatttcaataattctaggatatgttttaggtgtattcagagggttaaagctcattaagataccagatgaaacttgcaagtacatctccattaccgcagttaataattatacaatttctcaatctgcagaaagccgcttcagtcggaaaaaccaatacaaccataatcctttatctttagagtggtcagagtctgatgaatgggtcaaagatttctaaaacaggatgaactgtatcagcaggttttgtctttgcagaacactgcaactaaaaaaaatgcttattacaaaacatgtatcattaaaagagagtgcttttcccctcttattaccagggagtgaaaaaactccctgtagtaatgccttttcatgtctattttaccaaaaacaccaaaaaaaatcataaagttgctcaatagcatcaaatgacaaagaagccacatgggattgtaattaaaagcaagggatttggaacaagagagatgtgggttcaaattactactctg

SEQ ID NO: 395464 - DNA, 409 bp, Homo sapiens
cacgttttggttagtcaaggaaggccaactgttcaaaccatgttcaaataagcaaataccatgctggaacaaatccagctatttttttacttcacttccattctctgcacatcacgttctctgcccataaattttcttccaccaagcagctgtcctggagtctctctcaacctattatggtttgggggctgccgacgcttaaattgctttttcctcatttaaagtgttacatttaatttgtctaaggttttttagtgcagaattgtggcacacacaaggatggaagaaaaaccgtgaatccacacacattaatatgttcttttcctttgagaattctttctttctttcttttttttttttttttctgagatggagtctcactctgtcacccaggctggagggcaatggc

SEQ ID NO: 395465 - DNA, 315 bp, Homo sapiens
cacctcccacctgacctcaccttcactgctgtcgtctgtgtggttgacacaccaaacccagccactctttgcattaggccttcgcatcggctgttccccctgcctggaatgctctttccccagtatccgtttggctcgttccctcattatcttcagtcctctggttgaatagcacctccttagcaagcccttccgtgatggctcgatcttatttatttgtttgtttgtttgtttgttttttgagacagaatctcactctgtcgcccaggctggagtgcactggcgagatcttggatcactgcaaactctgcctcc

SEQ ID NO: 395466 - DNA, 209 bp, Homo sapiens
catttaagaaaaatggcagcagaattatttgcttttgagatctctggaagataaaaccattaggccaaaattggcaatctaaactcaaggagcagtattcagcatataagacaatatgggagaccttaaattttccctttgtaaaaaaggggatttcttagaagtcacaagttaacaaaaatgcaaatcctgtcacctgcacaagggtc

SEQ ID NO: 395467 - DNA, 454 bp, Homo sapiens
aatggtccccattttataaatggtaagggtccaagaagcaaagcaattcagttagccagcttcttacaggcaggctcagattcaaactcaagataatctccaaagtcaacagttttccactgcaccaaagggcctctgtgttacatgggccagttagctcagtaagtttcccaagcacacatcagtgccagaaaggacatgtgctcttccactaacggagaatccattcccgtgaaatgctaatgacttagtgtcaattcatacattcattcctgttttatcgatcagccttttatgagtttgaccaacgagttcattcataaggaaggcttgatcactctgagtagttggataaaaatccaaattctgaactaaaaggagagccagcccaagatgccaagacctcttagagctgtgtccatgttaatgacaacagaaaaggtctttggcatca

SEQ ID NO: 395468 - DNA, 598 bp, Homo sapiens
actcatataattctcagatgtgccttaatttttaaaatatgtgtatatagtttatacacatacatcataagttggctgcattaaggagttggaaaatctgggacttcatttggatttggaaaatcagttaacatctataaattcaagttcctcattttgaaactgtgttggcaatatctactttagctacctcacattgttctataggttagaatgaaaaattgcatgtaaaatatactgtagctctgacatttgtacggtccctacagaaattttacattagccaatcaacactttttgaaaaatctaactccagtggtttttaaaatgtatgaagtgcttgtattttagtacaaacatctagttacatttaaaacattttgtgaaaagaattgccataaaatatttttaaagttcacatctttcttaccgtttacattcatgttataggctttttgtctcctctcctttcatttttttctactcccagagttctggaagctgaccaaagagatacttgtgtgaaatgcttgtattttccctaccatatttaaggctctcaagagcaattttatgctcctgttttaagattttttta

SEQ ID NO: 395469 - DNA, 269 bp, Homo sapiens
cgagtattcctgtggctgaactagtgagaagagaataatagagatcctaaactccctttttgacttatggggactcagggttagtaggcaaatgaaggtacctgcctcggtgttttatgtggaccatcccatgcattttgtaaacctgtgttccactcatttgtttctgggtcagttgtgattttggtattgaatccttcatttctttcggtttattcatttcagaatttttttaaagattaaaacaactcccacgtgattagattttg

SEQ ID NO: 395470 - DNA, 349 bp, Homo sapiens
tacaccctccgctacactatctagttgagaatcaaccagctcctggaacactgagaccctctcacagaggttcattctcagtaaactgagaacagattgctcaacttctacacaaaaagaagggagaatctttacctagacaaatgacagtcttacagttttcctgcattacatcattgtagagggccttctgagtgtaatccagtaactccaattcttcctgagaaaaatatatggccacttcttcaaatgtcaacaagctctaaagaagagaatggacttcagctctgaacttgccactgcagaagcagcctaactgcgtatgaactgcatggtaggccaggtgcta

SEQ ID NO: 395471 - DNA, 845 bp, Homo sapiens
aacaaaacaaaacatgctgaaatcgaaaacaagacatattacttagagcagctatcataggaccaatggaaaagagcataattagtaaatgcccccttctgcattaatacagggattacatgtcataattccatgtagcaggtgatgggacttcctgacattcctgggcccagcatacaatttctttctttcttacttttttctctaaaaagtgagagagggtcacactatgtcactaggctggagtgcagtggcgtgatcacagctcactgcagcctcaacttctcaggctcatgtgatcctcctgcctcatcctcccaagtagctgggaccataggcacatgccatgacgcctggctaattttttattgtttttgtagagacagggctttccttatgttgcccaggctggtctcaaactcctggcctcaggcaatcctcctatcttggcctcccaaagtgctgggattataggtgtgaaccaccgttcctgacctacaatttcttttcttttctttttctttttctttttttttttttgaaatggggtcttactctgtcacctaggctggagtgcaatggcatgatcttggctcactgcaagctctgcttcccaggttcaagcagtcttcccacctcaacctcctgagtagctggaaccaccacgcccagctaatttttttgtatttttggtagagacagggtttcaccgtgttgtccaggctggtcttgaactcctgagctcaagcagtccatccatcttggcctcccaaagtgctgggattacagtgtgagccaccatgcccagcccacaattttttaaaagcagatcattgtatatataa

SEQ ID NO: 395472 - DNA, 320 bp, Homo sapiens
tgtgtttttctcatttcacagttaaggaatctgaagatgaaaaagatgaggggacattcccaaagtcgcacagccctcaagccagtgcgaaaatgtggaccccgctgccttgtctggtgcccatttctggagagagaaaagcaccgctgggtcgtgggggagactggccggtggcagcttctggcatctcacctgtctctgcacgggttaagaatctcccttgttgtggatttcagaccttgagtgtacagctccccatctggactctcgtgaaggtcgtggtaaacaacacacagagcatctctttgtcacgggctcag

SEQ ID NO: 395473 - DNA, 300 bp, Homo sapiens
tttctgcaattactctgctgaaaggaaaacaggctactcagcactcatttgctttgagttaaagttgtctgtttcatatcctggaaacctatcgtgccttgttttacagaggcatttcatggtttacagtattatacattggagtaaaaataccatttaaaaatcactaaaaagaatagttcgtagtgactttcaggacaactaggacaaacatattatagtaaagcatgggtgaattttatggtatatgaattatatcaaaacaaagctttttttaaaataatgcatgtagagaatagc

SEQ ID NO: 395474 - DNA, 223 bp, Homo sapiens
gacctgagtcaggagagaggtgctttagcgagacaggtcttgctatgtggcttaggctggtcttgaactcctggcctcaagcagtcctcccgcttcagcctcctaaagtgtcaggattacagacatgagccaccaagtccagcctgaagatttttaaaaattattgttagtagtagtcgccagagttactacatccaaagtccctactaagttctaagtagtc

SEQ ID NO: 395475 - DNA, 259 bp, Homo sapiens
aaaggtaccgtcctacatacagtgaaatctcgagagaaaatctcaagaatggctgggagagatacaagaaatagaaaactgcatgtgccaatagctactcttagataggtgcacctgcagtgaagagaccagcatcagacggagtgggaggcccatatgggggaagccagaaacacaggcagagggacagaagcagacagtggagagaaactctggagagaaactcagccttgcaagatggaaagataagcttgcctgt

SEQ ID NO: 395476 - DNA, 676 bp, Homo sapiens
tagcaaggggtaggccattctcccaaagagctaacaatgaaactcctaatacttgtttagcagtcactacctgtctaattctccctggagaatgggacaattctgactgcctttcctttaatcatggagggaggtgaccattctaacaactactcaggacacatcccacaccacctgacccacagaaccacactgccttctgctgagtcccttgcatgccaggcactgggttaagagctttatagatctgaaacccacgcgaggattctacaatgagaaactggaggctcagagaggtaaagtgacttgcacaaggccacacagctgacaagcactattcttatggcccgacaaccaggtctgtttgccccaaagacaatagtgtcaactactagacaaccctgccctccattctagtgttttccacatattacctaaggatggttactctgcaatatgcaatgactctcattgtatttccatttttatatggttacttatctttcaaccagactgccagccacctgatggcacggtggcagctgcaccagctgcacagcacttggcacactggcagagccgatgctggtatttagaggagaaacatacacaagtggtactcaagaaagcaagaaaaggggggggggtttcctgtagagatgacaccaggttctgt

SEQ ID NO: 395477 - DNA, 285 bp, Homo sapiens
gacatagcaagaaggcagatgtctagaggctaaggaaacactgaacctgttgacaccatgatctcaatgaaactgtgaaaaaatgaatttctgttgtttaagacactactctgtggtaattgcttaggtaagtataacaaaatattttgagggagagaggttttaggatgttgaaatcaagaacacgacttgagacatgttaaatttgctgccattttagatggcaagtgaattacttagggctttgactcatctccaggtgcctgagctgctgctagagtatgg

SEQ ID NO: 395478 - DNA, 464 bp, Homo sapiens
aagtctgaaagtgtccgactttgacaggacaaaatgcatcagatacataagatgcaattctgtatgttgggctgcatagaacatgcaacttcaacacaggcttacttactattttagtaccagtacaggtttaaaacctgtaaatacaggaattctaataaattcttcaaaatgtcaaaaaatgatgtatttataacttactttgaacagtcaagtatattcctaacaggagagaatttccattttgatgagacaacaatgacaatgaaatctttttaaaaattcacttctctggtgattggaaagttttctcctagattatctctgactccatacgattcaaacctcatttcttctccattatcctcacactcctggtgttagttactttaagacatagtcatattaaaataccacctctgaccctacagttttcatcaattcattgggtaagttgatatagg

SEQ ID NO: 395479 - DNA, 319 bp, Homo sapiens
cttcctgtaaggtcttgagcaggtcatttaactgcacctgaaaatgaaaataactgtccccacctcaaccagttgttgtaaggattaatgagataatagatataaaagcatttgataagctttaaaatgttttaagaacataaggtctactatcttccagtgataattgagaatagtaattgtgtgttccttgtttgcttcattaggcaaggtgatcaaaaatatttgtcaaatgaatgcataaattaatgaatgaatgagaagtgagtgagtgaatggacaagtgaaaaaatcaataaatgcctaaatgcaatctaag

SEQ ID NO: 395480 - DNA, 324 bp, Homo sapiens
cctgtgggccacacccccttggtcgcacctctaacctcctggcatctagcggtgaagccccagaacctggcttctcctggcatggagctccatcatcttcatgatgttgttgagtggactcctttgactgcctctccaaccaccagaagagccaccaccaaacttattattgatgatggtgcccctctcccagcacattctttatggtcttagtgaagagtgagctttctgctccttctcttggactatgaccttctcttgggtcttttggtctgacataatatacaatctctgcttccttcagcatatcctctggcttctgac

SEQ ID NO: 395481 - DNA, 274 bp, Homo sapiens
atgaaaattgtttcccctcctttttaagtgactaaacatcttttattggttttatgatatatatacaaatagactagtggtgagcatagctgccttccaaatggactatacaattttattttttatttatttttttagatgagtcttgctctgtcacccaggctggagtgcagtggcgcaatctctgctgactgcaacctctgcctcctgggttcaagtgattctcctgccttagcctcccaagtagcagggattacaggcatgcgctaccacg

SEQ ID NO: 395482 - DNA, 287 bp, Homo sapiens
ctcagcctctcaagtagctgggaccacaggcaggtgccaccatgtctggctaatttttgagtttctttgtagagatggtgttttgccaagtcacccagtttgaggctggtctcaaacacctgggctcaagcaatccatctacctcagcctcccaaagtgctgggattacaggagtgagccatggcatgaggccttgtggggtgtctcttttaaatgaaagcatactctgtttacgtatttgatatgaaggaatatccttcctttccacaaagacaaaaattatccta

SEQ ID NO: 395483 - DNA, 193 bp, Homo sapiens
gtactaagaggtctaacaggcatttgagattaatagatcccaaactgagttcctggttcccacccaatcctgctccttccaccagccttctttatcatagataatggtggctctgttgttccacctgttcaaacagaacacctggagtcaccttgtactcttattctcctagtccacttctaattccacagaa

SEQ ID NO: 395484 - DNA, 745 bp, Homo sapiens
agagcaaccttacttatgttaccataaatgagtttgttaaattaatgttttttaaatttaccagttttaattcctaatatggtaaatcctaacagatatacctatgtaaacaaaagctctttgggatcttcaatatttttaagagtatgaatgagtccctgagacccaaagtgtgagaaccactgatacagaaatcagacttcggtaacttttatgatcaataacaggtgtccccaacccctggaccggtaccgatcgctagcctgttaagaaccaggccacacagcaggaggtgagcagctgggggagtggggagtgagcactatggcatgagctccgcgcctccagtcatatgagtgctggcattagattctcagaggcatggaccctattgtgagctgtgcaaacaagggatctaggttgtgttccttatgagaatctaactaatgctttgatgatgtgaggtagaacagtttcatcccaaaaccccaaccccctatccaccatccatggaaaaactgttgtccacaaaaccagtccctggttccaaaaatgttggggatctctgctctagaagatagctttacattctgaaggtttctgggcacatgaaataaccattacccagaccaaatatttaatttttatttatttacttaaaaaaaatttttgagacagtctcactctgtcatccaggccagagtgaggctcatgcaggttcactgcaaactccatctcctgggtt

SEQ ID NO: 395485 - DNA, 762 bp, Homo sapiens
tgaacagtggagctcatgatggcattagagcaacacccattttactgtgttgtgaggagtaaagatcataatggacataggtgctcttgattcatttgggaaaaaagaggggcatggggcagggatttgcttgtggaatagtgctctgagggcagggaaagcaggtagctatttttatgggaaccacacacaaccctaatactgtaggagttgaaagaacaagcttttaggatggctcccagcactgccccttgggagctgtctgccttgggcactctttgccataggcgctgtctgtcggtgccccaacgacgtcttcatcctggaattcaatcagacctcaaagccccgtggtgataatcaaaagtatcaatatgtggcaaaggtgtagaagagtgattggcttgtaggaagcacttaaggcaggtgcacaatcaactttgtgattactactaatataataaagcagcaggttgtttactctgatgtcccgtggaccccttaagtatttctggagccaggcctatgtctgcaaaatgatgagttcctgccccagagagctacagcatctttctgtaaaaccataattgattcagactgcacctaactaacctagccagaaagttggaatttcaagatgaccaactagacctttaatagttcagtgcttttatagttcatgtccagggtcacatgtcactgggaaacaaacctccatccttctgtcctgtgaaatgggtactcatcctcaaggtggtagaa

SEQ ID NO: 395486 - DNA, 638 bp, Homo sapiens
gagcggggtctgggctgagagttggggtgtggactgagagtggggtctgggctgagagtggggatctggataagagtgggaggcctgggctgaaagtgggagtctgggctgagggtaggggtctggtaatgagagtgaggtgctctcagagttaaatgctcagtccccgtgtacacctggggccctgccaggcagttagtaggattcagattattgtcccacactatttattgaggatctattatatctaagtcagagcaggaagcacggctttagtttcctgtggctgccataacaaatttctgcacaattcatggctcaaaacaccaaaagtgcatcctcttgcagctctggaggccagaagtctgaaaacaaattatgggcagacttggctcctcctggaggctctgagggggaagccgccccaggcccgctcctggctcctgccagctgccggcagtgctgggcgttcctgggctcagagctgcagcagtccagcctctgcctccacttccacagggccttcctccctgtatccctttatgtctcacatgtccctctccttttcttatgaggacacctgtcatcaggtttagggcccaccctaacccaggatgatctcatgcagagatcctcaa

SEQ ID NO: 395487 - DNA, 837 bp, Homo sapiens
gtgttagttttatgacttgtgtttttccagaaatttgtccatttcatttatcaaatttattggcataaaattgttcataatatttcctgtcaactttataattctatactctgtatagatttattcccaattcctatttttatccccaatattggtaacattttttaaatccctgatctagctatttatcaactttattgatctttttgatctgtttcctatttcatctatttctgttatctttattatttccttctttctactttgtatttaatttgttctttctctagcttcttaaatggaagcttaggtttagacttttttcttttctaacattaacatttaaaactaaaaatttcactgtaatgactactttggcttcatcccacaattttaaaaagtatgtgaatttttctgaaggacacaatttttaatatgtagtcattttattatcatgtggttcaaatttactttcattatggtcagaaaacatactctgtaagattttaatcttttgaaatacactgagactcatgtcctaacacacggcctaccctggtgaatcttccttgtgtacttagggagaaaaagtgtattctgtatttgttagttacagttctataaatatcaatcaggtcatggtagttaatagtgtttttcagatctttgatttctttactttggtgggggcgatccagttgtattatcaactacagagtgaaaagtgtccaactacggttgtagtttgactgttttccctctcttagttgtttgcttcatgtattttgaaactgtatttattaggtgcatatacacatgtaattcttataacttcct

SEQ ID NO: 395488 - DNA, 404 bp, Homo sapiens
cattctaggtgaggttgagaagaatgtgtgttttgttattgttggatagagtattctataaatgccaatcagatcgaattgattgatagtgttcttcaagtcaactatatcctttatgtattgtattcctgctagatctatcacttactgacagagggttttgaattctccatctctacagtgggtttgtctttttctctttgcatttctattcgtttttgcctcgtgtattttgacactctgtaatcaggtgcatgcacatttcttggagaactaattccctttgtcattaggtaggtttcccgtttactcctaacaattttccctgttctaagtcttctttgtctggtattaacatcgctacttcagttttcttttgatcagtgtgttgtctaactttttcc

SEQ ID NO: 395489 - DNA, 599 bp, Homo sapiens
cacaccacctgagtcaagttaaaggacaatgaaaaactgaaaaaaaaagatttataatggtacaaagtgttactatctcaatgtataaagaacttccaaatgataaaaataaacattaaaagagccaacaatgtgatagaaaaatgagctagaaaaatgaagagacagttaaaaatgccaatgactcctacccatatgaaaatatgcttagtatcattcataataagagaaatgcaaattaatgctacattgatatgtttctcacatacaaggactcagtggtgtgcacaccacctgagtcctgccagccctaaggaagttccttttatgcattggaggaaaaacatgttggcttttctcttgacgtgggagaaattgaaaagaaggggaaggggaaggaaagaaggggaagaagatcaaagaaggaaagaagaaggggaagaaaagaaggggaagaagatcaaaacccaccatgccccaggctcaacagcatgccgatggaagtggaagagcctgaagtcttgcaggactcactggatatatgttattggactccgtcaatgtactttgaactacctgactcaggtggtgtggggtac

SEQ ID NO: 395490 - DNA, 613 bp, Homo sapiens
tgagctcggtacccatttgtcagttttggggggcagatgactcaggtggtgtgaaaaaaaaagatttataatggtacaaagtgttactatctcaatgtataaagaacttccaaatgataaaaataaacattaaaagagccaacaatgtgatagaaaaatgagctagaaaaatgaagagacagttaaaaatgccaatgactcctacccatatgaaaatatgcttagtatcattcataataagagaaatgcaaattaatgctacattgatatgtttctcacatacaaggactcagtggtgtgcacaccacctgagtcctgccagccctaaggaagttccttttatgcattggaggaaaaacatgttggcttttctcttgacgtgggagaaattgaaaagaaggggaaggggaaggaaagaaggggaagaagatcaaagaaggaaagaagaaggggaagaaaagaaggggaagaagatcaaaacccaccatgccccaggctcaacagcatgccgatggaagtggaagagcctgaagtcttgcaggactcactggatatatgttattggactccgtcaatgtactttgaactacctgactcaggtggtgtggggtac

SEQ ID NO: 395491 - DNA, 459 bp, Homo sapiens
atggtgtctcgtggtcagaacaaatttatagataaaaaaagggaagtgacgtacagaaattggaagtgaggctcagaaacagctgaattagttacaggttggcatttgccttatttgaacaccgtttgaacacccagcagtgtatgaatggttgaagtatggctgtgctgggattggctaagactcagctattgttataggcactattgttataacctctaagttaggttttcaattttccctacctattaagttaggttgcagttcatccaaggactcaaatatggaagtacagagtccttctcatttagtttgctttaatacttcccgtgaatcttcggagtttccctctgttgcccaggctggagaactcagctcactgcaacctccgcctcctgggttcgagtgattctcctgccccagcctcctgagtaagcagcttggattgcgggtgcacgc

SEQ ID NO: 395492 - DNA, 345 bp, Homo sapiens
tattacgaaatgatataagcatggtcctataaatactttctaatggtttcataaactggctgttgttctttctccacccttccagaagaagagctcagagctggagatttcacaattcccttctaacaactatgcattgatcccatttgcgataacctgacattatattcatatcacaatgatccagacagttgtgcatatttcaggaatggaaaagacaagtcatttattatatagcaatttttttccttttttgtttggtccaacaagttgggcaggcctatgactacatctcaactgttgtgtgcttcttatttcatatattttatttgtgtctgcctgaat

SEQ ID NO: 395493 - DNA, 205 bp, Homo sapiens
ttatggtaatctgtaatctattctcccacaaagctggactattcctgtaagaacatatcttataccatttcattcccagctctgaatcctccagtggttacctatgacaattaacaaagaaatccaagctctttactatggtctgtatttatctgctcctcagagtgtgcattctcctttccgcctcccagtgcctgcagcctga

SEQ ID NO: 395494 - DNA, 306 bp, Homo sapiens
atatttagaactcaacatttgagatagtccctcaaaataaatcatgattctagcaaccaaaacagatatttcagttaatgggcttttattttcagagcagcaataatcttttctttttagtcaggcttttagaaagatggcttcatcttctccttctacaacgctggcacagaaccaccctaaagtgtttccctgagtggccaaggattaagatggggccactcaaccaccaggacccacttgtgactgaccttcccttccccacttcagcagccaagtgaacaccccgggggcaacctaatcagc

SEQ ID NO: 395495 - DNA, 141 bp, Homo sapiens
actagagcattaatatacaatgagggcaaggagaaaaatgtgaggaacccagatgatatatttggatacttcttggtacttccttgcttaactatgatgactgtaaatggatagatacattaactctggattgtgaggtga

SEQ ID NO: 395496 - DNA, 368 bp, Homo sapiens
cccgagttgctggatagttgctgtggacagtagcccaccaccacgcctggctaatttttgtgtttttagtagacatggggtttcaccatattggccaggctggtctcgaactcctgacctcgtgatccacccgctttggcctcccaaagtgctggggattacgggcgtgagccaccgcgcctgtccaaaatttctgttttatttggagcacagcatgtggaaaaaatgatgttgtggaatttgctgtggctggatggagagagctggaacttaattcctggcctgctgtctctccctctctttttaaaaaaaattattgtaatttctatgaggttttaagaaaaattcagtgtggtcgtgtaactgtg

SEQ ID NO: 395497 - DNA, 103 bp, Homo sapiens
ctcccaaccccaagcctccccaagccctcggcctgctgcagggaccctgtgcagccccaggtccagccctcaacacctgctggcacctcaaacccaatgtgcc

SEQ ID NO: 395498 - DNA, 383 bp, Homo sapiens
tgagacagagtctcgtgctgttgcccaggctggagtgcagtagcgttatctcggctaactgcatcctccccccaggttcaagcaattctcctgcctcagcctgctgagtagctggaattacaggcatgtgccaccacgcccggctaatttttgtatttttagtagagacagggtttcaccgtgacaggccaggctggtcccaaactcctgatctcaggtgatccagctgcctcggcctcccaaagtgctgggattacaggtgtgagccacctcatccggccactaagtgggttctgatcatactattgtgtgatttttttttttttggctgtatcttttaagatctatctaaatatcagtgattcttatgattggctgatcat

SEQ ID NO: 395499 - DNA, 503 bp, Homo sapiens
aggaggtggaggttgcagtgggccaaaatggcaccactgtactccagcctggaaaacaagagtgaaactctgtctcaaaaaaaagaaaaaaaatcagtgattttccaatgagtgtaccatgtgcaatccataggtgtactgccaaatcttgatcaatatgtaaaatttatttttgccacactgagcatacacattattactacagagccttaatttaatattgaacaaggaagaatatgatgttcaggatgtgtgcatggtgggggaaagaggcaggatcatttgtcctaagttaaacataaaaagtgccctgttacatcatgttgggtccagagaaagagcatgtggttatcagaacatgaaacaactttgatccatgagtatattaagcctgggttgtcagggcaataaaatttctgctccaacaagaaggcaaacaaaagaactgcgtgatcactgtagatatctttatagataccataaaactctgttttgtttagtag

SEQ ID NO: 395500 - DNA, 359 bp, Homo sapiens
gggcttccaatgcatatgctggtgaggtggacccaatgtcctttgatgggcaggagagggagtgggctctttgcgaatttagtaaaaagaggctgtcactttgaagctgccaaaagcagcaagaggccttgttttagaatgcatttttaagtgttgttctatttgcagagtgacagctgggacagctgaggaggagagtgccaggcgaggcagggacactgtccatgcaggggaggtgaaaaaccatggggctgatgaaaatgcacatggatgtcaactccagggatgtcaaggtcttaccctggcagcagaagcacgagcggccgtcacagcctcaaggaggcagggtggatggcagg

SEQ ID NO: 395501 - DNA, 358 bp, Homo sapiens
ttattctatatctgcctcagtttgtggtacagaagcaatagatttttctctttatttttttaaataaatataattttattctaaaggaatattattatatggcaacactttgagaaccataaaggtgcctttgaaatgttgttagaaaatcacttaaatcatattttttattaataaattgatgccattttcaggcacagtatttttttgggcaagcactgtacagcataattcaaaatatacccatttacagaatccaattaggtatttttctgctcacaattatatgatggctgatttctgctcacaattatatgatggcggatttctgcctacattatgatgtgatatgatatga

SEQ ID NO: 395502 - DNA, 308 bp, Homo sapiens
tggaaatgggagacgtttttgaactggcccaccttgttgatggtgtggttttgagagacaaaattaatgatgtcgaggatgactttaaagagtgtgatatttgtagactagaatggtgatactattggcagaagtggatttgtctctatggcctctacggatcttaaaattgataatacatccctctttatttagtttggctgcctggaaactcatagccttatttgctcctcagttttagtaattaattgcattttgtgtagaaacctcaactctctggttgtatttgatttttctacccttttccc

SEQ ID NO: 395503 - DNA, 580 bp, Homo sapiens
ctcgaagcagagctaacttgaggatcctggtacatcctgaaactgtccatggttcccaggctgctcaagtcaagggtcacctgtaggccagtgctgagcctattgattttttttgtttgttttgttttgtttgagacagggtctcattctgttgccctgactggagtgcagcactcccctcggcttccccactatgcttgttggtacccaaagtctggcagggccaaggcagcagggggccagcatgtcagcactgccccaagtgtgtgcacacctggctgggctgtgacagtaccccagcttggccccatgttgctccaagatcagagcaggtgccaacagcagggagaagccagtcagtaggagcagtcacttctgagaccatggggttgggggacttcccaggcctccaagagtgcagagaggcccaggtctggaggtgtgaggcatgcagggtgcctgcctgctctggcccccaagaacacaggaaggcctgagtccacagccccaacttgggcagctgcagttgcacctggggtgggggggatgggggctgctgcctgctcccagctcccaccag

SEQ ID NO: 395504 - DNA, 259 bp, Homo sapiens
ccgggttgctctgtgctctcttagcgctccagaacgccctgtcctctctctttgagccccgggacaccctgtcctcgctccccgaggccccgggacgccctgtcctctctctctctgcgcctcgggatgccctgtcctcgctccccgaacccccgggacgccctgtcctctctctttgcgccccaggatgccttgtcctcgctccccgagcccccgtgacgccctgtcctctctctttgcgcgtcgagacgccctgtcc

SEQ ID NO: 395505 - DNA, 440 bp, Homo sapiens
tgccccacacagaagctcttgtgctctcagcctgtgtcttaggttctctttgcaaatctctctccacaccgtctgaaggaagtgtgcttacaggactctgggggtaggatggaaatagatgttcttccatctcacccttaggggctgaaaacctggggtggaatccttcttttgccccttaggtgctgtgtgacctcaggcagctctcttgccctctctgagcatccatttcctcatctcctaaatgaggatgatagtatctgcttcccaagattgctgtgaagattattttcttcttcttttcttttcttttctttttttttttttttgagacagagtctccctctgtcacccaggctggagtgcaatggcacaatctcagctcactgcaacctccacctcctaggttcaagagattattgtgcctcagcctcccgagt

SEQ ID NO: 395506 - DNA, 627 bp, Homo sapiens
tgccgtcacggtcaaatatcactttctcaaacatactgatatattttggctgtgtccccacccaaatctcatcttgaactgtagtgctcataatctccacgtgttgtgggagggagggagcaggtggagatcattgaatcacgggggcggtttccaccatgctgttctagtgatagtgcgtgagttttcaggagatctgatggttttctaaggggcttcccccttcgctcagcactcacttctcttcctgccacaatgtgaagaaggaagggtttgcttccccctccaccatgattgtaagtttcctgaggtctccccagccatgctgaactatgaatcaattaagcccctttcctttataaattacccagtctcgggtatgtctttatcagcagcgtgagaatgggttaataaacatatattttctgactaccccctcccctcctccaaccactcttaccttatcctgatggcactgttcactatctgaaattatattatgtgtttacatgtttgtctggctcacttctcccactacattttaaactcagtaagggcagagacttcgcttatcctattacatttctacctcgagtgcataaaaaaaagtctgaaacactggaggca

SEQ ID NO: 395507 - DNA, 880 bp, Homo sapiens
tcactgctgtattttaacagtgcctgccctgaagtaggctctcaattaagatctgttgaatgaatgcattaatgaataatgaatgaatgaatgtggggaactatggaggaggttaatggtgaagatgcaacaactaaacagtaaatgaggaaagaagtgcttggattcgactgaaatatgtagaactgtaccctttgaggaggaaggagaaagggaagggtggaaattaactgtcgaagaatgagttttgaataaagaaaaatctgagccaatcagtcaggcaatattgaaagttttgtgcccggtctgacaaattggagtgcatctatcagagggtggtgaagatggtgggaaattgacaaccatttacatgatgaggaattgattaattattttgaaaaagaaaaggaaggaatgaagaggtaggaaggaagcatggggaaggggaaagaacataccagatgaaaagttaccatgagagggagagtatatagtatatttattttgaatgtacaatgcattatttttatagtatatttggggttatcttggtaggaagaatatatatttattttgaactaatcacagtaaatagctatagtacatcaaatttctagatcaataaaagaaaaaaacttaatttgttcagaaaatagggtgttttgtgtggtattgaacataaagtcccttgagtgttcaagcaaagcctgatgatgacttctcaggagtgttacagaacgtttaaaaaaacttgtattagggctaatggggatggtaagtttgaagtgcttctagagccagtggctggtgtcagcctgctctaccattgaactaactcagaagtgatgaaccagctttctgctacgctaccagaaagagg

SEQ ID NO: 395508 - DNA, 703 bp, Homo sapiens
ggggaaggttcttctacttgattggaaaatttccaaataaatctttccagaagatactatgcacacagctaagtggcctgtctgtggagtaacccttttgtaaacaaacagaaacctaaagcttgatgttttggggggctgcctgtcatctataggttcatttaggtgtatttaggaagaggatccatgaaaccactggtttcctgttacataataatcattaataatgatttaaaatgtgtacattgattttttttaaattccaaaatacaagcgtatatggtaaattaagtcaaatgtatgttcagtgagcgagatgggcttggggcaaaacaatactttgcttccaaagaggatacaactctcaaggagattctttcatcttgcctttaaggtcatttaaactaattcacataatcttcagaaaactaattcacatcatctattcatgtgtaaaatcaaaaggaagactgttttcttagtctctcgttgcctaactggccatttatactactaggttgattaagggatttgcctttttctgctgatatgggaacaaaaagtcttaagcatttttaaaggcaatggaaaattcagccacatgggggaaaattgatattgtcaccattgagttgctctgtttcttggtgaagagtgaatctaatctgatttccttcttcatcagatatgcctctttaacaac

SEQ ID NO: 395509 - DNA, 358 bp, Homo sapiens
acacttactgtcacaaaacatctggtcctatgtgaaagctggaccatttttcctcgagatgagatgagtttctatcttagatatgtgatagtgacttatttgtttgaatatcctagtcctacccaaccctattcactctccaactagtattattactatatacaaagtttaaatcatgtaaagaaaagtcaaagttcagcacctctaataacttagtcacaaatttatcaacaaattactgcgaacttgaactcttctttcttctatcaaaatgaaaaacaaagcaggcaatcgaatgcctttttaagagtcagtttgtcaccgagccctcttaaaaacatctgttttaaagggtcaa

SEQ ID NO: 395510 - DNA, 380 bp, Homo sapiens
acacacctccatgcctctgctcatgttcccttcgaggtctagccattgctgtcacctctcctcacccttactgccccatccaactgacaatgcttgctaatttttcaagactcaacccaagtgctatgacttaagtgtgtaccccagaattcatgtgttgaaaacttggtccccagtgcagcagtgttgaaaaatagaacctttgggaggtgatttggtcatgagcattctgccctcatgattggattaattcattcatgaattaatggattaatgggttaccaagggagtgggtcagttatcacaagagtgggtctcttaccaaaaccagtttggccgtctctagtgagcccttcttgccatgtgatgccccgcaacat

SEQ ID NO: 395511 - DNA, 376 bp, Homo sapiens
aatttatgagcatttatggcccggttatgccttaaacgggtaagaaggtttgcatgaactgactctaggagtgagtgtctggggtggcatttgtagaaatgaagttggcaggagaagaagtacagaatgatcacagtggagaggtggaaaatcatagctcaggaggagtgttccatttggctttagagagggctggggcagagaagagtgagcaggaaatgaggctgggatggtaggttgaggctagactggagagtcctcatgtcccatctctagtggaatttggacttgagactgtgctgaataaatagcatcagtaggtttgtgaccttgggtagtgacccattctgaattcgaagaagtgaaacaggcagtg

SEQ ID NO: 395512 - DNA, 312 bp, Homo sapiens
cgcccgcctcagcctcccaaaatgctgggactacaggcatgatgacaccacgcccggctgttatttctaataggaagttgccgtcctcttttctcaccccagtggcatttctggggagcagttttcccacctgctgatcggactccttgtggtggtcatatgggcttggggtgaatcgggaggggagagtttaattggcttacatgtcaagctgtttaaaacaggcctttcaggctagtgagtattgatgctggttatattgagaagctgtggcgggcgggggtccgggggctccttcgtaatccttgtgct

SEQ ID NO: 395513 - DNA, 421 bp, Homo sapiens
ggagttcgaggctgcagtgagctatgattgtgccattacactccagcctaggtgacagagcaagaccctgtctctaaaaaaataaaataaaataaaaaatatgtaatttgtaaatggttctccagtactaaaatgctaagcctatatctaatttagaagaccattaaccttacccatttaaatctggccctgtctagggttgattctcatgtttaaagattatacgtacatttaagagcatgttgtaatcaagtattttgaaaacaagtgacctgttacctttaaagatactgctgccaaatagtaacttgcaaatgcatttatttacttgttctatattggggtaaagggatatttataggtgaaaggtcataaaatttggagcttgttagaaaggtgtgtaaacacctcatgtaggttg

SEQ ID NO: 395514 - DNA, 402 bp, Homo sapiens
tcttcgtcatcgtgtataatccttgcaatatgttattgaatttggtgttctaatgttccgaggagaatttttacatcaatagtcaacaggaaaattgatttgtagttgtatttttttttctccttagtgtctttgtggggtttggtgttgtgttaatgctgggctcataaaataagttggaaattgttttatctttttcatttttctgaagtagtttaagaagggttggtgttaaccctgctttaacattttgaaaaaaatatgtatttaatgaagtgatccgggcctgggctttttgaggggaggttgttgttactacttatatgcctattcagatttttttatggtttatttttagtataatctatatttctagacatttgtctatttctcttagcttat

SEQ ID NO: 395515 - DNA, 627 bp, Homo sapiens
tccctttcagggacatggaaacagtagttgcctggctcattctaaagaagatctcagaatacttccttctaatgttagagagaaagagacttcctttacttcaagccctacctacttacaattggtttttatcattatcaccatccacagtgttgcaggctgcctgaaaaaaatctcctatcagacacttaaggccatttcacagcttcctcttcccaaaccacattgatagcactgggttatcatctgtcctttagagatttaagattcttaacttcttgtcaccagcagaggcatgactttagctattaagggataaatctgattatcacgattggaagaaaaagccagtacacctctgggacacattatggcatggatccttgggaaggcccaagtctgtttccccttcactttcttagagctgggcttctctcctaaagctgctgttgctgtgtgctcttgggactgttaccccaaccaagatcctaaaaaaaggcttagatgtgcctgtggttggggtgctctgcaaggcaccaaaaaaagaaacctgcagaaggctacataccatgaaggaaaaaaccacaagaatgtgggctacaggagagtatgatgtgaaaagcataa

SEQ ID NO: 395516 - DNA, 367 bp, Homo sapiens
gaattgtctctaaaaaacaaacaaacaaacaaacaaacaaaaaaaaactattagctgggactacaggcgcccgccaccacgcctggctaatcttttctgtttttagtagagacggggtttcactgtgttagccaggatggtctcgatctcctgaccttgtgatcggccctccttggcctcccaaagtgctgggattacaggcatgagccatcgtgcctggccgtgtgtacgtattttttaaggtaaaatacctcatgagtttatactgatgtgccacaaggcttttacttaacttcattcattttacatcagtattttctttctctcaaactgaaaatagcagttctcactcacaccaacacaattt

SEQ ID NO: 395517 - DNA, 475 bp, Homo sapiens
cggcctcccaaagtgctgggattataggtgtcagccagcgtgcccggccaggcacagcttttaaatccaaatatttagtcatgaccttgctataatattttagttttcctcacctagttttgtgtgtggcataaaattataatagttgcttggaaaaagtcagtgatttgcaaaagggtgacacagccatggttttgttgttgttgttgttgttgttttaaggatctataaaagtgtctttgagtagcatttttttttcattgaacatttattttgaaattctgtagtctctggaacacagtctacccattcctctgtcccatgtttctttggaagtgccacaaccttgggtgtaacaagagtacaaccagcattaggctgtacctggaatcaaatgaatgcagtaaggagcttgcctggaagccagcacagagtaaatgttagccttccttttccatccacacgtttccttagt

SEQ ID NO: 395518 - DNA, 232 bp, Homo sapiens
aatcagccacagagcagaccctgcagagcatgatggtactgctaggtgcaaattgatccatttccctctggggaattatcggaatctagtctctgccgctatgattaggatataaatgataccactcctgcctccagagaaaggtttttttttttttttcttaagaagcagggtctaaccctgtgggcggcaagccacccaggcaccgaggcaagagacagaggacacgagc

SEQ ID NO: 395519 - DNA, 175 bp, Homo sapiens
taactcttaggctatgcatagccccatgtcctaatcaggcattcactgatcccagcaggtctccatctatttgtaccagcctcttctttcctcccaatctcaaggttactcttaaatactagtaaatgcaaaaagaacttgtaaagtggcaaggcatggcctatcaaaagtcagc

SEQ ID NO: 395520 - DNA, 474 bp, Homo sapiens
actacagccatgtgccaccataccttgctaatttttgtatgttttgtagagatggggttttgccatgttgccgaaggtggtcttgaattactgagctcaagtgattactttttaaatgtaatttaatttataaaagatattagctatattaattatactgccatctagtagagtcttgatattgcaataaccttaacaaaaaaactgtagtttagaaaatattcccataggacaacactaaaaaggtaatgtttttggctttaaaagaagatgtgaaagtgataaaaggaaaattgggactgtaatgttacaagtgtgccttttaacttagagctgccactaaaatacataaacagctttgtgaataaagccgtacaatgtaacaaatactagaacatggaaaccattattaacatacaaatcatatcttgtgatcctcgagcacagctgcagtcggtccgcgctgactgcatc

SEQ ID NO: 395521 - DNA, 454 bp, Homo sapiens
actacagccatgtgccaccataccttgctaatttttgtatgttttgtagagatggggttttgccatgttgccgaaggtggtcttgaattactgagctcaagtgattactttttaaatgtaatttaatttataaaagatattagctatattaattatactgccatctagtagagtcttgatattgcaataaccttaacaaaaaaactgtagtttagaaaatattcccataggacaacactaaaaaggtaatgtttttggctttaaaagaagatgtgaaagtgataaaaaaaatccttcaaaggtcttctctagcaaatatgtatttattatatagtttgccacacaaatggattttatagccctggaaggaaacataaagacttcttacaaagcaaaatttaagtaataattaatagagtactgatgaattatctctgaattcagtcttgaaatg

SEQ ID NO: 395522 - DNA, 544 bp, Homo sapiens
ccacccgcctcagcctcccaaagtgctgggattacaggcttgagccaccgcgcctggcccagtatctttgtttttatcaccccttttgtctcttgttttgtctttgggtttccttagaaaccccttcttaaaaagagtctgagctttgcagtctttcatctataatcttctgttattcaggggctctgtaaatgtggtggtaaagtgtgtgtagaaggaagcattctatactctataattaggtgtcagtcttttggtgggtctttgccctgggctattaccttgacaagtttttctcagcatttcctccccttaagtgagagaggaaggttagagtgggctgaagttgtctaattgcccttctccagctcagataaggctttggttagacattttcttgagagcttaccttcattacagagaacggaacgaagaacagaacgaagaacagaactctctgggaatattccaaaatagctatttccttctctccctgctggaagcagaagcggattctctgatcttcacagtgagaacatgttgg

SEQ ID NO: 395523 - DNA, 777 bp, Homo sapiens
tgggcctctttttttctgttgatgcttctccaacattccaccatggatggaacctctaacacctcataacatgtttggaaaattaaaagggataatcactgcttattattcctactaccatagaaggttaaaacatacctgtcttttgggcttagctagaactctaaatttagtaatcctacttactactaataacaatacaggcagtttccagagtttccaatttacttacataagttctgtcttccaaaattcagttataaaacaagaatttgaatctcacaatacactttcccataaaaaatgttataagacataattaaaactcaggcctacctatctaattatcccaataccttagagaaaaaaaatggtaccgtagatcaccaatcatgtgtgattcatagcacatgctgtgaattctagctacagagatatctgaaacacagctacctccatgaaaattctagggatgagaggcctcatgcctgtactctaccatctttagtaaaagacaacattttgcgggacatgattttcactgggtaacttcagcctcagtttttgggcaacatcaatggcagaagagaatgagggatggcggggtggaaacagttattgttatgtgtatgtaattgtaaagactactttattgctagcgatataaaattgctaaaaactttggcatttgttttattgctccctcttctccctcaccccttaccatcactccacaaatcaaccaaagccaatgtcctaagggatactttcagttgt

SEQ ID NO: 395524 - DNA, 475 bp, Homo sapiens
ggtgagagtatgaaggaatgagtgagaacaagcttcccagaaaaggattcaaacagagcttttatattcagtgctgcttactgtaaaacaaacagtacataaaagtattcctgagattcgggctatcaatttaacacaatcttttccaatacaaaccaagtctgtaaactaagtctgtattttcattttttaagatatgtcattacctaagatatatactgtagaatagaatcattcttacaatacggtaaaaaatcataactttgcatatactctcatatggtatgactgtgtccccacccaaatttcatcttgaattgtagctcccataatccccacttatcatgggagatacctggtgggaagtaattgaatcatgggggcaggtttttcccatgctgttctcatgatagtgaaaaagtctcacgagatctgatggttttataaagggtagctcccctgcacatactctctt

SEQ ID NO: 395525 - DNA, 402 bp, Homo sapiens
aatacagaattatatattttaggaattttgaagaaatgaccacccacagcacttttcacttgcaggatcaggccgagtggtgtggtgagctgctgctgctgctgctcctgctacaacttcggggacattgcacagtagacccttctttaggatctctttccctccctccttccctgcccccggaggtgctcattgatgcataaagggaaagcaagagtggagctgagcccctggtgccaccagccctggtaccaaaatactggctgtgcccgcttgctgcggggtacccttcagccatcatcccctcctcctcccaagctggaaactacagcaggggaggctaattgtctgtgccttctcccttgttccctccttactgaaatctactcagtaaggaccaag

SEQ ID NO: 395526 - DNA, 651 bp, Homo sapiens
  misc_feature (33)..(33): n is a, c, g, or t
acaaacagcctactcacaagtgagagaaacccnaacccaaactagcttaagcaaaaaggaattttatctcacataatagtccaagggtagagcttgatcaagatattaaattatgtcactatggcaagtcatctccccttctgtccttcttgcacattggctgtatctctgtcaacttcccccacttgtggagcaagatagttgccatagttctcgaatcttcaagtgtttcttgactgaagttaagtggggatgagtctcagcttctctcggcagtcccagaaagcctcagtgtatcttactagctttgactggggcatagtcctatccttgagctatccttggccagggggaatgcatatctgattggccaggcctgattcatatgcttactcctggagctgggaatagtgaatgccatctgaaactaacctcgattctggagggagaaatagatccctagaagaaaattgggatactgttatcagaagggaaatggatgcagaatgttcacaaatacatcccttctttactcaatgtttttcttaattacaaataaattcttctggccaatgctctatacaatgccttctctactctcttcaagatccataacacagtgcttatcaaactttaaaatgcaaagaaacc

SEQ ID NO: 395527 - DNA, 382 bp, Homo sapiens
atggagacagggcctccctctgttgcccaggttggtcttgaactcttgggctcaagcgatcctcctgcctcagcctcccaaagtgctgggattacaggtgagagccatagcacccagcccggtgctacttctgactctgtgaaggcagcaaccacatcctccctttcagacctcacataaccagaagattccccttgtgaatggggtagtgtgggcctgtcagccttcacggaggtctggcctcacaggccaagggcttctggctcacagggctccctgtgctgtggggagatgccaaggtgatggtcaggacacagcagccacttggagaagagccccttatgctgacttttggagcccactcccactttgctccctctgg

SEQ ID NO: 395528 - DNA, 345 bp, Homo sapiens
aaccccccgcagctgtcctgcccagacgcccgcccaggcggggtgggggaggctgcaccggcgctcaggtcgcgcagcgcccggcagcgcgcagtgatgtcaaccgcatccgccgcagtccccggcagccctaaaacgcgccgcccgcggaaaccccagcccggctcctcccgccagggccgaggaggagaggacgcgcgggtccccggagtcccccactccgtctgcctaagccgtggagaccgggagtggacgcacggcggtgccgtggacccccggggaggaggaagaagaggagagggaagggagctgtggagtcaggtgtcgatttgacgcccgcggccg

SEQ ID NO: 395529 - DNA, 400 bp, Homo sapiens
ctaaatgccaataaggaatactctctataatggtatttccaaagtaaactgggaaatttgaatttgcaatacacgtagaatcaatgttagagtcaaggatcagaaagctaggagcactatataatctaccacagtcctatggttcaatgatataaagacaaattccagaaatgtttgaatttctctatatctcattctctctaatgtgatcaagtttgaggggacaaagaaacactttcctcctttgaagtctacctgtacctattaaccagcaccatttcaacggcaatgggtagataaaacaaactaaaaattccacactgctcctcttcttaggggatacaatgtattcattcttttcaaaattctcagatgctactttcaagagagctcatattat

SEQ ID NO: 395530 - DNA, 695 bp, Homo sapiens
gggccccttggacttggctggcagccgcctgcgaaacaccgcttctcagcggtctgcaagttcctttcctccctgcgcccaagatgggcctgacaagggcccgggatcagaccagaacctctgggggctgaagacctctccccacccccatcttacaaagtgtgtggggcttgcggagagtggccttggatcctaaggcgccaaggtctcagactctgaagtggaagggaaatgcgcgaagtaggagtcttttgtgtctgtgcagaaggaggtcctccggccgccggcccttgttgcacgtctggatagaccccttattgcattggtggtagactccccatttgccccctagatttcctttcaccttggcttggaggtgcacagtgcaacccggaggagcgcccggggaagacagcttttaatcgactccatccgctctgtccccaaagagtgacacagcccagaggtggctcagaaccctaatccggggtgaccctaagagcccacaggtccactcaggcccagggcttcaacttttcttccaggagacaagagtgcagatgcaagccactttttgattacaaatgctaatttcttgtacaagctgttcttttaatttttccctggaaagaactgtggcagggagaagggcgtcttggtacaaatatgggtattcatctcctttatggtgcaat

SEQ ID NO: 395531 - DNA, 150 bp, Homo sapiens
tcaaaagaaaagcaaaataaagacaatttcacaaaacaaaattcactaacagacttgtggtttaaaaaaaaaaatgtggctcggagcagtggctcacgctggtaatcccaacacttggggaggccgaggcgggtggatcacctgaggtca

SEQ ID NO: 395532 - DNA, 160 bp, Homo sapiens
aactaccccatgagatagtatccttgttttacagatgagaaaaccaaatctaggataggaagctcaagaaacttgtccaaagtgacccccagtttgaacccacatttgctgttacaaagccaaggcattttctactgtgaaaagcagcctcttacacatc

SEQ ID NO: 395533 - DNA, 295 bp, Homo sapiens
gctgttataagtgtttggcatacagtactaggtgaaaaagaaattcttctgacttggatagtcaggaaatgggggagggatccagagagggtaaagtatgtaagaagaatagttgtggggctgtggatttgttggaacttatgcctgtcctctgtaagtaagagatgtctgtgaggagaaagcggaggtaaatagatgggagattaaaatggacaggatttgtagtgattttcaggtgagcaggggagggagtttgaagtcgcgtaatagccaacatttatttacttccgagtag

SEQ ID NO: 395534 - DNA, 677 bp, Homo sapiens
tctgttgcctaggctgattttgaactcctggcctcaagtgatccttccaccttagcctcccaaaatactgggattataggcataaacgaccacaactgcctgtctttgtacttttaactctttgtttcgtccctggctccatgtgagctcctgttcttggttcacttgttctttgctttttcttgtatgtcattgattctgaaatgttacttttagaattgtcttctgagttcaaggctcagattttctgtgcctctgatacctttgcatgtgggtaaatatgccactctccctacaaatctggaaagtctagaaatacggtttaatttttggttttccagatttactgcttcgcatatattctcctatactccttcttcagtttatggcattatcttccctatctctgagactaaatattccttccttgccttctctttcattctacctcttattttttttttcccccctggattacttttttaatctaacacttattataagaaggaaactactgtgctttgacagatcattaattaaaatagaatatattggacagtgtacattataacaataatcacatattatccccatttgacaacagaattgggccttaggaaagcttaatgctggttagtggtagagctgcaattctagccaagatctgttctaaatct

SEQ ID NO: 395535 - DNA, 521 bp, Homo sapiens
tcagcaagctcattggagctggtagatagttggaatatttgtgaataagtggtttgtattccatctcccaaaaagcccgacaactccttcagatgggtttaggttagcgtttttcaaactgtggattgtaaccccttggtaccttgtgaaatgaatttagtgggttgcaaccagaattttaaatcaacagaatagaccaggaaagaaagtatcagagtgcatcctatgtatcaaggataaggcattgttttatgaaatgtttatttccattaggtatgtgtatatatctactgggtcatgatgtaaagtatatttcttactctaggttatggtcataagcgttggaaaaacgccagcctggaccaaaggtccagtgtccctccgaggaattatgcatgtgccacaatcccacaggggctcatagccactactcccattccttccctctccagtctccaagccccatgctgagtggcccggcctaggaactgttcctttttgaactttgctgactctccgag

SEQ ID NO: 395536 - DNA, 328 bp, Homo sapiens
cttaggccgggggtggactcctgtgttttggggtaagctgaatgctttggaccaccattacacagcgggaggaagctctcaccagtcctccttacctgcctcctcgtctccctttgtctatctggcagttgccatttgccaagcccatcttcaatgcagtgctgttggaaaggagctctggattgtcacatggagaacaagggccaccctttgctgtgaccttcagatttccccaatcatctttggacaccgtgcgttcatgagtctccttattgtcccctgccatgctggaggaagagctgggcttccttctgccccacgctgctca

SEQ ID NO: 395537 - DNA, 283 bp, Homo sapiens
ggagacacagacacagaggagaaggccacgtggagacagaggcagagactggagtgatggggcctcaagcccagggatgcctggagcccccaggagctgggagaggcaggaaggaccctcccctagagcctccacagggaggatggttgatatggtttgactatatccccacccaaatctcacctggaattgtaataatcttcacgggtctatgtttattgcagcactatttacaatagcaaaggcttgggaccaatccaaatgcccatcaatgatagactgg

SEQ ID NO: 395538 - DNA, 220 bp, Homo sapiens
ccaacacctgggtagacatcacctcctcctggaagtcctcctcagtcacctcctacagggttggtgatctctgtttccctgttcccgttgcactttgccattgatactaatcaacagtttcaagagtgattccccactagcctgtgcccgtcttgagggctggagacaggattatcctcacatccctgctcccagcccagagagagcacgctattattac

SEQ ID NO: 395539 - DNA, 600 bp, Homo sapiens
ttcgacttcagcctgccaagtagctaggaccataggcgtacagcaccacatttagaagtccctgagaaaattatcttggaggaaaactcgcaagtccgactattggttttccaaggaagccagtctcgcctgtgaggagggatcctgctcgccctgggagcctactcagacaccatggggaatggggggtggggctcagagcgcgcaggcttggtttttttccccctccgaactcctgagttccagtgatctgcctgactcagcctcccacagtgctgggattacaagtgtgagccactgcgcctggcctattacttgttttaataataacaaaaaacagcaaaatcttgcagaaggttggaaggtaaccaagcagcttagcttcaaaccacgttttaaaaactttgtttcttttcttctttctccccagtttctagacatagctttgagacaaactgcagatgtgctttcttttgtcgtcaattactgccttggaatgggcattaaaactgccttccctttcgcatcttatgcccccatgccttatgctcatttatttacctggatgcttgttaagctcataccatgcccacttatctg

SEQ ID NO: 395540 - DNA, 374 bp, Homo sapiens
cagaatctaattcttgttctttcagtgaatttcatccaaatattaataaaactataaattaacagcatgagtttgttaattacagatcatggacaaagttatcaatgactgatgcacatttcaatataaatattaggtcacaaaaatgttatgacatatagttattggtacctttttcacttgcttttaaaaaaacaaaactgggctgggtgcagtggctcacgcctgtaatcccagcaatttgggaggccgaagcaggcgtatcacaaggtcaggaggtcgagaccatcctggctgacatggtaaattcccatcttactaaaaatacaaaaattagccaggtgtggtggcacgtgcctgtaagtcccagctac

SEQ ID NO: 395541 - DNA, 446 bp, Homo sapiens
catttcccagtctttccactgtactcactccctattcccccaccccagggcctttgcacaagcccccatgtgacaagccatgccctctgcctagaagtgcccttcccttggccttccccgtggccggctcctcctagcacatgaggtttcagctcacgttgccttctccaggagagacccccatctcatcacctcatgtgctctggctctgacactgggccccatctgaggtcacctcatttgtgaactctcctgtttgtcttgcccccaccatcggctggctccctgcagggaggcccctgtccccacttgctgtgccttcagcttcccgtcagtgtttttgagtgttcacctgaataaactgacaagcactcgaggtccctgccaggtggccccagcgtcctcccctgggcctgggccaagctgcaggcttcttcaggaagggg

SEQ ID NO: 395542 - DNA, 959 bp, Homo sapiens
agtacagagttactttccccagaaatttggtggagaacagaagacgaaacagagctgataatattgattttcatgagaagtcagatggctgcttaaagggaaggggctgaagaaacagagaaggaggtaaaggatgggaacagctgctgtgggaattgatacagacaggaaactggctagattttctgaaaaggctgtcccagcagcactgagaggctcagcattaagttatcataacttggtaacaacaccaaccagctgggctctgcagctctctctaacagtgccaggcagccctcgagagcaggacgcagaattagagacactagagtctctttgggtggggccagcctgaagtcaggagcactgagcagctgctgaacacgattgcaaaggcacaatgtgggctcccagatgggcaaaagaaggaagcccttgggaggcaggtggatcgggaggacaggcaggcattggctaaggatgggaaggtggatttgcagcaggtctcatgagaatgacatggtaagagaagcagcagctccaagtcatggttagagaggagcatttccagtgggagtttaggtgggacagttttgggcagtggaaaactcctaggtgcggctctgggctgggctgctggggagaaggtgagaggtacgaggaggtggaggctgctggagctgcaaaggtggaggatctccaaggacaggatttcagcagactgaacacggaaagtgcctacagtgctgggcagaggcaggtggaggagaggctgagaactaggggaggagcctgccaagaaggcggcctgtgagaagggagttgtgggaaacaggttggtgaggcaggagctgggctgatcagacaggtcactgggccaggctggagctggaactttaatccacaggcagtgggagttttgaatttgggcagtcacaatctgagccgtgcttgggaag

SEQ ID NO: 395543 - DNA, 525 bp, Homo sapiens
tcagttgataagccctgaaatatcttaaaattttaggattgcaagacatccacatatcctatgttatattagcagaagttaaatttcagaagaaaaatacagaaactgagcttcacgattgtgtctggagtatacaggcaacattcaatttttgtcaagcacaaggtttaaattaagactgctgagtcctagctggattttttttttaacccacatttttccttacagtaccaacatactaatttctccaattcctgaaacataccaaaattgttaaacatttttttggtcaagcttatcactatattataaagtttggtctcactctagatgcagcaaaatatgactggtcttatggtattttcttttttaacaaagataactagttgaacaaatgccctgtgtcaagcaggacttattctgggatggccatgattaatattaaaacagggcaactgcttaaaatatacaagatctttggctaaaatctagaaagaccataagctaacatcacagatggattta

SEQ ID NO: 395544 - DNA, 345 bp, Homo sapiens
agatataaacattaatgtgcaccctttcgtacagcacttctctagcattttgccagggaacaaaggtttcagctagagaaaaaaaattctaaaggttgagacttctgggagaaaatcacagatcatttcgtagtaaagtataaaggcttttcagatactctgaaatcagactttgtcaccttgtgtccccccacaaaaaaataatatttttgagtgataaccagtaccaaatagacaagtcaggctgtttaccagtggaacagctccaggttatgaaaaataatgctgaaggacagggtcctttgctagaagaatgtcacttgaggtacaatactctgtcctaaa

SEQ ID NO: 395545 - DNA, 277 bp, Homo sapiens
agtaaaattctctgatatttcagtcttcagacgtacactatactctccttatatatgcaaaaacatatattcagatacatgtacatagacgacagttgatgactgaaatggtgtacagtataacatctgccaagtcatttcctgagtggtaaaggaaagtggccatgtgttctctgacttcttataactcagggaagataagaagagagcacaggaaaaaaggcagccattcagtgacatattatacctcttcagttaagtcaggtgacataagttt

SEQ ID NO: 395546 - DNA, 719 bp, Homo sapiens
atcttcccttccacctaccccatatcacaaccgacattggattcctcaaactgggcaagctacatgctttcagagacctggacacattacacggaagagggattcccctcattttggccatcatgaacccattagaggaaattgaaagctgaattacactacagccacttaggaaagaataatgagaaggaataatgaaagttcttttaataaggtgacagcaaagtgtctccagccttttttttcttaacattttttatgttttacttttgcctcactttgcatttcaatattctgaatttacgtaaataaaaaacccctagctttgcttttgcatgtgctgggagctttgctgactgtaggcttggaatcttttcatttatgaaaagcattcattgaagttccactctaatgattcttggaaagctcaggggttaacagccaggaggaaaaaaaccagataaaacaaagttaggttcacaggaaggactcaagattggaagacagtgctggaattctgagcttgtgtggacatcaaatcatcatcccattccaatccattatttgtttattcatgcactcatttattcaacaagcatttaaaacacctctgatgggccatttatagcaggtaaatctctcctttgcccagagataggaaattatttaaggaaaatcctgcaaatttaattttccttatattaaaaattgtgaaaaat

SEQ ID NO: 395547 - DNA, 381 bp, Homo sapiens
ctattgaggaagaaccaaccctgaagtcaccctaccaccagaggagacagcttgtgactcagggccatacattccttgtagcgtaagccatctttggttgggtcctgtgttacccacagctccaagcctccttgccggcgaatttcattctgctcctctgaaaccggttttcactgccatctgcaataaccacggctgccgtgcacaggcaccacatctaagacatcatacgtttattatttattatagcaattttcccacagatggcagtaaagtgttttgttctaataaaatcagtgtgttacagtagttttctgatagaagtaaattaccttgaggaaggggcacctttttctaattcacacaagggcacaatctagc

SEQ ID NO: 395548 - DNA, 347 bp, Homo sapiens
tgcagctgctgctgtaggtcgctctagaggtcccccatgcctcatccaggggtaattctttaggtaagaagcagtggaattttgtcaatccagagatgggaccgagtttttgtctgggttcacacctggtcacagagattacacacaattgttaagacccagaaagagcgaggcccgagagagactaaagggtgggaagggcttggatgtgtgtaggcacaaaaactagtgggcttgcaccaaaagttttctgaatctccaaatgagcagggacgccccccgacctctgtggcctgcctggagttggtgccgctttgcacttgccactggatgagggcatggggtac

SEQ ID NO: 395549 - DNA, 375 bp, Homo sapiens
cccccctcccccatgaagccagtggtctggtagtaatgaacccccaacggcccggagaaaactggggcaaggtgtttgtctggggaaatgttgcatgttgccttgactgtgctttcttctacaaagcttaaaaagagatattatattattttatttttatttttatttttgagatggagtcttacttggttgcccaggctgggtgtgcagtggcacagtcatggctcactgcaacctccacctcctgggttcaagtgattctcctgcctcagcctcccaagtagctgggactacaggcacatgccaccatgcctggctaatttgtatatttttagtagagacggggtttcaccatattaactacattggtcttga

SEQ ID NO: 395550 - DNA, 317 bp, Homo sapiens
accatggcacgtgtatacctacataacaaaactgcatgttctgcactgtaccccagaatttaaagtataataataaagaactaaaataaagccataccttctaaaaaaaaaaagtcaaaagaactaaaaggagaggtagacaaatctacaatcagagtggggacattaacacccctcttcaaatgcccagagtcaccctgactcccctcatatggaaactctagcttctggaaaatctaagcagaaagctaaccagccctcacatggagaacatcttctttataggaaatccttgctgtgagcaaactgcagatggg

SEQ ID NO: 395551 - DNA, 181 bp, Homo sapiens
tggcggagggcggcctatgttcctagagctcaaggaagcattcaatcacacgctcaacacgtgattttcaggccacttgtgtgttttggaaacaagtatgtgaccaggcacagaggcagccaagattcaaatgagtgaatgtcccatggacataattaaagagaaagggcttgtactaaac

SEQ ID NO: 395552 - DNA, 216 bp, Homo sapiens
aggcaaatgaatactattaatatatgcagacttaggatctaatcaccaaatactagtgggctgggttactactacctgagttagaaaggcttcttttgcttctatttggcaaatgtaagaagccagtcacattcttcctttttttttttttcggaaaggaagttcccttttttggcccgggtgggggggcaagggggcaacctcgagcgggggcaa

SEQ ID NO: 395553 - DNA, 220 bp, Homo sapiens
aaagggtgtaatcatgaggttagaatgagggttagtgccagtcctcctatcacatactcagatgttctccagtagtagaattaaaacagcaagttactctagcagatgttttcaaattagctaaaaccgtgtcaccagagtaaagcagcaaagctggaaatgtgcccagagagaccttcccacaagccgcctgagggagccatttaaatgtctctgagcc

SEQ ID NO: 395554 - DNA, 216 bp, Homo sapiens
cgacactctggatgcattaaaaaaatcaaataatgtgagcaacaacaatctgggattctttaaccttaacagggtctagataagaatttcaggccaggccgggtggctcatgcctgtaatcccagcactttgggaggctaaggcaggagaatcacttgaacccaggaggcagaggtagcagtgagctgagatcacgccactgcactccatcctggc

SEQ ID NO: 395555 - DNA, 215 bp, Homo sapiens
cattgttccattgttcagaagaggaaacaggccatttcgggttcagtgatctagaaccaggctctgaaacctatggcctatgggcccagatcagccaattgcctgtttctgtcaacaaagtttattggagcagaggcacgctcatttgtttctggatggtccgtggctgtttttgtgctgtgactgtagaggcgagcattgcgggaggggtttta

SEQ ID NO: 395556 - DNA, 438 bp, Homo sapiens
agtataggctgggcacagtggctcatgcatgtaatcccagcactttgggaggccgaggcgggtggatcacttgaggtcaggagttcgagaccagcctgctcaacatggtgaaaccccgtctctactaaaaatacaaaaaattagccaggcgtggtggtgggtgcctgtaatcccagctactctggaggctgaggcagaagaattgcttgaatctgggaggtggaggatgcaatgagctgagatcacaccattgcactccagcctgagtgacaagagcgaaactctgtctcaaaaaaaataaaataagaggtttggaagaggtcagttatttaacccctttcctgatatacctaagagctctaaaaggaatgcacctgagtcactgctgtagctaaacaagcaagttgtaagaaaatccataggctatacagacttttg

SEQ ID NO: 395557 - DNA, 277 bp, Homo sapiens
tccctaattagtggaatttctgttgctatgactaagcaattatgtctactactgacagtgtgtggaggcgaggaaagtatcttggaaaagaggattttcttcttactccttaaagtttaaggctgcctcatgtacaaggtctccctcagtctctcaaattcatccatcttcccacacaagtttggtttaaagcaccaataagccctacccttaggcctatgtaaaagcctatcattctgatgctgcagaagccaccaagaaccaggctaagaaccaa

SEQ ID NO: 395558 - DNA, 268 bp, Homo sapiens
atttttgcatctcagtaccaagatttggaacttcacatagatgtattcgaacataaaattttaaagccattgttgccccagctatgtgctacagacccccccaccgaccacctggttagttttctgagagtttctgcgggaaaggtttacaatggctggttcctggtttgatgtcacatcgataaattatggtgctttaaacagatgtgatctcacagcatagaattcttcagggtaaagctcgtgaaaaggttttttccccctcttg

SEQ ID NO: 395559 - DNA, 370 bp, Homo sapiens
gaggcctcccttcttttactgaaataacttttacttttatatctgtatcaactaaggggtaaaagtgacactttagtcactttggacaataaaaataaatttttagataattttaatacccttttatcccatacgattcttgatcttgaatttcaattctgcaatcttaggactgtggtttaaaacattacaggaggattttctttttttttttccaaagactgagtctcactctgtagcccaggctggagtgcaatggtgcaatctcagctcactgcaaaaaaagttatccttctctcctaggcttccaagaaattcaggggtaaatttgtagttcacctatagcaactggggagaaggcgtaacgtgt

SEQ ID NO: 395560 - DNA, 411 bp, Homo sapiens
ctttcatgacctgccataggatttcagacttacctagccagcccccacaattgtgtaagctagttccttacactacatcgcttaatatatacctcccactcgttctgttcctttagttgaaccctggctgatacaacagaacaggtgagataatctgttctcagaggcgaagggatttgcccaagtcacatgactggcaagttgtcggcctaagagtgggaccccaggcaacctgatgcagttgtttcccagctcccacacaaactctcccttgaggcccacatccaatcatcagagtctgtccaacacccgcagtgccttgccccctccactgctgccagagcccacatcctatctcacctggctagcagccccctgcgaccttgcacatcataacccatcctgcctagt

SEQ ID NO: 395561 - DNA, 488 bp, Homo sapiens
gagccaccatgcctggctaatttttgtatttttagtagaggtggagttttactatgttggccaggctgatctcaaactcctgtcctcaagtgatacgccttccttggcctccctaagtgctggcattacaggtgagagccaccatgcccggccagccaatgtattgtttatctcagacattttggttttcatctctagcagctcagtttgagccttttaaatattttccatgttgctacttaacatttccaacatattgaatatagaaacaatagcttttaatgtccttctctgctaattctaatatctgtgtctgatcggggttgatttccatagattgattattctcttccctgtgggttgtgctttcctgcctctttgcatgcctgggaatatttgattggctgccagacattgtaaactttacctttttgagtcttggatattttgtattctttcaatcttctgagcattgttctgggatgctg

SEQ ID NO: 395562 - DNA, 253 bp, Homo sapiens
ggctgcgggcaggggagagggccctggggcgcccttgtaggggctggcggctatgagcgtgtgtctcttccctgcctcagctgttgcaggggcccctgggggcaggagtgaggttcactggccaggaggcttgtttcctgtgggcctgttccctcctggctgtcttgttggtttgttggcatctgccgtctgccttccctgaagcctcagcagagaactgacctcccccggtacccccaccacctgttcctgc

SEQ ID NO: 395563 - DNA, 228 bp, Homo sapiens
ggagtaacgacaggttgctggcagaagcagtttcagggcccggaagcctgactgcagcaggaagccgtggacggggaatgaagacaggagtgcggtggagaggaaaggacatgctctgctcctaggaaccccaagagagctgctctgtcctgacctgaaggagcagagatgaggctgagctaagagcagtacagccaggtgtggtggctcatgcctgtaaccccgaca

SEQ ID NO: 395564 - DNA, 289 bp, Homo sapiens
ctcccagtgtttctacctggagtgttacctcacctcacactgctccatgcatagtgaagtggattcaaatgaatgaaacacccacatcacactcagctgaagaggaagggccaggaattcacacggagttggcggtccgacattacttacctgctctgttctgtggctacctgtggagattgtgcagcctgatgcctcaagggtccaagaggaaagagggaagcctgcctgcctgacctcacagggcctggtggaacctagaggtctgaggaaatatttgaggatcatg

SEQ ID NO: 395565 - DNA, 484 bp, Homo sapiens
aaaatcaaaatcatatcaagtatgttctcagacaaaaatgtaataaaagtagaaatcaataacaagaggaacctgggaaactgtacaaatatgtggaaaataaacaaacagcatgctccagaatgaccactgagtcaagaaaaaaaatatggaggatatcaaaaagttatttgaaacaaatgaaaatggaaacacaacataccaaaatctatgggatacagcaaaagcagtgcttagagaaaaatttgtagcaatagatgcctacatcaaaaaagtaaaaagattccaaataaccaatctaactgttcacctcaaggaactaaaaaaggaaaaaccaaatcccaaatgagtagaaggaaggaaacagtaaaggtcagagccaaactaaacaaaatagaaactaaaaatatacaaaattttaatgaaacaaaaagttagatttctgaaaagataaaaaattgataaaccatcagctagactaacc

SEQ ID NO: 395566 - DNA, 727 bp, Homo sapiens
acacacacacacacacacacacgcacacacttacttgctttttttctctgttatcactgttgatcatcactgtttctcagcaggcagacttttttctagtttctttcattacggtaaaaggaatatgtgtttgaattcagcagtgagtcatctgagatgcgtgttgttatggaaaattgccatagcgttcagctgttacgagacagaagtcaaagctaagcacatttaatggccggagatgagcggtatttccaagaagttctttttattatttttacactttagatgaaatgggtatttggatgggatgagtcccattatgctgcggttgctcacgttggggggatgtgttcacacgtctgtgtggttgtcggtgtctgtgcatgcaatgtgattgagctcctgggtaggtgttcctttctgtcttgaatacaaactggaacagtatgagaacaagctcatgattattatttctactgttatttatctttgatttaagagatcactgtgaatagctttggatgccatactttactgggaattctgacttaccttatttggcaaatacagatcatttccaaaatgtacattcagttgaaggataaatagttgatgaaataggtttaaaaaaactcaaaggacattaaaagcctcattttattgaaaaataaataatgactttttttttcttgaagacgaaccctgttatttagaggcctaaaagatt

SEQ ID NO: 395567 - DNA, 355 bp, Homo sapiens
ctgccaaatgagctcccttggcctagctagtggggacagtgctcaggaacggaacagtgctgagtgagagcacgtcagggagctgtcctcacagttgctgccctttccgagcaaggggacaaaaccagtcctgttccaaacatcaacggcccaacgaaaccgcacctctttcttattctttcaagcaaggttggcgtttttcatattagaccatttgaatttcaggaaaagcaaattaggccaagcgcggtggctcacgcctgtaatctcagcactttgggaggccaaggcaggcggctcacctgaggtcaggagttcgagaccagcctggccaacgtggcgaaaccctgtctct

SEQ ID NO: 395568 - DNA, 659 bp, Homo sapiens
tacaaaggctaaaaaaaaattgctaggcatggtggtgccctgcctgcagtcccagctactccggaggctgaggtgggagaattgcttgagcccaggaggctgcaatgagaaaaacaaaacaaaatggctaaaatggtaaattttatgtacatatattttacaacaataaaaaatgtttccatatagtaccttcacagtcaccttgatacatatatatataacaaggctgtagtaaccaaaacataatatgggctaaaaacagacacataaaccaatggaacagaatagggaacccagaaataaatccccacatgctaaagaatgaaactgggcccctgtctctcaccatacacaaaagtcaactcaagatggattaaagacttaaatgggaccacacctataatcctagcactttgggagcccaagcctggaggatcacttgacccaggaattcaagaccagtctggacaatgcagtgagatcccatcgctacaaaaaaaaaaaaaaaataggcatggtggcatgcactggtagtcccagttacttgggatgctgaggtaggaagattccttgagcccaagagttcaatgctgcaatgagctatgatcgtcctactacaccctagcctgagtgacagagtgaaaccctcctctcaaaaa

SEQ ID NO: 395569 - DNA, 697 bp, Homo sapiens
cacattagaggctcattggaaaagtgatgagctgatcactaattggaactggttagactcaaggattattttttaataatatttattgactgtatataatgggtatgaattggtgctaagcaatgagaataacaaaaagcaaagaagacatcatccctcctttcaagggaatcaacatctactggcagagttttacttgtaagtgtattattatcatactacatggaaacgtaagtagcaatcaaattcttagattaaaaaaaaaaagtccctaggttattctacccataagcattttaaacagctcgcttcacatctttaaaacaaaacaaaatgaaacaaaaacactccttggatcctacataaccttccaactaccttttatatatattcccccctttccttatccaaacttcctgaatgttgtctacacttgctgccaccattatctcacctccctctcagtcctatacccaaattctatccatccagcttcactcaagtgacccataagtggcaaatcccatggacctcatttcagcactcatcctgctacccttcagcaacatttgacattcctggacatgcttgcagacttgaagcactatttcctctctttcctctggctttgctctgtaatgtatttcattcactgtctcttttgcgaatgacttctcctctaccaatcattaatgca

SEQ ID NO: 395570 - DNA, 273 bp, Homo sapiens
gaggccaaaaaaataacaaataggaagggaggaaggaaggaaggaaggaaaagggaaggaaggaaggagacagaaaggggaaatagtaaccctttgtgtcactaaaattcatttcatcatatattaatgttatagttaatgcctaatagaaacttttcatttttttaacaaagggaacatgaaaatgaagttatggaggttgaacttcttgctaaaacatatgccatggtaataagaatgctttatgctataataacaggatgaagttggctg

SEQ ID NO: 395571 - DNA, 444 bp, Homo sapiens
  misc_feature (1)..(1): n is a, c, g, or t
ngaatttagaggatccccccccctccacgggtatgctgggcagtgggaacggcttgagcaatgcgtggaggcaggacaacagaagagtgttcaaggaacagtgtgtactcaggcctagttacagcagagggggtcaggaggagggaaggaagtcgattctgggaaggcgcctggagaccggaggctccaaacgcagcactgagcccctgactgctctcagagagggcacctgagcagacaaagctgggccatggaggcagattctggaaggatgagaaaaaaaactggagatagggaggcctgggagggagacaagttaggaacagatctacacactggagggtttaaacgatgggtttgaaactcagccagaactgagttagaatcctggctctgacttgacgtggccaaccctaagcaaagaatctctcacctctctatgcc

SEQ ID NO: 395572 - DNA, 1052 bp, Homo sapiens
gtttgctttatgtactgtgttttttagtaagtcagttggtgcttacaattcttgaaattttgtatacaaatggatagaaattgaatttgtacttccatcattatgacatgtgttatggaaaaccagaattagaaacctcttgttaaatagttcagcggaggtcctttaactggatgttttaaaccgtttagttcctttttttccgttaccctccatattcttgagtgcgctaataggaattttcctagtgtgaattccttgtggtttcttttgtcatttctttgttccctttgtcagcatttctcaaatggaagtgtgcatcacaattacctgatactcgtttaacatacagattttctggttctatccccagtgattcttactaggtcttcagcatccagaaatttgcatgttaaacaatctctccaggtgatcaaatgcaaatagctctaatgttattctttcagaaagcaatgctttgctatacatggtctctaagtcagagagacataggatccctgaaaaagcatcctcctatatgtcagatgggttttggagaggcataaacagatggtaatacggccctcatagctgaggtagtctcagctatgagccctataaatggctatgaccttctgtttttgccactgaattttaaattggattattgacattagccacctacatgactcatgcatccctcccagatcacttttgatccagacagaaccagatttctggggcagattacaggtaaccattatactacaaagggaggtaattttcttttaagttagatggtttgtgtgagctgtacatttcatcaaataccttttcccatctgtaatttgttcttgagaatatggagctatttacttagaggggatttgaaagaagagttgaattatttatattagtttgattgaaagttggaaagaaattaaaagatactgggaaagtgaaaaatacagtcctagagggagtatacattaattgccaaagatttgaggaaaatgacatgggatgctggagaatcaattcattttctgatc

SEQ ID NO: 395573 - DNA, 167 bp, Homo sapiens
gctgaccaggttgttaggtcctagagggcatgaatagtaacttatctctgtgttatctgtagttccttgggcagggccttccataaagtgagtcattagtaatgactattgatttgaatccattaaattttgattcaaacttttttctgctcttttcctgtaaagct

SEQ ID NO: 395574 - DNA, 362 bp, Homo sapiens
ccaatctgcatgactcaagcatgaagtgggggccagatgagctctgctatggaggccagggaagcttctaataagataaaatgaacaatcaccttttatgcctttcagttacaaatgcattcggtgaatacagttttcagagttatggcttccaaatgtcactgatattgcaaagtttaggaagtattctgataattaagatataaaaggagaccagctcatttgaacactcattttagagggataaaatcaaaacctgttttatgttagttagtctttctttgtgaaaacctattagatgtaatcagcataacttggtcataatgtgttttcattatgtttgattttatttggctatttta

SEQ ID NO: 395575 - DNA, 363 bp, Homo sapiens
aaacttttactaaaaaattctaagcatgcatgaaagcttttaatcagatttaaaataaaataaaattttaaaaaaccagccagctacagtggctaacacctatattcccagcactttgggaagctgaggcaggaggatcacttgagctcaggagtttgaaaccaacctgggcaacacagcaagatcatgtctctacaaaaaatttaaaaattggccaggcatagtgacacacatctctagtcctagctattcaggaggctgcggtgggaggatcgcctgagcccaggagttcgaggttgcagtgagctgtgatggcactactgcacacctgcctgggtgacagatcaagactctgtctctgtt

SEQ ID NO: 395576 - DNA, 279 bp, Homo sapiens
cgatgttatctagactcactgagcttctggctcttagttttttctcacctgtaaaatgggccagtataactacatttgtgtttcctattctaaaaatctttgaggtcagtagccaatttcaatgttcttaaaagccttggggaaattggaaaatcatcactcagaaacgtacccataacaacaaaaatgccttatttatttaggagtcatgggatttatcacacaatcagattacatttgctattccatgctggtaagaaactctggcaatcatataca

SEQ ID NO: 395577 - DNA, 167 bp, Homo sapiens
tcaaactttgacatcaaatatgttgcatatctttattctgtcacctactggtgagcctagattccacatctggaaaatgggaacatatagtggacactattggttatctacccaacgttattacctacttcttccttgttggcagaccaaggggggcatagctgtca

SEQ ID NO: 395578 - DNA, 844 bp, Homo sapiens
ggctgggggcgccacctgggccacattcctcaggccctgccttcatctcattccccagacggaactccttcttaccaactccttcttctacccattcattcattcaacaaacatttatcgagtgcctctgtttgcctgagctcagtttatacactaacatttgatgttagcgtataaattagtgttctgtgtcaaagaagtgcagaacgtactcttggcagaaaggatttaatacaggaaattaagtgcttttaaaaatgtgggaaaggccaggcacagtggctcatgcttgtaatcctggcattttgggaggccgaggcgggaggatcacttgaggccaggagttcaagaagcatagcagacgccatctcaactaaaaatcaaaaaaattagccaggcatcatgttatgtacctgtggtcccagctactcgaaagaccgaggtgggagaatcacttgagcccaggaggttgaggctacagggagctgtgttcccgccactgcactccattctgggtgacagagcaaaaccctgtctcaataaatcaataaataaaatattaatagtaatttaaaaaatcaggccaggcacagtggcttacgcttgtaatcccagcactttgggaggcagaggtgggcggatcacttgaggtcaggaatttgagacctgcctggccaatatggtgaaaccccgtctctactaaaaatataaaaatcagctgggcgtggtggcgggcacctataatcccaactacttgggaggctgaggcaggagaatcgcttgaacccaggaggcggaagctacagtgagctaagattgcgctactgcactccaggataggtga

SEQ ID NO: 395579 - DNA, 360 bp, Homo sapiens
ccggctaattttttgtatttttagtagagatggggtttcgccatgttggccaggatggtctcaaactcttggcctcaagcgatccacccacctctgcctctccaaattacaggcttgagccactgcgccctaccccattttcttgttgtatagaacctcattatgtcactggaacagttccctagtgatggctctttagattacattgagtcttttgctattaccaactttcttctgcatacctgtgtttacatacacgtgtttatatgtggtataaattagtaaaaatagaattgctggatcaaagtctttcccatagattttaagcaaaccccaattcttatgttaaatttgaataac

SEQ ID NO: 395580 - DNA, 811 bp, Homo sapiens
cagacctgtcagctctctgtaaaatggaccaatcagcaggatgtgggtggggccagataagggaataaaagcaggttgccccagctagcagtggcaacttgggttgtctttcatgctgtggttgctttgttctttttctctttgcaataagtcttactgctgctcgctgtttgggtccacactgcctttatgagctgtaacactcactgcaaaaggtctgtagctacactcctgagccggaaagaccacgaacccaccagaaggaggaaactacgaacacatccgaacatcagaaggaacaaactgtggacacgctgcctttaagaactgtaacattcaccacgagggtctgtggcttcattcttgaagtcagtgagaccaagaccccaccaattctggatacactgctacatcgggtcctcatccaatctgcctggtgtccctacaagaagaagaaatatggacactaagaaatacgaagggtgcatgcagagaagagagcatgtgagggcacgcaggaggcggccgcggctctgtaagacaaagcaagggggctcagtagaaaccagctctgggccgggtgcggtggctcacgcatgtaatcccaggcgtgatcatttgaggtcaggatttagagaccatcccggaaatacggcaaaaccccatctctactaaaaatagaaaaattagccgggcgtggtggtgggcgcctgtaatcccagctactcgagaagctgagggacgagaattgcttgaacctggggctactctggaagctgaggcacgagaattgcttgaatctgggaggtgg

SEQ ID NO: 395581 - DNA, 478 bp, Homo sapiens
ctgcagccagagcggcgaggtgtcccgccaagaaacggccaaatccagtttcctccccagccagcctctccttagaagcggcagaaccgcttcaaccactagagggcaccagccaaccctcgatggatccaaatgtgcccacgtcgtgagggagcctcagcaccgggtcgcggctcccagctccaccgtcatagaacacgaatagcttttgtcttttctcaaaatgagccctgcagttgaggcaagctttacattggctgcacagactttactctttttaaacattttttgggagtccatagcagatgtatatatttatggggtatgagatgttttgatataagcatacaactcataataatcacgtcagggtaaatggggtatccaccccctcaagcatctactctttcttcgtgtgacaaacaatctaattatactctttcagttatttttaagtgtacaataaattatcgttgac

SEQ ID NO: 395582 - DNA, 380 bp, Homo sapiens
tctattgaaaggtttacacttatgctaaactaattaagtaacatgagcttgccactcagaactgacctcatccaaacataactgtgttcccagattccatcaccagaccatgaaagccatatgtactccaaaagagtgcttatgtgctctgcttggactatgatagatgctggaaatggaggatcctgagggaaaaagaacaacaggagaactcacagattccgggagtgtagtttcagcagcagacagtctcccaggttttgatcccctggagagtgaaggagcaagctttccaagggaagtggggaggaacagccatccaaaggagctctctgtcaggcctcatatttctcatgttcctgtattcggaagtatgtagt

SEQ ID NO: 395583 - DNA, 277 bp, Homo sapiens
ccctctcccacaataatgcctgtcaaagttccttgtgcataacaaacacccactgagttggacttcctgacactgtacacctagtgctgctctgtgttccaatctgttgctcatcacaccaagctaggttgcctccagtacatatgtctacttctcaaaaaggcaagaggaaagccagaaactcttccaaatgaaatacagacagaattttcaatttctacaatgttcagtatatttaatgctttaaatgtaaactcctctgtgtaacttagtaatt

SEQ ID NO: 395584 - DNA, 366 bp, Homo sapiens
caaatatctatcattatattaatcaatctaaattttttgttacatttcagagtaagttgcagacatacccagatccttaagcattcatatcattagctaagctttaatattttgtttgcagtttttttctctttcgaggtaaaatttatatacagtgtaatgcacaaatcttagatgtgctgtttatgtgttccagcaaatacacattactatacaaccaaaacccatattaaaatataaaatattaccaccactgcagaaagtttccacattcctcttctcagtaaatcctctgcttactaccccagaggtcctattcgtttgttttttattccccactataaattagttttgtctgtcctagag

SEQ ID NO: 395585 - DNA, 412 bp, Homo sapiens
tttgtctttttgataatagccattctaacaggcatgaggtaataatagcccagtgtgattttgatttgtctttcactaatgattagagatattgagcatattttcatctatctgttggtcattcatgtcttcttttaagaaatattcattgagctcctttgcccattttttaatcaagttatttgttttgttactatttagttgtttgagttccttatatactttggatattatccccttatcagataggtggtttgcaaatattttctcccattctgtggattgtgtcttcactgttgtttcctttgttatgcagaagctttttatttggatgtatatgtctgtttttgcttttgttacctgtgcttttgggcttctgagaaatcatggctcagatcagtgttggggagct

SEQ ID NO: 395586 - DNA, 537 bp, Homo sapiens
gcatgtgatcatggaccactggaggaaaataaggttctaagagttacaagagagaaagaaagtggtcacatacaaatggctgctagaccacagaccaatgccttcaaaatttcaagtaaaaatgttatcgaaatacacactattaaaactatcaatgatgggagaagagaataaagatattttcagacatttcagatctcaaaacttttacctcctacacacgtttacagggaacctacgcaaggatgcatgccaccaaaaagagggaataagtcaaaataggaatacacaggacacagaaaataggaaatttaacataagaggcaaagagaatcaccagggtggtggtatgcgaaagtcaatggaactacagagatctcgcacatggctgagaccatgaaggtattatgttcctaacacaaatggcttaaacacaagctgcatgactcttagattatctgagcaagaatgctgtttcctaaactgaaatacagaaattaaaaatctgcctgaattcaactgattctatatagtctt

SEQ ID NO: 395587 - DNA, 230 bp, Homo sapiens
cagggacacaaacaggggaatattaggtctctctagaagatcagaaaggtttcatcaatgaacttgagatagccttaaaagatgagtgtttacctgacaaggaagagatgcaagcatccaggtgagcaatgaaaccccagagcgcattaaaggaactgcaagttcaggacctttcagggctggggagggaaggaaggccacaatgacactagaccagggaggaaggagag

SEQ ID NO: 395588 - DNA, 439 bp, Homo sapiens
gagctcggtaccgatttcgctcctagacggacataaaatcagtaaaactaaataaaatcagggtccttatttagatgagtaacttgctttgtcacatcaagattaaatgtactgttttagtgggatttacctaaaaagaggtaaaaaaagaattggctactactgaaaccgggaaaattgtttgcaaaatgcattaatgttcagtatggaaaataccaaaagctattcttttttgcaggatttcagtactttaactaaatgtttttctataaatactgtctttacctctctctctcttcttttgcaccctggagattttttttttcttcctgtcagtttgtatctcttatcatttactgtctgtggcttcacaatactgtattgttacagtaccatttaaaaaattacagctggaagctctgaaatgcatcctgacaaa

SEQ ID NO: 395589 - DNA, 193 bp, Homo sapiens
ctttgatatgcttcttgatatttaaaatagtttaaatcttctcgtcttgataaagtatttttagccattttgttaaagtttgaagtataaactactgtggttctttaaagaatggagtatgacatatttaatggttgactaatgtacttttatgtaaaactgcttttcaattatactttttttttgagacaaa

SEQ ID NO: 395590 - DNA, 430 bp, Homo sapiens
tcggatagaagtgtggataatctgaggacccgctacatgtcactggtatctgaagtggagagcagtcttgcgtgactgagctcttaacctctggagtccgcactaactccaagtagtgtcataattgaattgtaggacacccatgtggtaaccagagaattggagaattggctggtgtgggaaaaaaactccacacttctggtgtcaaaagtgttgtgtgagagtgtagtagaaaacaggagcaagttttgttcctttctagtgtaataaccatttacaatgtgaagtgaaaggggaacacatttttatttgagggtaatgatgtgtgcttacacatacacagaaaaaaatgactaaatatgtcaaaatgttaacaattttgggtcatgtggttggttaaaaggaagatgtttggccaggcatggtggct

SEQ ID NO: 395591 - DNA, 516 bp, Homo sapiens
ttttctactgtctttctgatttaataccatgtccctcttccaatcatctgttagtctttacaaatgggctcagtaaagagcataaggatccccaaaaccctgaaaaatactgagtttctgacctagttggtcagaactgttggaacagtaatgagagcagtaaactggtacctccattaactgctgacttgttgctgtgtcctcacatggtagaaggggcaagagtcttccttgggcctcttttatgaggatactaatcccgttcatgaggactcctttttcatgacctcatcatctcccaaaggtcccactttttaataccatcaccttaggggttaggtttcaacacatacatttttggaggacacaagcattcagaccataacattagactgtcagtttgttaaaattagagataatgtatttttcagccccttattcctagcatcctggcatagtgaaagcacttaatatttgtttgtttactggaaatcaagctgttagatatggcgagaa

SEQ ID NO: 395592 - DNA, 234 bp, Homo sapiens
catcacttaacattagtagcagaacgggactaagctttcatcactgacagactctgtgtttaacgattgaggaacttacctgccaaagaagtcaccagggactggggagagggatggggagtgagtgttccatggcgacagagtttcagtttgggaagatgagaaagttctagagatgaccgtggtggtggctacacaaccacgggaatgtgattaacaccactgaactgtacg

SEQ ID NO: 395593 - DNA, 368 bp, Homo sapiens
taggtctttgctggcacaaacatgttttgtctttgtatcccctatacttccttgaagagaaaatacttaggaattatttgataaatggaaaagcacatgaaagaaggatgtctacccccaaaaatatatatatatatataaaatatatattagtaataacaaacacaaagaaaaaaacccaggttaaaaattaagtttttaaaaatcacaccaagagcatattacttttgtgttattcctgccaaaagttcataaactaaaactaaacatgaaaaaagcatcaactaaaaacaaaccaagaaacaagctataaaataattggtctccagccttcaaatatctcaaaattgggaaaagcaaagactgag

SEQ ID NO: 395594 - DNA, 349 bp, Homo sapiens
cctctcagcagggctttatattttcgaagggtgggcacttaaattacacagattgggtttttctgttcctctttgaacactgggctgtgtgaggaggaggaggaagaagactgaatcttacagagctgagatgatcagatactgccggatgtgccatggggcctggagagctgacgttgctaatatatcaccccattggtgcctacagtttccattctctgattagagatcatatttctttgacttgatgctcaaatgcctctgagtttgatcctttctcatatcctgaattctatttccagttccccagagttttatcctaattttatccattattgaagttttccca

SEQ ID NO: 395595 - DNA, 349 bp, Homo sapiens
agtgctgggattacaggtgtgagccaccgtgcccgactgactgtggattcttaaaatacagtttctatgtgtgtctcagagtgtttggatggtaaatgcaggggagtggctgtttccatggctatttcttcttcagtgaatttttgttgctgagtcttcagtgacctggctctgggtattagcttcacttgaagtaggtaggtgatggaagagtcattagccagttttaaagacaagtttagttttctctgctgttatatagataaattggcaagtggttgtgattgagcctttccaccttaggggtggtcagaaatccattaacttagtattgcccttcttagaaata

SEQ ID NO: 395596 - DNA, 250 bp, Homo sapiens
ttccctcagattccaacaacactttctgcttcgctatattataaacataccataccatatttggtaatttgttagctcttccttatccttctcatgttaaattgagaattgttcagcaacaggggctgtgacttagtcgctattgtttcacagacacattaggactgcagtgaaactgtagaggaatgagtgaactgtataatcatcacgtctccgtgcatacccgcacaattgtacacatgcacacttt

SEQ ID NO: 395597 - DNA, 748 bp, Homo sapiens
tgtttttacatgagggtaaatgtaatactattctacgatttcaatttacatggatcattagaaaaataacaattaaaagtcgaaggtgaatcaatagaacaagcacatgactgtgctgagtctggaaaaaatattcccctcatcctacgtgttgctggaatgagactaggaatccaatcaaaatatttggcaaccattaaaaatagtgaagcacattttaaaagaaggcagaaaagatttgtccgttgtttccaacacagtgatttcaaaaagccacacccttcaagagactgaaagacttctttctgatctccataattactcaagcagtagacactttgccaagatgtttcatgtcgccgaaatgttttttttccccaagagttttgttatgttggatgaaccaggactgaagaaattttgagagcttattttagattagcaacattgaccttatccagatactaatagtcaccatttaacccatttaaaattctaaataaggtcttagattcaagcattagttggttaatttactgttaatcttcctgtcaagtccattatgggagtgaaggtgtttcaaaggggaacagtgatttcattccaaatatatgagggcatatcatatttagggatctccacaaagcactgtttcccatggcaaataattggaaatgagcaaatggcaaacaacatgcatctagctaactgcctttacagtgcatccgtacaatggtatggcatgcag

SEQ ID NO: 395598 - DNA, 440 bp, Homo sapiens
ccatgtctgtggcattccattgtttgctagaccttgttcgtggaatcacaagtatgattgaaggagagctaggagagcttgaaacagaatgtcaaaccaccactgaagaaggttcttcaccaacacagtcgacagaacagcaggatttacagtcaacatcagaccaaatggataaggaaattgttagtagggctgtttgggaagaaatggtgaatgcctgctggtgtggtcttcttgctgcactctcactccttcttgatgccagcacagatgaagctgccactgagaatattttaaaagctgaactgactatggctgctctttgtggaagactgggccttgtaacttcaagagatgcctttataactgcaatatgcaaaggttccctgcctccccattatgctcttactgtattgaataccaccactgcagctacactt

SEQ ID NO: 395599 - DNA, 380 bp, Homo sapiens
cacctgctttcaggaaaaggggtcagagggcccttcttacacctgctgttcttcaagtgccttcagctcaaaataattcttatatcaaatctgcatattttggggaggtctattctgctatcttgttgggagctgaaagcctgagggtcgtgaccaactcagcattccactggaggctatatgactaaacagcaaactgtttatcatgaatgcaggatgtgggcaaactcgcatctgtgcctgccaccagaaggtacgctgagggcctcattccctggctctgtgctccttgaggttatctactgggacatctggagcctactgttcaaagaatgcagtcatgcaggcctgcactaagtcaagcagctgaccacaaccac

SEQ ID NO: 395600 - DNA, 236 bp, Homo sapiens
ggagcctcctacggctcgactctgccttataagcgcgagcccaagcttcttaccacattgtgactcagttctaccaccaccagagacctgaactctgcctttttctcttgtgatgccccctccaggctctcaaactaacccttttcgggttcttccccaaacggcttcccaggaacacgcggttccacacatctcatcatctgaacggcacacaatgtgggagctgtgatcagtcc

SEQ ID NO: 395601 - DNA, 414 bp, Homo sapiens
tggtcattgggagggtaggaggtaaattgccaggcagtactcacactctttccacctcagctcccaatgggagaagctatacagagagagttcatagagtcactactcaatgctctctgaagcatgctgcccaactatggagataaatagagatagctgcgacagataaaacacaaaaaggtccacaacagcaggtaaattctttctaactgagacagaaagtgtatgtaccagcttcttctaagggctaggttgtaggcattagtaaaggcagagcttcaggaaaagctctctgcaattggcttatcaggtaagatgttcaaggaagtcacgtccagtctagtatgggactcagcaaaatgatgctccagaacagaggcaggtcaagcaaagaaatgggttcttacaaagttc

SEQ ID NO: 395602 - DNA, 539 bp, Homo sapiens
ataggattaataatatactaaatgtagatttgttaagctatctttgataattcaggaatagaatatatacacactacatataaaattttgtaaaaggcataaaataaaaaagtatgaatttcaaaaattgagagtttaaagtgaaagataaattggtattctgcttggtgcaaatacatttaaaatcaacaggaaagacttaaatgagaaagaagactaagatgtatcagtggagtataagatagggtgcagttatgatacttgacaaaaaatgcttaaaaaataaagttttttaaaaggccgcaattaatagggaacatatcatgaaatataacaatactgaatataaatatgaccccaacaacataaagcctatatacctgtactgatattcagaaggaggataataagttgagccataattgctttgaaagtctttaataatctcactatctgggattattggactgtatggtcacatccttgttttggtacttgtttcttgtggaaaacattcctttagtcttctgttcctgctt

SEQ ID NO: 395603 - DNA, 364 bp, Homo sapiens
caaaattcatggtttcagtcctgcatgttaaatgagtttcaaataaactggagattgtcaataactatgatacagagctagactgggctggggagaaactttttgtggtgggtggttatttttctgggagtgactttaattaacctctcttctttaagcatcctcattcaaaaggccccttggcactcaagaatgaaggtaacaatttttattgctcagcattgttaatttggttgatattggggcaattccaaagaaaccattaaagctatcagagaaaatgaaggggaacacattcgagtaagattttggaacatttttggcttttggagtggcctgcagttttgacaaaaaggaaaaaaaa

SEQ ID NO: 395604 - DNA, 244 bp, Homo sapiens
actattataccatcctgctgctcaaggagcagaagaccagacacacacaaaacagcaggtcctcatggcacatggagtgagatcatggttaagcaggcagaggctggcctgtctatggggtcagagccccacaggtatttcagagcagggcgggaacaggcactgggttacaaagcgagtagttacctacctagtgaccattttctcttcttcgaaagccagaggagccagaggggctggatgg

SEQ ID NO: 395605 - DNA, 158 bp, Homo sapiens
caccccctactcattccccaacagctcttggttcagagggaggctgagtgttgagttcatgatccccctctgccatcggaagatgtcttccatgaagcattgcagatggcatgtccacgaatgggttctgtgcatggggggaatccaatctaagcagg

SEQ ID NO: 395606 - DNA, 302 bp, Homo sapiens
cagcccaacacctctaatttcttttctatgttgctttcattatgaatcatgtgaaatgcaaaacttgatcatatcatccctaactgaaagctcccccttactttcagaagaaagtccaaactcctaaatatggcaaaaggatttttaatgaactggcccaagcttacctcttcatgcacatcctttgccactttgtactcatcatgcacccatatgccagtcctcatccagctgtctgcattttccaaacatactgtgttgtctcacatgtctgtgctttacacgtgttggggataacatca

SEQ ID NO: 395607 - DNA, 380 bp, Homo sapiens
cctgagcagtgggaacccctgtgtgtgcaggtggcctgccaccctgtttgcagctggcatctggagtgggagcagtctgggggactgagcccttaacctgtggtgtttgtgctaactctgggagttagtgtgagaattgaatggaatttttggacaaccagttggtgttggataattggagaattctgaggaaataacacatatttggtgtcagaaaacaccacacatgacatctgtctttgccagtgcttaactcaatatggtgctcagcctctcttcatattcagcagaaaacgttcttacaccaaagcgtaccgaacagattatgctgcaggtttcagagaagaaatgtgaaggcatgctgaatccacaacatcttt

SEQ ID NO: 395608 - DNA, 390 bp, Homo sapiens
agtgtctctgtggagagagacacctttggctgagctctggcagggctgggccccacgcctgctgctgcacccaggccctgagcagcttgggctgcaggaggttttggaaactccgtcgtggatgttggacaccaccaccagctacaccagagaaggactcgcaggctgcaatttctgaggcccatgggcagggacggaggcagagggaggaaaacccaggctcctggagcgaagcggggttttgtcccaggcgtgtgtctgggtcagatttttgtcatgtgtgctggacacacgtccactctcactgtgagcctcaggcctgctggcagcatgtggaacagaaccctcgctcctgtcgctcttcacttccgagcagtttcgaaacggcag

SEQ ID NO: 395609 - DNA, 231 bp, Homo sapiens
ttcctggcactgttgttctcattcttatgtgctagtcacaactccgtcctcctgggagtttgtggagtgtggtgaatccaggatgagcttccttattttgaggtggctttcactgcagtggtctctttatttggacttgctattggttaaaccgtcggagctattctgtgtaagtgtccatagacatgggttttaggggactgatattttagctgtgtttaaattctcata

SEQ ID NO: 395610 - DNA, 186 bp, Homo sapiens
tgagccggtccaggtatcagctggcatgcaagctggttctttttgttattactgttttaaaatcactccttctccagaaccacagcaactaacattgagctagttacactggagcctgcattttctgaatgagctttgtgttttcagtttccaggcctttctttgcccctaccctctgcttggcag

SEQ ID NO: 395611 - DNA, 1349 bp, Homo sapiens
gttccctcctgattataaaaaatgtttattggaaaatatttttgaaaatacaaagaagtctatgaatagaaactaaaataccccgaagggtttttttctaattatgaaaggacaatacatggttattattttaaaaaataagaaaatgtgagccaaaaaagggaaaaactgtccatccacagacaaccagttaatatactgtaaaatatcaaaacaaaatcttttgagttctttttttaaatcaggctattttttcccctttatttttaggatctagctttagcttttttccccactttcctatcctgttgcagttatttttcctacttcacatttatattttgttcatctttttctggttgttgctttttgggggtttctgtttttatgcttttgaggaacagatatgaaatttcaatttctgtgtatgtgaaatttctcttaaccttttccttctatggcttctcctatttctgatgtaagatgaggggcagaattataggcctgtgaggttgaattgatattagaaggacactgcacgtaagtgaggtgggtgggagtcatttgattggaattgtttaggcagcctcctgatgttggcaagaccttaagctgaagggagggaatagggtcctaagaaagaagacttggctgagggaagggccttcacggttgctgtggaatagcatttgggcccgggctgggctttgttgaccttgtcctatctcttggtcagtgtgtcctcttggcatggtaggaaacaggtagatagccacctaagaggttatgtgttcagcctgtagagactatccaggagggctatcttgggaaagtttgtgtactgtttgttaggagatgcagtataagcaaatcttggaggccactaggcaggtgaactttacccacctctaacactttttttgttccttctaaacctctctttaggccaaagaactccaaacaagcagaaagggaagagaagcgagtcctcggtctggtgctgctgcgaggggagaatctggtctcaatgacagtagagggacctcctcccaaagatgtaagtcagagcaggaagccttgtggaggaggggaggccctactgtgagccaggctctgtgttagattctgtttcattgcagttctcacaggcatcctctggattttgccccctttttcagataataaatgaaatcttaaagaggttaccctgcaagaggccgggcgcggtggctcacatctgtaatcccagctctcagggaggcaagaggcgggaggatagcttgagcccaggagttcgagacctgcctgggcaatatagcgagaccccattctccagaaaaaggaagaaa

SEQ ID NO: 395612 - DNA, 717 bp, Homo sapiens
gaagtggaaaaggggaactagaatttgggtatctcagactttaaagctctacctgtttctcagttgatgtacatagtgagtcagtggaggaagcacctgaagccatctgggtcagttcttaatgtgacgacaaagcctaggtagaccttaaaaagttgtaactccgaaacaataggaaatgtgtgtattttgttttgtacagttacagttcatagttactgagaatctaccttgcgccaaccacttcagtattttatttgatcctttaggtctctttagagataaattctcatcttataaatagaataaaccagggcttagtaacttgcccaaggtgccacagccactaagtggtgaaactgacatttgatctcagacagtcttgattctgtaaacaccaagctacacatagaaatagagcaggctttagagacctagtcaaatttgttttccctttccctttttcatttgaagggttttttttttttttttttttagatttttagatggagtctcgctctgtcgccaggctggagtgcagtggcacgatcttggcttattgcaacctctgcctcccgggttcaagtgattctcctgcctcagcctcacacctgtaatcccagcactctgggaggctgagacgggaggactgctttagctcaggagtttgagaccagcctgagcaacatagtgagaccccatctctattaaaaaaaa

SEQ ID NO: 395613 - DNA, 902 bp, Homo sapiens
ggtgaatcggccgagggtgggagagaggctaggcctctgaggaggcgaatccggcgggtatcagagccatcagaaccgccaccatgacggtgggcaagagcagcaagatgctgcagcatattgattacaggatgaggtgcatcctgcaggacggccggatcttcattggcaccttcaaggcttttgacaagcacatgaatttgatcctctgtgactgtgatgagttcagaaagatcaagccaaagaactccaaacaagcagaaagggaagagaagcgagtcctcggtctggtgctgctgcgaggggagaatctggtctcaatgacagtagagggacctcctcccaaagatactggtattgctcgagttccacttgctggagctgccgggggcccagggatcggcagggctgctggcagaggaatcccagctggggttcccatgccccaggctcctgcaggacttgctgggccagtccgtggggttggcgggccatcccaacaggtgatgaccccacaaggaagaggtactgttgcagccgctgcagctgctgccacagccagtattgccggggctccaacccagtacccacctggccgtgggggtcctcccccacctatgggccgaggagcaccccctccaggcatgatgggcccacctcctggtatgagacctcctatgggtcccccaatggggatcccccctggaagagggactccaatgggcatgccccctccgggaatgcggcctcctccccctgggatgcgaggcttctttgaccttggcacgagtttggagtgtccgaagggtggcgtcctcggccgttccaccgtgtttgcggcgggccgggtgtggtgtcctaagggccccccggatgtcccaggccgattgggccaccgcgcg

SEQ ID NO: 395614 - DNA, 842 bp, Homo sapiens
acttaggctaggtcgaggctgggtggtaggcggcgggaaatcggctgtgggagagaggctaggcctctgaggaggcgaatccggcgggtatcagagccatcagaaccgccaccatgacggtgggcaagagcagcaagatgctgcagcatattgattacaggatgaggtgcatcctgcaggacggccggatcttcattggcaccttcaaggcttttgacaagcacatgaatttgatcctctgtgactgtgatgagttcagaaagatcaagccaaagaactccaaacaagcagaaagggaagagaagcgagtcctcggtctggtgctgctgcgaggggagaatctggtctcaatgacagtagagggacctcctcccaaagatactggtattgctcgagttccacttgctggagctgccgggggcccagggatcggcagggctgctggcagaggaatcccagctggggttcccatgccccaggctcctgcaggacttgctgggccagtccgtggggttggcgggccatcccaacaggtgatgaccccacaaggaagaggtactgttgcagccgctgcagctgctgccacagccagtattgccggggctccaacccagtacccacctggccgtgggggtcctcccccacctatgggccgaggagcaccccctccaggcatgatgggccacctcctggtatgagactcctatgggtccccatggggatccccctggaagagggactccatggctgccctcggaatgggctctccctggatggagcttttgacctggccgagttgcgtctcccagcgggctcctcctagcccttccccccgtgctccg

SEQ ID NO: 395615 - DNA, 569 bp, Homo sapiens
ggactccaagcccagtgttctttccctataagataacccatgggcaaacttggtgacccctgtttctctagtctggattattcctctatgggtttttatagacataggaacccagtcagcctcagagtagtccctagttagcacatatgccatgtatacccctctcctcactcgattactgcagggcgtgggaggctggggcagggttggggattcaagttgcagatcaggcactgactaaacttcttactcttacttcaggccttctttgacccttggccacagagtatggaagtagctccgcagaggcgtgggctcgattcctcagggccacgttaccacagacctgtttgtttcttatgctgttgttcgtggagtctcatgggattgtctggtttcccttacagggccccctcccccgggaatgcgcccaccaaggccctagactcatcttggccctcctcagctccctgcctgtttcccgtaaggctgtacatagtccttttatctccttgtggcctatgaaactggtttataataaactcttaagagaacattaaaaaaaaaaa

SEQ ID NO: 395616 - DNA, 926 bp, Homo sapiens
aaatatggctaggtacgaggctgggttttaattcggccgaggcttcaaggcttttgacaagcacatgaatttgatcctctgtgactgtgatgagttcagaaagatcaagccaaagaactccaaacaagcagaaagggaagagaagcgagtcctcggtctggtgctgctgcgaggggagaatctggtctcaatgacagtagagggacctcctcccaaagatactggtattgctcgagttccacttgctggagctgccgggggcccagggatcggcagggctgctggcagaggaatcccagctggggttcccatgccccaggctcctgcaggacttgctgggccagtccgtggggttggcgggccatcccaacaggtgatgaccccacaaggaagaggtactgttgcagccgctgcagctgctgccacagccagtattgccggggctccaacccagtacccacctggccgtgggggtcctcccccacctatgggccgaggagcaccccctccaggcatgatgggcccacctcctggtatgagacctcctatgggtcccccaatggggatcccccctggaagagggactccaatggcgaatgccacccatcagacagaaatgaggactcacatcacaacatgaggaatgaaaaaggaacacaatatacagtagagaaataggacagacaaaggccatagaaatcatataggacgtactttaagatcgtggactgtagtcacgtaacggaagaacaatactacaagaatatattgtggcgtatacaaaatgatttagaataaaacttaagagacaataacaaaaaaataaaaacatagagagcaaaaattaagttacgaaaagaggtactaagcgtcaatgaaataagggatgtagagcaataatgaaaagaaaaaacgaaacctaaatg

SEQ ID NO: 395617 - DNA, 1141 bp, Homo sapiens
  misc_feature (3)..(3): n is a, c, g, or t
aantatgctcagtacgagccgggtgtgtaatcggccgaggcgtggtgctgcatttccggtagcggcggcgggaaatcggctgtgggagagaggctaggcctctgaggaggcgaatccggcgggtatcagagccatcagaaccgccaccatgacggtgggcaagagcagcaagatgctgcagcatattgattacaggatgaggtgcatcctgcaggacggccggatcttcattggcaccttcaaggcttttgacaagcacatgaatttgatcctctgtgactgtgatgagttcagaaagatcaagccaaagaactccaaacaagcagaaagggaagagaagcgagtcctcggtctggtgctgctgcgaggggagaatctggtctcaatgacagtagagggacctcctcccaaagatactggtattgctcgagttccacttgctggagctgccgggggcccagggatcggcagggctgctggcagaggaatcccagctggggttcccatgccccaggctcctgcaggacttgctgggccagtccgtggggttggcgggccatcccaacaggtgatgaccccacaaggaagaggtactgttgcagccgctgcagctgctgccacagccagtattgccggggctccaacccagtacccacctggccgtgggggtcctcccccacctatgggccgaggagcaccccctccaggcatgatgggcccacctcctggtatgagacctcctatgggtcccccaatggggatcccccctggaagagggactccaatgggcatgccccctccgggaatgcggcctcctccccctgggatgcgaggccttctttgacccttggccacagagtatggaagtagctccgcagaggcgtgggctcgattcctcagggccacgttaccacagacctgtttgtttcttatgctgttgttcgtggagtctcatgggattgtctggtttcccttacagggccccctcccccgggaatgcgcccaccaaggccctagactcatcttggccctcctcagctccctgcctgtttcccgtaaggctgtacatagtccttttatctccttgtggcctatgaaactggtttataataaactcttaagagaacattaaaaaaaaaaa

SEQ ID NO: 395618 - DNA, 1110 bp, Homo sapiens
gaaaacttacggctagtacgaggctgggtggtggcggcgggaaatcggctgtgggagagaggctaggcctctgaggaggcgaatccggcgggtatcagagccatcagaaccgccaccatgacggtgggcaagagcagcaagatgctgcagcatattgattacaggatgaggtgcatcctgcaggacggccggatcttcattggcaccttcaaggcttttgacaagcacatgaatttgatcctctgtgactgtgatgagttcagaaagatcaagccaaagaactccaaacaagcagaaagggaagagaagcgagtcctcggtctggtgctgctgcgaggggagaatctggtctcaatgacagtagagggacctcctcccaaagatactggtattgctcgagttccacttgctggagctgccgggggcccagggatcggcagggctgctggcagaggaatcccagctggggttcccatgccccaggctcctgcaggacttgctgggccagtccgtggggttggcgggccatcccaacaggtgatgaccccacaaggaagaggtactgttgcagccgctgcagctgctgccacagccagtattgccggggctccaacccagtacccacctggccgtgggggtcctcccccacctatgggccgaggagcaccccctccaggcatgatgggcccacctcctggtatgagacctcctatgggtcccccaatggggatcccccctggaagagggactccaatgggcatgccccctccgggaatgcggcctcctccccctgggatgcgaggccttctttgacccttggccacagagtatggaagtagctccgcagaggcgtgggctcgattcctcagggccacgttaccacagacctgtttgtttcttatgctgttgttcgtggagtctcatgggattgtctggtttcccttacagggccccctcccccgggaatgcgcccaccaaggccctagactcatcttggccctcctcagctccctgcctgtttcccgtaaggctgtacatagtccttttatctccttgtggcctatgaaactggtttataataaactcttaagagaacattaaaaaaaaaaa

SEQ ID NO: 395619 - DNA, 1140 bp, Homo sapiens
tgggaaaatttcctcagagggcactaacttctgctcagaaacccacaactgaccgttccggcggcggcgggaaatcggctgtgggagagaggctaggcctctgaggaggcgaatccggcgggtatcagagccatcagaaccgccaccatgacggtgggcaagagcagcaagatgctgcagcatattgattacaggatgaggtgcatcctgcaggacggccggatcttcattggcaccttcaaggcttttgacaagcacatgaatttgatcctctgtgactgtgatgagttcagaaagatcaagccaaagaactccaaacaagcagaaagggaagagaagcgagtcctcggtctggtgctgctgcgaggggagaatctggtctcaatgacagtagagggacctcctcccaaagatactggtattgctcgagttccacttgctggagctgccgggggcccagggatcggcagggctgctggcagaggaatcccagctggggttcccatgccccaggctcctgcaggacttgctgggccagtccgtggggttggcgggccatcccaacaggtgatgaccccacaaggaagaggtactgttgcagccgctgcagctgctgccacagccagtattgccggggctccaacccagtacccacctggccgtgggggtcctcccccacctatgggccgaggagcaccccctccaggcatgatgggcccacctcctggtatgagacctcctatgggtcccccaatggggatcccccctggaagagggactccaatgggcatgccccctccgggaatgcggcctcctccccctgggatgcgaggccttctttgacccttggccacagagtatggaagtagctccgcagaggcgtgggctcgattcctcagggccacgttaccacagacctgtttgtttcttatgctgttgttcgtggagtctcatgggattgtctggtttcccttacagggccccctcccccgggaatgcgcccaccaaggccctagactcatcttggccctcctcagctccctgcctgtttcccgtaaggctgtacatagtccttttatctccttgtggcctatgaaactggtttataataaactcttaagagaacattaaaaaaaaaaa

SEQ ID NO: 395620 - DNA, 1487 bp, Homo sapiens
ctccagggctagtgagctggaccggaagtaggtttctacccgaccgcattttacgtggtgctgcatttccggtagcggcggcgggaaatcggctgtgggagagaggctaggcctctgaggaggcgaatccggcgggtatcagagccatcagaaccgccaccatgacggtgggcaagagcagcaagatgctgcagcatattgattacaggatgaggtgcatcctgcaggacggccggatcttcattggcaccttcaaggcttttgacaagcacatgaatttgatcctctgtgactgtgatgagttcagaaagatcaagccaaagaactccaaacaagcagaaagggaagagaagcgagtcctcggtctggtgctgctgcgaggggagaatctggtctcaatgacagtagagggacctcctcccaaagatactggtattgctcgagttccacttgctggagctgccgggggcccagggatcggcagggctgctggcagaggaatcccagctggggttcccatgccccaggctcctgcaggacttgctgggccagtccgtggggttggcgggccatcccaacaggtgatgaccccacaaggaagaggtactgttgcagccgctgcagctgctgccacagccagtattgccggggctccaacccagtacccacctggccgtgggggtcctcccccacctatgggccgaggagcaccccctccaggcatgatgggcccacctcctggtatgagacctcctatgggtcccccaatggggatcccccctggaagagggactccaatgggcatgccccctccgggaatgcggcctcctccccctgggatgcgaggccttctttgacccttggccacagagtatggaagtagctccgcagaggcgtgggctcgattcctcagggccacgttaccacagacctgtttgtttcttatgctgttgttcgtggagtctcatgggattgtctggtttcccttacagggccccctcccccgggaatgcgcccaccaaggccctagactcatcttggccctcctcagctccctgcctgtttcccgtaaggctgtacatagtccttttatctccttgtggcctatgaaactggtttataataaactcttaagagaacattaaaaaaaaaaaaaaaaaaaaccaaaagaaaaccagtggcggcgcacggcacgggcgacatccaggagaaaggttgtagaaacccagtccggtgggagcggcgggggcgcccaaggtaggtgctatgggagacacgtggggccataagcggggtccacagagggagaacccgggcgcatagacacgggggtgtggggattcccaccgaacattaaaaaagccggcggggggggacaaccggagcgtcgtagacaaatcccagaggggaggtccgaggagtcacagcgggatcttaaccaaggggggcacacggcacgcgaaataaattaacgccgcgctgggagg

SEQ ID NO: 395621 - DNA, 1086 bp, Homo sapiens
gactagttctcggacgcgtgggtcgacccacgcgtcggctaggcctctgaggaggcgaatccggcgggtatcagagccatcagaaccgccaccatgacggtgggcaagagcagcaagatgctgcagcatattgattacaggatgaggtgcatcctgcaggacggccggatcttcattggcaccttcaaggcttttgacaagcacatgaatttgatcctctgtgactgtgatgagttcagaaagatcaagccaaagaactccaaacaagcagaaagggaagagaagcgagtcctcggtctggtgctgctgcgaggggagaatctggtctcaatgacagtagagggacctcctcccaaagatactggtattgctcgagttccacttgctggagctgccgggggcccagggatcggcagggctgctggcagaggaatcccagctggggttcccatgccccaggctcctgcaggacttgctgggccagtccgtggggttggcgggccatcccaacaggtgatgaccccacaaggaagaggtactgttgcagccgctgcagctgctgccacagccagtattgccggggctccaacccagtacccacctggccgtgggggtcctcccccacctatgggccgaggagcaccccctccaggcatgatgggcccacctcctggtatgagacctcctatgggtcccccaatggggatcccccctggaagagggactccaatgggcatgccccctccgggaatgcggcctcctccccctgggatgcgaggccttctttgacccttggccacagagtatggaagtagctccgcagaggcgtgggctcgattcctcagggccacgttaccacagacctgtttgtttcttatgctgttgttcgtggagtctcatgggattgtctggtttcccttacagggccccctcccccgggaatgcgcccaccaaggccctagactcatcttggccctcctcagctccctgcctgtttcccgtaaggctgtacatagtccttttatctccttgtggcctatgaaactggtttataataaactcttaagagaacattaaaaaaaaaaa

SEQ ID NO: 395622 - DNA, 1076 bp, Homo sapiens
ggtgaatcggccgagggtgggagagaggctaggcctctgaggaggcgaatccggcgggtatcagagccatcagaaccgccaccatgacggtgggcaagagcagcaagatgctgcagcatattgattacaggatgaggtgcatcctgcaggacggccggatcttcattggcaccttcaaggcttttgacaagcacatgaatttgatcctctgtgactgtgatgagttcagaaagatcaagccaaagaactccaaacaagcagaaagggaagagaagcgagtcctcggtctggtgctgctgcgaggggagaatctggtctcaatgacagtagagggacctcctcccaaagatactggtattgctcgagttccacttgctggagctgccgggggcccagggatcggcagggctgctggcagaggaatcccagctggggttcccatgccccaggctcctgcaggacttgctgggccagtccgtggggttggcgggccatcccaacaggtgatgaccccacaaggaagaggtactgttgcagccgctgcagctgctgccacagccagtattgccggggctccaacccagtacccacctggccgtgggggtcctcccccacctatgggccgaggagcaccccctccaggcatgatgggcccacctcctggtatgagacctcctatgggtcccccaatggggatcccccctggaagagggactccaatgggcatgccccctccgggaatgcggcctcctccccctgggatgcgaggccttctttgacccttggccacagagtatggaagtagctccgcagaggcgtgggctcgattcctcagggccacgttaccacagacctgtttgtttcttatgctgttgttcgtggagtctcatgggattgtctggtttcccttacagggccccctcccccgggaatgcgcccaccaaggccctagactcatcttggccctcctcagctccctgcctgtttcccgtaaggctgtacatagtccttttatctccttgtggcctatgaaactggtttataataaactcttaagagaacattaaaaaaaaaaa

SEQ ID NO: 395623 - DNA, 1395 bp, Homo sapiens
ctccagggctagtgagctggaccggaagtaggtttctacccgaccgcattttacgtggtgctgcatttccggtagcggcggcgggaaatcggctgtgggagagaggctaggcctctgaggaggcgaatccggcgggtatcagagccatcagaaccgccaccatgacggtgggcaagagcagcaagatgctgcagcatattgattacaggatgaggtgcatcctgcaggacggccggatcttcattggcaccttcaaggcttttgacaagcacatgaatttgatcctctgtgactgtgatgagttcagaaagatcaagccaaagaactccaaacaagcagaaagggaagagaagcgagtcctcggtctggtgctgctgcgaggggagaatctggtctcaatgacagtagagggacctcctcccaaagatactggtattgctcgagttccacttgctggagctgccgggggcccagggatcggcagggctgctggcagaggaatcccagctggggttcccatgccccaggctcctgcaggacttgctgggccagtccgtggggttggcgggccatcccaacaggtgatgaccccacaaggaagaggtactgttgcagccgctgcagctgctgccacagccagtattgccggggctccaacccagtacccacctggccgtgggggtcctcccccacctatgggccgaggagcaccccctccaggcatgatgggcccacctcctggtatgagacctcctatgggtcccccaatggggatcccccctggaagagggactccaatgggcatgccccctccgggaatgcggcctcctccccctgggatgcgagggccccctcccccgggaatgcgcccaccaaggccctagactcatcttggccctcctcagctccctgcctgtttcccgtaaggctgtacatagtccttttatctccttgtggcctatgaaactggtttataataaactcttaagagaacattaaaaaaaaaaagaaaaaaaaaaaaaaaaaaaataaaagaaaaaaaaaaaaaaaggggggggggggataaaaattcccccccgagggggcacccaagagttagcggttccccgacgtttttcgtttgtaacaggggggggccccttatagagggggcgcgatataaagaccaagggcgggggcggggtgtttaaacccacgcgcgcgtgtgtggcgggaaacaccgtgtccgtgggggacactctgtgggaggaacccctctcggtggggcggggcatactggtggcccacactcccacggaaatttgagagctcaggggatctataacctgtcagggtgatatggtggtacccagcgcaatgctggggcgggagttgcttcgggctgtttgcacattc

SEQ ID NO: 395624 - DNA, 1053 bp, Homo sapiens
  misc_feature (889)..(889): n is a, c, g, or t
  misc_feature (944)..(944): n is a, c, g, or t
ctccagggctagtgagctggaccggaagtaggtttctacccgaccgcattttacgtggtgctgcatttccggtagcggcggcgggaaatcggctgtgggagagaggctaggcctctgaggaggcgaatccggcgggtatcagagccatcagaaccgccaccatgacggtgggcaagagcagcaagatgctgcagcatattgattacaggatgaggtgcatcctgcaggacggccggatcttcattggcaccttcaaggcttttgacaagcacatgaatttgatcctctgtgactgtgatgagttcagaaagatcaagccaaagaactccaaacaagcagaaagggaagagaagcgagtcctcggtctggtgctgctgcgaggggagaatctggtctcaatgacagtagagggacctcctcccaaagatactggtattgctcgagttccacttgctggagctgccgggggcccagggatcggcagggctgctggcagaggaatcccagctggggttcccatgccccaggctcctgcaggacttgctgggccagtccgtggggttggcgggccatcccaacaggtgatgaccccacaaggaagaggtactgttgcagccgctgcagctgctgccacagccagtattgccggggctccaacccagtacccacctggccgtgggggtcctcccccacctatgggccgaggagcaccccctccaggcatgatgggcccacctcctggtatgagacctcctatgggtcccccaatggggatcccccctggaagagggactccaatgggcatgccccctccgggaatgcggcctcctccccctgggatgcgaggcttctttgaccttggcacgagtttggagtagctccgcaaggngtgggtcgattctcaggcccgttcccagactgttgtctatgcgggtcggggccanggatgtgtcctaagccacccggaaggcccaggcaaatttgcgcaacagctgcgaggacaatatctggcaaggtatataaaaaaacgggaaaggacacctagcataaaga

SEQ ID NO: 395625 - DNA, 980 bp, Homo sapiens
ctccagggctagtgagctggaccggaagtaggtttctacccgaccgcattttacgtggtgctgcatttccggtagcggcggcgggaaatcggctgtgggagagaggctaggcctctgaggaggcgaatccggcgggtatcagagccatcagaaccgccaccatgacggtgggcaagagcagcaagatgctgcagcatattgattacaggatgaggtgcatcctgcaggacggccggatcttcattggcaccttcaaggcttttgacaagcacatgaatttgatcctctgtgactgtgatgagttcagaaagatcaagccaaagaactccaaacaagcagaaagggaagagaagcgagtcctcggtctggtgctgctgcgaggggagaatctggtctcaatgacagtagagggacctcctcccaaagatactggtattgctcgagttccacttgctggagctgccgggggcccagggatcggcagggctgctggcagaggaatcccagctggggttcccatgccccaggctcctgcaggacttgctgggccagtccgtggggttggcgggccatcccaacaggtgatgaccccacaaggaagaggtactgttgcagccgctgcagctgctgccacagccagtattgccggggctccaacccagtacccacctggccgtgggggtcctcccccacctatgggccgaggagcaccccctccaggcatgatgggcccacctcctggtatgagacctcctatgggtcccccaatggggatcccccctggaagagggactccaatgggcatgccccctccgggaatgcggcctcctccccctgggatgcgaggcttctttgaccttggcacgagtttggagtgtccgaagggtggcgtcctcggccgttccaccgtgtttgcggcgggccgggtgtggtgtcctaagggccccccggatgtcccaggccgattgggccaccgcgcg

SEQ ID NO: 395626 - DNA, 1009 bp, Homo sapiens
  misc_feature (845)..(845): n is a, c, g, or t
  misc_feature (900)..(900): n is a, c, g, or t
gaaaacttacggctagtacgaggctgggtggtggcggcgggaaatcggctgtgggagagaggctaggcctctgaggaggcgaatccggcgggtatcagagccatcagaaccgccaccatgacggtgggcaagagcagcaagatgctgcagcatattgattacaggatgaggtgcatcctgcaggacggccggatcttcattggcaccttcaaggcttttgacaagcacatgaatttgatcctctgtgactgtgatgagttcagaaagatcaagccaaagaactccaaacaagcagaaagggaagagaagcgagtcctcggtctggtgctgctgcgaggggagaatctggtctcaatgacagtagagggacctcctcccaaagatactggtattgctcgagttccacttgctggagctgccgggggcccagggatcggcagggctgctggcagaggaatcccagctggggttcccatgccccaggctcctgcaggacttgctgggccagtccgtggggttggcgggccatcccaacaggtgatgaccccacaaggaagaggtactgttgcagccgctgcagctgctgccacagccagtattgccggggctccaacccagtacccacctggccgtgggggtcctcccccacctatgggccgaggagcaccccctccaggcatgatgggcccacctcctggtatgagacctcctatgggtcccccaatggggatcccccctggaagagggactccaatgggcatgccccctccgggaatgcggcctcctccccctgggatgcgaggcttctttgaccttggcacgagtttggagtagctccgcaaggngtgggtcgattctcaggcccgttcccagactgttgtctatgcgggtcggggccanggatgtgtcctaagccacccggaaggcccaggcaaatttgcgcaacagctgcgaggacaatatctggcaaggtatataaaaaaacgggaaaggacacctagcataaaga

SEQ ID NO: 395627 - DNA, 1034 bp, Homo sapiens
  misc_feature (828)..(829): n is a, c, g, or t
  misc_feature (852)..(852): n is a, c, g, or t
  misc_feature (856)..(857): n is a, c, g, or t
  misc_feature (859)..(859): n is a, c, g, or t
  misc_feature (880)..(880): n is a, c, g, or t
  misc_feature (899)..(899): n is a, c, g, or t
  misc_feature (901)..(901): n is a, c, g, or t
  misc_feature (904)..(904): n is a, c, g, or t
  misc_feature (921)..(921): n is a, c, g, or t
  misc_feature (924)..(924): n is a, c, g, or t
ctccagggctagtgagctggaccggaagtaggtttctacccgaccgcattttacgtggtgctgcatttccggtagcggcggcgggaaatcggctgtgggagagaggctaggcctctgaggaggcgaatccggcgggtatcagagccatcagaaccgccaccatgacggtgggcaagagcagcaagatgctgcagcatattgattacaggatgaggtgcatcctgcaggacggccggatcttcattggcaccttcaaggcttttgacaagcacatgaatttgatcctctgtgactgtgatgagttcagaaagatcaagccaaagaactccaaacaagcagaaagggaagagaagcgagtcctcggtctggtgctgctgcgaggggagaatctggtctcaatgacagtagagggacctcctcccaaagatactggtattgctcgagttccacttgctggagctgccgggggcccagggatcggcagggctgctggcagaggaatcccagctggggttcccatgccccaggctcctgcaggacttgctgggccagtccgtggggttggcgggccatcccaacaggtgatgaccccacaaggaagaggtactgttgcagccgctgcagctgctgccacagccagtattgccggggctccaacccagtacccacctggccgtgggggtcctcccccacctatgggccgaggagcaccccctccaggcatgatgggcccacctcctggtatgagacctcctatgggtcccccaatggggatcccccctggaagagggactccatggggcatggccctcggaatgggctctcccnnggattgatggcccctcccggatnggcnncnaggctaatctttggctctcantcctgctgttccgtagtgnantancttaatcttggcttgantgnttactactctcaaagattttcgaacaacaaaacaacggtttttgggcaaaagaaacgctattcgtcactttagaggaggcctggataaagcaaaaaggaacacacaacaa

SEQ ID NO: 395628 - DNA, 1070 bp, Homo sapiens
  misc_feature (816)..(816): n is a, c, g, or t
  misc_feature (842)..(842): n is a, c, g, or t
ctccagggctagtgagctggaccggaagtaggtttctacccgaccgcattttacgtggtgctgcatttccggtagcggcggcgggaaatcggctgtgggagagaggctaggcctctgaggaggcgaatccggcgggtatcagagccatcagaaccgccaccatgacggtgggcaagagcagcaagatgctgcagcatattgattacaggatgaggtgcatcctgcaggacggccggatcttcattggcaccttcaaggcttttgacaagcacatgaatttgatcctctgtgactgtgatgagttcagaaagatcaagccaaagaactccaaacaagcagaaagggaagagaagcgagtcctcggtctggtgctgctgcgaggggagaatctggtctcaatgacagtagagggacctcctcccaaagatactggtattgctcgagttccacttgctggagctgccgggggcccagggatcggcagggctgctggcagaggaatcccagctggggttcccatgccccaggctcctgcaggacttgctgggccagtccgtggggttggcgggccatcccaacaggtgatgaccccacaaggaagaggtactgttgcagccgctgcagctgctgccacagccagtattgccggggctccaacccagtacccacctggccgtgggggtcctcccccacctatgggccgaggagcaccccctccaggcatgatgggcccacctcctggtatgagacctcctatgggtcccccaatggggatcccccctggaagagggactccatggaagaggactccatggnatgccctcggaatgcggctcctcccnggatgcagcttcttgacctggccagagtatggaaggcccgcgaggggacgaacataggccgtaacacagaccgggactaggacagggcgagcaaggacaggtggccagagggaccacaccggaatggcacaggcaaattggagcgagcaggctacaacagaaacaaacgagaaagagaacaaaaaaaagcgcaacaacgagacgagcaggaaaagagcaggacggaga

SEQ ID NO: 395629 - DNA, 1265 bp, Homo sapiens
  misc_feature (3)..(3): n is a, c, g, or t
aantatgctcagtacgagccgggtgtgtaatcggccgaggcgtggtgctgcatttccggtagcggcggcgggaaatcggctgtgggagagaggctaggcctctgaggaggcgaatccggcgggtatcagagccatcagaaccgccaccatgacggtgggcaagagcagcaagatgctgcagcatattgattacaggatgaggtgcatcctgcaggacggccggatcttcattggcaccttcaaggcttttgacaagcacatgaatttgatcctctgtgactgtgatgagttcagaaagatcaagtgtgtgaggggggagagcttgagtttctggcctcattgcctatttgtaaagctgtagcctaaagggctctcccaatgcagcctggtctgaaactgctttaagaagcctctgaccctcttcagggccaaagaactccaaacaagcagaaagggaagagaagcgagtcctcggtctggtgctgctgcgaggggagaatctggtctcaatgacagtagagggacctcctcccaaagatactggtattgctcgagttccacttgctggagctgccgggggcccagggatcggcagggctgctggcagaggaatcccagctggggttcccatgccccaggctcctgcaggacttgctgggccagtccgtggggttggcgggccatcccaacaggtgatgaccccacaaggaagaggtactgttgcagccgctgcagctgctgccacagccagtattgccggggctccaacccagtacccacctggccgtgggggtcctcccccacctatgggccgaggagcaccccctccaggcatgatgggcccacctcctggtatgagacctcctatgggtcccccaatggggatcccccctggaagagggactccaatgggcatgccccctccgggaatgcggcctcctccccctgggatgcgaggccttctttgacccttggccacagagtatggaagtagctccgcagaggcgtgggctcgattcctcagggccacgttaccacagacctgtttgtttcttatgctgttgttcgtggagtctcatgggattgtctggtttcccttacagggccccctcccccgggaatgcgcccaccaaggccctagactcatcttggccctcctcagctccctgcctgtttcccgtaaggctgtacatagtccttttatctccttgtggcctatgaaactggtttataataaactcttaagagaacattaaaaaaaaaaa

SEQ ID NO: 395630 - DNA, 1783 bp, Homo sapiens
gttccctcctgattataaaaaatgtttattggaaaatatttttgaaaatacaaagaagtctatgaatagaaactaaaataccccgaagggtttttttctaattatgaaaggacaatacatggttattattttaaaaaataagaaaatgtgagccaaaaaagggaaaaactgtccatccacagacaaccagttaatatactgtaaaatatcaaaacaaaatcttttgagttctttttttaaatcaggctattttttcccctttatttttaggatctagctttagcttttttccccactttcctatcctgttgcagttatttttcctacttcacatttatattttgttcatctttttctggttgttgctttttgggggtttctgtttttatgcttttgaggaacagatatgaaatttcaatttctgtgtatgtgaaatttctcttaaccttttccttctatggcttctcctatttctgatgtaagatgaggggcagaattataggcctgtgaggttgaattgatattagaaggacactgcacgtaagtgaggtgggtgggagtcatttgattggaattgtttaggcagcctcctgatgttggcaagaccttaagctgaagggagggaatagggtcctaagaaagaagacttggctgagggaagggccttcacggttgctgtggaatagcatttgggcccgggctgggctttgttgaccttgtcctatctcttggtcagtgtgtcctcttggcatggtaggaaacaggtagatagccacctaagaggttatgtgttcagcctgtagagactatccaggagggctatcttgggaaagtttgtgtactgtttgttaggagatgcagtataagcaaatcttggaggccactaggcaggtgaactttacccacctctaacactttttttgttccttctaaacctctctttaggccaaagaactccaaacaagcagaaagggaagagaagcgagtcctcggtctggtgctgctgcgaggggagaatctggtctcaatgacagtagagggacctcctcccaaagatactggtattgctcgagttccacttgctggagctgccgggggcccagggatcggcagggctgctggcagaggaatcccagctggggttcccatgccccaggctcctgcaggacttgctgggccagtccgtggggttggcgggccatcccaacaggtgatgaccccacaaggaagaggtactgttgcagccgctgcagctgctgccacagccagtattgccggggctccaacccagtacccacctggccgtgggggtcctcccccacctatgggccgaggagcaccccctccaggcatgatgggcccacctcctggtatgagacctcctatgggtcccccaatggggatcccccctggaagagggactccaatgggcatgccccctccgggaatgcggcctcctccccctgggatgcgaggccttctttgacccttggccacagagtatggaagtagctccgcagaggcgtgggctcgattcctcagggccacgttaccacagacctgtttgtttcttatgctgttgttcgtggagtctcatgggattgtctggtttcccttacagggccccctcccccgggaatgcgcccaccaaggccctagactcatcttggccctcctcagctccctgcctgtttcccgtaaggctgtacatagtccttttatctccttgtggcctatgaaactggtttataataaactcttaagagaacattaaaaaaaaaaa

SEQ ID NO: 395631 - DNA, 1017 bp, Homo sapiens
gcccggtcaggccagggcagagcagctggctcgtgcatgcgaatcccggggctataaccatcgacgccatgacgtgggcagcgatgctgcctttgattacggatgaggtgcatcctgcgacggcggatcttctgcctcagctttggcctgaattgtcctctgtgatggtaatcaatcaagccaaagaactccaaacaagcagaaagggaagagaagcgagtcctcggtctggtgctgctgcgaggggagaatctggtctcaatgacagtagagggacctcctcccaaagatactggtattgctcgagttccacttgctggagctgccgggggcccagggatcggcagggctgctggcagaggaatcccagctggggttcccatgccccaggctcctgcaggacttgctgggccagtccgtggggttggcgggccatcccaacaggtgatgaccccacaaggaagaggtactgttgcagccgctgcagctgctgccacagccagtattgccggggctccaacccagtacccacctggccgtgggggtcctcccccacctatgggccgaggagcaccccctccaggcatgatgggcccacctcctggtatgagacctcctatgggtcccccaatggggatcccccctggaagagggactccaatgggcatgccccctccgggaatgcggcctcctccccctgggatgcgaggccttctttgacccttggccacagagtatggaagtagctccgcagaggcgtgggctcgattcctcagggccacgttaccacagacctgtttgtttcttatgctgttgttcgtggagtctcatgggattgtctggtttcccttacagggccccctcccccgggaatgcgcccaccaaggccctagactcatcttggccctcctcagctccctgcctgtttcccgtaaggctgtacatagtccttttatctccttgtggcctatgaaactggtttataataaactcttaagagaacattaaaaaaaaaaa

SEQ ID NO: 395632 - DNA, 890 bp, Homo sapiens
ctccagggctagtgagctggaccggaagtaggtttctacccgaccgcattttacgtggtgctgcatttccggtagcggcggcgggaaatcggctgtgggagagaggctaggcctctgaggaggcgaatccggcgggtatcagagccatcagaaccgccaccatgacggtgggcaagagcagcaagatgctgcagcatattgattacaggatgaggtgcatcctgcaggacggccggatcttcattggcaccttcaaggcttttgacaagcacatgaatttgatcctctgtgactgtgatgagttcagaaagatcaagccaaagaactccaaacaagcagaaagggaagagaagcgagtcctcggtctggtgctgctgcgaggggagaatctggtctcaatgacagtagagggacctcctcccaaagatactggtattgctcgagttccacttgctggagctgccgggggcccagggatcggcagggctgctggcagaggaatcccagctggggttcccatgccccaggctcctgcaggacttgctgggccagtccgtggggttggcgggccatcccaacaggtgatgaccccacaaggaagaggtactgttgcagccgctgcagctgctgccacagccagtattgccggggctccaacccagtacccacctggccgtgggggtcctcccccacctatgggccgaggagcaccccctccaggcatgatgggccacctcctggtatgagactcctatgggtccccatggggatccccctggaagagggactccatggctgccctcggaatgggctctccctggatggagcttttgacctggccgagttgcgtctcccagcgggctcctcctagcccttccccccgtgctccg

SEQ ID NO: 395633 - DNA, 1056 bp, Homo sapiens
atctcatgtccctttaatgccttgcctgctgaaccctgagtggaaccctggccctttgctcttggtttaactttcacaggagtgcatataggtggttgagttgtggcatgtttctctagacttactcttaagttctaccctgcttcagggataactcatagtcttggatggaggaagaatggtgttggcacacatggagaggtagtatttataagctatttcgatagtatttataagctatttcgaggggctctcttggcaatgatattccaaagtatacttctgatcttcagatcactgggcatcagagcatatttgtttatttttcagactggtattgctcgagttccacttgctggagctgccgggggcccagggatcggcagggctgctggcagaggaatcccagctggggttcccatgccccaggctcctgcaggacttgctgggccagtccgtggggttggcgggccatcccaacaggtgatgaccccacaaggaagaggtactgttgcagccgctgcagctgctgccacagccagtattgccggggctccaacccagtacccacctggccgtgggggtcctcccccacctatgggccgaggagcaccccctccaggcatgatgggcccacctcctggtatgagacctcctatgggtcccccaatggggatcccccctggaagagggactccaatgggcatgccccctccgggaatgcggcctcctccccctgggatgcgaggccttctttgacccttggccacagagtatggaagtagctccgcagaggcgtgggctcgattcctcagggccacgttaccacagacctgtttgtttcttatgctgttgttcgtggagtctcatgggattgtctggtttcccttacagggccccctcccccgggaatgcgcccaccaaggccctagactcatcttggccctcctcagctccctgcctgtttcccgtaaggctgtacatagtccttttatctccttgtggcctatgaaactggtttataataaactcttaagagaacattaaaaaaaaaaa

SEQ ID NO: 395634 - DNA, 837 bp, Homo sapiens
  misc_feature (3)..(3): n is a, c, g, or t
aantatgctcagtacgagccgggtgtgtaatcggccgaggcgtggtgctgcatttccggtagcggcggcgggaaatcggctgtgggagagaggctaggcctctgaggaggcgaatccggcgggtatcagagccatcagaaccgccaccatgacggtgggcaagagcagcaagatgctgcagcatattgattacaggatgaggtgcatcctgcaggacggccggatcttcattggcaccttcaaggcttttgacaagcacatgaatttgatcctctgtgactgtgatgagttcagaaagatcaagccaaagaactccaaacaagcagaaagggaagagaagcgagtcctcggtctggtgctgctgcgaggggagaatctggtctcaatgacagtagagggacctcctcccaaagatcacctcctggtatgagacctcctatgggtcccccaatggggatcccccctggaagagggactccaatgggcatgccccctccgggaatgcggcctcctccccctgggatgcgaggccttctttgacccttggccacagagtatggaagtagctccgcagaggcgtgggctcgattcctcagggccacgttaccacagacctgtttgtttcttatgctgttgttcgtggagtctcatgggattgtctggtttcccttacagggccccctcccccgggaatgcgcccaccaaggccctagactcatcttggccctcctcagctccctgcctgtttcccgtaaggctgtacatagtccttttatctccttgtggcctatgaaactggtttataataaactcttaagagaacattaaaaaaaaaaa

SEQ ID NO: 395635 - DNA, 1386 bp, Homo sapiens
  misc_feature (3)..(3): n is a, c, g, or t
aantatgctcagtacgagccgggtgtgtaatcggccgaggcgtggtgctgcatttccggtagcggcggcgggaaatcggctgtgggagagaggctaggcctctgaggaggcgaatccggcgggtatcagagccatcagaaccgccaccatgacggtgggcaagagcagcaagatgctgcagcatattgattacaggatgaggtgcatcctgcaggacggccggatcttcattggcaccttcaaggcttttgacaagcacatgaatttgatcctctgtgactgtgatgagttcagaaagatcaagccaaagaactccaaacaagcagaaagggaagagaagcgagtcctcggtctggtgctgctgcgaggggagaatctggtctcaatgacagtagagggacctcctcccaaagatatttttagatggagtctcgctctgtcgccaggctggagtgcagtggcacgatcttggcttattgcaacctctgcctcccgggttcaagtgattctcctgcctcagcctcccgagtagcggggattacagatactggtattgctcgagttccacttgctggagctgccgggggcccagggatcggcagggctgctggcagaggaatcccagctggggttcccatgccccaggctcctgcaggacttgctgggccagtccgtggggttggcgggccatcccaacaggtgatgaccccacaaggaagaggtactgttgcagccgctgcagctgctgccacagccagtattgccggggctccaacccagtacccacctggccgtgggggtcctcccccacctatgggccgaggagcaccccctccaggcatgatgggcccacctcctggtatgagacctcctatgggtcccccaatggggatcccccctggaagagggactccaatgggggattgtgcccatacggaaatgcgggctcctacccctggatgccatgggccccttcccccggaatgggccacaatgcctacactccatttgggcctcttattcctgctgttaccgtaaggtgacatatcttatgatcccgggcggccaatgaaacggggtcaaataagacctctaaagaagcgtgaggcacaacaccagcgaggcgccacgaataccaccaggagggcaccgagagagaggccgacaccgtccggtacaaaaggggcccacaggaagagaaaaagcacggggccaggccgggactaaagaacgagaggcaacacgaaggaacgagcgagacacccccggggaggcaagacacaaccacaagaaccgcgacaatgcggatggaagaactcgacgagcagagaccgacagagcggaacgatgacagacgacacggactagcgcaaccaggcacccaca

SEQ ID NO: 395636 - DNA, 870 bp, Homo sapiens
  misc_feature (3)..(3): n is a, c, g, or t
aantatgctcagtacgagccgggtgtgtaatcggccgaggcgtggtgctgcatttccggtagcggcggcgggaaatcggctgtgggagagaggctaggcctctgaggaggcgaatccggcgggtatcagagccatcagaaccgccaccatgacggtgggcaagagcagcaagatgctgcagcatattgattacaggatgaggtgcatcctgcaggacggccggatcttcattggcaccttcaaggcttttgacaagcacatgaatttgatcctctgtgactgtgatgagttcagaaagatcaaggccatataggaatcgtccaacactagaggcatgaaaggggtacagatgaacgcagatgtccctcggctactggctgcgtgcgtgcagaaggcgtgagaacttctggtcgtcaactgacaggtcagacggtgactctccttcctcagatagatacctggatattgcgtcgaggattccagcattgcgtggtacggctgtccggtgcggccccacgtggcagtcgcgtcggaggtggccttggctggtcgacgagcgtacattcaccatgctggagggcttccccaatgcgcctcagttgactcccctgcatggacgttgacttgggccattgtcctgtgtgggcttgagcggggccagtcctctaacacggctgcatggacacccaacatagcgaacagaggtagctagtatgcaggccagctgctagacgtgcatgaacacgatgctcacgctgtttgcctgtggggctcctaacctcgagtacgccattcttggacctgtgcgagtggtaccgtacccccgagctatggcgccggaggagctcagccaccttccgaggcaatgat

SEQ ID NO: 395637 - DNA, 1154 bp, Homo sapiens
ctccagggctagtgagctggaccggaagtaggtttctacccgaccgcattttacgtggtgctgcatttccggtagcggcggcgggaaatcggctgtgggagagaggctaggcctctgaggaggcgaatccggcgggtatcagagccatcagaaccgccaccatgacggtgggcaagagcagcaagatgctgcagcatattgattacaggatgaggtgcatcctgcaggacggccggatcttcattggcaccttcaaggcttttgacaagcacatgaatttgatcctctgtgactgtgatgagttcagaaagatcaagccaaagaactccaaacaagcagaaagggaagagaagcgagtcctcggtctggtgctgctgcgaggggagaatctggtctcaatgacagtagagggacctcctcccaaagatactggtattgctcgagttccacttgctggagctgccgggggcccagggatcggcagggctgctggcagaggaatcccagctggggttcccatgccccaggctcctgcaggacttgctgggccagtccgtggggttggcgggccatcccaacaggtgatgaccccacaaggaagaggtactgttgcagccgctgcagctgctgccacagccagtattgccggggctccaacccagtacccacctggccgtgggggtcctcccccacctatgggccgaggagcaccccctccaggcatgatgggcccacctcctggtatgagacctcctatgggtcccccaatggggatcccccctggaagagggactccaatgggcatgccccctccgggaatgcggcctcctccccctgggatgcgaggccttctttgacccttggccacagagtatggaagtagctccgcagaggcgtgggctcgattcctcagggccacgttaccacagacctgtttgtttcttatgctgttgttcgtggagtctcatgggattgtctggtttcccttacagggccccctcccccgggaatgcgcccaccaaggccctagactcatcttggccctcctcagctccctgcctgtttcccgtaaggctgtacatagtccttttatctccttgtggcctatgaaactggtttataataaactcttaagagaacattaaaaaaaaaaa

SEQ ID NO: 395638 - DNA, 895 bp, Homo sapiens
ggcctcaagcctctatgcggatcgctggatccggcgggatattagacccccacacaaccggcaccactaagggctgggaaatactcggtcatatgctgtcacatcttcattcctggatagacgtgtgtcctgccccgatgcgacggatctctcttgtgcccttcgagcgctcattgaccctgcactgtgtatttgagattcctcctgctgcatgggtcgccctgcaagtgtctactagagagagtccaaggccacacaggaactccacgaccaagctgaaatggcgcaacgatcacatggagttctctggatctggtctggtgctgctgcgaggggagaatctggtctcaatgacagtagagggacctcctcccaaagatactggtattgctcgagttccacttgctggagctgccgggggcccagggatcggcagggctgctggcagaggaatcccagctggggttcccatgccccaggctcctgcaggacttgctgggccagtccgtggggttggcgggccatcccaacaggtgatgaccccacaaggaagaggtactgttgcagccgctgcagctgctgccacagccagtattgccggggctccaacccagtacccacctggccgtgggggtcctcccccacctatgggccgaggagcaccccctccaggcatgatgggcccacctcctggtatgagacctcctatgggtcccccaatggggatcccccctggaagagggactccatgggcatgccccctcgggatgcggctctcccctgggatgcgaggctctcttgaccttggccgggttgaattctcgagagggtgggtcatctttcggccgttccccgaccggtggtatcgtgccgtcggtctgaatgttgtttctag

SEQ ID NO: 395639 - DNA, 1118 bp, Homo sapiens
  misc_feature (3)..(3): n is a, c, g, or t
aantatgctcagtacgagccgggtgtgtaatcggccgaggggcggcgggaaatcggctgtgggagagaggctaggcctctgaggaggcgaatccggcgggtatcagagccatcagaaccgccaccatgacggtgggcaagagcagcaagatgctgcagcatattgattacaggatgaggtgcatcctgcaggacggccggatcttcattggcaccttcaaggcttttgacaagcacatgaatttgatcctctgtgactgtgatgagttcagaaagatcaagccaaagaactccaaacaagcagaaagggaagagaagcgagtcctcggtctggtgctgctgcgaggggagaatctggtctcaatgacagtagagggacctcctcccaaagatactggtattgctcgagttccacttgctggagctgccgggggcccagggatcggcagggctgctggcagaggaatcccagctggggttcccatgccccaggctcctgcaggacttgctgggccagtccgtggggttggcgggccatcccaacaggtgatgaccccacaaggaagaggtactgttgcagccgctgcagctgctgccacagccagtattgccggggctccaacccagtacccacctggccgtgggggtcctcccccacctatgggccgaggagcaccccctccaggcatgatgggcccacctcctggtatgagacctcctatgggtcccccaatggggatcccccctggaagagggactccaatgggcatgccccctccgggaatgcggcctcctccccctgggatgcgaggccttctttgacccttggccacagagtatggaagtagctccgcagaggcgtgggctcgattcctcagggccacgttaccacagacctgtttgtttcttatgctgttgttcgtggagtctcatgggattgtctggtttcccttacagggccccctcccccgggaatgcgcccaccaaggccctagactcatcttggccctcctcagctccctgcctgtttcccgtaaggctgtacatagtccttttatctccttgtggcctatgaaactggtttataataaactcttaagagaacattaaaaaaaaaaa

SEQ ID NO: 395640 - DNA, 1106 bp, Homo sapiens
acttaggctaggtcgaggctgggtggtaggcggcgggaaatcggctgtgggagagaggctaggcctctgaggaggcgaatccggcgggtatcagagccatcagaaccgccaccatgacggtgggcaagagcagcaagatgctgcagcatattgattacaggatgaggtgcatcctgcaggacggccggatcttcattggcaccttcaaggcttttgacaagcacatgaatttgatcctctgtgactgtgatgagttcagaaagatcaagccaaagaactccaaacaagcagaaagggaagagaagcgagtcctcggtctggtgctgctgcgaggggagaatctggtctcaatgacagtagagggacctcctcccaaagatactggtattgctcgagttccacttgctggagctgccgggggcccagggatcggcagggctgctggcagaggaatcccagctggggttcccatgccccaggctcctgcaggacttgctgggccagtccgtggggttggcgggccatcccaacaggtgatgaccccacaaggaagaggtactgttgcagccgctgcagctgctgccacagccagtattgccggggctccaacccagtacccacctggccgtgggggtcctcccccacctatgggccgaggagcaccccctccaggcatgatgggcccacctcctggtatgagacctcctatgggtcccccaatggggatcccccctggaagagggactccaatgggcatgccccctccgggaatgcggcctcctccccctgggatgcgaggccttctttgacccttggccacagagtatggaagtagctccgcagaggcgtgggctcgattcctcagggccacgttaccacagacctgtttgtttcttatgctgttgttcgtggagtctcatgggattgtctggtttcccttacagggccccctcccccgggaatgcgcccaccaaggccctagactcatcttggccctcctcagctccctgcctgtttcccgtaaggctgtacatagtccttttatctccttgtggcctatgaaactggtttataataaactcttaagagaacattaaaaaaaaaaa

SEQ ID NO: 395641 - DNA, 1190 bp, Homo sapiens
ctccagggctagtgagctggaccggaagtaggtttctacccgaccgcattttacgtggtgctgcatttccggtagcggcggcgggaaatcggctgtgggagagaggctaggcctctgaggaggcgaatccggcgggtatcagagccatcagaaccgccaccatgacggtgggcaagagcagcaagatgctgcagcatattgattacaggatgaggtgcatcctgcaggacggccggatcttcattggcaccttcaaggcttttgacaagcacatgaatttgatcctctgtgactgtgatgagttcagaaagatcaagccaaagaactccaaacaagcagaaagggaagagaagcgagtcctcggtctggtgctgctgcgaggggagaatctggtctcaatgacagtagagggacctcctcccaaagatactggtattgctcgagttccacttgctggagctgccgggggcccagggatcggcagggctgctggcagaggaatcccagctggggttcccatgccccaggctcctgcaggacttgctgggccagtccgtggggttggcgggccatcccaacaggtgatgaccccacaaggaagaggtactgttgcagccgctgcagctgctgccacagccagtattgccggggctccaacccagtacccacctggccgtgggggtcctcccccacctatgggccgaggagcaccccctccaggcatgatgggcccacctcctggtatgagacctcctatgggtcccccaatggggatcccccctggaagagggactccaatgggcatgccccctccgggaatgcggcctcctccccctgggatgcgaggccttctttgacccttggccacagagtatggaagtagctccgcagaggcgtgggctcgattcctcagggccacgttaccacagacctgtttgtttcttatgctgttgttcgtggagtctcatgggattgtctggtttcccttacagggccccctcccccgggaatgcgcccaccaaggccctagactcatcttggccctcctcagctccctgcctgtttcccgtaaggctgtacatagtccttttatctccttgtggcctatgaaactggtttataataaactcttaagagaacattaaaaaaaaaaataattgcaaaaaaaaaaaagaattcggggacaaaag

SEQ ID NO: 395642 - DNA, 1489 bp, Homo sapiens
ctccagggctagtgagctggaccggaagtaggtttctacccgaccgcattttacgtggtgctgcatttccggtagcggcggcgggaaatcggctgtgggagagaggctaggcctctgaggaggcgaatccggcgggtatcagagccatcagaaccgccaccatgacggtgggcaagagcagcaagatgctgcagcatattgattacaggatgaggtgcatcctgcaggacggccggatcttcattggcaccttcaaggcttttgacaagcacatgaatttgatcctctgtgactgtgatgagttcagaaagatcaagccaaagaactccaaacaagcagaaagggaagagaagcgagtcctcggtctggtgctgctgcgaggggagaatctggtctcaatgacagtagagggacctcctcccaaagatactggtattgctcgagttccacttgctggagctgccgggggcccagggatcggcagggctgctggcagaggaatcccagctggggttcccatgccccaggctcctgcaggacttgctgggccagtccgtggggttggcgggccatcccaacaggtgatgaccccacaaggaagaggtactgttgcagccgctgcagctgctgccacagccagtattgccggggctccaacccagtacccacctggccgtgggggtcctcccccacctatgggccgaggagcaccccctccaggcatgatgggcccacctcctggtatgagacctcctatgggtcccccaatggggatcccccctggaagagggactccaatgggcatgccccctccgggaatgcggcctcctccccctgggatgcgaggccttctttgacccttggccacagagtatggaagtagctccgcagaggcgtgggctcgattcctcagggccacgttaccacagacctgtttgtttcttatggctctgatacctcgccgtccatgtagcggtggggcaaggagctacgcatatgatgcgtgcacgccatattcgattacatgggcagtgacgagttgcaagtccttgtcaggagatcgagtcctgtgagtcctctccactttgaggcatcccttttcgaaccgggcttttccggaacaagggcgcctgttgacatttttgactctctcttgttgacgcttgttgagtgacgttatcagagagaaccctggagtctaaataggtccgaattcaaggaaaactttcctcgaaaagccaagaaggtccagtatacaggggcgcgacaacgccaagtaaaacgggccgaaagtttccctttcggcggttcctgggttttgtccttggccttgtccgcaacgagtcgggtcacgcaacacttccttgggggtccctccgacaagttggccaactcagtcttaggcaaggtgtgtgaaacccgttccctttccccccgtatatagtcactttaccctgggggttaatccggccttctggaaggggtttcc

SEQ ID NO: 395643 - DNA, 1008 bp, Homo sapiens
ctccagggctagtgagctggaccggaagtaggtttctacccgaccgcattttacgtggtgctgcatttccggtagcggcggcgggaaatcggctgtgggagagaggctaggcctctgaggaggcgaatccggcgggtatcagagccatcagaaccgccaccatgacggtgggcaagagcagcaagatgctgcagcatattgattacaggatgaggtgcatcctgcaggacggccggatcttcattggcaccttcaaggcttttgacaagcacatgaatttgatcctctgtgactgtgatgagttcagaaagatcaagccaaagaactccaaacaagcagaaagggaagagaagcgagtcctcggtctggtgctgctgcgaggggagaatctggtctcaatgacagtagagggacctcctcccaaagatactggtattgctcgagttccacttgctggagctgccgggggcccagggatcggcagggctgctggcagaggaatcccagctggggttcccatgccccaggctcctgcaggacttgctgggccagtccgtggggttggcgggccatcccaacaggtgatgaccccacaaggaagaggtactgttgcagccgctgcagctgctgccacagccagtattgccggggctccaacccagtacccacctggccgtgggggtcctcccccacctatgggccgaggagcaccccctccaggcatgatgggcccacctcctggtatgagacctcctatgggtcccccaatggggatcccccctggaagagggactccaatgggcatgccccctccgggaatgcggcctcctccccctgggatgcgagggccccctcccccgggaatgcgcccaccaaggccctagactcatcttggccctcctcagctccctgcctgtttcccgtaaggctgtacatagtccttttatctccttgtggcctatgaaactggtttataataaactcttaagagaacattaaaaaaaaaaa

SEQ ID NO: 395644 - DNA, 994 bp, Homo sapiens
tgggaaaatttcctcagagggcactaacttctgctcagaaacccacaactgaccgttccggcggcggcgggaaatcggctgtgggagagaggctaggcctctgaggaggcgaatccggcgggtatcagagccatcagaaccgccaccatgacggtgggcaagagcagcaagatgctgcagcatattgattacaggatgaggtgcatcctgcaggacggccggatcttcattggcaccttcaaggcttttgacaagcacatgaatttgatcctctgtgactgtgatgagttcagaaagatcaagccaaagaactccaaacaagcagaaagggaagagaagcgagtcctcggtctggtgctgctgcgaggggagaatctggtctcaatgacagtagagggacctcctcccaaagatactggtattgctcgagttccacttgctggagctgccgggggcccagggatcggcagggctgctggcagaggaatcccagctggggttcccatgccccaggctcctgcaggacttgctgggccagtccgtggggttggcgggccatcccaacaggtgatgaccccacaaggaagaggtactgttgcagccgctgcagctgctgccacagccagtattgccggggctccaacccagtacccacctggccgtgggggtcctcccccacctatgggccgaggagcaccccctccaggcatgatgggcccacctcctggtatgagacctcctatgggtcccccaatggggatcccccctggaagagggactccaatgggcatgccccctccgggaatgcggcctcctccccctgggatgcgagggccccctcccccgggaatgcgcccaccaaggccctagactcatcttggccctcctcagctccctgcctgtttcccgtaaggctgtacatagtccttttatctccttgtggcctatgaaactggtttataataaactcttaagagaacattaaaaaaaaaaa

SEQ ID NO: 395645 - DNA, 928 bp, Homo sapiens
ctccagggctagtgagctggaccggaagtaggtttctacccgaccgcattttacgtggtgctgcatttccggtagcggcggcgggaaatcggctgtgggagagaggctaggcctctgaggaggcgaatccggcgggtatcagagccatcagaaccgccaccatgacggtgggcaagagcagcaagatgctgcagcatattgattacaggatgaggtgcatcctgcaggacggccggatcttcattggcaccttcaaggcttttgacaagcacatgaatttgatcctctgtgactgtgatgagttcagaaagatcaagccaaagaactccaaacaagcagaaagggaagagaagcgagtcctcggtctggtgctgctgcgaggggagaatctggtctcaatgacagtagagggacctcctcccaaagatactggtattgctcgagttccacttgctggagctgccgggggcccagggatcggcagggctgctggcagaggaatcccagctggggttcccatgccccaggctcctgcaggacttgctgggccagtccgtggggttggcgggccatcccaacaggtgatgaccccacaaggaagaggtactgttgcagccgctgcagctgctgccacagccagtattgccggggctccaacccagtacccacctggccgtgggggtcctcccccacctatgggccgaggagcaccccctccaggcatgatgggcccacctcctggtatgagacctcctatgggtcccccaatggggatcccccctggaagagggactccaatgggcatgccccctccgggaatgcggcctcctccccctgggatgcgaggtaagtgcctgcagtggtgactttggcttctttccctagagcctagtgggataggaaatggagggaagattgcatttagatc

SEQ ID NO: 395646 - DNA, 962 bp, Homo sapiens
ttttatttaggggaggacataaaccccggttttttttccaaccaaggggggaaccccataatttttttggaacaaagcacatgaatttgatcctctgtgactgtgatgagttcagaaagatcaagccaaagaactccaaacaagcagaaagggaagagaagcgagtcctcggtctggtgctgctgcgaggggagaatctggtctcaatgacagtagagggacctcctcccaaagatactggtattgctcgagttccacttgctggagctgccgggggcccagggatcggcagggctgctggcagaggaatcccagctggggttcccatgccccaggctcctgcaggacttgctgggccagtccgtggggttggcgggccatcccaacaggtgatgaccccacaaggaagaggtactgttgcagccgctgcagctgctgccacagccagtattgccggggctccaacccagtacccacctggccgtgggggtcctcccccacctatgggccgaggagcaccccctccaggcatgatgggcccacctcctggtatgagacctcctatgggtcccccaatggggatcccccctggaagagggactccaatgggcatgccccctccgggaatgcggcctcctccccctgggatgcgaggccttctttgacccttggccacagagtatggaagtagctccgcagaggcgtgggctcgattcctcagggccacgttaccacagacctgtttgtttcttatgctgttgttcgtggagtctcatgggattgtctggtttcccttacagggccccctcccccgggaatgcgcccaccaaggccctagactcatcttggccctcctcagctccctgcctgtttcccgtaaggctgtacatagtccttttatctccttgtggcctatgaaactggtttataataaactcttaagagaacattaaaaaaaaaaa

SEQ ID NO: 395647 - DNA, 1118 bp, Homo sapiens
ggctggaacatacggctaggcccccgaggacgctaattcggtgagtatggtaatcattgtaacctacgacatgcatggtgcgtgaatagctgcttggatgtctgcaccattatagatacaccgcgattgagggatgccagtacgtgtacggaaagcgacagtcactactacggttgtgcatcgatgtcgtcagtgtatcttggactcatagtcaaactagagatgttgcaatacctcatgctgcagatgattgatgatgtatcaccacacaggaatctgagccaaagaactccaaacaagcagaaagggaagagaagcgagtcctcggtctggtgctgctgcgaggggagaatctggtctcaatgacagtagagggacctcctcccaaagatactggtattgctcgagttccacttgctggagctgccgggggcccagggatcggcagggctgctggcagaggaatcccagctggggttcccatgccccaggctcctgcaggacttgctgggccagtccgtggggttggcgggccatcccaacaggtgatgaccccacaaggaagaggtactgttgcagccgctgcagctgctgccacagccagtattgccggggctccaacccagtacccacctggccgtgggggtcctcccccacctatgggccgaggagcaccccctccaggcatgatgggcccacctcctggtatgagacctcctatgggtcccccaatggggatcccccctggaagagggactccaatgggcatgccccctccgggaatgcggcctcctccccctgggatgcgaggccttctttgacccttggccacagagtatggaagtagctccgcagaggcgtgggctcgattcctcagggccacgttaccacagacctgtttgtttcttatgctgttgttcgtggagtctcatgggattgtctggtttcccttacagggccccctcccccgggaatgcgcccaccaaggccctagactcatcttggccctcctcagctccctgcctgtttcccgtaaggctgtacatagtccttttatctccttgtggcctatgaaactggtttataataaactcttaagagaacattaaaaaaaaaaa

SEQ ID NO: 395648 - DNA, 966 bp, Homo sapiens
tgcatttacacaaaaactggttatttagctaccattagcaaacgcatacatacacggagactaaacagatctggtttccacagttttgaatcaagcagtgccaagtttcattcaaaatgtctctactacaaacagcaaagaggagacctgagcaagccaggcctggcttgctcaggtctggtgctgctgcgaggggagaatctggtctcaatgacagtagagggacctcctcccaaagatactggtattgctcgagttccacttgctggagctgccgggggcccagggatcggcagggctgctggcagaggaatcccagctggggttcccatgccccaggctcctgcaggacttgctgggccagtccgtggggttggcgggccatcccaacaggtgatgaccccacaaggaagaggtactgttgcagccgctgcagctgctgccacagccagtattgccggggctccaacccagtacccacctggccgtgggggtcctcccccacctatgggccgaggagcaccccctccaggcatgatgggcccacctcctggtatgagacctcctatgggtcccccaatggggatcccccctggaagagggactccaatgggcatgccccctccgggaatgcggcctcctccccctgggatgcgaggccttctttgacccttggccacagagtatggaagtagctccgcagaggcgtgggctcgattcctcagggccacgttaccacagacctgtttgtttcttatgctgttgttcgtggagtctcatgggattgtctggtttcccttacagggccccctcccccgggaatgcgcccaccaaggccctagactcatcttggccctcctcagctccctgcctgtttcccgtaaggctgtacatagtccttttatctccttgtggcctatgaaactggtttataataaactcttaagagaacattaaaaaaaaaaa

SEQ ID NO: 395649 - DNA, 1355 bp, Homo sapiens
gaagtggaaaaggggaactagaatttgggtatctcagactttaaagctctacctgtttctcagttgatgtacatagtgagtcagtggaggaagcacctgaagccatctgggtcagttcttaatgtgacgacaaagcctaggtagaccttaaaaagttgtaactccgaaacaataggaaatgtgtgtattttgttttgtacagttacagttcatagttactgagaatctaccttgcgccaaccacttcagtattttatttgatcctttaggtctctttagagataaattctcatcttataaatagaataaaccagggcttagtaacttgcccaaggtgccacagccactaagtggtgaaactgacatttgatctcagacagtcttgattctgtaaacaccaagctacacatagaaatagagcaggctttagagacctagtcaaatttgttttccctttccctttttcatttgaagggttttttttttttttttttttagatttttagatggagtctcgctctgtcgccaggctggagtgcagtggcacgatcttggcttattgcaacctctgcctcccgggttcaagtgattctcctgcctcagcctcccgagtagcggggattacagatactggtattgctcgagttccacttgctggagctgccgggggcccagggatcggcagggctgctggcagaggaatcccagctggggttcccatgccccaggctcctgcaggacttgctgggccagtccgtggggttggcgggccatcccaacaggtgatgaccccacaaggaagaggtactgttgcagccgctgcagctgctgccacagccagtattgccggggctccaacccagtacccacctggccgtgggggtcctcccccacctatgggccgaggagcaccccctccaggcatgatgggcccacctcctggtatgagacctcctatgggtcccccaatggggatcccccctggaagagggactccaatgggcatgccccctccgggaatgcggcctcctccccctgggatgcgaggccttctttgacccttggccacagagtatggaagtagctccgcagaggcgtgggctcgattcctcagggccacgttaccacagacctgtttgtttcttatgctgttgttcgtggagtctcatgggattgtctggtttcccttacagggccccctcccccgggaatgcgcccaccaaggccctagactcatcttggccctcctcagctccctgcctgtttcccgtaaggctgtacatagtccttttatctccttgtggcctatgaaactggtttataataaactcttaagagaacattaaaaaaaaaaa

SEQ ID NO: 395650 - DNA, 417 bp, Homo sapiens
  misc_feature (3)..(3): n is a, c, g, or t
  misc_feature (376)..(376): n is a, c, g, or t
aantatgctcagtacgagccgggtgtgtaatcggccgaggcgtggtgctgcatttccggtagcggcggcgggaaatcggctgtgggagagaggctaggcctctgaggaggcgaatccggcgggtatcagagccatcagaaccgccaccatgacggtgggcaagagcagcaagatgctgcagcatattgattacaggatgaggtgcatcctgcaggacggccggatcttcattggcaccttcaaggcttttgacaagcacatgaatttgatcctctgtgactgtgatgagttcagaaagatcaagccaaagaactccaaacaagcagaaagggaagagaagcgagtcctcgtctggtgctgctgcgtaccctgacancctgaaagctttgcagtccacctgctgcaaagtgtggactg

SEQ ID NO: 395651 - DNA, 438 bp, Homo sapiens
ttaataacctcttgcagttagacagaaatccggcaggaccacctgtgccctaattaacagttttactacaagacataagatagtagggtaatcaattccttctgtcaagctccagatgtgccagctatcattttaaatacttttttatttgatgtatattagcttatttttcttctcctttaaaaagtattcaatagttttaaaaataagaagcatacatagaaaacaccattctgcagctggaactctacttaattaaggccatgcttaatggttctgcgtttgatcacctcctaaaatcacaataagaagtttacctttctctgacagtcactgactcattaatgcattctatttatgaaacatatgctatgattttaaaacagcaggggccatacttgtccttgctcactattgtatcctgtgtcttacactgca

SEQ ID NO: 395652 - DNA, 108 bp, Homo sapiens
acccccacccccaacacacacatatacattacgtccatgtgtgacagtgtcaaggtcaatggaacaagctattctgccagaggggtttcctttgtgatctgcttccct

SEQ ID NO: 395653 - DNA, 445 bp, Homo sapiens
cccaaccttcacctacccgcgcctaacccgcaaccctcacattcgttcttgattccttgggcaatggcagcagcaacattggcttctttttcatctgcctgcaccagaagtttctttccatcagcttctctcgtctccgcttcaattttcaccatcatcttggcagtttcctcggaggtgaggatgagttgaggttgaagagctgtcagttctctttgcataaccgctacctgagaagctgcaaagtcgagtttctgcaagcctgtcaggtagcggttcctcatcatagccacctcttgcctcttgctattcaggagcgtcttgaaggttagaatcaattcaaggtaggaggtgggggtaacatagttgtgtcttcgaagtttgttgtaataatcgagtgacagcttcttgacgctctcttggaaatatttgcacatggacacga

SEQ ID NO: 395654 - DNA, 541 bp, Homo sapiens
gcaggaatccctcactaggtaacttagagcggcggatcagggcacagacttgggagacagactgtctagcttcagatttaggcttcttactagtctgaagtagaatggttgtttgttcctccactgcttcatctggaaaacaggggcaggcatcccagggtgtttgagagatcatatcagatggagaggccagagtttttagccgatacatcatagacattccccaaaggacagttattgttatcattgggtggatggggaatattgagcctccagccctaggcattgtggatcaatttgttcttcagttatctttggaataatttaaatacactggattgggaagacaaagctatcaccctcctgatgggagagtgctgggtacctagcaggtgctcagtagttagtgaatgaatgagtaagaacagaacaggtcctaggccctgccctgaagaggctcacagtgcaggacaaggcctggagtcaggccagggttttgtggttgtctttaaaaagaaacaaaacaaagaactacttccta

SEQ ID NO: 395655 - DNA, 408 bp, Homo sapiens
ctacagctgtgacagtttagcatttatatggaacttgttctgctacttgagataatgggactaggaatctaggagggctagaagcaagaagccagcaagtctagacacattccagaggacattatgcaagccctgcctcagtttccctcccaaccctcagcttttttcccaacacaagcaaaatcctgtccctaaaaaaaaagaaaaataatattcatgcaggagaaagaaaatatcatttggcataaactttgaatttttctaccactgccagaaaaaaatatagagatgaaacaatcatcttcccaccttctcttgaactaatagatttgttgtgctctggcagtaaagcacagagactagggacaaattccaatgatgccactggtgacaatttctcccaaaatc

SEQ ID NO: 395656 - DNA, 371 bp, Homo sapiens
aagggcacagcacaggcccatccctagtgacctggctggcaagccagctctccttgccagacctgggacctggagcagactcccaacaccagcccggcctgtctcctgatggggcccttggggtaagggtagggcctggatggccagctgagcagtgatgggcagccagagctcaggctgccaggcctgccattcccccgccctgcccggtctgtgcgtctgaccacaggcctgtcccctcccggtgcagagggggctgtggtaggggccctgcttacattgcccatgctgcccctgctgccggcaagcccgcttgctccgctgcctcctgcccaggcctgctcctccttgccccgtgccccctccctacc

SEQ ID NO: 395657 - DNA, 335 bp, Homo sapiens
gtgtgtgaaggtgtgtgtgtgagggtgggtcagttgtgagtgaaggcatgagtgaggtgtgagtgagcctctatgtgaggttgtgaggttgtatggccatgtgtatgagacgtcacagagacaacgtgcacacctagcactgaacagagactaatacaacacacatgcagcattattctgagtgacttttgatgctgaatgaaatttgagttcaagtccaagtctgagctgagttcacactcctagtggtggtggacgaccttggatgcctatctcagtcctcgccctccacaaggtggggactcccagagcccacctggaaagcttggacaagg

SEQ ID NO: 395658 - DNA, 468 bp, Homo sapiens
gaagggactgctcctaccagggttagctgattcctagagaaagcaaatgatgcggccaggagctagtgtgagctttcccattccagggccttagtcccctgccctgatcaccccagagccaggcaccgagcagctggggacagcgcctgtgccctagagctcactgcaatcactcaagccagccaatcctgagcctgctcactccccctcacccattccttcccatggaaaccacaggaaaggctcttggcccacgtattccctgctgcctctgccaccaggcaaccccggtgcttcctgtgtggcgtggcgtgcccaatctccaccccgccgggatctgtcacagctatcttttcagtagcagttgtctcctgatctattggcttcaccatacctgaaaaataatatgacctatattttaaaacacaagcagagggagttgctggtgtggctccaacaggagcgagt

SEQ ID NO: 395659 - DNA, 427 bp, Homo sapiens
tgaggtcccgccccagcgcccgcctcccgggctccaacctctttgctcagcccgggaggctcggctggctggggcgggcgtaaccgtggggcgaggcccgccggtctttctgatttccgcgggcggcgtgggcgctgaggcagccgcggtcaggacctggccgggagtcggggctgctccgtggaccccgcgtctgcgccgaaaccccgcatggcttcgggggccggacctgcgcctccgcctaactccggccgccggagacgccgtgcggaccccaagccagtgcgcggaagacaccgtcctaccctcggcatggctgcctcccacccggtcacgtcggtccccgcgccccacgccgacgcgcaggcgacccggggacgcggagacgcagacagctcgggactcaggttcgtgggagcagcggccg

SEQ ID NO: 395660 - DNA, 445 bp, Homo sapiens
taggtatgttaggttattgttttccatttctatgtctgaaatgattgtttttcattttaaaaaatgatggtacagctcacagatctaaagcaaagtgaagttttaaatgaatgcattaagtacaatcagtaactacagaatgtgatctaaaaatacatgttcctcatgttgcagggtgagaatggaaatgaggagtaaattgtaatcgtgccagggaagccaggtgtctcagcagatttggaatctttgcatggcaggtggatccaatttatgtaatgcttgggttaagacagctcaggaaggcagccttgcaatgaaacgtgaacctgtgtgcgtttttagcagtcaccacatggtggcagcctatccaagaaaattcaagggcaatagtttgcacttgagagcccagaaattttgatttggaagctcagtggaagaggaaaat

SEQ ID NO: 395661 - DNA, 335 bp, Homo sapiens
cccgccgacccacgtctgcaggggatgtgtcaacaactacatatgctggctcccatcccactggccactgctgctggatcccacacgaggctgcttctatccaggcaggcctagaaggacaatctacggaaatgaactgcaaagtcaccagcccatctttcttgtgcaacctaatctgcaaaacacaggggctcagaacctgtcccttgcttcagatttcaaggacccccccaatgatacagtttctggcttttcaagaagcttcatggatgaggctggttcactgaagggcaatcagggctcagcatccagccttctgaagaagctgtttactt

SEQ ID NO: 395662 - DNA, 381 bp, Homo sapiens
cctcgttgtgtgttcatgcttaggtggagtgagtgagccagcatgaattccttgtctgatgcaatgccttcacacaatctccaagtcaccaaccatgctagtttcagcattcctgttggtaaaggagttctactgaggtttagttcacagcagtccatggtagagatgtgaactgctaaagttctgtcacttatgctgtccctgtaatatggagcccttctaggctcccacccagtcttgaccaagcgggccacttgcttccttttccttctgtgcctcaaatgttccctgtgtgttctccattgtactctagtgttctttcctagacgttctatttatagtatgattatctattcataattgtggttcttctttctggag

SEQ ID NO: 395663 - DNA, 327 bp, Homo sapiens
ggtacctgagcactttttccaggggccagggtccattcaactgaccactatcaccaaagctgacacccacccacatgtgggcacctgcagcaggcctggagactgatttagtcagcctgtcacaacctctgccaacaccaaagtgaaatgcttgggttccagggggttgtcttgccactgctactgacatcaactatgccacgcctaccgcccagggcccagtaacctgcccactcattcaccccactactgccattcctggcacccaagcaagctgcctggaagcccaagaatcgacctgcacagacccactaactctggtggcag

SEQ ID NO: 395664 - DNA, 296 bp, Homo sapiens
gctgccctacccctacttcccagggccaggagggagtcccctctgctagttgccccaggaaggcgactcagaagttcccctcctgtggaagggaaggccaggtggattggatactgcttgagggttggggagagcctcaggagaggaaatgctgagttctagaacctcctagccagacagaacctcggaggtcttcccttttctagaggcaggactgccgtctcgctgccatcactcctgctgagtgccctccagtccctgcctggccatttccaggagcagggccctctcttgtc

SEQ ID NO: 395665 - DNA, 648 bp, Homo sapiens
tcccaacacatacaagacagaacagaaagtgcccgctccatcgacatctcctctaataatctgacttccaagtgttaactgtacaccatgattactgaggtaagacatgtccctccagtcccgtggcagcaactgattttgcctatgcaaagccgtgctattcttctgctggtggttagcctttgctttagaggacttccctcctattccatgtgcttggaagtgatgagcagagggaagactttcaacgtaaatcctggtggtccatctggaccactgccaccaaccaaggtggtcacatggccagacagaactaatctgtgtcctaccccagaactgatgtagaaatgtccaaagtttaaagccttggctgggcgcagtggctcgcatgtgtagtcctagcactttgggtggccaaagtgggtagagcacttgagcccaggagttcaagactaaaacctgggcaacagcgagaccctgtctctacaaaaagtttaaaaattagctgagggtggtggtgtgcacctgtagtcgtagctactcaggaggctgaaatgggaagatcacttgagcccagaaatttgaggctgcagtgaactaaaaaggtgctatggtactctagcctctagtctgggtgacaaagcaaga

SEQ ID NO: 395666 - DNA, 678 bp, Homo sapiens
gcagtcggagggagaacaccaggcgcggcgcgggcggctccggctccggccccggcccaggcccgggagaggcgatggcgagccgcgatagcaaccacgctggcgagagctttctcggctccgacggggacgaggaggcgacccgggagctggagaccgaggaggagtcggagggcgaggaggacgagacggcggcggagtcggaggaggagccggactccaggttatcagaccaggatgaagagggaaagatcaagcaggagtatatcatatctgacccctccttttccatggtgacaagtccaaagggaagatacgtgggataacctgggaaacaattcaagtagatcttctactccttgggcttcacgaagaaagtcagactactggtgtgtgtagtcgggaagggtccacctgttgaattctcctccatggcaaagtgtttccatttattgtgggcatgacagtgccaaacaggttcgggaacaacggactcatcacgtcacaagcatggttcacccatcaatcacgccgggaaacggcaacgcggacacacgaacccttcttttgactcccaagactgtgccaaaaaaacaaaaaaagggccagtcctttcagcttcagcaagacaaggtactaacacggaagaaagagcagtcatactactggcactttatg

SEQ ID NO: 395667 - DNA, 396 bp, Homo sapiens
aggaaactggaagcagatcacacaatgtaacaggtgcatgaaaagatcaccatgatagtgaaagtgaccagactgagtgctttctgtgtgcccttgagtgttgagcacatgacctgtatctgctcattcaccctcatggtattcatggtggagacactaggatgctcccattttccagaaaaggaaattgaagttcaggaggggttaggtaacttgtccatggtcacatggccatttctccctggctgtaagagctgcactgttaaccttcctgctttaacgcctttctgtggcaaatgtcagatggacagtagtggcattaggggccttgagaactggagggagaaaggaggccccagctggcccttagaggagagaagccctggtctccttcca

SEQ ID NO: 395668 - DNA, 340 bp, Homo sapiens
ggaggggaaggggggaagtaagggaagggaaaggaggagaagggggctgttggggaggaggaggaggagaagaagaaaggggtctgggaaaggatccggttcaaattaagttctcaagcgctggtggaaggtttagctacaggtcacggagaagatcagggaagcaacaggacaggcggggcaagggagtgtgaggcttaggagcaattaggagacaaaggttctgctttccaccaaaccttcttcggtctgggccctcccttagcaaccctggggctttagactctctctccaccaatccctgatgaccccggtggtgcctcacaatggacattccaag

SEQ ID NO: 395669 - DNA, 231 bp, Homo sapiens
taagctgagacctgaaggcagaagttaactggccagcctcatgggtggggctgagggatgagcaagcttaggcattaggggcatcaaagatgttacagatgaaggatcagaggccagagctgagtggcctgtcacatctcatggtcagtatgtagcacagccaggcgtttgcactcaaagcctttttcccacttctagtaacaccggaaggacaaggtatcttttaggtgt

SEQ ID NO: 395670 - DNA, 299 bp, Homo sapiens
attgtattaagctggtaaaatcttggtataagacaaagaaagtacaagataggaacattactgataatcttacttttgaacataagtgaaaatatcctaaacaaaatatccacaaatggaatccagcaatgtataaaagctatcatgcctcacaaccaagttgaagctggattcctacctcctgctatataagaaaattaattccacatgagtttgtcagtcatagcttcatcactatgagccttatggtgttgtgccatagtaagtatacaatagcacctatgaagtgttcttgcctt

SEQ ID NO: 395671 - DNA, 320 bp, Homo sapiens
tgatttgactggtaaattgcgtcttcactgggagaaactaaagtatccaatggagaccctacatcttaagtgcaatgacataagaggcatatgtctcaggaagcttagaagctatgcctgtgggtaacaggtcataaaacttttaaaaccaggtgtcttgtgcacttgcgtgatgtggatctcacatctcagacctaagttgtattgctgcgtgaactgctacaaggatccctgtggaatgcctggcactgccctacttgctgcatcctatcctgtatttttctaagtgaatatgccaaatgtggactaacggttttcta

SEQ ID NO: 395672 - DNA, 603 bp, Homo sapiens
catagcaagctgctgagtagctggactacaggtgcgcaccacatgcctggcttttgtgtaattggcactcaggacagagagagaagataattatattcactagtcacattcactggtccctcttttaatttattccttgcaaataatttatcccatataatatcccatccccttccccccattttgtgcatgtcctaagatagtgttttgcattacttttaatttatttaaatgttactctgctgtcgccttctcataatgctttcaaagttatctatattgtaacatgcatcaggatttcattcttgtacgtggctagataatacttcattttatgtgtataccgcgtgttgtttattcattcgtctgttgatagatacttgggtttctaactggctattgtgaataatactgctacaaacattggtctgtttgagcctctgttttaattctttggggtctatgtctagtcatggaattgctggatcatgtggtaattctatgtggagactctgaactgttttctatggtggctgcagcatgttacattctcaccaacgatccacaaggattacaatttcaccacacccttaccatgaaagt

SEQ ID NO: 395673 - DNA, 542 bp, Homo sapiens
tataaaaaagtggaggagcttttcagagcattctagaataagagataagactagagtctgggaacggagtagaaagatgctcaaggaaggactcctcttccttgtttccacagctgggccacaagcccaggtctcttttgcctttgactgtacaacctgctgcctgggagttcctgggagggacaggtttcagagtgtgtccttgatggacacatagtagagccctgggatccaggaagtaacaagagggcacttcccagtccctgaaagcaaacaccttaattttgctaggtaattttggggaggcaccaaacctgaaggttcaggatctgaagtacttgcttcatctccataaaacgttgctcttgggctttttcctgttttattacttagcattaatacctggcagcttatatctgagctctcattttattttcgtaacatataatattgcctctcctctggcagccttggtgcttgcgaagggtttagtggcctcttgtttttttacattgggaggtaagaaaaaaagaatgcggccg

SEQ ID NO: 395674 - DNA, 878 bp, Homo sapiens
aagtgctgggattataggtgtgagccaccatgcctggctctttcttttttttgagatggagtctcactctgtttcccaggctggggtgcagtggcatgatctcagcagctccaacctctgcctcccaggttcaagcgatgcctgtgcctcaggctcccaagtagctgaaattacaggtgtgtgccaccacacccggcttatttttttatttttagtggaagtgggggctttaccatgttggccagaatggtctgaaactcctgacctcaagagatccgcccgcctcagcctcccaaagtgctgggattacaggtgtgagccgctgcgcctaaggagggttgtgaaccttctggcaaaactgacccatatcaaacgagtcagagggactcctgccagaaccagtttccaaccagcttttcaaacagatgtcacaaagtaagcagaaagttaggagggcaaatatgattactgtatatgtaccaagctccagccacgagctttgccaacagcagctcatttaaaccacacagaaatccctggcagtttacctatgtaactggaggcaacgaggctcacgtgaagtccagggccagggagtacaagtgagggaaccaagcctcaacacatgcctgggcccaaagcatgtgcttttcttacttaagggttcccataaatcactatgatctccattaaaaccacttctccacctgctcttctcttagccagggcataaggcaacagggaaacttcttcaaagtttctttgtgattgaactggacaggggaatagattggtctctctctgttaaggagccaatggatagaagcctttattatttttaagttttcatttttactagttttttaaatgagatgtgg

SEQ ID NO: 395675 - DNA, 596 bp, Homo sapiens
aaagtgaaagacatttgggggaaacattaaattttttccataagtggaaattcttatcaatggcctaaagatctaagatcaattgctggaagtagtacttcttttaatattatgctaaggtttaggtctgctctgaattccaaagtgatcacattatgctcaaaggaagatgctgaaagtggtttgaaatcagtgactccctgaacagagagagggatgtgagacctgttaagaggacagaaccggtcagagaggaactcttaggtgtgtcaattacataaagggagaaatgatgccaagttaggagaagcaatgtgtgtgatgttagtaaatttagaaagcgctccctgcccctagttcctgtgcagagttaggcaaaaagaggagaagcctcaaaacaggcatgtgaaaggttttcttcctctcctatcaacctcagaaaacacaactagagtttaagtttttgtaactgggtagagtctaagtgagacgccagtggctggttcacttctcagtccaagggactccaccttatgacaatggcatcatcatgaggacacaggtgtatgtggaatgggcagcaaacctatcagaca

SEQ ID NO: 395676 - DNA, 630 bp, Homo sapiens
gttttctcctatctctgcttgtagtggttttacagtttcaggtttatatttaagtctttcatccattgctaattgatgttggtataaagagtgaaataatgatccaattttattcttctgtatgtgaatagtcagtttttctctacattatttattaaagagaattttctttccccattgtgtattctttgtccttttaccaaaaatcaattgaccacagacacatggatttatttataggttctatattccttcacactggtctaggtgtctgtttttatgccagtgctatgctgttttaagtactataactttttaatattgtttgaaatcaagtagtctgatgcctctggctttgttctttttgctcaagattgctttggtttttcagcgtcttttgtggttccactcagattttaggactaatttttctatttctgtgaagaatggcattggattttgatagtgattgcatttaatctgcagattgcttttgttagcattgaaattttgacaatattaatttttcaaatccataaatatgggatgtttttctacttatgtcactttcaatttctttcaacaaggctataaattttcagtatacaaatatttcacatccttcattaa

SEQ ID NO: 395677 - DNA, 619 bp, Homo sapiens
gttttctcctatctctgcttgtagtggttttacagtttcaggtttatatttaagtctttcatccattgctaattgatgttggtataaagagtgaaataatgatccaattttattcttctgtatgtgaatagtcagtttttctctacattatttattaaagagaattttctttccccattgtgtattctttgtccttttaccaaaaatcaattgaccacagacacatggatttatttataggttctatattccttcacactggtctaggtgtctgtttttatgccagtgctatgctgttttaagtactataactttttaatattgtttgaaatcaagtagtctgatgcctctggctttgttctttttgctcaagattgctttggtttttcagcgtcttttgtggttccactcagattttaggactaatttttctatttctgtgaagaatggcattggattttgatagtgattgcatttaatctgcagattgcttttgttagcatttccctgatcattagtgatgatgagcattttttcatgtctgttggccatttttatatcttcttttgagaattgtctatttaagtcctttatccattatttgaagggatcggttttc

SEQ ID NO: 395678 - DNA, 359 bp, Homo sapiens
gactacttttttcttgatcaccctaatccttaacattggtccttgacttcaccaatggtactgggctgctttccttggttttaaattgctggtaagccagtccatttcttttagtcttttcgtttagttttaaaaattatcttgttccattaatttctttaatggtgcttcttggagctatttgggaatttcctgttcataattgtaatcttaagtttatttttcactctagtggcatcactctctcatggcatcttttgtgagcattcattgtcacctttgataaagggggtattttagaataattatactgagttttaaaatatttttctctgctgctgattcactgacagtatgca

SEQ ID NO: 395679 - DNA, 512 bp, Homo sapiens
ctagaggatccccgactgagtaaatctggcttgtcctacaaggcctatcatatatactgttcagccttttgtggaaaaactttgcagggtctctcctctagtctttttatagcattcttttcagatactatttggaaacatattaaaatggaaactaaaattttatgtttatatcatctatttattgtttttccatgaggaattctactaggtatcctaccagtcattggatatacttagtataagttgtttttaaaatatcctttagccaggcgctgtggctcacgtccgtaatcccagcactttggaagaccaaggcgggcggatcacaaggtcaggagatcaagaccatcctggctaacacgctgaaaccccgtctctactaaaaatacaaaaaaattagctggccgtggtggcgggcacctatagtcctagctacttgggaggctgaggcaggagaatggcgtgaacccgggaggcagagcttgcagtgagccaagatttactcatcg

SEQ ID NO: 395680 - DNA, 130 bp, Homo sapiens
caatttctgagcccacaggacacttggagaggccagctggggaaactgaggcccggagaggcaccttgtccagcatcacataataagaccctctactctaggcatgtgtttctcactctttgattctttc

SEQ ID NO: 395681 - DNA, 611 bp, Homo sapiens
aaaaattgaaatgggcacagaaattagagaaactttaagaaaacttgtagaacacaaaaatcacattagactcttctataattctcataaccatagaaacttaaccataatggagcttatatttgaatgcttcatatggacgagagagagtttaagcattttgcatatattaactcacatgatcctcacaacaattccgctgggtagatactattaccgcccatttgaagcataaggtaactgaaggaaatctaggttaagtaattcccagggcttgctcttgtaagacaactgagcttggattcacatccaggccctcagctgcaaagcttatattcctcagcccatgaatactgcctctgggtatgcaaaaatcacctttgccttcaggaaataaggctcacatttttaagtgaacactcaagttgatatagtggggaaggcggggaaggcagggaaatctggagctgagacaaaggagtggggaaacatactatgggttcagaggacctatccacaaacctgttggtctctgtacctcttcacgctgttgaaaattgactacaccgaagagcttgaatttctgtgcccattcaggtaccgatatttaa

SEQ ID NO: 395682 - DNA, 689 bp, Homo sapiens
ctatagatgattcttctatttccgctgcttgctcattcttgacctacccactggcttttctgtcctcttgtttattcattagcagagaacatattcaggtgaactggttgcccactccatcttgccaccctttcacatgatgcttttctgaaatttgacattttaaatgtggggaaacgtttcagatgtatttggctaaccaatatttattgtgctaggaattattttttataaataaatatttactgctgagttagatcatacagccattaacttggctcagtaaataaaatgcatttagctagttgtcctttaatcgattctcccccccaccatttctgttttctttgcttttctgtgagtggctcacacagaaaattaccattgttcctatttcaggcccgtgttattgtggagagtgttttaacatcgtcagtccttggccccttctgcttttaatcagcctccttgaacagaacccgatagaaacttcatttttaattttgtgggttttattttctttctttatttatttttgatttaaactgaaatactaatggctatcaaattgtttcatgattctattacaaagatcacttctttggaatccagaaagactcagatcactttttcttctccctgttatttcatttttatttactggtattaaaaaatttccctattttctg

SEQ ID NO: 395683 - DNA, 590 bp, Homo sapiens
atcatgtgcaccatctgagtggttttggtggctggcaggacttaagtcggtactggtaagaaatgaagccagagatgatggcaggggcctgttcccagagcactttctgggccatacaaagatatgtcacttttaagtagggcagaaataaaatgaggtatgcctgtacttgccaaagtattttcactcacctaaagtgcccaactttttccttattctaaagcctaactctgtctgacatttggactgagactactttctttaaagacagagggaaggccggacacagtggctcacacctgtaatcccagcactttgtgaggctgggcacagtggctcacacctgtaatcccagcactttgtgaggccgaggcaggtggatcacttgagttcaggagtttgagaccagcctggccaatatggtgaaaccccatctctactaaaaacacaaaaaattagccgggcatggtggcgcacgcctatagtcccagctactcgggaagctgaggcacaagaattggacgaacttgggaggtggaggctggagtgaggcgagatctcaccatggataaagctgggtgaagagcgag

SEQ ID NO: 395684 - DNA, 330 bp, Homo sapiens
tgaaaagtgggaaatttacccaattggccatcattaggctaacataattgtttagatgaaacattttatttaacttacacgagtaagtgaaacttggggctgaggatattgtgcacacccataattccagcttaaagagaaagcaaagtagacattagattgatttcatcaaacaattagatgatttgaaaacagctagataaattaaattacatgactgacttcaaacatgggtggccatactcaacaagtagttttccaagaaggtatttgtattcctcaagccacatgttataagaagaaaaaataggaggaaagtatttgttgaag

SEQ ID NO: 395685 - DNA, 512 bp, Homo sapiens
atgtattatgtatagaggagtcattttctgattgtattttaaaaatcacaaagcagatatctaaaggcaagtattgcctttcagtttcctgaaggtgtttagcaagtgtttaggaacagatttgttgttttttcaaaaccacatagttctttctctgaattcccttttcaaaattttctctctccatcctcccatgagcccttttacccttcttgcatgtttctgtgcatatgtgcggacaagtaaactgttttgaaggtgagactcttggcagaaaagagatgagattgaggcatttgctgttctacaaaatcaccgttatcagatttccagaatcagatgtcagtgatagatcagacactaggcctgtgaatttgcagatagtattgccttgcctaatgaattagatataagacctggacttagtatatatctcatgctccgtttctggacaagattttttttcttccagtggctctgcttattatatataataaaattattttaaaaat

SEQ ID NO: 395686 - DNA, 451 bp, Homo sapiens
tccaggacgcgctcaactatgggcttttccagccgccctcccggggccgcgccggcaagttcctggatgaggagcggctcctgcaggagtacccgcccaacctggacacgcccctgccctacctggagtttcgatacaagcggcgagtttatgcccagaacctcatcgatgataagcagtttgcaaagcttcacacaaaggcgaacctgaagaagttcatggactacgtccagctgcatagcacggacaaggtggcacgcctgttggacaaggggctggaccccaacttccatgaccctgactcaggagagtgccccctgagcctcgcagcccagctggacaacgccacggacctgctaaaggtgctgaagaatggtggtgcccacctggacttccgcactcgcgatgggctcactgccgtgcactgtgccacacgccagcggaatgcggc

SEQ ID NO: 395687 - DNA, 339 bp, Homo sapiens
tatctagagtatcccggtcatctgctacaggacgccccaaacaacaaagaaattagaattcacataaaatcctttgttaactaatgtgcaaataatgttaaaagttggcagtgttaactgtgttagtgtagaggggaaaatcacaatcatgtaatacaagtgtaaatcagtacatttctgggcaatagtttgatggaatgtaccaaaagctttaaaaagtgctcattgcttttgaaagaacaagtccattttcagccactccaaaggtaattgtggatgtatgaagggcttttacgacaaagacattcaccagtgttgcttagaacaataaaacactag

SEQ ID NO: 395688 - DNA, 866 bp, Homo sapiens
tcaagatcagcctggccaacatggtgaaaccccgtctctactaataatacaaaaaaaattaggcaggcgtggtagctgggattacaggcacccccaaccatgcccagctaatttttgtatttttagtagagacgggatttcaccatgttggccaggatggtctcaatcccccaaccttgtgatccacccgcctcagcctcccaaagtgctggaattaacaggcgtgagccaccacgcccagccataagaatcaatttttgtttgattttgtgtcttgcaactttattaaattcacttactagttatggtagtattttgtattagtaggatatgtagggtttctatccatcatgtcatgtcatctataaaaacaaagacagttttcttctcttcaatctgtaagcattttatttcattttcttgcctttctgcaatggctagaatgtctagtatagtgttgaatagaagcagggagagcaataatccttgccttgttcctgatcttagcggacagcattttatcactaagagtgtgtgtgtgaatacgccctccatcgggctaagaaatttccctttcatttcttgctggaggtggggaggaatatttacaaagaatgtgtaggtttgtcttgaattggttaagttgctgtatgtgaaaggatgtatatgtgtccatgagtattggttgattaccaggaagcatctagataatgtttcagggaataagtgaaacacattataaaatttgattaaattgcactctgggaggaaaatagatttcaaagggccttggaaagagtgcggagaaaaaagttaacggaaaggaaagttggggcgcatgcacagaagtttggagatgcatacat

SEQ ID NO: 395689 - DNA, 212 bp, Homo sapiens
acctgggggaagaaggggtcacttaatttttttgggaaatcaaggcaaaattgtaattctttaagggtacgtagatgggattaatttgttatattaaggccgagtatagtggctcaacctgtaatcccagcgctttgggaaggcctaggcaggaggatcgcttgaggccaggagtttgagagcagcctgggcaacacagaactcctctcttt

SEQ ID NO: 395690 - DNA, 105 bp, Homo sapiens
gacagagcgagactctgtctcaaaaataaataagttacttagaacattttgataaacttttacagtgaaactcaggatagctcaatacccagaacatttattaat

SEQ ID NO: 395691 - DNA, 400 bp, Homo sapiens
ataggtacatttattatctccatttacatctgaggaaactgaggcacaaaggggcaaaataacatttccaagcctgctgactggtaagtggccagcatttgactgaggaggtctgtctctagaaaccctgcccctgctgccccttctgtgtctgagtgtggcagtcagaccccagagggaatcccacacctgtaaaataaaaacaatcagctggccctgctgacctcgctggggagcgaagcccagcctaaaaagggatgagtaccctgaaaaggttctgcttgggtgtggccgtgcaggaaacgctcctgctttcttgcctgcctgtcatcgatgacccgaataatctctgcaccagatctgtgtttgtctcttccctgctgtaggtcgctgtggcctt

SEQ ID NO: 395692 - DNA, 316 bp, Homo sapiens
cctgtagcgatctgaggtacctgcactgatgatacatctccgctatccagacgttagtctggccatttcttccaaagaccacttctgattgactctaactcaggagcccgtgagaaaattagaaaggaatgtaagagacatgcttatttctgacccctaatctccctacagataacacaagttggagtgtccttcacagctattcaggagtgttaaatttctaatccctttcttaaggaaatctcagtgtgaatctcatagacatttccacttattcccttatttcgagtcctgcaaaatattggcatatagataa

SEQ ID NO: 395693 - DNA, 587 bp, Homo sapiens
tgactgtctcccatgttgctcgtcttgggtgccttagcatccctcggtgggtcccttggctctgccttcacttctgtcaatagacctccattagctgctcttcattggaaacttttgagcatgccatttgctacctgcacatcttgtctgataaaattactagcaggatgaccttgggcacattacacaacctcactgtacctcagtttccttcatctataaactgcctccctagggttgctgatgtatgttgatctattacaaaggactgaaaacagccactggcacataggaagccctcacgtaagtgttcaccattatttgtatgattaccatatcctgtgcaaggtccctcctaaggatgtaagctgccttaaggtctccagggggtcccctttgggaatgtgaagccccttacagattcaagtaacttaaatttctgggctttcgaggcaaagaccagacattggccaaaagggaagaaaaagcagtaatttggaaaggattctccccaagaacctaattcaaccaaaagtggagaccaaaagcaattgtgggtgaaaacctccttcctcagtaaccaagct

SEQ ID NO: 395694 - DNA, 358 bp, Homo sapiens
ccctccccgggtaccatgtgatatataataaatgcatccaatgttatacatcaatttaaaaaacaggtaaatagctaaggaaaagataactactagccactgtgctcagcccagaactgatgttttctaaatgctgggattacaggcatgtgccaccacggcaggctaattttgtattttaagtagagatggggttgctccatgttggtcaggctggtctggaattcccaacctcaggtgatccgcccacctcgacctcccaaagtgctgggattacgggcgtaagccaccgcacccagccaatccttttattctttcaacacctatttactgagctaggaactgaatttgcaaggta

SEQ ID NO: 395695 - DNA, 488 bp, Homo sapiens
ggtttgatgtgttgggagagctacttcagctactgtgatgattttgttaagagtgtgaaaatatttgtatgtgtttaccaattctaccatttaaacctctggtattcaaagaggaggctcccggtgacatttctttatatttttatgacagtatgcattttgtttttcataacaacaaacatttattgaaattttcctgtgacacatgtttaagaaaatattccatattttaaccatacaattataataaaagccttgtaagataggcactattattttccccatttatcaatggtaaaatggaggcctagagaggttaatacttgcctaagatcagttgaataatgcatggcagaggcgagctttgaattgaagtcatcttcctagagcctgtgagagctatcctcaatgctaacatgaagatatatctgtgacaaaaaaaccaagtacacgatgcatagttctaccatcaggatgcacacacacac

SEQ ID NO: 395696 - DNA, 423 bp, Homo sapiens
tgagcttctaacggcgaatttaacttgtatgttaatacagaagaaaggttacaaaacctatcgaaatggttttttgttttaccaaacatattacaactcaagtcaaaagttcacagccccagcaactcgcgtacgaatctgaagcaggtccagaccattaaagtcacagccccagactagaaaacggccggtgggtggggggaggggagagggcgcgtcccgaagatgtccacccgcagcaccgcgcaggctgacgcctcccctcctctcgggctggaggtgagagcgcccttcctcctaccacgtccctaccttcccggcctcggattacgccacagctggcaaaaggactttttcatgagaaaacagacaagtcaaccagcgcgccgcacactcgacctcccaggctcgcacgggcggccg

SEQ ID NO: 395697 - DNA, 423 bp, Homo sapiens
aataccaaaatgaggcaggtggtccccagaaaagccctgtctttcaacaggacaagtgccaagcatcctgtagaacgcaccagaggctgggcacggtggctcacgcctgtaatcccagccctttgggaggccaaggcaggtggatcatgttggccagcctggatgttctctcatttttaaaaagcagtttcactttagacaccaaaagcaagtgtccaataaatgctgaagaagaaaaatattttattaggttatttgccctttcctctctaacttgaaaatacattttctcaggaaaaggtagaatcctcagatttgtccataaaccaagggtcccttaagaaattttctttgtgttacagtgaaaatgactattttgacaacttggaagataaggagctaggctaagtcttattctagtct

SEQ ID NO: 395698 - DNA, 626 bp, Homo sapiens
agggtagggcggagacaggaggcagggtagtgagatgtgctttgaatctatctatgtccaggagtaccccttgccctaggagatttggggaacaaagtaagaggatgtcaactctccatctcctggcaaagagccacttgcttgtgcagtttaattttttgtttgtttgtttgcctttatagggactgcacattatctaccttgaagtgctttttctggcagcatagttactgttaaaaaggagaagggaaattgagatgagaggggcggggcagaaacatttttaaatattgctttatgggtgagaaaggaagaaaatatttgcagacaaaaaaaaaatctgccaggaaataatttcttcttttataaaactacgaggttagtctaaatatgatctttgcaatctcttttagttcaaaactgattatttgaagattagtatgtaatcttcctcgttcattgaatggcgttcttcttttatgtgtgttgcaaaacaacctttttagaaaatatctgtgaagcttatcttctgattaatagctatgattgttctttgtaagacaccagcttgaatgtcctgaaaccagaagccctagtccactggatatactcagagtatcttacca

SEQ ID NO: 395699 - DNA, 157 bp, Homo sapiens
ttgcttattgaaaattattggttaataagttccaataattctgctttgtgctgtatataatctgttgtctttcctttttgtagttcaacttctaaaatatctagttattttggtaattgggattgtgctcccatgagtagatcagctattacgtcag

SEQ ID NO: 395700 - DNA, 103 bp, Homo sapiens
ctcagcaccccaacacacaccccagatttcctaagacacagaccaactgggaagggcaccctctcagaaagtctctgatcattcgcccatctttttttttttt

SEQ ID NO: 395701 - DNA, 260 bp, Homo sapiens
atgcggccgccctgtgcaccgcaggaggttgggcagcatccccaccttctgctcaacaaataatcactttcatcagtgacaaccccagggtcgtgacaaccaaaaatgtctccaactcatggacagatgtcctctgggggacaagattgccccaggtggagaacccctgctctggatgcctgtcactaaagctactgatgaccaaccagagccccatacaacatcatctaaaactcttcataggcaacaaaagaaaaaaa

SEQ ID NO: 395702 - DNA, 513 bp, Homo sapiens
ctaagcacagtgccatatgccctaggcccaagtaattcaagagtaaatgagacagacatgatttctgccctcatagagcttatttacattctaaaaggaagaaacaagtaataagcaagtaagctaaataattttagattaacagcagataactgctattaaaggaaaatgaaattgtgatgtgttagtgactgggtgagggttatttcagttttctgactagaaaggggatggctgcattatctgtaatcaaaagaggtatggggtagaatatagagatctagattaaaacttcaggaagcctttcttctcacaacacagtagatattcaataaatattcactgatttaatatttaataaatatttaaagtctatattaagtttgcacttaacttcaggtttctgcagaaagctgctggatccacaaaatatttgctatgcaggtatttatgtatttaaggctacacatattttaaatccatatttatgactatgttatgcctaaggcactt

SEQ ID NO: 395703 - DNA, 360 bp, Homo sapiens
tccactattccagtctatcagccccctctggattccacttgactccttaccagcctgtatctcacagtcaagcttttcaaccttacacatacagcatcgtgaattttgtctcctttccttcccacactgaacccttcccatacctatccgccaatcactacctctgctgaaaccaactgatgtctctgtttctcctctctgattcctgagaattgctggagaaaagtcacttaactgataaaagaccaggtgcttagaacatagacatctcagtctgaaacccggctctgctattaatagccgggaaagatttcgcaaattctataatctctctgaacatgtttcctagtctgtaaaaag

SEQ ID NO: 395704 - DNA, 411 bp, Homo sapiens
caccctctcactgggagtcggaatcgtcgtttcccagaagctcctttgattctctgcagggcatggccaagaatacagatttctggtgaaaacaaaatctagtagccttaaattaatgttataaagtgggctgatgtgacggtgcaagagttctaaaattagacgctgcatgcttcctttctccacctacttgttaaagagaaatctaccccaaaccccaggcctggtaccagctggccctgggactgctcttgctatatctttttcctggatgttccatattgacatccacccaactctttcaggaaaacaatcttaggattcaatggacagaagtctccactgccacactccttcctagtgctttttattgtagctcaattacggtgttgctcttgcttagaaacattc

SEQ ID NO: 395705 - DNA, 81 bp, Homo sapiens
gttctctggcatattgtcatttggagacttcatttggactctattctctgtacctttttaaaataaaaatgggaaattttc

SEQ ID NO: 395706 - DNA, 894 bp, Homo sapiens
aatggtctaaaaagaaaatagggtcaaaagagtgctgtctgtactttatagttcttcatgtttaaaaaaaagttatgctatatagtgaaagttttctgctgttttaacatttcagattttcctgttattacaaatactatgtttataatactgcattctatgatttatttaccttttatatagggtattcccaggttttttctctgtaatagatactgctgctatgagtatctttatgtagagctttgtttctccttggcagagattcccaggcaggcatgagtgttttgaggctgataaatacaactaaattgccttgcagagggattgtgccagtttaggccccactagtggagagtgccagccttgccaaaccattacctgcatttttccttccttggccttctttgttgagatgtgtatttttctctggcttaggatactggttgtgcataccaattgtaatttaatatgtaggggaagaaagccgattttccggaaaaaggctaaaactacaaagaagattgtgctaaggcttgagtgcgttgagcccaactgcagatctaagagaatgctggtattaaaagatgcaagcatttgggactgggaggagatagagagaagggccagtgatccaaggttcttaagtgtcatcctttttattattgagaccacttaaaatcttgaggtttctgtttcaacaaaaaaacaaaatacaaccaaatacgaaaacaatgaacgatacaatagcaaatacacaaaaacacaaaaaaaaaaaaggggggggcatatatcgggggacaaaccttttataaagtccatgtataaaaataagacggcgacaattagaaaatgtttgaactcttggtgacaccctctttttttctgttggga

SEQ ID NO: 395707 - DNA, 182 bp, Homo sapiens
gacgagactaccacatatattttttataattctctgagaaactttcagttttgggcttctctatctgaggcaccactggtccccaaaaagccaatggaaaaccttagctgttacgccccctttctttccaacccccagaccatccctagctatggagctggagacctcgggacagtatttct

SEQ ID NO: 395708 - DNA, 191 bp, Homo sapiens
tcccacgggccagctcttaacatctatgctattttgcctctccaggccttgaagtagagaacagaatcccatgccccagcacccactccaaacacacacacccatcaccatcctttctgctgttcccaaggccctttccagtctgtacggagccattctccactgtgactccctttttccatttcaccctt

SEQ ID NO: 395709 - DNA, 147 bp, Homo sapiens
catctcactggtttaggtgctttctttatatgtctactgtttcctttttctttttgttcttctttctctcctcttcaaacttttttctctgccatctgaacacttttagtttcttattttttttgctgagaaacaactgaaattgtc

SEQ ID NO: 395710 - DNA, 352 bp, Homo sapiens
gggagaaaaagaaaagaaattacaaagtggtatatttaaactcaatcattgtcaattatattaaatgtaaattatgtaaacactgcaattaaaaagcaaagattgtcagactgaacccaattatttcttgtttcaaggcaaataaggaaatatttttaactttatgaaaatgtaaacagaacaagctaaaatttatagaatgcagctaaagcagtgtttagagggagatttgtaaccttaagtgctcctgttagaaaagaataaatttctaaaatcagtgatctaaacttccattataagaaactaggacaggaagtacgagtaaacttaaattttgtagaagaaagaaaat

SEQ ID NO: 395711 - DNA, 464 bp, Homo sapiens
ggcatctacgtagtgaaggcttcccttcccttgtcctgcagcgtgctggacagtgtcccggctcagggaccccttctgtccccttcctggctactatgggtcggccctgcgtcctcaccactttgagccaccctttgacccagcgtctctcccgcaatgggacctggtgggatggggacttggagcatgctacaggagaggtagaacttttgagtctcttcttcccaaggttctccccagagtcggagagcagagacggatccaggggcactttctggccgctgcctgctcgggctcaacagatggagtccaatgtttcagtctcccccaagaatgtgtatcctcattgctgacacgggagctgggtgcggggagagatgtggtggtggggacccttgcctgagcagcccattgtcatgagtgttattgccattgtgataatatgttagcatgactctcctccc

SEQ ID NO: 395712 - DNA, 422 bp, Homo sapiens
tggtcatgatgcataattctttttacatattttagagaattttcttggataatattttgctatggatctttgcatgaggaatgatggtctgtgttgttgttttttttttaactttgcctgattttgatatcaggatattactagcttcataaaatgaactaggaagtatttcttcttcctcctgttttccaggagagattgttgtagattggtgtcaatgtttctttttttctgacttaaatgatattatatatttacttacttttattttacattgacagattatagtcgtatatatttatgggatacacaatgatgttaaagtttatgaatacaacgtggaataattaaatcaagctagttaacatatttatcacctcaaacacttatatttttgggtgaaaacatttgaaatttactct

SEQ ID NO: 395713 - DNA, 283 bp, Homo sapiens
tcttcagtctatttagagctcccttgagccttctctctctggcaaacttctttttataacataagcaaaataacggaagatgtacattccttgttgtgtgcatggcatggatgggaaggatgaacggagtttatccatgaaaagtatggctgtcaaaaaagggaattatgaagacatgttgtatgcaagatatcttgaagttaactttttaaaaatatgaaacaacttatttccagcaaagtgcaaaatgaaaatcacagaaaaagtcaacctgacctgaagc

SEQ ID NO: 395714 - DNA, 635 bp, Homo sapiens
gagagggagggagagagaggagcaagcatcttctctttccctgctggtaacttccaacagacttcctggaaatcggaaatactcaccgcacccgagccctacgggtatgaaacccagaatgccaggagccgcacgcgcctgctcggggcggcatttctttggctggccgccgccctggctacggggatttggacacatggacctggggttgttgtctcgcttggcacatgcatctttctccagccactcctgagaagttgatggcgcaggaaggtcgggaagcttcgagagccgcctcccgttttccgcttcccgccggagccagatgcaaagctgccgtggaatagcctgctcctttctcctgctttaacagaacttatgtggctgggacgcagggccctcgggtgtcaaaactttgaagattaatggattactttgttaatgactgcaggcgtcagactgaggtgcttaaatgatttgtgaggtgcgaggcgtcttcccgacagtcccaaacaatgcgcggagtgtgcgggggaggcagagggcagccaccggcgggaccgacagcagggcttacactcgcgcacattcacacacacacacacacactcccaggcacacacactagatagatc

SEQ ID NO: 395715 - DNA, 362 bp, Homo sapiens
acaggaaaacccaaaagatggaaaaaatataatgtcccctatgaaatctcactactcagagaaagttattcatattctggtgtatagcctcaaagccacttttctagaattatagagataagtggtaaacattattccacattttaaaaattattttaaaaaattttttgtaaagatggaatcttgctatgttgcccaggctggtcttgaactcctgaacttaggtgatccaccctccttggccccccaaagtgctgggattacaggcgtcatctactgcacctggccttaaatgttttcttctttctttctttctttctttctttcttctttcttttctttctagtttctttttttttttt

SEQ ID NO: 395716 - DNA, 278 bp, Homo sapiens
tgcagaggcgtttaggcctgcaaaggttgggaccaggatgtaagcatggggttcaagttcacagtcccattattaacaacactgagcagtaccactgctgcccaagcaaacaggaaaggtccgggccaaaaatgcatatccttctttatttcccagaactggaattcccattcaactgattttctggaaaaataaagtttcattttacgtcgtcatggtgattttcttgagaatataatgccaagagtacagcttcaagatcatcttgtgtctaacgc

SEQ ID NO: 395717 - DNA, 242 bp, Homo sapiens
ttaatctctacccctttctttcctagtaccatcaaataggcatgattaagtacaaatgtatcacttactatggcaagaaatattataaacaaaccaaatattataaaacaagccaaagtcacataccaagtaagttgtacatgactttcagtgatattcaccgactgaaacatttatgcatagtgagttccagcatactctgatccatctgtaaactttcatcaacagcagatttgtatagg

SEQ ID NO: 395718 - DNA, 444 bp, Homo sapiens
ttggagaagcattgcattcctctaagatttgtctacctcattccatctccctgtctatttctctctctttgctttctctttcctggtctctatcccttcctttcattacatgtcatgtaccttgatagagatagatgcctgcactcccatgtctagaggtacatggttgccaatgaatgcaaaactcagaaaggagactagaactctagccttctctttcactcctcctctttcctggcaaggtcgcaagaacagtcatctatttcatccaagtgtttgcatctaacacaatcactgcattcagttttgagatttgtcatcaaacaaactgcacccttgtctttgagagttcaggccctggtccgagaggattcaatcctgtgggtatgaactgcttggtaagaacactacccaaagccagcagcatgggccttaacagacctt

SEQ ID NO: 395719 - DNA, 621 bp, Homo sapiens
ggaataacttgcaggaaagatacaggttgattcacagaaagaaaagaatatcagattttctttgtgatgctcccactggaatgacttaatatgccaatctttgaaacaataattgtgctagggaaggggctaaagtgattaacattcccaactaccccaaagtaaggaaagaaatgcaaaacaggcaaaattaacaggtgtgtatgccgggcacggtggctcatgccttaatttgttatagcagccctagcctgactaatacattccctctccactgggagccatggtttgttcaaagaaatgataccaggccctcaccccacatgccatggaggtgggttcccctgcatactcttagacacccacatttgctgggagacattttacccatcaataacgaagctgcaaagccctccatcaatcccgtcaagagctcttacctcaatcagatgtgcccagcatcatgaaagcagagaggccttatcctgaattgtcagatggcagtcaaggttgcaaaagcagagacagactaacgatcttacatattacccatgaccacaaatccaggatgacagactggaagaactgaactgaacgtagagagaaaaaagaggacgggtg

SEQ ID NO: 395720 - DNA, 450 bp, Homo sapiens
tcaccaagtttatagtatttttttttttttttgagatagagtctcactctgttgcccaggctagagtacagtggtgcgatctcggctcactccaacctctgcctcccgggttcaagtgattctcctgcctcagcctcccgagtaactgaaattacaggtgtgtgccaccatgcttggctaatttttgtatttttagtagaggcggggttttgccatgttggccaggctggtctcgaattcctgacctcaagtcaaccacccacctcagcctcccaaagtgctgggattacaggcatgagccaccacgcttggccatttatagtaatttgttatagcagccctagcctgactaatacattccctctccactgggagccatggtttgttcaaagaaatgataccaggccctcaccaagtactttttgtcatttctacctctccttttaagcc

SEQ ID NO: 395721 - DNA, 354 bp, Homo sapiens
gtatcagcgctcgtactgctcttgtgtgcaacggtagtgctgctttgattatatcaaagtatatccattgaaatatcctatattacactatctgaagagtcattgattactgatgtatttttcaatgtgctagccttgaaaaaattacaaacaaaatggatagtgtggatagtgcgatgagtaagttattccggcttctccagtgtgaactttcacttaacccctgacacaaagccacgtggatgatagcaaaatggtgacatgcatcaagccaagaggggagcagcctgttgcttgagtattgctgatgtagtttctcttcatacagtatcacgcttttccaggcttttaaaa

SEQ ID NO: 395722 - DNA, 213 bp, Homo sapiens
ctcagcccaacagggattggcttcacctaaaaatctaaatgcagtcccctcacagcaagtccccaggctgtgctctctgcctcccattgccaccctagagggcacaaagctgtgaggcccagaggaccagaacgcaccttcccaagtggccaggagtcaagactgcatatttggggaggagactattgtccccagttgccagggtcctaaaga

SEQ ID NO: 395723 - DNA, 227 bp, Homo sapiens
aacttcagggagatcttttgggaactactaatttttgtggggaagaaacatctacttcagtttctttttctcctgttagattcacataaaattagattcagaacttttctttttaaaatagcattttaatataagcatttctatttagcattctacctagaaataccttagacatacctagaatgctgttcacctaatgttagtagttatctctgggtggtttttgg

SEQ ID NO: 395724 - DNA, 104 bp, Homo sapiens
gaaatcaccccaactttctccatagaggtctcatattgaccataagataatggggcccagaatggataattccagggtcatgtagagtttcagccttgtatccc

SEQ ID NO: 395725 - DNA, 373 bp, Homo sapiens
tgcttggtaaatccactacccaggccccttctttctgataccatggtgcctgccttgggttagcctttattatctcctttctggggtcctgatcccatcttcaccacacttgtctcccacattattgtctcttccttccctaagtcattctgcccatagtgaggacagtcatcttcctgaatcacaggtacaatcatgacattctagtgcctatccctgccactctactgaaactgctctaggcaagacttccagtgacgttcaaaggacacctttctattttatttggcattgctgtgacatgtgacactgttagctcttcccttcttgagaagttctccttctttccccttggcccttatccgaggggtac

SEQ ID NO: 395726 - DNA, 581 bp, Homo sapiens
attctgcccatagtgaggacagtcatcttcctgaatcacaggtacaatcatgacattctagtgcctatccctgccactctactgaaactgctctaggcaagacttccagtgacgttcaaaggacacctttctattttatttggcattgctgtgacatgtgacactgttagctcttcccttcttgagaagttctccttctttgtccttattcactctaccttccattgggattttctcctgtttctctgatctctcctttttagtctcctctatggctgtttctttctctgattaaacattaatgttattacatcagagagcagcaccctgagcaccctaatcttatgctgcagttcttaacacccctgggagagccatccacagccaagattatagctacactgaaggattgctgacttgcacatctattaatctctaaaccatttggcctcctgactccaagacctgttccattgcttaaggaatttctccacatggatggccacaggtatgtcaaagttggccaacgtcaacttatctgttcttccttccaaacctgtttctcttgtctttcatgttga

SEQ ID NO: 395727 - DNA, 499 bp, Homo sapiens
acacacacacacacacacacacgtacacacacatatataatgtatatatataatgacacacagataaatgtgtgtatatatgcacacacatacacaaatgcgtaaagatgtgtgcatgtgtgagtacacatattattttgtagccctttccactgagtgggcctagaagcaatgacatttagtaacaagagacacagcacccaaatcttgggtcttaaataccgttctccaataaaaggagcagggactccttggagaaatagttgattccagtgaggaggcaaggaaacttcaagataaacctggaacatctgactctacttttgtagagtcagaaagtaaggaagtgcttataaaatgatggaggcatgttgaaagaacacaggcatcaggtgaaggagctcccaacggccaaatctagggcatttgagtaacaaaatagagtaatgaattgtaatccacagagtaaaagaaatatccatgagtcatattaatataa

SEQ ID NO: 395728 - DNA, 429 bp, Homo sapiens
tctctctcagagcctcaagtaagatggagctgatgctgtctactccacagagtgtgggaatcaaacgtgccaatgaatatttctgatgctttgcttcatgtgtggcatgtagcaggtgtctgaaaaaggtttgttgactgactgactgactgactgactgactgaaaaatgaatgaatgaatgaatgaatgaaaaataaatgcctctgtaaacacctcaaacatcatttttggagactaagttacatggggaccctatagcatcttctgtcttacacagcagtctgcttcatatcttctaaccctcctgttgactttaagggagatagaattctgctcatttacagatgtgttcccaagacctaaagggaaggtggcttgtccaaagacacacagctaggaagtggtgaagacaggatgggaccctgat

SEQ ID NO: 395729 - DNA, 409 bp, Homo sapiens
ttgactttagatagcctcatattcatataaatgaaatcacatagtatttgtcttttcatgcatttcaaacatttttaagtgtacaattcattggcattaaattaattcacactgttatacaaccatcaacactattcctctctggaactttttcatccttccaaactaaaactctgtgatcattaagcaataactccccattactctgtcccccaggccccagtaaccactattccactaattttgtctactataggtacctcacacattatttgtccttttgtgtccaactcattttacttagtaaactattttcaaggcgtatccatgtggtagcatgttagaatttccctcccttttaaggctgaataatattccattctatgtgtataccacattttgtttatcc

SEQ ID NO: 395730 - DNA, 284 bp, Homo sapiens
cctttccagtgctcagccctgggctgccatccacagtgggaacacacatggacagacaagcccagtggcttgctgctggtgcagagaggtgcaggcactggtccctggaagggatgaaggactgtggggctgcctacaaggggaagggagagtgggatttaaggtggcctcatgcagtagttagtgcctgaactcagacttgaaggaggaaaggaggttggagagggccttccaggctataggaagggcatgggctagagcctagttgctcgggtgatgtgagg

SEQ ID NO: 395731 - DNA, 411 bp, Homo sapiens
tacactagctgttatgggttgaattgtatcccctcaaaagatatgttgaagttctcaccccctgctacctcagggtgaccttatttggaaacagggttattcccgatattattagttgagatgaggtcatactggagtaggatgggcccttaatccaacgtgactaatgtccttataggaattggaaaagacagataaacatggaggaaatactgctaatgtaaagatagagacagagactggatttattctgccacaatccaaagaatgccagggactaacagtggctagaataggcatggtggtttccttccccagatatttcagagggagcatggctgtgccaacactttaattttggatttcaagtcatcaggctgtgagaaaataaattcttgttgttttaaatca

SEQ ID NO: 395732 - DNA, 394 bp, Homo sapiens
gttgttaaaaagttaagttacttttcacagcctgcaaacccttcaaaggcaagaactcaaatagaaacttggaaaggcagataagccagaaaagtgtactaataaacgcacttaatatgattattttttgatgccaggtccaccaagtgaagattggaggatgtatttgtttcttctactcaacaacaattgataaagcatgagttccatcaaggactgtgttctaggtggagaaagggtgactcacccagtcattggatctctttcacttccagtctctggaaggcagatatctttataaaatatgcagacagctaggctctaaacactggacaagaggtctgtaatcatccagtcacatctcaggtcagagggtcttggactgcttaagaaa

SEQ ID NO: 395733 - DNA, 260 bp, Homo sapiens
tgctaggattataggcatgcgccaccacacccggccaaaaagcactgttaatatttctaactttgaaagccatcactaagtattttgagtactctaaatttttttttcacttcataactaaattagtgaaaaaataaaacttgtccttaatttaaaggtatattagaattaacaagttttttaaatctacccttccagtgagactaacattattttagttatttatttgtttttagatggaatcttgctctgttgcccag

SEQ ID NO: 395734 - DNA, 414 bp, Homo sapiens
taattgtatgtctccttatttagtttatcaaagtaggtctgtgcatacattaatgaaggtatacaggtaattctggtctttcactaatattcagtacataatcttccatctaaaatctgcttttttcttctgtgttgctacgttagtaaatgttcccattttctaactagttgttctgcaagaaacaggattctcaggaattttttgttgataatacaactttttaaaatttttatcaccaatagaagaatgaatttccagcagtcaggaatctaacacattacaggggggaaaaagtacgtgaaaagtggtagggggaaattaacaaatgatcttgaaaaatctatggcggctagcaaagtattcttgaaaacaaagatctctgcattccggtattttagggatcctcaaaaa

SEQ ID NO: 395735 - DNA, 140 bp, Homo sapiens
aggagacatttgagtgaagcctggatgataaggaatcagccatgccatgttctagacggaaaatataccaaccaagaagccagaccaaatgcaatgatcctgtgattctgggactggaataaatttaatttgtacaggga

SEQ ID NO: 395736 - DNA, 692 bp, Homo sapiens
aatttttctatttaaatcaaaagcacccttttaaagcccctaactaagccttttataaataaagtaaatcatcttgcagtgcattccttgatgatggcttatgttgtttttctaaagaaagtttaattaagatttgattttcttctattctgtactttgtttattcatcacagaatgaaacataggtctttaatgtcaatggtaagtctgactttttgggtcattgatgaccattgcagttttcaaaaaagcagctgaatatttatcttttgggtatgattagaacataatagagcataaaatgggctgcctatgaccttagcatgggcttctgtcattgcaggagaacatttctggtcagtggccactgtttatggtttgttaaaatcagcacaaatgtacaaataactcatgaataattgtgaacacagtatttaaatggatgtttaataaatatgcattaaaaatctcattacagtaatgaagtttacagctgaaattttaatccagccctttagaaatattaaagtgcttttactgattgtgcatttttctcacagcagttgggtaaacattttaaactggaaatctgaattccttatatagttttgatttcatttaactaagcatgtgttctttttggcaaccctcttctttctctttgtgaagaagtgaagctcctttattccata

SEQ ID NO: 395737 - DNA, 298 bp, Homo sapiens
agtagagatggaggtctccctatgttgctcagcctggtatcaaactcctgggtttaagcaatcctctcacttcagcctccgaaagtgctgggactgcaggtgttagccaccgcaccctgccttattctcaattttttcattgttggtttttgttgttttttttcctaattaccagaatgcattgctatgatggaaacctcaggaaacataaagactgtgatttaaaattctccacaaccactagagagtaatactaaaagtaatagaatggacaaaaagccacaatcccatgaaaaca

SEQ ID NO: 395738 - DNA, 620 bp, Homo sapiens
accagaggagccaacctcatactaaaataagatatttcaatttgtaagaatattttttaaaattaaaaaaatctgatagcaactttaatgccttaatttttaccagactactcagcaatgccgtaagcgtaaactcttctacaaggttccctgtagcatagcacggaaaaagcacagccttcacatggacttaaacctggccacaaacaagctacacttactgactatatgatttctaactttctattatacacattacttgtttttcatatctggcttaaaactttgaattcaagcacttgactcatgtatctatgaggctccgtgtgggcgcctaagtgctctagaagaaccatggttggcttggtttgtttttaattatgaaagtaatctacttacattacaaaactataggactgaagaataaatatgtaatcacacgtaatactaccacccttacagaagctacaagttttgtctatttcttctaacctcttgttcttgggctgtttttcctactaacaagctgaaaaattcatagctttttactctgataaacataattgttttttaaaaattcaaacagtctagagaaggaaaacacttttctcaaccattat

SEQ ID NO: 395739 - DNA, 175 bp, Homo sapiens
ctggccttagcctcccaaagtgctgagattacaggcatgagtcaccataactggccccatttgacttttaaataaacccagttatggaaaatggaaaaatattcaggctcttaaatcaaaatttttaacaaagaaatggagacaaacatttttaaaggatttattatttcgcata

SEQ ID NO: 395740 - DNA, 327 bp, Homo sapiens
ccatacacgatagtgaaccaggaaggcccactgggaggcattttcagtttttcagttgggatgacctaggaactcatgctactgacaagaagagagttgtcattattcctgcccctttcaagattgctctgctttccatgatcttttgtccaaatgggaggtttttctgttgtggtttcctgttttttggtgccccaaggtatgctgctgtaagggcagatgactggccatgatgaggagccatatatgtacatgttagagatgaatccccatgaatcagagatctaagacttgctgggctttgaataacaccctcatgaggatacc

SEQ ID NO: 395741 - DNA, 377 bp, Homo sapiens
ggcaggatggtctcgatctcatgacctcgtgatccggcgtgctcggcttccaaggtgctaggattacaggcgtgagccgacgtgccgcggcccctatctagttatttttacgctcccatgtaattccaaaatgaagccagtttgagaatcactgatagttcgttgccctgatagttgtcaggctcaggaagcctacagtaataagagcttatcgtgatggcttgtgtccgtgatggatgtggtcaccacagtatataatacacttgggtattacagttaccagaccatttctggcatgactgaaacctaagaaagatgctccctatacggtgtctactagtgtaactttctgcagagagaatctgggaggcagagat

SEQ ID NO: 395742 - DNA, 502 bp, Homo sapiens
gtttatattagagtcgaaagacctaagtttaaattcaggctctgtctcttattttgagatctcagacaagtcactttaatctgagttcctctctttacctgaaaataggtgtaatagccataaccctcactgcctagaccacatgactgctatgaggattaagtaaggaaatgtgtaaaaacgcttcataaaactataaagtgtaatacaaatataagggctcctggtattattcttaaaataagtgctaagagtaaatccctgtctataagaaatcagaatacaattgaattatttctgcatacttttcccaagagaatttatgtctgacatgcaaaactgtaaataactcctaaaggggaaattaccaaaaaaggaagggaaaaaagagaagaaagaaaacttggggtgggactagaagagggaggtaaattaaagagaaaaggagaagtttttgtagtaaaataatgcaatgtaagagagagcaaacctgatctgaaga

SEQ ID NO: 395743 - DNA, 239 bp, Homo sapiens
caccaattcagcttctttcctacccagtttgctttgccattttcctcctaactaaatgcctcccacctctttccatgttcctgacacatttttgggaggaggtgggttgctttttcctgcttagcgtggattttacaattggctgtcagcccacagctttccacgctctctccctgaaaacctgatgctaagtgacgggtcatccattggtgctgatcccaccttccaggagtccttgg

SEQ ID NO: 395744 - DNA, 404 bp, Homo sapiens
agcagagtgcaccaaattcaggagaagtctcttcctgctaaggaaacagggaaggcttcctggaagaggaggcatttgagctgagtcataagactggacagagaaatgtattaagtgaatggggagaggctattctagataacaatgtgatcagaggcatggaagtgaaaaagagaaattcagtttgactggaataggaaacaggaagtgataagacagggacaagaccacaaaggccttcaatgctagaccaatcaaaaacccaaaccaggtctgtcttccttaagtgtctgtgcttgtcacaatttgaagaaagagaaactcaatccattaagaaatagacagccactctagcagccttgggtggaacccacagactcatctgcaatgggctgaatgtctat

SEQ ID NO: 395745 - DNA, 412 bp, Homo sapiens
actctacaggatccccgacgagttgtccgagttagggtgctactgcttatcagtttcacttctagctctgtgccttatttttctagttactgtcaaagttagtgtcttctgttatgtaaaaatgttcgtaatttattagtaaaaactacattgttcagcacccagcagatggtgggtgctaaagtggaatgaaaagagttaccaaacaaggaatacaaaataattcctatcttggtatcatttaaagtgaatctatgctagaaagattccataaagaaaaaaaatgaatctatatacctacatatacagggaatctgaagtaatttttaaaagcaatgtcagaatggttttcttttcttatggccaagtaggcttttactggacctgaccttcctgcatataactcggacaa

SEQ ID NO: 395746 - DNA, 299 bp, Homo sapiens
aaataaaagcttgatgcaacattctactgaagttaacaaggtctaggaccctacatggtactgaggaaagggatggcatgtaccactagggtgggatgccctggaaaggaacacagacacggagtaaagagaatcagaaggatccccatggagcactggggaacacaggacaagaacggctcaaaatccaggtaaaaaactattagcagtggattcccaaaaaaataagactgaatttttgtggagagccacttacattttctcctacaaacattgctgaatttttatttttttaacat

SEQ ID NO: 395747 - DNA, 372 bp, Homo sapiens
cagtaactgatttagactgcaccagttgccctgttctatttcccaaggatccaaaatcgtttcacttcaaacctaaagaaaaatttaatttcttctctcccctatttctcataaatcccttacttactgtaccagccattccaccaaaaaggttcatttgaactaggctctgggaaaggatatcagtaaagaagggaaaatatatcagtaaagaagatgatggaagaaggtattccaggtaaaggaatcaacagtgtgagatgtgaaacacataagaaaacatagacctattttaggaacagtaagttcatcaatttgtctaaagcagtagtattccctgatgaagtgagtactactgtaaaatttagtagt

SEQ ID NO: 395748 - DNA, 253 bp, Homo sapiens
gtggagatggggtctgctatgttgcccaggctggtgtatattttcaaatagctagaacagattttgaatgttttcagcacaaagaaatgtttgaggtgatggatatgctaactaccctgattttatcattatatactgtatacatgtatcaaaatatcacactgtgcccaataaatactaaatacctacaattatttgtgatcattaaaaacaatgaaagcaaaagaaagggtgctcagtctcattagtcaca

SEQ ID NO: 395749 - DNA, 327 bp, Homo sapiens
acaatactgtcctactatgtgtgttaaccactcaaaagaggtcaaacacacaaaaagacatggctaaaagaattaaaatgctaactaactaatatcctcactagtccttgatcttctagtgaggaagaggatgggtgcagccaacatgagtcctctgctgcagagccacacccttgacaatggagataaatgtgcacgtatgtccccttgaaaggttgcacctttcctgctttggctagagcctctgtcatggtgccacgtggtttctatgtaaatcagctggcgggtagaatcatttctgaccagtttagggaggttctgggcaat

SEQ ID NO: 395750 - DNA, 261 bp, Homo sapiens
tagtacattctcctaaaatatgcacattgaaatcagataatagtaatggtctagacctcagatacggattttttaaaccatatgagataaatgattatcttcttcttcaaaatattcaaagacagaaacttctaacctctgatgttttaatatttcatgcccccaaaactcttaagtccaaattaacactctcacttaaatctaagctgattttcttcaacaattgaatagtgagaaggttatgttgcctcctcctaaatt

SEQ ID NO: 395751 - DNA, 700 bp, Homo sapiens
cctaagtgtgaaccctactaacacggttatgtctgtgatcatcaaaaaacaactaggtatccagcaagtacctgctcttagagacaggcacagctcctgtcttcacagagcttacaggctggttgaggaggcagccattaaacaaatacctatgtctgtgatgatcctacaacaatatagaatcgtctcaagtgatctcttttattatgcccaattttaaaaattgaattcaggtgagacatggtggctcagacctataatcccagcactttgggaggccaaggtgggaggtttgaggccaggggtttaagatcaacctgggcaaaatttttaaatttttgaaaaattgaattcaagcttgtagagaatcaagcctaaagggactgttgaaaagagtgagatgcccaaggccacacggtaatactgagagagcaagaactgacttggagctagtggtctcccaacgccaatgcgcttctcctaaacactcacacgctacccacgctttctacatcaactttaaatacactcctttaaatcataaagtttttcaataacagctacaactgattgataattcctcttatttatttatttatttagtctcgctgtgtcacccaggctggaatgcagtggcgtgatctcggctcactgcaacctccgcctcccaggttcaagaaattctcctgcctccacctcc

SEQ ID NO: 395752 - DNA, 167 bp, Homo sapiens
tgctcctctcctcagaagccatgtcatggctgcccactctctccaaagactccctccaccagccacgcggcccgcagccagagttcttcctgtgaagagccctcaccgcttcacttttcatgtgaagctggcaaagccgcttcagcgatcattttttaacacggcag

SEQ ID NO: 395753 - DNA, 614 bp, Homo sapiens
agtgactccatcttgaccagaattgcaggtcccctcccacatctaatccaccactaaggcctgcttcttaatagctcttgttcggctttggttgagacagggttttgctctgccgcctaggctggagtgcagtggcgtgatcactgcagcctccaactcctgggatcaagcagtcctcctgccttggcctcccaaagtgctgggattacaagcgtgagccaccacgcccggccaccctcttgtttcttacacattacttccattctcaaaatgcctcatagtctaaaatggctgccagagctccgggtctcacatctaagttccaggaaggaggaagaaggaaagaagggacaaaaaagggggcactcctccttttgtaagggttctcctttctggaagtcccataaagcacttctatttatatcacattagtccgaacttcatcacatgactacctggagaggctggaatatgtagttttcgacaagatctatgactgttctagataaaatgagggtcttatgatgaagggtgaagtagagaatggttgaatgcctgctatttcgggcaaatcccatcttagtccctcattcacaatctgacatctgacctct

SEQ ID NO: 395754 - DNA, 236 bp, Homo sapiens
aagtcatatggatttatctgagtgtaaggagagctggaaaaaatagtttctagcaggtcagccacctcccagtgagggctgcataccatagaaggggagaatgaattttgggagaacaggtaattatctctgtcacagaaggggatgaaaagtatggtagttacacaagttagacatctgtatggaaaataccacttggttctacaaatgtggttagaatatttgaaaggtatggg

SEQ ID NO: 395755 - DNA, 517 bp, Homo sapiens
gcctagggattgcacaagtttggggaggaatcataactgatgcattctgtcaccttccactccctggggactggcagagagcagacatctgtaaatgtttgctgttgttgaagtacattggaacatgcccccgaaccaccaggatccaggatctgctgagcagccagaggggtttaagtcagtgccactgacttgcagtgtggccctgggcaaggggtagaactcttctggcctggcttttctcattagtaaaataaggggtagttttaggcaatttgacagctaacgtctgtttcctgtcttggcccaatggcccttaggagctctggtccaggtcctcacagaagaagagtctgtggtggtctctttgagaatgcctctttccctctggtctcaatggcctactactggcccaagtgccctcccaccacacacacacacacacacacacacagattcacacacacatgcatgcatgcacatatgcacacacgtgcacatagcatgtgtacacaca

SEQ ID NO: 395756 - DNA, 673 bp, Homo sapiens
gtagccacacatccctctcatccacagctccccggagccccagccaggctgctcaatggctgaggaattaccacactgccacatacatgccatggtctggcctgcttttgacttcatttgttggtgtgggtgggcactgtcacctgggcagaatcccaggatgattctgtgaataaccacagcagtccccagggcaaccaggtgggtgaagagaaccccaaccagtccttccagaggcccagccacaaacaacggatctggggcccggctggacctctggggtcagagttctaggacttggagtcagtctcacgtctgtgaggtgagggccaccagagacaggagggaagctggggagactctaggaagggatggcaacgctgcctagaagaacgtcccataggaagaagtttcagggatgtctggagatgaggcgtggtctggttaactctcccttggccagagccgtctgacccttcctaaaactctggggaggctgtggtggcaaacgtggccttgggagtgcagctcctctttgcaatcatccctgtgtttggatttccctgctttttcaatagcgtccactaatgcttagtgacacagctagttttgtcattagtcctattccatttcggtgatctcacgatctggggtccgagtcaatcgtatctgc

SEQ ID NO: 395757 - DNA, 126 bp, Homo sapiens
tatggtaagtctttctaatttatttaggtctgatttccttcatcagcattttataattttcagcatacagatcctgcacattataaatgtatagctaagtatttcttttttttctttttttttttt

SEQ ID NO: 395758 - DNA, 1218 bp, Homo sapiens
ggagtgaggcaatgcctcgccctgcttcggctcgcgcacggtgcgcgcacccactggcctgcgcccactgtctggcactccctagtgagatgaacccggtacctcagatggaaatgcagaaatcacccgtcttctgcgtcgctcacgctgggagctgtagagcggagctgttcctattcggccatcttggctcctccggcttacattcttgtatgctttcagacttgaactgaattataccaccaactttcctgatttcccagtttgccaacagcacatcacaggacttctcagcctccacaacattgaaattaactgttcactaagaagcagaatgatcttcactggaacaacgaaataacggatgatctgcctttaataggataaaagccagtatttgcaaatataaaatactattttgagatccttgtggagttcatttttgtgtatggtcagaggttattgtcagtgttcattttttgccatatagatacctggttgttctaccatttgatgaaaggtattatcatgtccccattgaattaccatgacactttgtcaaatatcacttgaccctatgtatgaaggtatatttctggcctctgttttgttccattgatcttatgtgtatcactgtgccaatataaccctaccttgattactgaatctttacagtatatcttgatatcgtctagggtaagtgatctaaatgtatacttttgtttctaagtatttttgactttggttctttgagttctccatatacatttgataatcagtttgccaaatttctcaaaaagccctgctggatattgaatggaattatattgaatctaaatatcagtttggagataactgacatcttaataatacatcttccaatcaaatgcatacaatatatctcatttatttagataggtttgctttaatttattttagcaatgtttgcagttatctgttcagtattttatttaaattattcctaaatatttcttgatttttgatgctatgggaaacagtgtattttatttttttcattaatcattacttttgtagagagagacaatggatttttatatgtgaagcttatatgctgcgaccatgaccacgctaaactcactttttagttctgataaatttttttgtacatttcataggatttttggcatacataattgtgattatgtcacttataaataaagacaatattacttattt

SEQ ID NO: 395759 - DNA, 349 bp, Homo sapiens
acattctagttagcaaagcgcctcaggtgattttgttgcagatggttcaccagccactggttttcaaaacacccagtagaaagtggtgatagccagacataaagtgacagaaagaaaattttcaggaggagagggaagatactgaatctaattttggacaacagtgctagaaaagacatcataataaagaggaagaaagcatcacctgcataattatctataggaaaaaaatgaagataactatgccttcactattgtttgtattcttgaagtcctgtttttaatgtctcctgatactagtacatccttggatggccaattaggccaaaatcgttttacccccaaaaaa

SEQ ID NO: 395760 - DNA, 273 bp, Homo sapiens
aatgctgcaaacatccagatatttttgctagggttcaaagagtgaagacagttgttagaacagcaggcctggaaatgtgtgtagaacacataaaggacatggtgctgggtccctgatctgagggttcctagaccaactatctgtgaataatggtgaggctcaggcccatgagctgggggagaaccagcctggaccctgtgaggtggctgatcctctctggaaactgattcctaattcaaactctgagcagcctggctggaacctaaggttaac

SEQ ID NO: 395761 - DNA, 984 bp, Homo sapiens
tcctcttcttgcgttaaacaatagccctgaaacctcagcctctttctttcacctccctgaccatctgaaacctgacttttgtctgaagctcctctgtctccctcaggagtgggggtgagatcatggtctttcttttctcccatgccaattctagacatcagccaccattccctctgtggaaacctctgtcccttttacatgccatcttctacctcctggttgctgccatgtcttttgacctcctgctcgcttgccttccccccatcccccatggctttgttctctcctagcccttttccttcatgccaagttacccatcaacccccaccgcaatcctctgtgcctcaatggcttcagacactgatctctgtcttgaccacatcctccattctcctgatctttgacccaatcacttccaggtcgcctgatctttttttcttatattaaaaaaaaaatatttatggggggtggttaacaatttatacacagtaaattacatatcatttaaaatgcacattttgataagttttgacataggtatacatatatgaaatcattactaccatcaagataatgaacataggtactaaccccgaaagtttcctcgtcccccttggtaatcccgctctcccatcttttctcatctcatcccccagtccctaggcaaccactgatctgcttttctggcccttgtagactagcttgcgttttctagagtcttacataagtagaatcatgaagtatgtactcttctttgtttggcttttttcacttggcgtaattattttagggtttatttatattatttcatgaattaatagttcattccttctaatttctgagtagtacagtattccattgtgtggacatgtcataattccataatttattcaggtattgatggtcatttggattgtttctagcatctggggctattataagtaaagctactataaacatttatgctcgtctttgtgtgaacat

SEQ ID NO: 395762 - DNA, 368 bp, Homo sapiens
ttccaaatgaaagtgagtaaagcaagcaaaacaaattactctgggtgacaaggagatggcctggggattcctgaacaagaggatctgggggctccaactgccttgatggttttgtccatcagcaggagctgcatgtactccagactaacctcagcatcagcaaggccaggcgctgtctccctccctcccactgctgctctgttccaggcactgagggatctggagcctacgcccaccggggccccaggctccactgcctgctcccatctgggtcagtcctggcctgagatagaagatgatccttccaccatcccgacagtggatgggatagcccttggagtccaagaggcctcactgtggaatgaggc

SEQ ID NO: 395763 - DNA, 228 bp, Homo sapiens
gagttacatgggcggttgttttatatttatgcattatattatacatatgtttattttctctatgtatgttaaatatcacaactttaaataaagctaaaagtgttcctttatttttatcctccttatgttctattattttcattgaacagatgtaaaattctcacccatattgaaatcttcttatttctacctgagtgggtgctttatgcaactgtgtttctgttaatt

SEQ ID NO: 395764 - DNA, 375 bp, Homo sapiens
gatcatcccgccagcagttattaaccctagggtgctgagcagcatccccggcccccacccactccatgccaggagctccctgcctagtcgagacaatcacagacatccccagacaccttccagtgtcccctgggggcagaactgcccaggtgggcagtgtgggtctgggtgatggtttctctgctgcaacctctggccagagccggcagtcccggtggacaggtgtggaagggactgaccctgccaccccacggatctccccaggcttctgagttgctggcggttttccttccaactgcagtcccgcagtcctctcagccatgggccacacccccgggtctcagaccccgtgtttgttttcatgccaggaggcag

SEQ ID NO: 395765 - DNA, 588 bp, Homo sapiens
ccccttttagttttttatgtaggcagtcatatcatctacaaatagtaagaatatttcttcctttctaatccttatgattttgcttttctggtgttactgtgctgactttgactgatagaatctttgatagaatgttacatagaaagaatgatggtgagcactattattccttattttattttatttttattttttgagacagagtttcactctcgttgcccaggctggagtgcaatggcatgatcttggctcactgcaacatctgcctcctgggttctgattgcatttagacggtttgcctttgtccaaattccttcttttttaaacatggataaaagtattacatgggtccactgttaaaacagacaacatgtggcaaattaattctggtatcatgttttccgacaaagctcagaaaataaaggtgttgaggtggctttggactaagtttaatagtcatctcctctgctgacaacttctttacatgttgggcgcaacaggatggtatgttcaaattgcgctgtatatgatccttttatgtcacataatggtggatatggatctacaatggtctaaatgcaatcagga

SEQ ID NO: 395766 - DNA, 385 bp, Homo sapiens
agctcgccatttcacctgacagtccatttcttgcttagtttcagaattgtcaccactcacatcttgaccacattactctgagatgttaaaataattgacagcctcatccaaagccagactgactttagatacatcctcagtgcatctcccatgtgtccagctggtcagtcctgccaggctgctgtgtgttttgtcactattgcagagagcattcaagtgtgacagcgagtgggacttagttcttgggaaacaggagtattaagttaaaccccatgctaggtccaaatttcaagaccaggtgtaaggccagcggtttgcttttatgctcactcacagatatttgtttttaggcaaataaacaagtcatttatttatatgctgtttt

SEQ ID NO: 395767 - DNA, 319 bp, Homo sapiens
ctgtttgtttgtttttcgagacagagtctccctctgtcacccaggctggagtgcaatggtggcatgtgcctctaatcctagctacttgggaggctgaggcacaagaattgcttgaacctgggaagtcagaggcggagactgcagtgagcagactgcttcacaattatcgttagttcttgctctgcttcatttcattttgtttttctattggactttaggtgtagaactgtacattgggcaaaagtcatggtaagaattgagtgcctgaagctcgtagcttagctcagtgcctagcatggtatgagcactgagtcatcca

SEQ ID NO: 395768 - DNA, 394 bp, Homo sapiens
gctgggattacaggcatgcaccactgctcctggctaatttttgtataatatttttagtagagatggggttttaccgtgttggccaggctggcctcaaactcctgacaccaagtgatctgcctgccttggcctcccaaggtatggttataggcgtgagccaccacacccaaccataatagttttattttaaggtatcagtattcataaactcagaatttattctttgcagctttttagactgaaaattaaaagttttggatgtcaacttaaaaatatgcatgttatttttcagaaaaatcttagtaagtgtttaagcaaaagagtttgaagaacaccgttctagtttatactttgaaaaatactgtatccgaatcacctgtgacaatgttaaaaa

SEQ ID NO: 395769 - DNA, 292 bp, Homo sapiens
gaggaagtgtgacagtattgaaaaacaaaaaaacaaaaaaacaaaaaacaagtgcagctcagagaatcctaaacggagaacatactgaggaaaggtctttgcatcagaaaggggaactcacctccccccagtgtatgagttaacattgaggctgaggtggaaatatcttgttgctactagtaaatttaactaccagagatatcactcagctgctctgtggctttctagatggtgtcaaggatgcctatggaggaaacctcaagaatccagaccagtgcttggtaataattga

SEQ ID NO: 395770 - DNA, 477 bp, Homo sapiens
ccaccgtgcctggccaaacttcttttcttatcaattacccagtctcaggtgtttctttttagcagtgcaagaatggtctaatacaggagtgaaccatgaactgatcgttctctggtggacaaaacaaaggcatgctagcgaaggcagaaactaatatcattcatctgctttccaaactccaaagaggttaattcagtatcaaaaaattaatttctcaaaattcacagctgtttgctaaagttactcactacacttaacttcatacttgaatgctgttactatttattgacatcaaaacaaaacaagctgagactaaaagttgctatttaacaggaatagacatcggtgcagtttccttcctggagagggtaggcactcagatcatgagacctaagatcaaacaaactagattgtcaagaatccaacaaggactacattttacctcttaataaaaaaaatgctggagacaaaacaaga

SEQ ID NO: 395771 - DNA, 625 bp, Homo sapiens
tctaaagaggaaaggaaacagatgaatgctaatggcaatcatttaccaaccctatcctgggtaccacagaccagactaggccctctttatgcactatctcaatcaatctttacaacaagacaacacctcattaccccgttcacagcagagaattaggtggcgtgcacagggaggacagagaacaaggtgtgcagttggaaccggagcctggggactcaggatcccttccttggtgttcaccctgggcatgtggcccccgtgccggagaccagggagagccagactatacggtgcagccaggctacatggctgcactgaccctctcttctcacaaagtaagggctcaggaggaaaactgtcatggtctctgtcaaatgctggtgcaaagacacatctaatgataccacatgaacaaagatggtgtttccaaatgacagatttccttattaccagaagctacgctgaccaaaggaaactcttgggagggattcttacaaactttgcaaaatgtagtgtttgagtgtttctctcactgttaaaaaaaaaagttatgtcattaatgattttcaatcaaattccctgatcctgtctccatagccaagaacatagtggcaagatggcggag

SEQ ID NO: 395772 - DNA, 548 bp, Homo sapiens
cacgatttcattaatttggatcttatttttattatatccttcctcccactgactttggattatttcctccttttactgttttcctaaagcgaaggctgtaatcattgattctgaacccttcagcctctcttaagataggcattcaaagctgcaaattttcctctaatgctttagttgcatactatagattttagtgctacatatttatgatcattcatttccaaatattttatttgccttatttttatttttctcataagttatttagaagtgtattgtattgtttaatttccaaatatttaaggattttctgaattgtattgttattgaccctcgttccattgtggtcagaaaacatactttgtaaaattgcagttctttgagattatttactgagacttgttttctggtcctgtgtatggccaaacttggtaattcttcaatgtatacttataaaaataatatattttgcagtttggagctgtaatctcctctaaatctcatttaagtcaaggtggttaataaaatcactcaagtcttctgtatct

SEQ ID NO: 395773 - DNA, 1049 bp, Homo sapiens
acactataagactgatgacaaaaggtactataaacaaatatttcctaaagtcagtttgtcacaggggtctaggttagcaattctaaaaccatcttacatatacactaggatgggagcaatgagtatgctgtggagaatgagagcattttctcacttctggagaatggagtttcaaatgagcaaagggcaaataaacttgtggtgttggattggaactggaactgcaactgccagtgagtatccctggtttttaacatatacatacaggctggccgggcacggtggctcattcctgtaattccagcactttgggaggccaaggcaggcagatcacgaggtcaggagttcgagaccagcctggccaacatggtgaaatcccatctctactgaaaatacaaaaaatagctgggcgtggtggcaggcacctgtaaatcccagctactccggagactgagacaggagaaccacttgaacctgggaggcggaagttgcagcgagctgagattgcaccactgtactccagcctgggcgacagagtgagactctgtcgcaaacaacaacaacaacaacaacaacaacaactacacacacacacacacacacacacacacacagaggctgatgtagaaatacatatagatgtatacgtatgtatgttgaggtccatatattctctatctctctgtctgctaagtgggtctaggaatgatgatatcccatagcaggagcaaacctagcactcagatcttggtttctaaatgcctttctccaataaaaggaatcagggctctttggagaaatggttggttccaggtctagggcaggaaaattttaagatgagccatgagtgtcttgtggtaccagaaaataaggaagcacttaaaaaaaatggggataatattgaaaggacacaaaaacaaacttaaaggagtttccaatggtcaaatctgggacaatgtgaacaacaaaataaataagaatagtaatgaataataacttatggaataaatatacacagatccataatgatataaataaactgaataaat

SEQ ID NO: 395774 - DNA, 232 bp, Homo sapiens
caggagtcggggtgcaggaggctttctgcttggggcagtttctcagccctctccataaacctccagcccaagggctgttgcaattggaatcaaaggtggggtcagtgaactcctaggctctttgaccctgaggtggcctgttagaatctgttatttgtgttcatttgagtgagtggatggactcagtgggtaaagaagtgactctgtatgttgtatatgactttaagttgtt

SEQ ID NO: 395775 - DNA, 491 bp, Homo sapiens
ttcccttctctaaatcctggttataaccttttatcaataagcaataatttttttgtttaagacagggtttcaccatgttggccaggctggtctcgaactcctgacctcaagtgatctacccaccccagcctcccaaagtgctgggattacaggcttgaaccaccatgcccagcctatatatgaaaactgatcatgataatagctttaaaggaaaataacagattccacgcaaggatgatattcaaaatgtttcgcagtgcacacagcttaagcactgacccataaaaacagatgtcagtgtaatttgaatgaagactctgtgaacaattccacctggtatgaagtaactaaatagtactgctggtgctatgaagggagtacacctgtggactctgtagactttaattttgattagggaggtgaagtaagtgatatttgagctaaagcaaaaagatgagaaattagccaagcccaggagggaagggcaggga

SEQ ID NO: 395776 - DNA, 984 bp, Homo sapiens
cctatttaaattatgtatcttgacttaatatcttattgctttctaccttctataaggctaacatggtattttggaccaatccccttgctgaggacaaccaaaaagattggatgaagtataaaaagcacttacttgaaagcatcaaagacgtccaagatagtgaggaagtttaaagtcaagatctaggaaaagacaagaaactagagaaagaaacccagccgtaaaatcactttttttcccccctgcgggcttctgccaagtctggggaagcagctgcaaagctaaactatattttttgatgattcctcagagccggacaaacagaagtcagaaactaaaacctgccaggaatagggattcaggagtagggatttaataactcaagcccccttcgagctgagaatctgaaaggccacactctcaatatgaggagtagctgctaggaaaccagccctggcacagaattgtagtcagttttgcatcatttaacagtacaagtaaacttcaactctgacattatattaagatatttctggaatgataacacacactgctatttgcagcagcaaatgaatatcctctcaagagaaagacatcatcataacaggcctcagcacttcctccatatgacttataaaatataatttccatcatacaatgaaaaataagggtttacaaggcaacaagatcactgaatgagtaacagaagacagagaagctacaaaaaaagcctccaaaacatgaattattgaaatgatcagatatggttcacaaaataacgatgctttttacatttatgaaataaattccaagcttaaaaacatccgtgaaaaggaaactctaaaatttaatgtgacatattaagaaaaaaatccaaaaatataatactcaaaattaagatgggcttaagagcaaatgaaatgtagctaacatttttaaatggaagacaagaagaaaacatcctccagaatgcagcacacagaa

SEQ ID NO: 395777 - DNA, 349 bp, Homo sapiens
gctgctggaggctggagggaggaaggaaggagggggtgaaggctgaggggctggctgcctgtcaggtgctgtgctcactgcttgggtgacaggattattggtactgcaaacctcagcgtcaggcagggttcccatgtgacagacctgcacatgtaccccctgaatctgaaataaaagttaagccgggtgcgtggcttgtgcctgtaatcccagcactttgggaggccaaggcgggaggattgcttaggctcagaagtttcagaccagcctgaaaaacacagtgagacctcatctctacaaaacataaaagaattagccaggttgttatagcatgcgcctgtagtcccag

SEQ ID NO: 395778 - DNA, 405 bp, Homo sapiens
tatatcccaggaataaacatcccaagagacccacatatacacacagagagggagaaagagagagattgattttaaagaattggctcatgcatttgtgggagttagcaagtctgaaatctgcagggcagaccatcaggctggaaactcaggcaggagttactactgaagtcttgagttttcgtttttcaactgatggtacaaggctcacccatattattaagggtaacctcctagacttgaagtcaactgattgtagatggtaatcctagctacaaaataccttcagggcaacttgtggatttgtgtttgattaaatcacgggaactgtagcctagccaaacagagcatgacctacaaaaaggatacactgattcatgtattggggatagatgaagaataggaagg

SEQ ID NO: 395779 - DNA, 332 bp, Homo sapiens
atatattgtttaaatttcttccaaaaccaactatgttggtaataaagtatgatggctaagaacaatccactttgaagtcagaaatacctttagctaccgctaaagactgaatgtttgtgtccccccacccaaaatttctatgttgaaacttaatccccaatgtgatggtatttggaggtaggggccaatgagaaatgattaggtaatgagggcagagccctcatgaatggattagtcccttgtaaaagagacctcagagtgctcccttgccccttctgctgtatgaggacaaagagtgaaggcagttttctatgaaccagagagcaggctgt

SEQ ID NO: 395780 - DNA, 560 bp, Homo sapiens
ccaggtcactggaacttaaagtgtccaagagaggaggtgtcaggcctcaaaggggcactaggaactggcgtctcacccttgcctctgagacccgcagacccacatccagcctgggctgtcgtggctgagtgccccaggccggtcgcctcccctctctgggctgggttccctgctgaaggggggcggggctccctgctccctgtagtggcctcggcgtggggccgggcctgtggttgcaccatctccattggtgtcatcctcccccagccctgctgtgacaggcatgggaggcaggtgtgtttgtgagctcactggtgcgacccttggaggtgggaggctacacagtatttttggtcatcagaggatggaggatgagcctgcattctgggctgcagggcctggagctgtgctttctcaatggacttagaatttggggaaaaaaaaaaggaaaaaaaggagggaagagagtctgccgccctggagagtgaagctgatgaatggctggctcaggcgcccacagccccagggccaaccctccactggagcatgagagcggccgc

SEQ ID NO: 395781 - DNA, 505 bp, Homo sapiens
gggtgagaggatatgcggatgaggggtattatcttgaaatgtggttccgagagtaaaactcagcaagccctctccagctgcagcctcctggagtgttttaggactggaaccgacctcagatcatttatgaagtctatgctttccgttatagaagagaaaactgaggcctatacaaagggctatgacttggcccaggtggcttaggccaggagctggggctagactattccaagctatccgccagttgagtttgtccacaaaccccaggcaggaagttgtctgacatacagacttagctgaggaattcctatatcctccacaccagagagaattctggaatgagaaagagtgccctttcaaatatgggcccttgctgggggaaggacagggccccttctctgggctggaggaatctgcatccattgtacttaccttcacagcccttagggctgcgtgtgcccatgcagtgtgagaacccaggagtgaagtcaccatgtgcttggtt

SEQ ID NO: 395782 - DNA, 183 bp, Homo sapiens
ctgaaaggatgttctcagatggcagaatctgaggatcttcagattattgcatctgaagattattatacaggatgttcagttattttgttcaaaaacacaggctaggattctgccaggaatattctttcaggaatggttagcttttttggatgataacagtttttcattcacctttcttcctca

SEQ ID NO: 395783 - DNA, 355 bp, Homo sapiens
tggtgggagaaccaggactcctgagcagcatgagaggaaggccggctggagggcagtgggattgcgccgtgctggatgaggtctgtttgcccctccacatctactctccacccggttcctgccccaggaggctgacctgtatgcatgcagggagcccttctatgcagtccgttcaggccctctcctggggtgctgtccctaggccaccttgactgcaggcacaggtaactttctcaatggatacgaacaccaccccaagtgctccggccagcacagtaaaccctgaattccttttcctgaagttggactccagcaagccttaggatccattctcctcctcctgacacccttagga

SEQ ID NO: 395784 - DNA, 313 bp, Homo sapiens
aaaaagttacaatactaaaatttttaccattagcgaaatgatttttaagttttaaatacatttaagagctgcctaggtagaaatatttgttaaagtaatacgtggttttgtggtcattgactattttaataagccagtatatcaatttaatcaggaacacaattactactttttcatggttctcctttcacaaatccgaaaagttcttcccagtccacacggtttggacacattttcaagtgttaaaacatattgttcatacaaaacaaacaagctctttagtcacaattttagttgaagactatttgttatt

SEQ ID NO: 395785 - DNA, 103 bp, Homo sapiens
cacgtaagcactgctcagcctctcccggatcagtatcattctgctgttgcagttcccagagaatcagaggtaaatggaggttaagaagctttcccagactcta

SEQ ID NO: 395786 - DNA, 489 bp, Homo sapiens
taagcggcctgcagaaagagctccagccgggtagtcaggagacctttgccagcccgatccgtccaaggtttctgtgaccttggaaggcaaatagctctatgggccagcgtcagcctctgcgtctgcagagaggagtgcttcacaggtcatgcttggggctttcaggaagcatgtaatagatatgcaaaggcattgctgttggtgaaacatccgtggaacaccaggcaacaaaccactaaaagcagcatttttcttgctccgatcctttaaaatatcgatggagataaactgatgctgctatttgtgttttccttgactatttccttacgaagccctgcagtcaccgaatgctcactcaaccttccttcaaaagtgattcaacgtgtggcctgagaagcggcagcatcagcctcacctgggcgttggtgagaacggcagcatcttggcctctcctgctgaatcagagcgcgctgcttaacacgctcccgg

SEQ ID NO: 395787 - DNA, 493 bp, Homo sapiens
ctgtataatcacagtatgcgttaatcttctaagatattaaatatttgttctcatcacagctaaaatgcaatgcaaatcccatctcagatgtgggtcagatacctatgaatctcctgaggtagtcattgaaatgacttttttttttcttgagacagagtgtcactctcaaccatgctgaagtgcagtggcgctaccccggctcacggcaacctccacctcccagattcaagcaatctgcctgccttggcctcccaaagtgctgggatcacagacatgagccaccaaacccaacctcccaaagtttcttaaccctaactgaatcacttgggagattttaaaacatacagatgctggggtgctacccctaactcaattctgaggatgggacctggacatcagcattttgaaatttttccctgagtggctctgatgtaagactcactactgagaagcagtgttctagactgatgcatcttacattttaatttgcata

SEQ ID NO: 395788 - DNA, 2534 bp, Homo sapiens
atggggcagccgagagagttctggcatctcaggtcccaggttccagttccaacctgccacctgctcaccgtgcagccttggtgcctgcttcctcaccccaccccagctggagggcgtgagcgcaggcacagtgcttcctccctgcttgcggctctgtgcctgaggaaggcggttctgcggccccatcctgctgtcctgcctggagttggagggtgtgtggtcctttcctctgggcggatgaaggctcccttgaggggcggcctggctctggggacagggccagctcccacgaagctgcagcttctccatgactggcagagcgagcctgggccgagtggctggcagcaaggcccttctccgcctctcttcccggcaggcacttccctcgtccagcacctgatgaccgtcctcatccgcaaacacagccagctcttcacggcaccggtcccggaagggcccacctccccgcgcgggggcctgcaatgcgcagtggggtggggctccgaggaggtcaccagggacagccaaggagagcccggcggccccggcctgcccgcgcacaggacctcttccctggacggggcggccgtggcggtgctctccagaacagcccccacggggccggggagccggtgcagccctgggaagaaggtgcagaccctgcccagttggaagtcctccttccggcagccgaggtccctatcgggaagcccgaaggggggcggctcatccctggaggtgcccatcatctcctccggcgggaactggcttatgaacgggctgtcctccctgcgcggacaccgccgggcctcgtcgggagaccggctcaaggactcgggctccgtgcagagactctccacctacgacaatgtgcccgcgccgggcctggtccccggcatacccagcgtggccagtatggcgtggtccggggcctcgtccagcgagtcgtcggtggggggctcactcagcagctgcacggcctgccgcgccagcgactcgtctgcccgcagttccctgcacaccgactgggccctggagccctccccgctccccagcagcagcgaggaccccaagtccctggacctggaccacagcatggacgaggcgggcgcgggtgccagcaacagcgagcccagcgagccggacagccccacccgggaacacgcgcgccgctccgaggccttacaggggctggtcactgagctcagggccgagctgtgccgccagcggactgagtacgagaggagtgtgaaaagaatcgaagaagggagtgctgacctgagaaaacgaatgtcccggttagaagaagaactggaccaggaaaagaaaaaatacatcatgctggaaataaagctgcggaactctgaacgggcgcgggaggatgcggagaggaggaaccagctgttgcagagggaaatggaggagtttttttcgaccctaggaagcttgactgttggggcaaaaggtgccagggccccaaagtaaaaggaatggcagagctcacttctgtaccacgtctgctggtctccagccttgtatggagttagaagcgtctgtatctctggagcagccaggcgctctggagccagctggagagagagagatcctgatacctctgtggggactgtggggacttttgggaccccacacactccaggtgggatcagatgctgctccaaccatgcagttcctggtgagggtcagaaggggacggtaccaagagtagcgcttagcccttacccaggaaatatccttcatggccacagaaatggagggcgcccaggatccaggcagccaccgggaacagtcagctttctttattaaatgtgctcacaaagcaaaaaaacaaacaaaacaaacacacacaaaacaaaacaaaaacaaaaacatacaaaaaaacacacacaaaactacaaaaaaaaaaaaaataactaacgacacaaacacaccgcgcaacgcgccgtcgacggtgcgaacgcgccagaccagagcccgcgagacagacaggcgggaggacccccaggccgcagcgagagcggtgagcgtcgtccgccgcgagctctggagacgggaaggcgcgcacgcgccggaccgcaggagcgggcggcggcagcgcgatgtgagcgcaacaacatgactagcacaacgagactgacaataggaactcctgacctgctcgacacgttgaacgtcggcactacaagagaccgtgtagccactctagcgacccacccactatcgtacccgtgagtgtgggccagcgggggtggtcaggagtagtcggtattcggcccagcggtgcgtcctgctgtcgtggaagttcgtagctgagaaggaagtgagcctacgacgggcgagagcggggggtggtggctcgtggtgtgccgccagggcgcgttgcttgcggcagctggcggccgcgcacgaggttgggcgctgtggtccaagagcgcggtcgggtggtggaccgtgcccgagtgcgcggctataggcgcccatcgagttgtcggaaccgtggtcgccgggtccccttg

SEQ ID NO: 395789 - DNA, 1840 bp, Homo sapiens
atggggcagccgagagagttctggcatctcaggtcccaggttccagttccaacctgccacctgctcaccgtgcagccttggtgcctgcttcctcaccccaccccagctggagggcgtgagcgcaggcacagtgcttcctccctgcttgcggctctgtgcctgaggaaggcggttctgcggccccatcctgctgtcctgcctggagttggagggtgtgtggtcctttcctctgggcggatgaaggctcccttgaggggcggcctggctctggggacagggccagctcccacgaagctgcagcttctccatgactggcagagcgagcctgggccgagtggctggcagcaaggcccttctccgcctctcttcccggcaggcacttccctcgtccagcacctgatgaccgtcctcatccgcaaacacagccagctcttcacggcaccggtcccggaagggcccacctccccgcgcgggggcctgcaatgcgcagtggggtggggctccgaggaggtcaccagggacagccaaggagagcccggcggccccggcctgcccgcgcacaggacctcttccctggacggggcggccgtggcggtgctctccagaacagcccccacggggccggggagccggtgcagccctgggaagaaggtgcagaccctgcccagttggaagtcctccttccggcagccgaggtccctatcgggaagcccgaaggggggcggctcatccctggaggtgcccatcatctcctccggcgggaactggcttatgaacgggctgtcctccctgcgcggacaccgccgggcctcgtcgggagaccggctcaaggactcgggctccgtgcagagactctccacctacgacaatgtgcccgcgccgggcctggtccccggcatacccagcgtggccagtatggcgtggtccggggcctcgtccagcgagtcgtcggtggggggctcactcagcagctgcacggcctgccgcgccagcgactcgtctgcccgcagttccctgcacaccgactgggccctggagccctccccgctccccagcagcagcgaggaccccaagtccctggacctggaccacagcatggacgaggcgggcgcgggtgccagcaacagcgagcccagcgagccggacagccccacccgggaacacgcgcgccgctccgaggccttacaggggctggtcactgagctcagggccgagctgtgccgccagcggactgagtacgagaggagtgtgaaaagaatcgaagaagggagtgctgacctgagaaaacgaatgtcccggttagaagaagaactggaccaggaaaagaaaaaatacatcatgctggaaataaagctgcggaactctgaacgggcgcgggaggatgcggagaggaggaaccagctgttgcagagggaaatggaggagtttttttcgaccctaggaagcttgactgttggggcaaaaggtgccagggccccaaagtaaaaggaatggcagagctcacttctgtaccacgtctgctggtctccagccttgtatggagttagaagcgtctgtatctctggagcagccaggcgctctggagccagctggagagagagagatcctgatacctctgtggggactgtggggacttttgggaccccacacactccaggtgggatcagatgctgctccaaccatgcagttcctggtgagggtcagaaggggacggtaccaagagtagcgcttagcccttacccaggaaatatccttcatggccacagaaatggagggcgcccaggatccaggcagccaccgggaacagtcagctttctttattaaatgtgctcacaaagca

SEQ ID NO: 395790 - DNA, 163 bp, Homo sapiens
  misc_feature (125)..(125): n is a, c, g, or t
agtgctgagattacatgtgtgagccaccacacatggccattatgcatactttgacatgtaaatgaaaaacaggaatgttttagacttcagtcttatttcgtatggccagtatgaaatgtctaatnggagttttactgcttaacaatgaaactgaagactccta

SEQ ID NO: 395791 - DNA, 247 bp, Homo sapiens
tcacctatatcagcctgtactcaacaattatcaccaaactttcaagtagactactatagtttctctacttcctttcactttatgctaagagatctaaacccagctcaattctggctcatcctctaaagagttctagaaaagaggcagctacatccttattaaaaggttgattgtggactagctaaagaaagaatcttaaagagaggcttgctctatgactgcttgttttcctgttagaatgatatct

SEQ ID NO: 395792 - DNA, 401 bp, Homo sapiens
ctgtataaagccctgggctcccaagacaaggaatattcacaatataaatattagacgtttgttttcatttcttctagattacttttcacataccttcagagttagatctatagcatctagctatttgtctacttaattaccgtcattcaagaagaccaaatattacagcccagaataggtccctagcttaatccctagatgataatataactagatcaccagcatcctagatattttcacttcaaaatgtatggaatctacaccttggaggtggctctaggtcaaaaagccagaaccattggatctacttgccctttgtaaagactcatttagattcctaacattaggctaagaactcaggatcctttccattccatatcaatacaaaacaaaaaaaatga

SEQ ID NO: 395793 - DNA, 406 bp, Homo sapiens
caaatagtaacatttcaagaaaatatatacaccttcacagtatgtggtggtatccacttactgtctactgcctccataactcctaaagtcttctgaagatttattaatgctttgaatatatgagccaccgtttcttttcacagccttttcacaactgggaattctttagagaaaggcaatcttacctcatttacttacttcatcagtaatgccattactatgcctacctaagaagaaaatatatcatgtggcagaggactagaaagaaaaaacaacaacaaaaggctgtgaagatttgatcatatgcctacgtgtgtggtgaatacaatatttctttaatcgcaatcaggaatataaatcttattttgatgctatgacataataaagtgcattattttcctgaaat

SEQ ID NO: 395794 - DNA, 116 bp, Homo sapiens
tgcgatcaggctgaatccctgctgaggccacatttccttccctacctccatgcctctatgtggtttactatacctagaatgctgttcactcccttcgcctgactggccttaacacc

SEQ ID NO: 395795 - DNA, 609 bp, Homo sapiens
ttcctgcatttttgtcagtccttttccagtctttagttaggcttattcattaattacattaattatatagaggacctgctccaaccccaaaatatacttaaaatccctatcattatgtgttatatttttaaaatatataactgaaccataatcagaggggccaaacttcaaatattctctaccttaaaaacctgaccaaaactctgtgacaagtcttcaatattgagggctataggtgtttttctttttctttttccaagcagcattgtgaatatattcataaggatttgaattgtgatttcttgataaggaatcaagacattgctgttgttcttgtcatttgaagatttttccatcaagtgtaacatgaacagcaaatgaactattaccctaatcttcacatttccacttgataagttcacatgtgaccattctgatgtgttttatagtataccatcaagaagatccagtaaagaaggttcacagcttcaaaagctttcaaacttttttaatgtctgttagttatgagtgaatttgcccaaattaataaacataactattaaaacacatacatagcaccactaataaaaaagactcgagccgggcgcg

SEQ ID NO: 395796 - DNA, 552 bp, Homo sapiens
aattacaatagtaacataataggtcactgatgagagatcaccataacagatgtaattaataataatgacaaattgtgaaatattacaagaattaccaaaatgtgaaacaaagtgagtacatactgttagaaaaaatggaaccaatagacttgtttaatgcagggttgccacaaaccttcaatttgtaaaaagaacagtatctgtaaaatgctaaaaaaaaaaaaaaaaaaaaataggcaaagcacagtaaaacaaggtatgtctatgtaagaaactgggtgaaattataagaaaggtatctgatttgcatagagcatataattgtcgtatatagaaagaaaaactcttcaaattcctgttgattcaattgtgaacagtataattttttcacattattaaattactcttttagcctgtgactaccttacaattgaatttgataattgggctttgtaatgcatcttattataggctagttatattgcataccatgagaatagaaacatatgttgaaaggagacaaattagaatagacaaaaattattacctatt

SEQ ID NO: 395797 - DNA, 418 bp, Homo sapiens
ccttctagatggaacttctcctatccactcacccaaaaagaaactgaaaggtactcttgactcctcctctcattcctttccacctctaagaaaggcctggcaaatctactttctaaatactgctacaatctactcacttctctccatcccatgtgtgagttccacagtccaagtcatctttaattattttcattcacttcaaaagcctcctccagaaccctcctcacctgcctgctgtaaagcccttactctgtcgcatcccctgattaacttctgtaattgccctcaccaccacctggaattgctttgcgtgttgatggctgtgtctcctcctaaaacaatgcttctgagagaaggagaacatcttgttcctggcttctcaccactatgtccccctagaacagcattcatggtacta

SEQ ID NO: 395798 - DNA, 124 bp, Homo sapiens
agattcagggaatatgctattttattcacagataggctctctgaaatgtttgcctgccagcctgaatccacattaaaggatgtccttaaaatgttgattaataaaattgaagctgctccagtct

SEQ ID NO: 395799 - DNA, 518 bp, Homo sapiens
gaatatgactcataaaaaatatggagttcaaattctaattcaaatgccttttcatatgaattggaattttaataaactagtaaatgttttaataaacattttaataaactagtaaatgtaccatgtaggtagtgttgtgaaaattaagtgaaaaaaccaatgaagtttgtaatacagtccataaccatggtatttacagttgctaaatatttattttctcttatatcctctctttaacactatctcagcagactttgtacctgaggctacataatgacaagaaaaataattagttagaaatgacactatgcaatattaaataattatagtcaatttaggcatgaattatatgcaataaagtagaataaaatgcagatataactattgtgtacttctagtgttaacttctaattctccctgattaagttatgtcaaaatgctgagccaggcatagctgaaggaaatagctttgttatgttcccagttagatcatcttctttcattttctggctcttcat

SEQ ID NO: 395800 - DNA, 476 bp, Homo sapiens
gccgcccagctgtgtgggagccaaacgtggatgtgtcagtggccacgccaggaggtaaaccctcaaccaagggcctctaggtgtccaaggccaagtcttgttcaagaggtgcgttcagctgagccaaccatggcagaaatgcataagggagatcccatggttcctctgtttaaatcctctgctaatccccacccgactcagagacggagccaagtcctcacagcagcctgccacccctgcctgactcggcctcctctcggctctgttctccatacccttctatccctctctgtctcttctcccaccagagaggagatcctgcacatttatcctggtggattcaaacccatctttgccatacagatagtcaccggaatgaacaggtataaagagtccttttgaaaaagaaaaaggcaggccaggcatggtggctcatgcctgtaatcccagcactttgggaggctgaggtgggagaa

SEQ ID NO: 395801 - DNA, 777 bp, Homo sapiens
acttccagttgctatggttacgagttgcaacctccagaaagaattcgtggtttcacccgggaaaacagctccccggattaaacggataggtttacacatactgatccacccagctattcatcttctgtttgctgctttaattgggtgcggttaaaaggccacgtccctaggcgttcaccggctttcttgccatctgctgcatgaaaactgactttgccgaaaaaattaacaaagaagagcgaaaatgacagaccgcaaccgggataagaaaagtacttcaccttcaaattcagacacagaaatgaaatctgaacaactgcctccttgtgtgaaccctggcaatcctgtgttttcatgtatgttggatccaaagacactccagacagccacctcactatcaaaacctcaaatgattatgtataaaaccaattcaagtcattatggtgaatttctacctattccacagtttttcccctgcaattatactccaaaggagcaagtattttcaagccatatcagagcaactggattttatcaaaataacactctaaatactgcacctgacagaaccagaactcttgattttcctaatattcaacacactctatgaaaatatattcctttgtatattgaagagaaaatatactcgggaaaaatgagtgttaaatctaagggtagaatacctaataaagaagataaaaagttttgaatcaatttttaaaataagttaaataaagtatttggcctcgttggcctcagcggtggagctctcggccg

SEQ ID NO: 395802 - DNA, 843 bp, Homo sapiens
acttccagttgctatggttacgagttgcaacctccagaaagaattcgtggtttcacccgggaaaacagctccccggattaaacggataggtttacacatactgatccacccagctattcatcttctgtttgctgctttaattgggtgcggttaaaaggccacgtccctaggcgttcaccggctttcttgccatctgctgcatgaaaactgactttgccgaaaaaattaacaaagaagagcgaaaatgacagaccgcaaccgggataagaaaagtacttcaccttcaaattcagacacagaaatgaaatctgaacaactgcctccttgtgtgaaccctggcaatcctgtgttttcatgtatgttggatccaaagacactccagacagccacctcactatcaaaacctcaaatgattatgtataaaaccaattcaagtcattatggtgaatttctacctattccacagtttttcccctgcaattatactccaaaggagcaagtattttcaagccatatcagagcaactggattttatcaaaataacactctaaatactgcacctgacagaaccagaactcttgattttcctaatattcaacacactctatgaaaatatattcctttgtatattgaagagaaaatatactcgggaaaaatgagtgttaaatctaagggtagaatacctaataaagaagataaaaagttttgaatcaatttttaaaataagttaaataaagtatttcaactgataactacatgacagtgactttttaaatgaaaatatgttcaaaatagcaaaataaaaggtggcctcgttggcctcagcggtggagctctcggccg

SEQ ID NO: 395803 - DNA, 646 bp, Homo sapiens
caggtgtatgtgattttaagggtagtcttcaacgtcaagagaagagaccaccaaacaggctttgtgataagaaaagtacttcaccttcaaattcagacacagaaatgaaatctgaacaactgcctccttgtgtgaaccctggcaatcctgtgttttcatgtatgttggatccaaagacactccagacagccacctcactatcaaaacctcaaatgattatgtataaaaccaattcaagtcattatggtgaatttctacctattccacagtttttcccctgcaattatactccaaaggagcaagtattttcaagccatatcagagcaactggattttatcaaaataacactctaaatactgcacctgacagaaccagaactcttgattttcctaatattcaacacactctatgaaaatatattcctttgtatattgaagagaaaatatactcgggaaaaatgagtgttaaatctaagggtagaatacctaataaagaagataaaaagttttgaatcaatttttaaaataagttaaataaagtatttcaactgataactacatgacagtgactttttaaatgaaaatatgttcaaaatagcaaaataaaaggtggcctcgttggcctcagcggtggagctctcggccg

SEQ ID NO: 395804 - DNA, 391 bp, Homo sapiens
ataacaaagctgcacgtgtaccccctgaacctaaaatataaattaaaaaagaaaaaaatgaatatcaataagatacttagtaaacacacaagtgtttggaaatcaaacaacaaacttctgaataattcacaaagaaacatcaaaataaaacttagaatacattttgaattgaaagataaacatctgaagtgctgaaagaatagagatggctttagtctcgaaacttacatataaaaacattgaaatttcaatcagatggcaattggtatgtgatttgataatctactttaaagtttatacgaaactgagaacccggttaggtgcggtggctcacgcctgtaatcccaggactttgggaatcagaggtgggtgcaacacgaggtcaggagtt

SEQ ID NO: 395805 - DNA, 166 bp, Homo sapiens
attagccatctttaaaatgtgacattttcatgtaagcatcctctaactgctcctccctcaaatacatcagaaacttctctcatatgctgtataatcttctgtgaaatacagttccacaatttgcaatcataaacgctgataattatttgattaatgttgatcttcc

SEQ ID NO: 395806 - DNA, 573 bp, Homo sapiens
aagtcaataaacttttactgaacacttgtcgtgcgctagtcattgtgatagtggcgatgatgaagtgatgtatggttcttcttttcaagaagctttcagtctagtggtgaaagagcacagacatgaatgatacttggaatacaatgggatctcttttacagctgagatactttccaggcaggctgcagggagttggtgccagatagtcctggattcataatccctattgcttctaacaataaaaggatctcaaccagatactcaatctcatccatcatcaatttgcctctctgttagagataaacaatgccacctcataggactgttttgagatgcaatagacatcagaattgatatatgagatttaccagactcatatcatcaaggtgatctgccataacttgcttaaccattgctctgtgcctgatgaaaaaactttgccagagtagtctctctaccactctgaatcccttgtcccttgctcacctcctcaatggcaaccactccccttaacccctgtatatcactccagagatattttaatatttaatatatatgtatatattttttaaa

SEQ ID NO: 395807 - DNA, 794 bp, Homo sapiens
accccgcctttagctagtggccaagattcgcaaagcctcgcggcgaggaaagcacgagtattcaagcgcggctgaggccctccttggctagtgctgggacatggagccccggcagccaaggccaaccttgtgcattccgcccacgtaggcgcctggggccctggtcttcctcgactgcctctccactgcctggaggtcatcaaatgcccctggaccacctcctacgtgccacacgctgtgttggccatccaaggttccatattgagcataaaacagccctctgccctaaaggagttaacctgttggaatcacatacaaaggattctgactaccaagcgccttgaagttaagttgaactctgaagacagattgcctggctacaaagctcagttccactacatatggtccaggaacttaagacaaattattttaatgtctttatgtttcactatccgctgtagtgaaatagaataatacctactcatggcctgacgcggtggctcaagcctgtaatcccagcacttcgggaggctgaggcgggcggatcacctgaagttaggagttcgagaccagcctggtcaacaagacgaaaccccgtctctactacaaatacaaaaaaattagcagggcgtggtggtgcgcatctaatcccaggtactcgggaggctgaagcagaagaatcgcttgaacccaggaggcggaggttgcagttaaccaggatcgcgccattgcactccagcatgggcaacaagagcgagactccgtctcaaaaaaaaaaaaaaaaaaaaaaaagc

SEQ ID NO: 395808 - DNA, 854 bp, Homo sapiens
ttactgactgacttgagatggagttcatcttgtggccaggctggagtgcaatggtgctatctccgctcactgcaacctccacctcccgagttcatgcgattctcctgcctcagcttcccaaagtgctgagattacagacgtgagccaccgcacctggcttttttttgtattttcactagagatggggttcaccattttggccaggccatctcgaactcctgacctcaggtgatccgcccacctcggcctcctgagtagctgggattataggcgcgtgccaccatgcctggctaattttgttgtatttttattagagacagggtttcaccatgttggccaggctggtctggaactcctgacctcaagtgatctgcctgcctcggccttccagagtgttgggattacaggcgtgagccatccgtccggctggaatgctattcttaattgacctgcatttatttatttatttatttatttggcaagccttgaggaagggatttggggaatgaacaatggtacttgatcaaataatccttgtactaggcaatcacagtttctagggccactgtacctggccatgggggttttattgataataatctgtaaggaacaaaagggttagtactatcggaatttttgattagatgtagtgagcattaaggacatatggaaagtagtttgaagtaaaatatatacagtataagagtcagaatcagccaggcgcggtggctcatgtaatcccagcacttcgggaggccgaggtgggcggatcacctgaagtcaggagttcgagatggcctggccaaaatggtgaaaccccatctctagtgaaaatacaaaaaaaagccaggtgc

SEQ ID NO: 395809 - DNA, 648 bp, Homo sapiens
attgtccatttcctgggttcaaatgattctcatgcctcagcctcctgagtagctgggattataggcgcgtgccaccatgcctggctaattttgttgtatttttattagagacagggtttcaccatgttggccaggctggtctggaactcctgacctcaagtgatctgcctgcctcggccttccagagtgttgggattacaggcgtgagccatccgtccggctggaatgctattcttaattgacctgcatttatttatttatttatttatttggcaagccttgaggaagggatttggggaatgaacaatggtacttgatcaaataatccttgtactaggcaatcacagtttctagggccactgtacctggccatgggggttttattgataataatctgtaaggaacaaaagggttagtactatcggaatttttgattagatgtagtgagcattaaggacatatggaaagtagtttgaagtaaaatatatacagtataagagtcagaatcagccaggcgcggtggctcatgtaatcccagcacttcgggaggccgaggtgggcggatcacctgaagtcaggagttcgagatggcctggccaaaatggtgaaaccccatctctagtgaaaatacaaaaaaaagccaggtgc

SEQ ID NO: 395810 - DNA, 539 bp, Homo sapiens
cttttcccctcaaacatgcagtcatgtacaaaaccttacctaaaattttagaggacttctggcccctctgaagccctttgtagggccctggtaaagtaatcctggtatgtaatagagaagtcctgaaccagaatcttgggagaggcatcttttagggagtgaagataggaaaggagccagaaaacggaatggttacagaggcgagggaagagcctggaaaggattaacaggatgtcatgggtgtcagtgctgggagagctggggagatggatcacaagctccctagggacctgaccctaactgacctgcttaaagtcgggacctccttttattatctttgcaactctagtgcctagtccagtgcctggcatacgtttttgttttttggggtttttttttctttttgagcctttataaatcttagaaaatgatctcggggtgacggggtcaaacaccagtttgcaggtgtttaaaggaagcatagttggtttaaaaaagagtggcaggcatgtcgagggaaggaagtttttaccttagaa

SEQ ID NO: 395811 - DNA, 371 bp, Homo sapiens
ggcgctcgggtgccccacattcccaactgctacagacacaaccaaagcctccccatcccttcccccacccctgccggcaatcgcgtacaggagtgagcgtgtgacttcttgtccacatttttgtccacaagtttggcgagtttgcatccgtgtctaataaagaaactaccgtttctcacgcaggcacgttctgaacgcccgagtgcgggagccacgtaagacccggctcagggaccccgggtgaggccagctgcacatgcaggatgcaggtcctcaccactgcctccgctcggctgccagggctcttcctagaagacacgggcctctcctaggctctcctgactgaggccctacccctgcccccgagtcac

SEQ ID NO: 395812 - DNA, 286 bp, Homo sapiens
agggaaggtcacttcatctgcgcagaccatttccaaataaggccccattctgaggtttctgggggcatgaattttgaaaggacagtgtcaccccaggatgcgaggtgacaagccaaccctccggaggtgcttggtggcataggtgaggtctcagtggccctagaagtatttgttccgtaagagcctggcgaaagcttggccaaagcttcccaaacccattcagggctggccgcggccctctcccttcttcttccaacccacattcaccaaactctgactgtggacc

SEQ ID NO: 395813 - DNA, 221 bp, Homo sapiens
tactaatcaagatgaacagaatgcataggatataaagcatactgcatataaagcaatctcccctccttgacatatacatgaatgggcatgggtgtctatgtcttatgaacatgtaatttattaggcagtatgcaaaggggttacattcttattggcagaagaatagacatcctgggagaatacaataatccaaaattagactgatttaaaaaattaatgta

SEQ ID NO: 395814 - DNA, 197 bp, Homo sapiens
gggcagggaagccacattagcctttctgagggccaggattcccaaagtcttctgccagggacaggacagcttctgcttaaaacactttctgcaccctccaaaggccttctggtcacccagaaacatccagctgaggtcagagcaatatcagcactggatccaagaagggatgggctgagtagaagcctctggtccag

SEQ ID NO: 395815 - DNA, 463 bp, Homo sapiens
gggggtccactagctgctgggcactggattacaggtcttcaggggtgtgaggggagcaaagtgggagaaacccaccagcatcaccacccgtgttcctttaggtcagggtgctgggtccagtcctgattccatcttcttacaagttagggagctgggtccaggcctggatccatgttattatgaatcaggaagttgggtccaggcctggctccatgttcctgcaggtcagggcaggtcttcccccgagtgatggctcttggactgtgctcctctggggccctctcaactctgtgtctgtcatctgtcacctgcctggccattatggttttgatggcagtggatgggctccatgggacttcaggcctggggtgagactcaggaccctggggtgagcatggatggggatattggacccctgaaagaagggaagctgagagactttttttcctttaaagacttttcc

SEQ ID NO: 395816 - DNA, 101 bp, Homo sapiens
gggagtcatattttgggagtatgagtggggcggagacaattcaaactcttacagagaacaaaaggcaggttaggggaagggttacttctgcaagtgggttg

SEQ ID NO: 395817 - DNA, 428 bp, Homo sapiens
tgttctccccccaggctgtcagctcgggtgtggtcagtgcctgccctggatccacccctcacccccgctccatcacatcacctctgccctccagctggcccctgggaaagatccagaacactcactcaccgtaaggcgcgggtggctaaggatggctttagtcttcatcgtttccgtcatgcctacttcctgaaagcacataacacgtgcaaaggggcaggtagggagaaacaaaagaattatctaaaaccaagaaagagaatacaaaactatgccaagagccacaaaaaggtaatatggttgtgcatggtggctcatgcctgtaatcccaagactttgggaggctgaggcaggaggatcacttgaggccaagagtttgcaaccagcctgggcaacaaagcaggatcctgtctttattttaaaaatta

SEQ ID NO: 395818 - DNA, 302 bp, Homo sapiens
agccatgcaaaccctagggaacatcttatctgacagttcttgggatccacagtggcttgggtcataatgataatactgtaactgggagagctgatgtatatggagcactcagtatgtgtgaggcaccatagattctctcttcatttaatcttctcatgagaaatacagacgttaaataattttcccagggtcacataagctggtactaggaatgaggcttaaagcagggctctctaagaacaaaagctgtgatgccttagcatcattgacagcagctcccaggtcttactcatcctagtgca

SEQ ID NO: 395819 - DNA, 591 bp, Homo sapiens
ggatttttatgaggagtaaatcgaagcgcagagaggttaaatatccagaagtggaggagctgggattagaacccaggcatcctaatttcagtgcagagaggctggtttaggtggagtcagaactgtgaaatgtcttagagagattccattttatcttggaggtgtttgagttgcctgttgactttttcacatgctttctgcgtattcagcacctctgccttaaaaatctattgcttccagggctcactaggcataggctggtgggtaatcatgggatggtttcaagcaacaaatatttattgagctgtgggtcagtcagcgggcaaatagagaagcataagacatttcactgccctcaacagggaattgacgtaatatattaggttgccattaaaaaaaaaattggcaaagaccacagttacttttgcaccaacctagtaaatgaaattttagtatgattgttctggcagaatgaatttggagcagaggaaactagcagtactgtgattgtgaggtgataaaagtctgacctgttagactggaataaatgggcatatttgagaaatttcaaactttttcccatctgtgaaa

SEQ ID NO: 395820 - DNA, 350 bp, Homo sapiens
ctcaacatcggggtagtctgaatgctcattcgctctctcttcctctcatattgagccattgaagcttaatctgaaagtacctatgcacccaaggaaaatacagggacaaaaatgaacgatggaaaaaatatatggcatctttagaacaaaaatcaatttaaattaaaaccatgtaatattaacacagggaagaaaggagagtgagtagaaaactctttaggtttttggcttgctgcttttaaaattcacattctaatagtgtattgtttcagttattagaatgatatataataaaaattctccattcctctgatatctgattaaattacttcacttcctccttttttttg

SEQ ID NO: 395821 - DNA, 607 bp, Homo sapiens
cttttttttcttttttttttttgcttttcagaaatttggacacagtcatactccatcttgctttcatccactcagtgacttctccagcctaaaagccctgctttcctccagtggttccctgaagtttccagaaccctcttccatcctgcccaccgttcccctagggctctccagtttgcttcttaaaggactcacgcagccattctgtgtggttggacccaggcagggcagagtcctggggcaattaccaccaagatccctacgcaaatatttgctaagtgcccaacatgtgccaggcacttaaaaatgagtaagactctgtacctgccctcagtaaggtcacataattccattcatgcagcctaattaatgattttaacatttgtcttagggtcgtagctcatatggaacttggagtgaattaaagttcacatacattgcagtcaggccacacttatttcttccaacctaagttcagggctttacagaggcccctgttaacttttattatttattattgttttgatttttgccctattcacataaccaacataagaactatggcaagatattgttaaaactacagcagttacatagaaaaaaaaaa

SEQ ID NO: 395822 - DNA, 241 bp, Homo sapiens
cagtttttgtagagatggggtttcaccatgttcccaggctgttcttcaactcctaagctcaagtgatctgccagcttcagcctcccaaagtgctgggattataggcatgagccactgcgcccagccaggaatctgtatttttaatcttaagagagtctcgtatccagtctgggagcatttgggctacatgcccaaaggttaactgacaatcaaataaattaaggttgtacctttttttttt

SEQ ID NO: 395823 - DNA, 331 bp, Homo sapiens
aacctcacttgtgggacaagacttagaaattactactgccctgagacaccatttcttcacgcatcagattggcaaaaacttcaaccgtaagatgacactgggtcgatgagtttttgtgaaaacaggtactactcccagacactgctggggggagtgtaaatgggtagaatccctatggagggtaacttgaagatatctaccaaatttaaatatagacttgccccttgaccccaactcctactttttggaaatttgcccttcagatatacttataaaaaataatatacatataggggttttcatgaccatttcggaggcagttgcaaaagag

SEQ ID NO: 395824 - DNA, 296 bp, Homo sapiens
tgagaactgctgatctaaacaaagatttgatatttgttatttttctgcttataaacctttgatgaccaaggataatatctaaactctttactgtagtacataacggtccttcatcaatttcttacagtctattttcttttcttttcttttttttttttttttttggggggggggtttggccttttgccttgggggacggggggggtttctttttaaaaaaaaaaaagtttgatggaatggagggccttagtttccaaagtttttaagccatttccctaaatagggctaaattttgc

SEQ ID NO: 395825 - DNA, 795 bp, Homo sapiens
accgcctccaccggcggactcgtgagcgcgccgctgccgggaccgctcctgggccttagagaagacgcggataagggccaaggaaagagggaggtagcggttgctgagctccttcggcgcttcggctcctgtagctctgactattcggaccgtcaaggtagaataggaggcggccagttccccgctctaagaagttgcctgcgctctgagagacaggtgccgctgtgttgcctaggatgatctcaaaccactaagctcaagcaatcctcctgcgtcgactttccaaagcgctggaattatgggcgtgagccactgtgcccagactcgttcaaaacaagccatgactcctcagcaaaacagctccatcaagcgtctcgccaacctctcccttggggctcagtcaagggaatgaaaaaacgaggctagacacctgtccccaacggaaaaaccaagaacacacctggagagcagctcagacaaagggagccaggcggggaaaacagtaattggagaggagaccgtgcttccagtctgttgctggtttacaaggtaaatctattcctggacgaaaggggtacaggaacagcacccgaaaaccggcgacaggctgtggcaggcccgacgtctttcaagcccagctcctagcgtcgacgcccctccttccaagacgtttcccagcagggccctgcgcccagtttggatcaagacaatctatgcaggaagaatgaatggggtgattgctggcatcttgaaaagttgaagctgattgaattgaagaatggggattacataccg

SEQ ID NO: 395826 - DNA, 832 bp, Homo sapiens
accgcctccaccggcggactcgtgagcgcgccgctgccgggaccgctcctgggccttagagaagacgcggataagggccaaggaaagagggaggtagcggttgctgagctccttcggcgcttcggctcctgtagctctgactattcggaccgtcaaggtagaataggaggcggccagttccccgctctaagaagttgcctgcgctctgagagacaggtgccgctgtgttgcctaggatgatctcaaaccactaagctcaagcaatcctcctgcgtcgactttccaaagcgctggaattatgggcgtgagccactgtgcccagggttattttaaaagaagaggaagaagaggaggaggaaggaagaaaaggaggaaggaggagaagaaatcatatgtggctcacaaaatttaaaatatttacactcctggctctttgcaggaaaagtttgctagtttgctgacccctgaaaactatatatcacattttgaattttttgtattctgctggtgtattaggtgtaagaaaaagaaccactcaaactattttcagcaaaaatgaatttaatgcagggtatcaggagcttataaaatcattgggaagtctaaaggaatggtcacttagcaggcctccagaaatgattcctagagcaagtctgctggatggtctactgaggagctgccatctctgcaataatcagaaaggcaggcaggcagagacctccagtggagtgttgagttcaaagacatactgctgtacctgtgatccaaggatcaagaggccactgctgcccctgctacttcctctaaacaggcacaggggtaggacctagac

SEQ ID NO: 395827 - DNA, 299 bp, Homo sapiens
tttttaatccaagcagtcgtgtgcttctatactttatcttaaaataaaacatcaactccatcacagcagacgccagcttctctatcctttcatctgaaacaactgggctgggtaaaagaataaaaggtggctcgttaccttagaatgatcacagtgacaccagtccaagcagagagcagagactgcttatgtccagtctccagaactagactgtgagctccttgaaggcagatagtttttgttctatttccttctaatatctcattttctattttctgcgactgcttggattacaagtt

SEQ ID NO: 395828 - DNA, 520 bp, Homo sapiens
aagtccacaaaccagactcaatttcgagttcaaatgacttaatctaggcaagatggtagctcgataaatattaagcacatttctgatttgcaagaagcttccttcaactgtcatctgaaacttaattgaagcaggaatttatattttcagaaaccactatactaaattaattccatggaacacttactactctcagaatttgtcttattacatataaccaaaccgctgaaacattgttcttagaagcctagaatttgaatacaacaacacgaacaacaacaaaaaatatagttttttttcccccagttcctaaatttctgacttcggacaaaatatgacagaacacccacactcattttccctcgatcaattcatcctcgaagtcaactggtattcaccaagtgcctggtatgagccaagcccagttctgaggctgcgtagatgcatttcccacttgtcacggagctcacaccttatgtcaaccaatttgacaaacaaacaaacaaaaaatcaacgtctt

SEQ ID NO: 395829 - DNA, 585 bp, Homo sapiens
ggggagcctccacacatccttccaggcagatctaaaatggctactcttgagacatgagcaaacatttgtcacatgatggagacagcaaggaaaagggctaagtaggggaagcagaaaactactttctcccttgggaaaaaactgagcagaaagccagacgtcttctggttctgactcatctcttgggcatactctgcaaaagctatggcgaagagtcagtgaattagaagattcactcagagtaactttttcctaccctgcaagtacctaccagccctggaggtgcctatatgagtagtacttcttaattggattcactctatgtttaaggtaaatgcttgatgttaataggttagttctagctccctactgggtataactcactgctcttctttctatcattattattattattattaaggcaagggtctcactgtcgcccaggatggagtgcagtggtgcgatcacagcttgctgaagcctctacctcctgggctcaagcgatcttcccacttcagcctcccaagtaactgggactacagggtatgcaccactatgcccagctaatttttatttttttttgta

SEQ ID NO: 395830 - DNA, 251 bp, Homo sapiens
ttaaccaggaaaaacagagtttggctaaaattgagaagtatctcaaattgatttttaaagcctattgagaaacacaagaagaggtatatgtgtgaggttcttctttgaaagagtattatgttttgaattacttttgaaattaaaagaccaataactcatgaaataagcagtgagtatgtagttagaaatataaaagagacttataaaagatggatcgtctatatgacaagtttttgtcatacctccttaga

SEQ ID NO: 395831 - DNA, 374 bp, Homo sapiens
ggtcttgaactcctggactttggcctcccaaagtgtgtgagccaccatgcctagtccatgttgtttttattttgtattacttttttaaattttattattattactttttgagacatggtctcactctgtcaccaaggttagagtgcagtggcagaatcatagctcactgtaacctccccctcttgggttcaagcaattctcctgcctcggcctcccgagtagctggggctacagatgcacaccaccacccctggctgtgttttttattttttgtaaagatggggtttcaccatgttggccaggctggtctcgaactcctggtctcaagccccgccccatgtcttttttttgtttttttggtggtgctggttttt

SEQ ID NO: 395832 - DNA, 464 bp, Homo sapiens
atcatcccaagatctaccactaacactaccattcaatcacctgtgtcgtttccctccaactaggattcctccccatcatctctgcattctgatgcattatcaactctgttcccacaaccccaggccctttgaatagcctttctcttcctcaacactcatccaaacctgggatatccttaaagaagcacaagctcaagttgtacttggccaataaaatcctcgcctattggccaggcatggtggctcacacttgtaatcccagcactttgggaggccaaggcgggtggatcatctgaagtcaggagttcaagactagcctggccaacatggagaaacccactaaaaatacaaaaattagccaggcgtagtggtgggcgcctgtaatcccagttacttggggagctgaggcatgagaattgctggaacctgggaggtggaggttgcagtaagcagagatcgaaatc

SEQ ID NO: 395833 - DNA, 235 bp, Homo sapiens
atcatcccaagatctaccactaacactaccattcaatcacctgtgtcgtttccctccaactaggattcctccccatcatctctgcattctgatgcattatcaactctgttcccacaaccccaggccctttgaatagcctttctcttcctcaacactcatccaaacctgggatagagattaaggatagagagattaaggatagagagattaaggatcgagaggattaaggatagag

SEQ ID NO: 395834 - DNA, 636 bp, Homo sapiens
accactaggccctgacccgactacatacttccgaagtgtcaacaactgctcacctcagggcatctgctgagaacaccactccagttgaaataagtggacaaaaaggaaacaaacttccctaagaagcaggtttcagaagcccccgcaagtccacagtgagaggcaatggaaaccaccctgtgcacagatctcaacgtcactgcccacagactgcagaagctctgctcctaacacagcttccataccactagcacaaaagtgccgggagatgccagaaacaagggcccaaggaagaaacagaaatccacacatggaaaacagaaggaaggcaggccgagtatgtcggctaccgccaggcaaatttataaactctgagggaaggccagagcatctcaggtgccccttcctgagtagagcagtggtatgcacaggtggctcctctctaacccccaaagtacccagattagcctcctgactaatggtgatctctccctgccaagcgttaagtgcaaaggtctgagactccacaaccagcatgaattcaagcggaaaccaaggtgaggctctctccaacttccttccctctctttggtaaatcgaagtactagcggaagtatgtagtcgggtaccgagccg

SEQ ID NO: 395835 - DNA, 271 bp, Homo sapiens
tgaaggttttattctccagaatctgttcaataaaccaatttgatttttataacaaaaaatgtgatacataatttgctcccccattcagtagagattctggacaatggcatcacagaatattggagctagaaagaaacttaaagattactttcatgttattttactgatgagaaaacagatgcccaaagaggaaaaataataactttaaggtcaaaggcaccctgtgggagaggaaaagtaatcaggatggctaacaggccctgtggagaag

SEQ ID NO: 395836 - DNA, 325 bp, Homo sapiens
agaaatgtagacatacgtatacaaaaagctcagaagtacttgtaagatacatttcaaaatgaatatcatcaaggcatatactcatcagaccatccaaagtcaactgaaagacaacactctaaaatcaagagaggtgcatcaaatcacctctgaagaatattccatcagactaacagtggacttctcggcagaaatcttacaagccaaaagggaatagggccctacttgtattcttcttaaaaaaatgaacacccaagaatactgtatccttctaaactaaacttcataaatgaaggagaaataaagtatttcctagacaagcaaa

SEQ ID NO: 395837 - DNA, 487 bp, Homo sapiens
cttctttttcttttttttgagatggagtctcgctctgtcacccaggctggagtgcagtggtgcaatctcggctcactgcaacctccacctcccgggttcaagcaattctcctgcctcagcctccagagtagctgggattacaggtgcccaccaccacacctggctaatttttgtatttttagtagagatgggtttcaccatgttggccaggctggtctcgaactcctgacctcaggtgatccacccacctcggcctcccaaagtattgggattacaggcatgagccaccacgttgaccatgaagttaagcaccttatattctccatagcactcacttcaatctaatttcctgccccaagcttctccatttccccagaatctcttgaaatttggtcaacttttagggtgaattacagcaactccaggaaacatttctcagcactgaaactggtggataaatgcacctacaggacttcaaattcgatga

SEQ ID NO: 395838 - DNA, 599 bp, Homo sapiens
taaattgtgtcccccccaaaaatataacttgaagtcctaatacttcatatctgcaaatgtaaccttattttgaaaagggtttttgcagatgttaaggtgaggtcatactggatagagtaggttagggttcttaattccttataactggttttcttataagaagagggaaatttgtttttgttttgttttgcttatcctggcttgctttaagctttagaagaagagggaaatttggacacagacacacaggtagagtgtcgtataaagacagacacacagacacacagaaggaagacatgcgaagatggaggcagagactggacttgtgctgccacaaaccaagggatgcttggggctaccggaagcttgaagaaacaaggaagggtcctctcctgaagactttggagggatcatggctctgccaacaccttgatttcagacttctagcttctagaaccgagagagaataaattttggttgttttaagccacccagtttatagcagtttcttacagcagccacaggacacttaatccacaagcctttggagtcagtcggcctgcgtttgaatcctgggtttaccttctaatgctgtgatc

SEQ ID NO: 395839 - DNA, 494 bp, Homo sapiens
tgggatttctggtttgttcttgcagttgatctggagctaaaattcataatcggaaatggtattgtattttgaattttagttactgcctgttcattgctctgaagcagtgtttttctccccccaactttttttcctttgtgcttcagattggataattgccatcaatctctcttcaagttcacttagtcttacttcttttgtttccattctgcttttaagcccagtgaattttttatttcacatgctgtgtatctcagtttgatgaaggccaatttatcactctactgcttttaaagtaggctcacaaaatctaacctaagtgaggtttcacctcttggtctgaggctttttttttccattttccaattaataataagttatgagtaaatattatttataataaaagacaaagtctatgccactgctttccattttcaggactacctatggaaacctttgctttccagtctgatgttgacagaccattttaacca

SEQ ID NO: 395840 - DNA, 418 bp, Homo sapiens
tccctatctcattctgcaacagctatcccatcccatctctctattgtttgctgcatggtctcacacatgacatgtgaaaatctgactcaaagttctttatcttgaagctgtgtttatatgttccgtgtgcacataaaactcaactcagttactattcgtccttttccttttagctacgctgtcaaatcaaatgtggtttcaagataggaaggggctgtccagtttctaaatccgccaagacaggcacacttccagcttcattgaaagttggtcttgaattcctggtcactacgtctgctctgagtagtgcagcaaatgttttcaaaagggttcacagtttgcttctcatggaatcaggttatggtagagtccttcagcttagccaattcacagatctttgcagaatgagattaaaaca

SEQ ID NO: 395841 - DNA, 421 bp, Homo sapiens
catgccttcaggcactctagagatcccctggactccctatcagcctagtggaacgttcttaaaatggcgctgcagtctgagactcttcctaaccacttgtcttcttatccccctctcctttctcagggatcagacttgcagtgttgtctgaaggctcttcctgcctgttctttcttcctcttctttatccttcttaggcccaataaatctcctgcacttataatcccatcttgacatctagttctaaaaggacctgaactgacacatgaagaagaactgacacatgaagtagagggaagtatactgttcccaaatatacttccctctattctgtaagaaggattatatatccctgcctattaccatgtgatgtgttcaggccagtgaaatgtgagtagaagtgacatggccgttttaagca

SEQ ID NO: 395842 - DNA, 693 bp, Homo sapiens
gtttcatgcacttcctactgcattctcaccagatgactctgcctcctagagagtcatcaaaagggagctcacttgtagtttccaacagtccacaaacccactcgtacttatatctctgaatataaggaaagaaggcagttgcttattgtttattgcaatgtaaactccaagacaagataggctaccttccttgtctgtttcattagtggctacatccccagggcttagaacagtgccttgttctgccaggcgcggtggctcatgcctgtaatcccagcactttgggaggccaagggaggtgggtcactcaaggtcaggaattcaagaccagcctggccaacatggtgaaaccctgtctctaccaaaaatacaaaaattagccaggtgtggtggcaggtgcctgtaatcccagctgctcaggaagctagggtgggaaaatcacttgaacctgggaggcggaggttgcagtgatccaagatcaagccactgcactccagtctgggcaatagagcaagactctgtcttaatttttaaaaataaaaataaaaaagtccgggtgcagtggctcacgcctgtaatcctagcactttgggaggctgaagtgtgcagatcacaaggtcaggagttcaagaccagcctggctaatatggtgaaaccccgtctctactaaaaatacaaaaattagccaagcat

SEQ ID NO: 395843 - DNA, 440 bp, Homo sapiens
attttccagaatttagatacacaaaatcaagaaacccagtgaatcccagacagaataaataaaaagacatattttagagaaactacagaccagaagagacaaaagaagctctttgaagtaagagagaagagatggactatcttgaaaaaagcaacaattggacttttagctaacttcttaacagcaacaatgcaagccagaagatcttccacatgctgagagacaacaattatcaacctaacaactctgtgctcagggaaaatatcttttgaaaacaaggacaaagtaaggatatttttcagattaaaaagtgaaagagttggccagccatggtggctcatgcctgtaattccagcactttggagggtgaggcgggtggatcacctgaggtcaggagttcaagaccagccaagccaacatggcaaaaccccatctctact

SEQ ID NO: 395844 - DNA, 222 bp, Homo sapiens
ctgcctcccttgggtcacctcatccttttcttaggcaggagttctgtctacctgttgaattttgaatgaaaacccaatggatggaagctctgcactgaattctctattttgttccttgctgagcctccatgaatatgaaataccagcacaaaggggagagtcagcaggtagagatcaacactatccatatttaatggagagggagtctgagttcacaggtgg

SEQ ID NO: 395845 - DNA, 297 bp, Homo sapiens
tcatttttatcattggggtgggagagtgccattaaaatggtctttaacaaagtaggtcaataatttatatttcaagaagggaaatttggggacatggaatgagagcatgttatttgggttagttgaacagctccagaaataattacgtatttttaatgcctattagggacctagaaacctatttggggaggtcaggaaactgggtatgagatctgagtctttgcaggtgctcgatctagaatctccagggagaatgtattttggacataaacaatgagacgtggataagatggatgg

SEQ ID NO: 395846 - DNA, 93 bp, Homo sapiens
ctgcaggagacatttctcaaagacagaatgtccctaccatggttctagaatcctagggtgaatacaaataaattctgggataagccaggcagc

SEQ ID NO: 395847 - DNA, 228 bp, Homo sapiens
ctgacccttcagcccacaaactgaccatcttccccctcgcacctcactccaggcccacgcattgactgccatctctcccctctcctggaagcctctgaagcagccacatccaggccccaccccatgcatgaactcctccacaccagcccaagatgaccaacactgtcttaataacaatgactgccatcgagaacactcaccctggccaattcctttccatatgtgact

SEQ ID NO: 395848 - DNA, 442 bp, Homo sapiens
cttacacctcagtagtacatgaacagcgggaggcacctaatttcttcttaacctacatttcctgttggtaagcaaaaactattttacttaactctagttttataagaatgaagtcaatgagtgtatgacataatatatatgaagatagtccagtgtcagtggaatggatttgcaagatcttcaaccatgatgtcttagttgtcagtggctaagaataaagcaaagataatatatttgtcaggtattcaaactccattcctgttctcattagcctcagatcctctaagctgatgagctaatctggttctgtgattgctttatctttcaatagtagattgtttttcgtgtttttttttagttgggggtgtctagtaattttgggttgaatgctgaacgttgcatatattaagtagaacagtactactgaggtgtaagcgggtac

SEQ ID NO: 395849 - DNA, 932 bp, Homo sapiens
tgagtatctagaatccttgtcttagatgaattgattacgacatttaaaataaacctcagaagtcagtgattaaacttttactcttgatgatttccagagccctatagtacttctaaggggtctattaaacaaaggattagtagttttgtttttttaccatttaacaaaaacaaggtagatattaaatggagtctatgagaagccagcctgaaaaagcaggtatgcataaatattgaaaagggaaaccctaaatttatttacctcaggaaattgcttttaaagccgtgggaccagcaagactcttagtaactcctaccctgtacccagaatcttgatttagggagtttaaacctcagttttagctcatttggttatgaaagatacctttttaaaatttaatctagtaactagaagaaactaaataattggttcaacaccaagaggctatgcaaccaaaactgagagacaaaattgaattgaaaaatgttaaccaactctgaagtatttatgacagctggaattccgggcagttcttttctccttgttctgcaaatcatttggcacttgctcactgacttggcaaatgaggaaaaaatattttaggaaggcagtatgtgctggggtaggtctagagacactttacatgctatcatatacctagaagagacttttctggaggaatttctccactagaaagtatgcttttataattgattgtaatctgacttctctgtttttagaaacagataaatttgccactggatgttcagtttttatttctggcttatctgtttcatggttttttcttttgttttccctctcctgcaaggaaagtatctatccagagagtttgagaaaccatgcctttaaattaactaactgctgagttctacagaattggagaaaattgattatttccttgtatttcacag

SEQ ID NO: 395850 - DNA, 513 bp, Homo sapiens
gtccccctgtaccccgggcccaaggggccccccccattgggcccccccccccccccccggggaaccggcccaaatttttttcccccaaaaaaaaaaaaaaaaaaaaaaaggaaagaaaagatataaacatctgactatctagcataattattattgaaaaattatgcatttcagtgcataatattctcttgtaaatgaatttatttctcatttatattagaatttgggcagaggcaatccttcctacccgatacgtgtggccacttaccatatagggcatttggtctacctccgtgtgttcccagtgactgcagatgacatcattcagtagagaagcatcgtgctgctcttagtttataggcagtgagtaccctacagattagaccacctcataatgagttcttgattgcacttcagattgtcttgatggggcaccagatgaggtccctttgtatgaaatggccagatactgaacatgttctcaagtgtttacagtaatattaagactattcc

SEQ ID NO: 395851 - DNA, 416 bp, Homo sapiens
tggggaaaaactgctctactaaagcaaatcctagacattatgtaattccacctgtaaatactattggatatcattctaataggtaatgatggtatcatggttgtgtctttaagaatattaaccataattccttagtattatctgatattaaggagttcattgctggtcgttgctactgagttatcactggttctaggccataatagtgaacaaacagcaattggaaataaaacctggcaatcttaaaactgagttggaaaaaccagtttcatgtattttttaggggaaaaatgcatacttttaaattttatacctatatgccgtttctcttataccaaaaatcttggttcttatatatgtcattggataaacttactgctaatagcaattaaatgttggtattttgaagttataaa

SEQ ID NO: 395852 - DNA, 962 bp, Homo sapiens
cttcatttttaaattgtttttaaaagatgaagccaagccaggcccactgtgtggaaggcaaggcacatgaagaccagcaccccgactctctccaagccagccccactgtgtggaaggcaaggcacatgaagaccagcaccccactctctccttgcatcagctgacaagttctcactgagggcttttatgttccatgttccaggagctgaggggagaatcaaaggaggttacagagaaacacagacgttgttcttggccttacaggactgaaggcagtattgggagaaaggacatgcatatatattaaaaccaaataactcaaggcagaaaaatctgccaacatttgggagtactgtgttttaactttcaaattttataagggatcaggtagcctcttaaacaaagactcctcctgactacggtggagacccacatgctcaacacaagtggccctctctagtgactttaatgaatgatacctgcagacccaggggtccatatccagcactcgtgaatgaatgaacaaggacaatggctgtgtcagtagaattaacagtctgggctggcaaagcccttatgcttctcatggtaggcacaaggatgggggttgtgtttgcctctttttttctcctgcatcatcagaagacagatggccttagactgcctgtctgtgtctcttcaggcacctttgggaaggtgggaaggatgggtaaaggtacttagcacgtattcaacccatgcaaggcctgggttaaaaggaaagctagagtcaccacagcatgagggtgaacataaatactccttctactgggcagagtgtgctatgctagcagaagagaagtagataatgtccaaaggctcagggtcaggctccttgatacaactacactgatgtgtgatgtgtgttgggtgcagagggaaaaaaacttgctaatgccttagtagtcctcctccctaggtga

SEQ ID NO: 395853 - DNA, 509 bp, Homo sapiens
tcatattaagttgttggtttttgtttgtttgtttcccactcataatatgtcctgttttctaaaaactttttaggttcaggcagttgaccatttatgtgaaaaatgtctgaaaaatttgaccctgataaggtggatgcctcttgtgagatcacagaagcccttaacctggaagaggcgtgtaaaccaagaggtttcaatatatgtaacaattgaaatttaagcatatttaaatgttatctactcaaatatttattgagtcctactatatgccaggcactgtagtaggcacatgttgagcaaacaaaaattcctgttctcatggggcttacattctagcagagaaaacaaaacacaacacaagtacaatgcataggatgttggatggtggcacgtgttgtggtataaaataagtcagagaaaggagtcagttttaaataggaaggttatagaagcctcactgagaaggtggcatttgagcaaggactcaggtggtgtggatagtaccaagc

SEQ ID NO: 395854 - DNA, 232 bp, Homo sapiens
ttttcaggagttaaaatgagcttggaataaaaagtaataggacctaatttcttacatgactgaagaagttggctctaagagccttgccccatctaaaggtcaaaaatattttgagaaatgccagcattgtttgaataaatgcccagtctctaaaggtggcaactttgaagggcagcatattcatttgatagacagtgttaaatagtctcctcactttatcatcgctcacctg

SEQ ID NO: 395855 - DNA, 483 bp, Homo sapiens
tgctgggattacaggcatgagccaccgcacccagatccagaaactcaggctttattccagaccttctgacacagactgcattaacaagatcttcagtttattgtagacattacaatttgagcagtaccttctaactcaatgtgacttttccatctgaaaagtttacacaactctttctgtatgatgtaaatataccactcaaaaatgtacatgttagtgttcatgtcttcatcatctggaaaagtatcatataaatactgatattttggatcttatgccaatctcttttctcagagttagagtatattttcacagagtagagaatatttctgtgttgaaggttattagataatttcagtcacccctataagtaagacccaattatatttactcttatttcaccttgagtgaaacttaaaattctgcccaggggcacttggtaaatatgtgtgtttgtttgtgtttttcagggagcgttgacat

SEQ ID NO: 395856 - DNA, 235 bp, Homo sapiens
atgatttgttcatgtaatatttttacttatcaataagtttgctgttattagcgacatttaaaatacaaatttcttcattcactgaaaggtgagtgtgtgtatttttaataataaaacaaagtagagtttgaactgtaagacaaactgggaaaagttccatttggttatactatactatattaccatgctaatactttttccaaagagaggaaatcagtacagaagtatatgtgac

SEQ ID NO: 395857 - DNA, 278 bp, Homo sapiens
tgcattctacacctgtgagagaagatcccagctgtttcccagcttaaatttagcagggaggtaaatggaccctctgtgggtttagataaggtgtatggtcaagcagatgttgtttttccttttataacttgccaccgaccttctcattaggggctggaataaagtcatgagattatagtcttatgttgctaagaaggggaaacataacaaatctactagcattaatttatataccacgttgactcaataaaaatctttgtagatcttgaaccttaatc

SEQ ID NO: 395858 - DNA, 486 bp, Homo sapiens
agatagtcttcctaaaacattactctttttctaactgtgaccttttatgatttcagttacctacaggacctcattagcctgttgctcaaacctttcttcccctgtctcctatctccctattatgaacactttgccccagctagactgcctgtatgctacacacatgtccccatttttatccccagaacccagactctggctgttcccacattcattctattctttcttcaaactggaaatgccttttctattaaaatcctcccttccgacctgggcaacgtggtgaaaaccatctctacaaaaaaatacagaaattagcccaggtgtagtgttgtgaacctgtagtcccagctatctgggaggctgaggtgagaggatcacctgagcctgggaagttgaggctgcagtgagccatgatcatacctggctaatttttttgtatcactgcactccaaactgggtgagagtgaaaccctttcccccaca

SEQ ID NO: 395859 - DNA, 468 bp, Homo sapiens
ggtgctttttgcttttcttttcacttcccacatctcaagcacctgctgtgggtcagctctgtgcaggggtacaaagatgatcgatgtggcagtgtacaaaacagtcagaatccactgtggtggctgtaccagcagtattcacatagtgcagtaggaacatggaagcgggggcaggcagggccagggaaccctcagggtgatctagacccaggggacaacatgatcaaaagtatggaaatgtaaggctgtgatgtgatggggcataccaactgtttagcgcagaggtcacctgtaatcccagcacttagggagcagaggccagaggatagctagagcccaggagtttgagatctgctcaggcaatacagcgagccccctttctccacaaaaaggggaaaaaaaagacaaaaaaacccaagtgtagagcagaggtcagcaaaccggcttgcatgccaaatccagcctgct

SEQ ID NO: 395860 - DNA, 267 bp, Homo sapiens
tagttgtgtgagaacaaattaccgagcccctcttagcctgttttcttatttgaagatagtaactacctcagcgatattgtaaagattaatgagagaatgtatgtgatgcggtttttacagtttagtaactcaatgtaattggagacttatgtatcatttgctatgtggcacacactattttaaggtctttgtatatattaactcattcaatcctcacaataatcctacaaagtaggtaacctcatcatacggtagagggaaatgaag

SEQ ID NO: 395861 - DNA, 520 bp, Homo sapiens
agatggggcctttttcagttattatgaacttcttttaaaggatttaatttttccgtacttaagcacaaaggtttaaatcattaacgcctgaaattcaaaaattagattcactctacatcagtatgattttacccttttactgggtgtatgtgctgaaatttgtggattagatgtaatgttaactgtctggagaaagagtaggaacttgatttctctttgacatttgcaggaaaagaatatatatgattttgagactccaaattgaattaacaaaatcaatctagtaggtggtaagataacctaaaataacatagactcaaggtaaaaagcctaatgtagataaatgtcacattgcttggaggaatacttaaaaattccagtttaatcatcctatgctttttgataggagttcatgtacaacatattttaatagatgttcacaaaatttctgtattatttatatcttaattccactattggcactaattgtaggatattggggaaaaatattccttagttc

SEQ ID NO: 395862 - DNA, 510 bp, Homo sapiens
gcccagccacctgagttgcttatttctacagtaaggcatgtaatgaggcttggcagacagtgagaaaatgcataggagaaaccaaacatagccctggctgtggttatgaggttagggcttaaaggcactataatgtcctgatacagaagtgactcttggactgcaacagctctgtctgagatttccaaagctcaacgatactggtgtggaaaaggtgccttcttctttttgcttttgtgctcaaggtgttgctgctgccagcttgttgcctacctcttttcttagcagctgcggcatttcctgaaagaccatgcatgactaagttttaattctgtattcctgagggaaagcagccctgactccttctcagtttccattttgatctatttctctttattccttttagggcttgcatgtgaccattggacctaaactctgtccatcctggtcttttctcccaatggctaattttttgctctaatccctatcccccttttaaaagatgcctct

SEQ ID NO: 395863 - DNA, 462 bp, Homo sapiens
gctgtctccagtgctgaggagagacattttaattaattatagtcccatgggctcggggatcaatagcagtgaagagccgtggaatgaattccagcctctgtgctgtttccagctctccctgtgaccttgtaccagtcgctcaagctctctgggccttggtttcctcttctctagaatgggaatattcatttcacaggcataatgagaatcttcaaaaaggtatggcgatcaaagtgttgtaaaatgtagagtgctaaccacaagtaagttattattaaggtggtatttatattcccaaagggtaagcatgagtggtgtttctcttctgagccatttctagaaccttcttgctttttgttaatacgttaaaaccacctggcagcttccattttcctttctgagtctgagaagcaagcagcccagacagaattggggggagagggtgtagatgggaagaagttc

SEQ ID NO: 395864 - DNA, 787 bp, Homo sapiens
gtcagagacacaaagtcatcggggaaatgtgacagaagtgatgatataccagttctgggcctacacttcaaaaagaactggcagtttctgtttccttcctctgggaatgtttgccctgaaccactgcataagccatcaggtcctactgcagacctcactggaaaaggagaggtcgtgagactacacagtaaccaagaaaaaaggcccagctgttccagatcacagtggagcaagcagatgacaccggcccccattagcccagaaccacaactgcccacctgaacaaatcctcaaataccagcagttgttttaagccattaaatctgagtggttcggtgcactttcctatgagggagaaggggacttctggaattcttcatgaaacagtccggaggtgagtggagctgggaaataacttgaaccagaaaaggaaagctccttcgtggtgacagtccccactacccttcttatcttctggatgaggtattaccttcagatccaggaaactaacaggaggaccaatccgaggaagctctgggaaggtgaaagctgagaaatgtgtaaggtgtcgtatttctgcactgatccctgataggattcttacctttgaacagttgctttgaatggagtacatgctaagcagatactttgaatctataagtatgtatatgattaggacctaaaggggttgtcttagtccctttagtgttcctataaaggaatacatgacactgggtaactgacaaagaaaagaaattcacttggctcatgattccgccggctggaa

SEQ ID NO: 395865 - DNA, 530 bp, Homo sapiens
gtgcagaacctgaacccagacaacccctgggtatgagtccggccccagatcacagctgtggttttggctgccgcagtgaccttggcaaagtcctgagtcgtttgctgttgtgggtatgatggacagctgcgacgttttcctggactcccactgaaatctttaacttcaagatcatcttctccatcccaacagaactcatcaggcccagaaggctcccagccccagaggttcccagagctcttcaggtggaatgttgagtctgcacaagccaggatggtgactctggagaagttctccagaaaagaatcagcatctagagtctcctgagttccaggcccttagaaatttagactccagaaccactgccaaagtgaccccctcagcccagcccttcggtacccagcatccactgtcctcagcccagcccttccgtacccagcatccactgtcctggtgggagtccgctgtgctgctccaagaagacagaccctcaccattaccggaaagactgaccctcctgtgtccaggtc

SEQ ID NO: 395866 - DNA, 432 bp, Homo sapiens
aaagtctttagaatgcctaatgggagattagaaatgttgttcctgttcccacaagtttgagttatatcacctctactgaattaaaaaaaacccatggtacccactttgagatatgaaaacactggagccagccgggcacggtggctcacacctgtaatcccagcactttgggaggccaaggcaggcagatcacttgaggtcaggagttcaaaaccagcctggccaacatggcgaaaccccatctctactaaaaatacaaaaattagccgggcatggtgccgtgtgcctgtaatcccagctactcgggagactgaggcaggagaatcacttgaacccgggaggtggaggttgcagtgagccgagatcgtgccactgcactccagcctgggtgaccgagtaagactccatctcaaataaataaataaataaata

SEQ ID NO: 395867 - DNA, 263 bp, Homo sapiens
aggaaagtgatcacccctggggtggcacaacttagactagaacaaacccccatcctgatcctaacggcccccaggctgcatccgttatgcgacactcacgtgtgcacactctacaaatggaaaacccaaagcttctatttgtctaggtcagtggtcaaggacccctttaagaacttgtgagaggtggtgaacgccttgcataccacgttagggggctcgcagagactctgcagtgcggtccatggacttttaggagtcccctg

SEQ ID NO: 395868 - DNA, 150 bp, Homo sapiens
atggagtataggtagtaggtggaaaagagactgttgccatgagttgcttttggtatgaaccttagaagattgtcaaggcatggtaagagggcatgattatttctgtcctttgtgtagtctttgatgtgcacatcctggaaggtgtattca

SEQ ID NO: 395869 - DNA, 339 bp, Homo sapiens
gcgcctggccggtgtttgccattttttcttaacccattaactcttggctacaagaggacagaagtctgttagtgaaaactcaacaaatgacagccattactgtcatcatctgttgctactgtggtacttcatgctttgaatgaagtagatcttcagtaactattagctcctttcttctctttcggctcccttcattacagcaagtccgactcaactactactgcaaaaaattaggtcaaagacatgttataatggctgccaaggaaatggggtataattgataggagctatagaagaaggaagagcacaaatttcagaggaaaacacatcctgttaccg

SEQ ID NO: 395870 - DNA, 599 bp, Homo sapiens
cctggcgcaagctgactgtactgcccccatctctgctcactgcaacctccctgcctcattctcctgcctccgcctgccgagtgcctgcaattgcaggcgcgcgccgcgatgcctgactggttttcatattttttttggtggagatggggtttcaccatgttggccaggctggtctcaaactcctgacctcaggtgatccacccgcctcggcctcccaaagtgctgggattacagacaggcatgagccgccgtgcccggccataagcatgtaaagttttaaagaaaagcagcttttatctctcctggttagtgtgttttttaaacagcttttttgaagtataattgacatttaataaactgtatatatttaaagtgtgcaatttgataagttatgacatttgtatacactggcgaaaccataaccacactcaagatagtgaacatatccatcacccccaagagtttcctcatacctttttgtaatctctgcttcccaccgcatctcactctatcccttctcagtcaaacactgattggctttctttcactgttgatcagtttacattttctaaagttttatatgtatttagacagtatgt

SEQ ID NO: 395871 - DNA, 298 bp, Homo sapiens
tgcttgcttttggctggaaacacccgttaggatcagagatagggatattaaagtggatgttctttatatagaaatgacaccaaaaggcaggcttgcagaaagaaaaataatgaatgaagtgaaaggaaatgatgtgggtagaggtaagaactgcagtgcagtgtttaatttcttgatttaggtgtgaagaaacacacgttctgtgataaaatatgtaaattagagaaatatttttcatttgaatctgtaattccactcagagccaaagtttatcacttgtctctctactaatgttagt

SEQ ID NO: 395872 - DNA, 110 bp, Homo sapiens
gttagtctgagggtggggttattatcatcctttctttaaagttaaactctaaactaaattcctcccacgattagcttggtctgtgcccaggaacgagcaaggacagccag

SEQ ID NO: 395873 - DNA, 790 bp, Homo sapiens
tctcaacattacattgaaatgtaaataaataagatgtaaaatagtagagtgtttttggataaactttactattactaatattcaaagaaaatcttgggaaaaagttgtctgagagttaaaagggcactgagtcaacttattttgcaccctttgatggaaaaacttgagaatgtttgggccatgtctcttctctgctgacaagaattaagtcagctgcattgattgtgttctgagaaaaagcccaagaaagctcatgtatttggtttctaatttcagtgttaaattatttcaattttgctcttagatgcttcccataatcctggcacattaaaagatgcttcgtttttatttaacaagactagtaggtttgggacacctttaaatcctcacttcagagactaccaaagaaatattctttgactcagatatttaggtggaagtcagctctctgttagtgactaaatatcatgcctgttgtggtgctgctgatgggcaaatcagggagccattcattcttgccaggggagataaatgctgttagattgctcttttttgaaggaggtcagaaaaagctttgattgactgtgaatgactgtagataaaacctaaagtatatgctttgccattatcagcccaccagccttctaagcttcaaaaaattaaaaatagtgatcccttagtaactcagtctgtgggtatttaggagccagatggagaccatatgcccatacatattcctttttatctgctgtggtgggacagtgatggtccctcttcaattaaaaaaaaa

SEQ ID NO: 395874 - DNA, 363 bp, Homo sapiens
gggattacgggtgtgagccactgcgcccggccacattttatagccaaccggcttcttgtgtaacatgagttggggcttcttgggccccagagtccagcactcaggtagaaatatgaccgccatggccagacagcagccctcgctgggcccctcttcagagcagagctctgtgccgagcctttaggggtatgagagaaaccggagacctggtccgtgctctcaaagagctcgcggtgtagctggggagagagcaaggccacatgagacctcagaaggacactaaacggcacaccgacaagctcacagcactctagctgtgtcccgggagaggaaaggggtgaatcagggcaggtggggtcagtc

SEQ ID NO: 395875 - DNA, 379 bp, Homo sapiens
cggagcgagcacagtgctaagagggttcgacatggtccctgactccaggatgtccatcatctcgcgtatcttcgctagacaagacaagctattattcgacccacataatccagcactcaggtagaaatatgaccgccatggccagacagcagccctcgctgggcccctcttcagagcagagctctgtgccgagcctttaggggtatgagagaaaccggagacctggtccgtgctctcaaagagctcgcggtgtagctggggagagagcaaggccacatgagacctcagaaggacactaaacggcacaccgacaagctcacagcactctagctgtgtcccgggagaggaaaggggtgaatcagggcaggtggggtcagtc

SEQ ID NO: 395876 - DNA, 350 bp, Homo sapiens
tgtttgcagccaggaaggagttgctagacttcagcagctatgtctcacctgaaaggaccacccatcatccatggacagccaagcccaggaaagaggccctgaccaaacctaccactataaacatcatggaagctctcgctatagaccctggctatagcaagtctatgggggtagatcaggcatcgatatttttgaaagctccccaggtgattctaaaatacatccacataaggcttccgggtgagaaagcacagaacggggattcttgtgagatcattctggaaaggtgaacatgagggaattgatgctgttaagtggctactatgtgccaggcactatgccgggcattt

SEQ ID NO: 395877 - DNA, 393 bp, Homo sapiens
ttttagggaattagaaaatgaaataattgattcagctcataaatgtcctcttaggtgagtgtctctctctcttgctccctccctccctccctcagattagtgaagatttttcatttattgtaaaatttcagttgctgatacagatttttgcctttttgtggtctgttaatactttaattacaactgaatagtgaaataaaaagggagtaggagcagcaccttggaatattttacattttgagctttttttcttttatttctttgtatatgtttatatttcttctatctttttacctcctggtataatttatttctcatcgtaatgagtatggaagatgactgtgatgactacattaaaacctctgtttgttctttttcactctgataactttt

SEQ ID NO: 395878 - DNA, 556 bp, Homo sapiens
gaatagtctcttcctttaattcggtgtatttttgcttcatgcattttggggctgtgttgttaggtacatacactttaattatttttatatcttcttgattaactgacacttttataattataaaatatccttctttgccctaataataatttttatcttaaaatattttgtcaattttgcctggcattaatatagctactccagctcttctggttattgctggtgtatcttttccatccttttatgttccatttatttgtgtctttaaatcttaagtgtctattgtaaatagcatataattgtgctgtgtttaaaaaaatccattctccaaatctcttccttctagtttgacagtttgatccacttactttaatataattactgataagatagaattattttttgctattgtgctatttgttttctatatgtattatgtccattgtattcctcaattccttgattcttgaatgcttttgtgttaaatagatattttatagtgtaacattttaattacctttcatttctcttaaaatatataattttagttatttta

SEQ ID NO: 395879 - DNA, 344 bp, Homo sapiens
tgaactcctggcctcaagtgatctgcccacctcatcctcccaaagtgctgagattacagtcttgagcctgtactggctatcactgtgcctggctgagtttgacagtttgttataatgataaacataacacttaaatataattgtgcagtctgactcttaggtatttaccaaagagaaattaaaatgtggccactcaaagacctgtacatgaacgttcgtatgattacatagctttttatatgatttttccattttggagaaagttctgaggcaggaagagaagctgtaagtgcttgaagggtacactggcattgtacaattagtacttgtccatgacagctgca

SEQ ID NO: 395880 - DNA, 712 bp, Homo sapiens
gagttgggaatttcttatattttcctctcacttcttaaaaccacctttgtgcccctgctttacattaggaaaaatggaaaggtgattaaacacggccgttaggagcctaaaatctaggtcagagtcccgtatgaaagaaatcagataagttgagagagggcgtgtgcaggttggaaatggtggcgtccatctctgctggggcgtcgatgcctcctggctggacaggtggagcctggaaggtagggaggctcggagcatgttcagagaggcagggatgtttttgactgtgggtaacactgcatgctgggaacggaaatgagcactgtgtgcccagcagggctcagactgccatgtggggtccctggagaagaaatcacgctaacactgagtatcaaaaggatgagtggtcctgggttctgctctggcagccctgctaagggcagagtctcccggtggtcctgggtcctgctctgacgccctgctaagggcagagtctcccagcctctcaggagcttcagtccacttaggaaacttgaggtgagctgcagggagcctgtggagaaacgcttctcatttagtggggtgaggtgacacggggtggcggggacagtaagttaagtttgagaaggaagtatgtagaaagtgtatgtgaaatctgtagatttggggcctctactccattgtgaacttaaagaggcagggcgaaagcgag

SEQ ID NO: 395881 - DNA, 483 bp, Homo sapiens
agagcttttgttaatgtggcttctatctgtacatttccatattataaattaaaaatgataaatacatttattatttcatttaaatacaaaatagtaaaccctttacatgttaacgtaaataaaatacttttaagcatataacttttctaaaatgaaaatattttgtgagaaaaatggcatagttttatatttttgtaaatctctttaataattaccctaataaacaaatctactgcacatgcagttcataaaatatgttgctacggatgaagtgtatgaagaaaatctggcctcacagatgtgtagttggaaaagggagaatcattttaatagtctttatagatattatggatattattctttgagactatactaaaacttgacaagtggcagtttcctaaaggttagttgcaatgtgaaatctgaaaccatgtcggtgagctttttgtacgcagctataataaaatctgttggcagtttgta

SEQ ID NO: 395882 - DNA, 741 bp, Homo sapiens
ttcccgctcgcgcctctccctccacacctccctgcaagctgagggagtggactctggccttggccagcccagaaaggggctcccacagtgcagccgtgggctgaagggctcctcaagtgccgccaaagtgggagcccaggcagaggagtcgccgagagcgagcgcgggctgtgaggactgccagcacgctgtcacctctcaataacgcccatcccaacgtttcctgaggaataattttggtcgtgttcctgctactcagcttttcgtggttcctgctcattttcagagtctaacattccagcttttccggaaattctaagtctgcagtggggagaagtggtgaggtggtcacacacattctggtccatgtccctaccaagtttctactcttcttcccacaaggctgcctctgacttgagggttcaagagaagaagaggaaagagatactttgatgtaaaagttttcaaagaaatgctttgggcagaagagactcatggaaactggacactatatctggagccaggaataataggatccgagaaacagtaacaagtataaaacaaagtggtcttgaactcctggcctcaagtaatcctccccactgggcttcccaaagtgctgggactacagagaatcttaacccaaaagaagaatgagccaagaacatgaacagacaattcaaagaaaaggaaatgacctttaaacatatgaaacaatgtccaacttcaggcaataagaga

SEQ ID NO: 395883 - DNA, 362 bp, Homo sapiens
aaatgctgttcattgttcttgtgacatttaccaaaatttctagcaaatagttatatagttaattaattgatatctgtttccctgagagaacataacatctttgagtgataggatcttgaatgtatagtaattagtttatttccatatcctcaagcacaatgtgtagtacatactgagcactccattaatatttgttgaaagctgttatatatgctgaatgatcaattgacatgagttttagttctggattggccaacaatgtgaccttagtcaagtagttaattaatttttaggttctttacaggtcaaaacctttaatctatgagtttaggcgcaaatgaaactgaaaacatgtcactagg

SEQ ID NO: 395884 - DNA, 627 bp, Homo sapiens
tgacctgaagtcaaattccttctggagacatgttctaaaactcaaaatgataatcagtaaggtttcaaagattatgttttatactgataaaatgactttaaaatttcagtacactgagaaaaggtggctagtataatatattgcatattcgtgtaattgtatgacaagagtatcaataaaatttgctgtgcttctatttggttgaacagctttcaataaaccacattggtaaacaagtgcataaaaataaataagtcttatttttatatagtgacattgcatgtcaaacatttaatgttgaaaaataaattttaattttattaattcaaactattcaaagggaaaaatatgcttgatatatcttactatacattagagaagcagaggaaaacgcttattttctaatgatacagggttgaaggcattaattgattattgggaccaccatggctctattcattctcatgtcttgccttttttttccagaaacatgtgcttatatgtttctttcttccacgttctctccttagacaactgaaaaacacttttaaatatcagacatttatcgtctatcttggctcttctttcctcagctatttttgtctctttaaaaatagagtttggtca

SEQ ID NO: 395885 - DNA, 580 bp, Homo sapiens
tcctgacctcaagtgatcagcccacctcaacctcccaaagggctgggattataggtgtaagccactgtgctcagccccaatagaaaatttgaggagtataaaaaagttgtagaaggttttaagactgcgcctgggctgaagtaatatgaagtagtagtcattcatatatacatacatacatatatatgtatatatatgtatacacacacatatatatatttcaaagtattagcctcccgagtagctggggttacaggcatgtgccaccacgcccggctaattttttgtagttttagtagagatggagtttctccatgttggtcaggctggtctcgaactcccgacctcaggtggtctgcctgccttggcctcccaaagtgctgggattacaggtgtgagccaccaggccccagccttaccagtatatttgaaaccttttttttttttttattggagacagagtcttgctctttcgcccaggctggagtgcagtggcacgatctcggctcactgcagcctccacctcttgggttcaagtgattcttctgcctcagcctcctgagtagctgggactacatgc

SEQ ID NO: 395886 - DNA, 292 bp, Homo sapiens
tctggaggatccccaaacgcagagaggagatacattatcaagaaccccaaaatatttgtgttcagaagtgtacgtttttatgtgtgctgtatttcacccctcaaaaataattttttaaaaatgtttaacaactttactattttttttttaacttttaagttcaggggtacatgtatagttttgttacataggtaaacttatgtcatgggggtttgttgtataaattatttcatctctcaggtattaagcctggtacccattagttatttttttctgatcctctctgcgtttg

SEQ ID NO: 395887 - DNA, 557 bp, Homo sapiens
gatcacaaatttaccattacttctattgttaagcatttactgagcataccttattatcccattaagaaaatagagaagaaaagaaacacaggtttccagactaattgggtggatgtggggatgacaatattgcatgattgtgctatgatggagtctcagctttgtgaaggcaagaattcacttctatatattcattatttgatgtggtaaatacctaacatatgaataaatgaatgaaactacattattttaggacagacattctccaagtatgttacctggcccactaccatcagaatcacctgatccttttctagaataccatatatgagacactgttctaattacttttcttaaattaactcattttatcttcactcaactctatgagataggtactattattattaccttcactttacagatgagctaactaaggtccagagtgccaaggtcacacagccagtaagtgacagagctggggatttcaacccagagtcgatgctcaaaacccctacatcatcttgcctctctatatctaaaagtaatgaggcaga

SEQ ID NO: 395888 - DNA, 535 bp, Homo sapiens
taattatttcttaattaagtgggataaagataaatcgctcttttgtggcattaatgtgacctatcttagacattttttttatttctctttaatctcacatggtggctttcaaactttttagttctgctattttctttacaattttattctctttattttaaaacaaaatgttagttggaatgtaccaaaattggaaagcattgtctcactgtctctaattcttctcccattctctttaactgattacaattaggcttgtgctccagatcacaactagtttgatcaaagtcaccagtgacctccatgttcctaaatctagcattaacctgttatcagcatttgactacagttcatcactcccttcttaatggatttctaggactttcttggtttttctcctacctcagtatatgctcctttacattctcctttagtgctttctcttctctctgacatcttaacattacagtgccccagggcttaatcgtaagcctatacctctctcctgagtgccaggctgttatgtccatttatg

SEQ ID NO: 395889 - DNA, 255 bp, Homo sapiens
cctgcccccgactctactgtatgtaaaaaggttttataaaacagcaagtcagggaaccactcagggaacagtggggagaatgtaggacaatcctgagcaccaggcttcaggcaatcaggcacctgcacccagaggaactggaacctaggtggggcttttcgagttgtgtttccaatgtcctttttaccatattgacaaagggaagaatttatgtaggaatacatcatctttaattaaagcatagctataaattat

SEQ ID NO: 395890 - DNA, 229 bp, Homo sapiens
taacttttttagagacaaggtcttcctctgtcgtccaggctggagtgcaatggcatgatcatagctcactgcagccttgaattcctgggctcgtgcaggcctcctgcctcagcttcctgaggactataggcattcaccacaatgtgtgaagtttgtttgcatgaagtttgcagctaattttaggaagcttttttattttttatttttttggagatggagtctcactgtg

SEQ ID NO: 395891 - DNA, 466 bp, Homo sapiens
aataatgggaagctcaagataaatttagaattctacaggccaaaaatcatcttacaataggtacaatttagaacacattgaaacaataaattacaaaaaaaaagacattaagtgagtaaaatttcatgttatggatatgaagttttgttttaaggcagttatgtaaataattcctcgtcaaattatttaatatccataaatatttcataattccattttaacatgtaatgacttctagccccatttaaagatgataagaataaaaataggtgcttatagctaaacagtaaataatttaaaatttagagatattcagttttttcctgtcagagttaattctgtgattctatttattggttttatttgcttgtttattatttatttatttgaggcaggctcttactctgttgccaaggctggagtgcattggcacaatcatggctcactgcaggctcgactttctggg

SEQ ID NO: 395892 - DNA, 600 bp, Homo sapiens
gttgagaaacactggtgtactgcatgggcaaagaggcaagggatttatgagcaatattttttatttatatttttggaaaggaaactccagagagtaaacaaatgtgctgatgacagactatcttagaaacacttccccgggtcaaagtggttccttctgagattttgctcctatgtacacactgcttggtaaactttgcaacttcacggcatatcagaaggaactagactgcatcctcttcctgtctcttcccttggagtagcatttagcttttcattgcggacctgttgttaaaggaagataaactttaccctataccagccattttctccttttatcaagaaaaatcaatttgtatggttcttaaatgtatttccctagtatatattcaaattaaacttgcagttagatttatatcagtgtttactccaaatagtcaaaatatctacaggctaaaaacagttcctatttcgagcattaaaatagcataagccttagtcacttgttcagctctttgattctcataactatttctaaccgtggtagagataagaatccaacaaaacaaaactctttgcaacaacatttaagttttgctat

SEQ ID NO: 395893 - DNA, 396 bp, Homo sapiens
accgggggggcgccgggggcctcccacttattctacacctctcatgtctcttcaccgtgccagactagagtcaagctcaacagggtcttctttccccgctgattccgccaagcccgttcccttggctgtggtttcgctggatagtaggtagggacagtgggaatctcgttcatccattcatgcgcgtcactaattagatgacgaggcatttggctaccttaagagagtcatagttactcccgccgtttacccgcgcttcattgaatttcttcactttgacattcagagcactgggcagaaatcacatcgcgtcaacacccgccgcgggccttcgcgatgctttgttttaattaaacagtcggattcccctggtccgcaccagttctaagtcggctg

SEQ ID NO: 395894 - DNA, 309 bp, Homo sapiens
ggctcacaccagcactttgggaggccaacgcaggcggatcacctgaggttgggagttcaagaccagcctgaccaacatggagaataataataagccgagatcacgccattgtactccagcctgggcagcgagagtgaaactccatctcaaaaagaaagagagaacgagagaaagagagagagagagaaaggaaggaaggaagggaggaaagaaaaagaaagaaagaaagaaagaaagaaagaaagagaaagaaagaaagaaagaaagaaagaaagagaaaagaaagaaagatgtatcctttccctattt

SEQ ID NO: 395895 - DNA, 409 bp, Homo sapiens
agatccaaattaactatctaattgagaaacctttacccaagaacctcaagtattgagccaatgctaaatgagtattcaaaaaagaaaaaaggagtaagccggactttgcgttcccaaataaaatgctgccaagttcacgtgtaacccatagtgctgggcagaaagatatggtaaaattttaatatttacagaggacttttctgctttgatagtcacaattgaaattcaactagaattcttgcatcttaagctttagagttttctttcttccccacaattctaggggcaggtggtgatggtggtagtggtggacgggatataaattgttaaagcaggaaacagtacagaatggcaggataaacagctgatccaggcctgccgacagcagagagagcacgggctcactgac

SEQ ID NO: 395896 - DNA, 508 bp, Homo sapiens
tcagcaggttctactctactcctctatatccaatgagttactgatactacctcctgtttcttacttccttcaaaacatctccttatgttccttctggtccaacagtaagcatcctgatctgaattttcactgccccatacattgaagtactgcatagcttttcatctggctttctggccttcagtttttcccttgcctaatatatcttacacagtgctattaaaacttcctaggatactactttcacaatgtcattcttctacagaaaaattctctgtgactcgtggctgggtgcggtggctcatgcctgtaatgccagcactttgggaggccaatgcgggcggatcacgaggtcaggagatcgagaccatcctggctaacatggtgaaaccccatctctaccaaaaacacaaaaaattagctgcgtgtggtagcggacgcctgtagtcccagctactcgggaggctgaggcaggagaatggcgtgaacccaggaggtgcagcttgca

SEQ ID NO: 395897 - DNA, 445 bp, Homo sapiens
tagtgtggctatgcaataatgtatttatttattcctcctagatggccattgaggttgtttttagaagcacacactgggatgaccattcttgtttacaccactttaaacacgtgtgttttttctagattagatgctttaattcatatagctggatagatgaagagagggaggaaggggtggatgggtggatggatagatggatagaaagctagaactctgatactttattagtagtagcaaatatccatgtacactttgtctaacttgtgaacttatcatactcctagtgctattgtgcacacgcccacgcatgcacgcatgcacacacacacacccctctcccttagcagctggccaggagtccactatgggaaaaagtcagctgagggctatgacattagaaagaaaatgagcagagttatatgagatgaacaggaagaatcat

SEQ ID NO: 395898 - DNA, 188 bp, Homo sapiens
gaaggcgaatgatttgtctttgagtgcaactcagggtcttagacttttttctctttagacttaccagttaggctctaatttaggaaaaataaaacaaaaacttacatgggtttggagtaaaattagctggagtaaaatccaaggctagatttctattgaactagaacctcagctttctgcttataaac

SEQ ID NO: 395899 - DNA, 382 bp, Homo sapiens
ttgagcccagaagtcactggaggagttcaagggtgcccagagtgcaagcaagatccaagaatatccagaactattcctaagccacatcgtgtattattatcaaatggcctgtgaagcagattctcttgctgggacagtttttaagacctctctatactgaattgggacactgcctggaagttgtccaaactctgccttttgaaagaatattgatgactaagaaaacttgccctgaataaactaatgttaggacacaggaaagcaccctcacttcaagtcatgttcattccacaatctcatatttcagatgtcatggttgcaggattggtcgtgttgtgttggagctgagaagaggcagtgcccatcaatcagcagttcctgc

SEQ ID NO: 395900 - DNA, 239 bp, Homo sapiens
gattgagcccaggaggtcaaagctataataagccatgatcatggcaacactgtgctccagagctgtgacagagtgagaccctgtgaaagaaggaaagaaagagagaaagagaaaggagagagagaaagaaattaattgacttcaactcacttactgagcctttaccatatgcctaggactgctaactgttgcgtatgcaaagatgagtgggcactcttggacttagtgttcattaactg

SEQ ID NO: 395901 - DNA, 466 bp, Homo sapiens
acggtggggtctgtgctgaccgtggtgttgtcagaattgagttgttggacacccagttggtgatagaagtttggttggtgttcagcaaactccatatatttggtgttagaataaagatatcagaccaggtgcggtggctcacacctgtaatcctaatactttgggaggccacagagggcagatcgcttgagctcaggggttcgacaccagcctgggcaatagctggtgaaatcttatgtctaccaaaaataaaaaaaaattggcttggcaaggtggtgcatacctgtagtcccagctggggctgaggcaagaggatcacttgaaggctgggatgttgaggctctccagatttatgatgtatcctggagaatgttccatgtgtgtttgagaagaatataagttatactgttgggtgaaatgttacctatatatgtcttttaggtgtagttctttagtgctatgaagt

SEQ ID NO: 395902 - DNA, 498 bp, Homo sapiens
gagaaatagcaccgaggtttggatatgaacaggaaattcacagatgaggaaaccagaatgggcggtaaatacatgaaaaaggccagacatggcggctcacgcctgtaatcccaacactttgggaggccaaggtgggcggatcacttgaggttaggagttcgaaaccagcctggccaaaatagtgaaaccctgtctctacttgaaatacaaaaattagtcaggtgtggtagctgggattataggcatgcaccaccatgcccagttaatttttgtatttttaatagagacggggtgtcaccatgttggcaggctggtccgaaactcctgacctcaagtgatctgcctgcctcggcctccccaaagtgctgggatttcaggtgtgagccaccatgcctggcctctttttcttttttagcttccatttttaaacctttacgttcaggaaaatacattgcatttgtttatagcttgttccttaattctttgtttttcattata

SEQ ID NO: 395903 - DNA, 405 bp, Homo sapiens
gactagaagaatgagtttatgaatgagataggcgagtgatccacatggtcaaaggaaagccagaagaacagggatcatattctacatgtcaattgctggatataaatgatacctaaataatgaatttaaacattttaactcagatattcagtttatggcatggcaaacaactgatttaaaaattgtttataatgctttttttttttttgctcataatgaaaatgatgtaaaaattcctgaactctgtgtgtttttcctgtatatatctaatttacttacaaaactctcatagggaacttttttttaatgttccatttttaaagcctagaataacttcctaaggaaagtgtgaaatattcagacccataatagcttcctagaaagtagttcttactttccatatga

SEQ ID NO: 395904 - DNA, 353 bp, Homo sapiens
ccccgcgggaccccagtgactggttttccgggatcactggtgagggtgggagatgggttcttgctgggtggtcaccgttccagccacatggtgggcgaggcagggggtgggggagaggcctggggctgtgcacctgtctttccacctctctcctctgcatcccaccctccatttcaaatcagggaaggatgaggaaagagtttgtgggtatcaccctcttgctccatgccctggcttctcagaagttccccagtgggggcccctggagtgatggacactgccacctggacctgaaaaaggacacctggtccctggggtgggagccgggctccctctcactgaccttgtggcct

SEQ ID NO: 395905 - DNA, 777 bp, Homo sapiens
aattactaaccagtcttaaccatcttttataaacatatgctcttataaatgtgtgactagatgcaattaaaaataatagggaatgtggtaggtttttaatttgtacatcctcttatttagtgttaccacataaatgatgagtttgtgtggttctgttttccatttttgttctaactgaaaactttttggctgggcacggtgcctcatgcctgtagtcccagcactttgggaggccaaggtgggtggatcacttgagatcaggagtttgagaccagcctggccaacatggtgaaaccctgtctctactaaaagtataaaaaattagccatgtgtggtggcacacgcctgtaatcccagctactcaggaggctgaggcaggagaatcgcttgaacctgggaggcaggggttgcagtgagctgagacggtgtcactgcactccagcctgggtgacagtgagtctttgtctcaaagaaaaaaagaaaaagaaaacttatgcaagtcgagctcctttttaattaagtaggaagggattaggttaagaaagtctctcaacatgacccatctttagcagtatctggggtgcttatttaagtatgcagtcccactaccctaccctagtcctacagaattagaatctgattcaaaataaagtctgaaaaccatgagatagagaattctatgaaatatcttgtacagattttcgtgatatatttatacacgcatgggtttgtagatccctgaaacttagaggtcatttagctaaaatctacattttt

SEQ ID NO: 395906 - DNA, 526 bp, Homo sapiens
cagcgtgtgctgtagactgaggtagtatcttcgagttctgtcattggcacctatcagtggctgagatatcctgggttgaagtctgcaaggtccagcataatgtattatgcatgaaaagacatctcctgttacttcatttttgtaaaagattacctcaatactccttaagggctggatgacagtgtgtgaagtggctgaaacttacatcaaatgctttaataacaggtcagcaaaaaggccaatgggcttaacttttacattccaactggcacagctacaggagtgggctatttgccaaagacatcgaaccaagcctcggagaagtagaaacagctcaaccaggttcattcagcagagaatcgtggttaaaatatattaagcctggattcctcaaattctgttggtaaagttaatcgggatagggtaacacttggcatccttatgctatgactggatctctcatgggaatgagatcttagctttaatttttagaatttaattaaagcttcacaagtataaatataaa

SEQ ID NO: 395907 - DNA, 350 bp, Homo sapiens
tggatccctgggtgaaaaagattttataatattagatgagttgagagaaccaatgtgaattaaagctgactggcttaaaaaaaataaacccatcaaaattagtaagggaataatgttattcattgcctttttttcgttgagttatgaaagctcttcgaagatgaaggttttatgaaactcaagatctctccagaggccgggcacagtggctcacgcctgtaattccagcactttgggaggctgaggtgagcagattgcgagtccagaagtgagcagattgcttgagtccaggagttcaagaccagcctgggcaacatggcaaaacccctgtctctactaaaaaaaaaaaa

SEQ ID NO: 395908 - DNA, 538 bp, Homo sapiens
aggactaagagaaaatactaccacagaatacaagggagtagaaatattccagaaatagatgggaagcaataatgttaaatgtagcaaaagaaaggagaagataaggtgtggaaagcattctttgggtttgccaattaggatgctactggcgatttcagaaagagcaggttcagttaactccgtgagaatggaagccacacgttatcaaatgtcatagagcagccagtaaaatacagactgaaaaaatagggagctgaattcagtaacaaggaggttttcaatgacctttcaaattcattgcagtttgacttaatgaagtattatgggtaactggcaaaccgcagtggtttggtatagggatgggagagtaagaagtagattgcccaatagatttattttctctatgaaatgggaggtgatcattgcatgtggaaattgggagggaaggaactagccttccagtttgaaataggagatttcagttgggggttgaaaaactttctctgtaagtggacagtaaatattttaggcgttgtag

SEQ ID NO: 395909 - DNA, 495 bp, Homo sapiens
cttaattctgctagttgattgtgtctttactgaaaagaacccagctaccaatttgcctttttttacaccacaaatcctaattagaaacttgaggttttatagaaatcatttaatgatagagattacatatgtgaattaatgtgaatatagtatctgtgcttcctgtgtctatgactattttaagatataattgtgctgcgctatcagattaacatttggaagtttctagaacagttaatgctatttacagaaaggagtagaaactcatcaactggcactctctttgatttttatattttaaattaactctcttcgatctcaaagtatattttacgagtaattttattaggaatctcttatagtgccccaatgggataagctatttgcctattttcacagttctgaacttggaaagaagcaaagtatatgtaactaaaccacatatttgtctttttattgctttttcccttcttttatatgctaaatcaaatatag

SEQ ID NO: 395910 - DNA, 884 bp, Homo sapiens
ttttttttgagatggagtctcacttcttcacccacactggagtgcagcggtgggatcttggctcactgcaacctccacctcccgggttcaagcgattcttgggcctcagcctcccaagtagctgggactaaaggtgcccaccaccacgcctggctaatttttttgcatttttattagagacgaggtttcgtcatgttggccaggctggtctcaatcctgacctcaggtgacccacccgcctctgcctcccaaagtgctgggattacaggcgtgagccactgtgcccggtctgaacctttatctttctattaatagtaatattaacaaggggtatctaaactaataaaagtataaaagtcccattaatctcattaagataatatgtttaataagatacattttaattaaaatgtattcatgtttaataataattttcttataatatttaatatatctatggtttgattgatactatataactagtgattctaatcataactcagtgcacaagaattcttaagggttatgaccacaggaaaatattaaaatatcaaatttaaatttatataaatatttttattgagaaaagtacaagacaggatctgtgcaagccatctagcacaaagtaaattacattagtataaaattctaaggagaagtagaatggaaacaaggtcaaagagaaaaaggaaaatgtaaataataatttgtccttaacggtttttgaatagatgatgatggatatcaagtatggtatttgtattttattggatacttccttttctttaaaaaagtgatgcttttttaaaaaacagtctttaatacccaagaaattagatctttgcaactctttaaattttcgacgtaaaacatttatatatcaa

SEQ ID NO: 395911 - DNA, 355 bp, Homo sapiens
aatcactaaaaatccagacaactacaacgttcaacacggaaaatgatttaataggtgctctctgaaatagccaataatcttctgaaatgatgctgactatcctaggtcactaggaaaattcatactaaactttcaacgctcagcctaggcaacatggcgaaaccctgtctctactaaaaatataaaaattagcctggtgtggtggcatgcccctgtagtcccagctactcagacggctgaagcgggaggattgcttgagcccgggaagttgaggctgcagtgagctgagatcatgccactgcactacagtctgggtgagagagtgagatcctgtctcacataataaataaataaa

SEQ ID NO: 395912 - DNA, 277 bp, Homo sapiens
gttttaagtacaatgctaattcttctacacatttcttggcttcctcataatgctttgtgtcttcaaccccactacacaaagtaataggctgctgctcagggacctggaggccaaaagaaaagatctgtatgagtgctcaattcattaattgttttatttagtatagtttatgcactcataatgctgacactggtaacatcaaaacgcccactaaatttactgaattctttcaaaagatctttcctattaacatgtatctttgcattcctttgttttg

SEQ ID NO: 395913 - DNA, 274 bp, Homo sapiens
agctcacagtgaattgtgggctttctccctttccttttgagagtttgctgtgggaacgccagccaggaagcctaaggcccatttgcagttccagggccaagccagaaaaagccacctggaaccctcctagctcaggtaacaggcacattcccccctccacaggaagagctcacagggtcagcactgggcctccctcctgtttctacagggctctgaacaatcacctattggaagccaccactcccacgggaagaggcaagcagcctcgccctgg

SEQ ID NO: 395914 - DNA, 208 bp, Homo sapiens
cctgggcagtaccaggccatcacttcacctgccttgtgccctccacccgcctgagggaacctgccctgtcactctgtccttggggctggcctttgtaccctggttcccaccagctgtctcctgccactgaaactagcccctgcctaaccctccacatttcttacatttcccccaggagtctccccacattaccacctatgcaacaaca

SEQ ID NO: 395915 - DNA, 808 bp, Homo sapiens
gaccttgggaggtctcaggtactgaagaaatccatgactgaggctttctgccaccatttctttatgatacctgaccaataaggagagggtaatcttatttccagattatgttaatgaaaaaatgagattatacgctaagctgctcctagatgtggaaagagtaatgattccagccagttgtttttaattaatctcttgtgttcttggcttatctggtcccagaaaatgaaagccatgaattttacaatacgtgtgccagatcacatgtgtaattcagtggaaaacccctacacaataaagaaggaagctttacaatgaatagtagttccctgggtcctaggaaaacttgaacaacattttgcaagctaaagaattcctccttctataacccacttcactctgaaacatcagagttttttgttttttgttttttttgaaatggagtctcactcggtctcccaggctggggtgcagtggcacagtctcggctcgccgcaacctccacctcctgggttcaggcgattctcctgcctcaggctcccgagtatctggggtaacaggctcccaccaccaggcctggctgatttttgtatttttattagagacagagcttcaccattttggccaggctggtcttgaactctcgacctcaggtgaaccgcctgcctcagcttcccaaagtgctgagattacaggcatgagccatcacacccagccagagtgtatctcactgttacctgaaattatccaaagttgtagatgatcaaaggactgggtatggttggactagtcggggtcctctagtcag

SEQ ID NO: 395916 - DNA, 185 bp, Homo sapiens
agagacaaaatgagtgagtcgagtgagccatgatcacaccactgcactacagcctgggagatagagaaagtccgtctcaaaaaaaaaagtacagaaggacgggtcaaatcgtcttctatctcttcccgcccagtaaaagagcagttgatatttaaaagaaaaaatattttaaaaatagaaatata

SEQ ID NO: 395917 - DNA, 799 bp, Homo sapiens
gttttatcatgcagggccatgatacaatgacaccattgtatttagcattgccttattacagtatactagtctgacactacttgagaaaagtaggaaatttaaagaggtaaagtggagacaacattggtaggagtagaaaacaggaactaaggaaatagtgagaacatgggatgattcaccctggaggcaggaagacagagaagcaaacacaattgttatcaggaatgcatgaatgatactttacttcactgaatctaagacatggtgaaatgtaagatgcacccatattttatgtactgagaaaaaatactaacaatcaaattctggaatgccaatgattataatatgaatcctgatttcaccaatatgaaactgtgaaaaaatgttaatgttacaataaaagaaatgggttttatacaaaaaaaaaaaaaaaaaaaaaaaaaaaaaaaaaaaaaaaaaaaaaaaaaaaaaaaaaaaaaaaaaaaaaaaaaaaaaaaaaaaaaaaaaagggggggggggggaaaaaaaaaaggggagggggggacacaagagtaagacgccaccgacaactatggtagacgataacaaaagagagccgctaccaacagagggacggcatagaaactaacaaagacacagggaggacgcgataaaaaacaagacgcgggggaagagaacaaaactgctgacagagcggatgtgagtaagaacaaccactcacggggggggcaacaaagagggacagaaaaacacaagagaaatataacagcctgcagaggaaaacacaaagggagcaaaa

SEQ ID NO: 395918 - DNA, 649 bp, Homo sapiens
cacatcttgatttgtacagtcataccgtcactgcgatagaaaatgtaagtaattaaaatggttcccaaagctaggcacaatggtgggcgcctatagtcacagcttcttagggggctgaggcaggaggatcacttaagcccaggagttcaaggctgtagtatgcaatgatcgttcctccacatagccactgcactctatcctgggcaacatagtgagacctcatcccttacaaaaagggggaggttccaacattaataccatgtacctgttattgtaattccccatgtatatcatacaaaggggcacatactaataggatcatggttggatgtggtatgatttgggctgtgtcagtaaattggacctaggaaaacatgcttatttgccctgtttgtatgtaaaaaacagctaaaattcctgtgtcttctatttaagtagagtgaggacatttatataaaaaattttatcttctcattacttctgatagctcagttgaaaactttgttttacggctgttgcatacacttgactccttctcaaaccaactcctggtgctgtggatcctgtacccacctgtttcattttcattcattattctcccctatgactaaaattcacttataaatatttttaggactttgcatcttca

SEQ ID NO: 395919 - DNA, 163 bp, Homo sapiens
cctttaaagaggtgattaaattaaaatgagaccattaggatgggccgtaagccattctgactggtgttcttttaagaagcagaatttgaacatggaaagagacaccagggatgtgtgtgcagaggaaagatcacataaggacatagcgaggaagccaaggaga

SEQ ID NO: 395920 - DNA, 460 bp, Homo sapiens
ccagtgtgggagcaatggaggtgttcagaggtggtcagactcccatcgaatcttgaaggtggatccactgggatttgttggctattggatgtaggataagacaaaatgggagaagtcaaatttgactccagtttttggctggagtgactggaaggatttgtttgccatttattgagattgggaagacagaggcaggggtagatttctggggatgatcagtgattcagtttcggacatgatgcatttgagatgcttttcatgtatgtaagggaataggcaagtgtggggttcagggaggaggttcaggctggaaataagatttgagaacgacataaagatggctttgaaagcatgagagtaggtgagattatcaaaggagtggttttagtaaacaaaaatgaagaggtccatggactgaaccccaggctcttcagcaacaaggagtctgtgaacacaggag

SEQ ID NO: 395921 - DNA, 378 bp, Homo sapiens
aggaagagaaggaaggttggggggttcagctctcagctctgttggagatattatacgggagttattccaggtgatgatctagcacctaatgacctaggcactcggtctctgacctacagtgttaacctaagacaagaatctcttctgggtgtagtgttcatcccagacctagcacagctctaaggagaaggaacccatcccgtcccctcagttgggattagtgtttgggattactcaatttgtagttttccaacagtgagcttatctgggcaaacaagcaaagaacttctgtggccaggccaaggtgggcatatcctcaccatcagggtctctggaccacctcgcttttcctgttctccacaccccaccctgccccac

SEQ ID NO: 395922 - DNA, 227 bp, Homo sapiens
cacaagaagcacatgcccaggctggagaccaggagggccgtgtacacactcctagagccctttctacaacatgcgcgaaccacgaagttaaagggctggaggcaaagccagagatcctccggcttcacgccaccctcagaagttagccgaggcccactctggatgaaaacccccaactaagctgctttctgggtctgcatcgtcgagaccggccaccccatagggag

SEQ ID NO: 395923 - DNA, 512 bp, Homo sapiens
tgaggctcaaaaataccttcaggatagttgtatatccagttattgattttcttaaaagatgtgtaaggaaaacagtttcaatttcaggggaaaagtaaaagtttttccctaagtcacttaaagcctttgcaacttcttttttcagttttgtaagtaatatatctatgttcttttcattatagcaagcattcaatgtgaacaactttttaattaactctgaattaccattcatacatcctaaaaataaaagctcgttattcattaaaatcaactgatcccatttttcttaaaatttccctgaaggcaaatgtctgaagcacctttcccttgtgggggtaaaaatcctaaattgctttatttttcattccctcctattcaacatgggagcagcatagagacccaaaccatgtaaacaagttcagtgaaccaaaacagccacattagcttcagtaaaattatagctagatgtgcaattttttccgccaaaccattctaatgttggagcggccgca

SEQ ID NO: 395924 - DNA, 473 bp, Homo sapiens
taaaactgattaaattatacgttaaaggaaagcacattttaaaccttaatgtgtccaaaaggttggatggcaaggtttgggtgctactgccttggcagagacaaggcagggaccagggaggctgtgtgcatgattttaggaggtgagaaactcaggtgggaaggaattgcagaagcctgtggttcacctggaaagccagggagagagagaggatgtattctggtgacctaacaggtattgtgaataatgaatatgcttttccaaagcgatctggtctccctgttggagagcatcctgaaataacttaagaaatgtaccttgctttcaggtttcctgagaacatgagggcccctagacagagtacaaggtgtaattcagacagccagccagaaaaagaattaaagaatcagggcaggtgtggggatcctaacaaaacctaagcttttagtagtcagaaaactgcaataacacag

SEQ ID NO: 395925 - DNA, 644 bp, Homo sapiens
ctatgtatctaaggtatcatcactgtgccatctttgggaagaatgagaaaatagccactgcaataattttctggagggctattttttcctatgggacactgatggaggaagaccacagcccattgactagaaaaaggcctggaatggagttcacgccctcagagctcgtgcaggagccatctatgaactacaagcacattgactccgtatcctcacatgagccctgggaggcagccactgttaatatcctcattttatggatgaggaaactgttgccctgttaaagcttaatcagctttattatttgcttcccatcactgctgtcacaacttgccacaaactcactgatgtcacacaacacaaagttattatcttatggtttgggaggtcagatgtccaaagttggtctccttgggctaaaatcaaggtgtcagtgaggttggttccttctgaaattctgaggggagaatttgtttccttgcctttttattttgtttttgtttttgagacagagtctcactctgtcacccaggctggggtgcagtggcgccatcttggctcactgtaacctccacctcctgggttcaagagattgtcatgcctcagcctcccaagtagctgggattacaggtgcatgccaccac

SEQ ID NO: 395926 - DNA, 843 bp, Homo sapiens
tcttgctctatcacccagtctggagtgcagtgatgcaatcacggctcagctcactgcagcctcgacctcccaggctcaagccatcctcccacctcagcctcgaaagtgcacaatcttttgaggcctcacacagatggtggtgtgaaagggtcaaggctgtggaggcctgctagagggccgagttccatttccccttagagtgagtgcagggtcagcctctcagggctcgggggcttcagtggccctgcctcggagagctccagccaatggccatgtcacgcgtgaggcagctgaggggccagggcagcagagcaaggtctgttgccaggaactgactgccctgcctcccagcagcaggtcagaggtggggcatctgggacaggtggccacagcagcctggagacatcgcagaaggagaccttccgtagaacaccaggagcccagcagtgaggggctacaggaccaggacccagggtgaaccaggtgaaccaggacccagggtgaaccaggagggtgaaaggccaggcactgcccagctaagggctgcagcaggcaccgcctgctaggagagtctcaaaggacatccacacaagtgaccacaagctcaaagtcaacttgaaacatgggccacagatcgcctgaagccagcttacccccttgggacacagaacagcccccaaagacgtccatgacctaatccccagaacctgcgcatatgttacctgacacggcaagagggacttcgcatatgcgactgagttaaggactttgaaatgaggcgattatcctggattacccaggtgggccccaggcaatcacagcaatcctaatgggggaagacag

SEQ ID NO: 395927 - DNA, 525 bp, Homo sapiens
aggacccttgcatagtgaggaaacctctttcagcccatataacagcatggcggtgcaggatatggaatgcatatttagagtcagtagaaatattgatgcgtagtccccttgcaagagtgaggtcccgagttaagacaatgagttcggcttgctgagaggtagtggagggcagcagagcactagcctcaatgatagatgtggatgatattatagtatagcctgcctttgctggtgagtggcaattaggcctggtggaactgccatcaataaaccaagtgtgatcagggtgagggacaggaaagaaggaaatatggggaaaaggagtgaatgtcaggtggatcagagagatacagtcacgggcatcaggtgtgctatctggaataatgtggcaggccggattgaagtctgggccagaacagtggtaactgtgggagactcaacaaagagtgagtatagctgaaggagctggggagaagaaagtatatgtcaggtgtgaggaaggaaatagattttggaagttatgag

SEQ ID NO: 395928 - DNA, 305 bp, Homo sapiens
tatatttagtaatattagtttagctatgttctagacactattctggggactgggatattacaatttaatgttgaaagcattctgattcattttcagagacaaaaaaaacaaaaaacaaaaaactattctcaagctatcatataacattgtcctggaggtccaagccattgtgacaagaaaataaaaggaaataaaagataagtagttgaaaagaaaaaaacaaaactatcatggtttatagaatgtattattctctacctagaaaaactgtggtaattaactgacaaggcattagaactaataag

SEQ ID NO: 395929 - DNA, 276 bp, Homo sapiens
ttcaatggaaattgattaggcctgagagaaggagcaagaggcagaaacactgactctgagaccatgaccttggaagatcctcagagatcaactagccaagtcactcacttaaaatggggaaactgaggttccaactgacagaaactgagggtcctgccctcttctctggctcctcagtctccagtttgaagcagaggttgcagtgaactgagatagtgatagtgccactgcaattcagcctgggtgacatagagagactccatctcaaaaaaaaaa

SEQ ID NO: 395930 - DNA, 146 bp, Homo sapiens
acattcactactgcaacacagccaccattccaccaagacgccctagcaacctatacaagggaactgaggtcactgacagacaaccctggctgagctcccggccaactgccagcaccaacttgccggccacctgagccagccttttt

SEQ ID NO: 395931 - DNA, 741 bp, Homo sapiens
atatattcttccagacctttttcctgtgtattgacttttaaatagatgtacattgcaatagtttggattagctcatccatagcagggtggttaaataaacagtggcacttttttttttttgagacagagtctcaccctgtcgcccaggctggagtgcaatggcgcgatctcggctcactgcaacctttgctttccaggttcaagcgattctcctgcctcagcctcccaagtagctggaattacaggcgagcaccaccatgcctggctaatttttgtatttttggtagagacggggttttaccgtgttggtcaggctggtctcgaatgcctgaccttgtgatctgcctgccttggcctcccagtgtcaggatcctggccccagtggcacatttttatgatgcatctggtactaaagaaggagctggctttatgacctttacttgagtatttttttgtgtgtgacagttgaacaattctgacccctattattgttggctggacaggcattttctttttaattcctctatgcaaggaactgtggattgcttttttctggatagctagaacgaggccattttctttcaaaagacagtcctagagtttccagtggttttctttaattgtgtatgcgtgagtgtgacagtgtgtgtgcctgtgtctctatctgtgcatgcatctgtatgcacagtttcttagttgtggacaatgcaacttggaatcattttagttttccaattgatt

SEQ ID NO: 395932 - DNA, 406 bp, Homo sapiens
ggaaaggtagactgagtaaagcacattgccctccctaatgtgggtgagtctcatccaagtagttgaaagccttaatagaacaaaaaggataaccctcccctgagtaagataatttcttctacctgactgccttcaaacagggacattggctttttcttgccttcgaactcaacctgagacattggctattccttggtcttgaggctaccagctttcagattagaaccacatcactggttctcctgggtttcaggccttcagactggaactacaccctgcagattttgggacttgtcactttccataattgtgtgagccaatttcttataataaatttatctatctatgtatccatcctatttgttctgtttctctagagaactctaactaataaagattttatgac

SEQ ID NO: 395933 - DNA, 805 bp, Homo sapiens
ttctcaaaaaaaaagaattgagtcttctatgtctgggataatttaaacatggggtgttggattgggtctcttgattctgtaattatatgtcagccagtcgaatgatggcaacttttaaggactggtccttagggaagaggaggtcaagtggtaaagacctaattccacacagcccaggtgactacatggagaatgtgctcaaaggcgaagtttatgctctgagctggacagtgtagactattaggggaaaacagtgaatgggaagaaaaggtgtgtggcccagattcaatttctagacacttcctttcctattttttctaccaagactacctagcagtggcaagtatgttctgaacattctgcagaaattccttctacctcactgaagtttcaagtaattaatgtgaaatggaggagttgacacagattaaatgggcacacatataaggacattcacagtcattttgtgaagcactattatgagacctaaatagcaagaagcaaatgtgaataactctgtcatttaaaaatttttaaatccaaattggattttaacatttttcttctttttactttattgcctttccaatgcagataccgttaaacatattggcagttttttctcaaagcaaataggtgaagtttctctctgtctctcctagagagaccgtcctggatttgattccctatggcttgggcttgtgttcctcccttccttctgtggtgtgctgtagaaccatgcaggcttccctctccactatgactgacttcaactgcatcttcagttgctcttcttccctccaaa

SEQ ID NO: 395934 - DNA, 164 bp, Homo sapiens
tcccctctgctagagcatggactaccagctgacctgccgagtcactcaccttaaatgttagcagtagctatggggtgtgtgtgtgtgtgtgagagagagagagagaaagcaagcaggcagagtgtgactttttttttttttgagacagagtctctgttacccag

SEQ ID NO: 395935 - DNA, 1056 bp, Homo sapiens
tgaggcaggagaatcgcttgaacccaggaggcagaggtggtagtgagccaagattgtgccattgcactccagcctggacaatagagcaagactccgtctcaaaaaaataaataaaattaaaatttaaaaaaaaatcaaaaaggaaggtcctaagaaaggagagaggtgagcaaagaataaggaaatagttaggtgatagacacatacaactgttgaggaacagaaagaacaatagaatcaggaagaaaagagcactttacaaaatatccttcagtatactaaaaagtgtgagtgtgtgtgagtgtgtgtgcgtgcatgtgtgtgcgctatagtgagattatttagaaaacttgccctgagttcattttcacttagggttggttttagatttgtgagctttcttgactatgctaatcctcgcctctttggtactcaacacccaatcctcccacacaaacagagtctgtcagaattatctcttttatcacttgatattcagctcacatttactttctcagacttttggaagttaccactcagacagatgcaaattcagtgcgatgcctgccaaagtgctgagcagaaaagagactttcttttacaccttccatcttttgagcttttggtcctactctttcaatttttgctaaatagtaaatggggatattgttgtttttcagatgaacacgtgagtacatttgcattactgagcttgctgtctctagttctaaagagattctttacaatttccgtatcagcaaaggaattgccttgatttcctttgatgatgtttccctgctgatattctagacctagcacagaagcaattggtaccctcgtgaaaatggctcttgcccagtaattctgctttatttgtacatattcagctttaattacaggggtaagtgggggaaggagaagaaagccaaaaatacccactgcccccaagtggaagaacaagaagaagcttgactccctcaacttgcaggagtacaattatattgtaactgaggttgttttcctagatgtcagccagaaagataaacactcaaagtt

SEQ ID NO: 395936 - DNA, 823 bp, Homo sapiens
ggtccgggcccccgtaggaagggccccccgagctccctgcccccgcccttttaactccccccacagacggagcgcgccgacggttctgctccgggcatctttgaatcggaggcacagttgtgacgtggtctgagcgacgacactcgtgcggcccattcagcccgagcgcccggcgggtgattctaagtatgacttgctatgtaaagaagaatttattgaactcaaagacatattctctgtgaaactgaaacggcgttgttctgttaaacagcagagaagtggtactttattaggtatcacactcttcatctgcttgaaaaaggaacaaaataaactaaagaattctacacttgatcttattaatttaagtgaagaccactgtgacatatggtttagacagttcaagaaaatattggcaggctttccaaacagaccgaagtcattaaaaatactccttaacccccaaagtcacaaaaaagaagctacccaggtttattatgagaaggttgaacctctgttgaagcttgcaggaataaaaactgatgtaacaataatggaatatgaagggcacgctctgtcactgcttaaggaatgtgaactccagggatttgatggtgttgtctgtgttggtggagatggatctgctagcgaagtagcccatgctttgcttctgagagctcagaagaatgctgggatggaaacagaccgaatcctgactcctgtcagagcacagcttccacttggcttaataccagcaggatctaccaatgtattggcacattctcttcatggagttcctcatgtgataactgcaacattgcac

SEQ ID NO: 395937 - DNA, 185 bp, Homo sapiens
acaaaccaaactcataaagattggaagcaggaagacaagttgcctccaggtttgcccaacggggatgttctttcaggcctggacatactggatgagcggggggagtccagacccttccaggcatccaagggccctgtcagccaccagacacatgcactgagacccagccagggaggcaggatcta

SEQ ID NO: 395938 - DNA, 354 bp, Homo sapiens
ctgcactccttggctttctccccagacaaacccaccctgagctcaggatccctccagcttccaggagcaggtgcggggcctgcagggacggctcgcagagaaggcagtttgcgagtcagtgcctggcttgtggaggttgagaccaaggccagttgggtgcttgcatttccaggggtccaaatatttttgagaagaaaatgttctaagaaagtgcacagggtggtggatgaaagaccacgctctgggtaccgtgtacaccgctcgggtgacagtgcaccagaatctcagaaatcaccactaaagaacttacccatgtaaccaaacaccaccccttccccaaacactattggaatt

SEQ ID NO: 395939 - DNA, 357 bp, Homo sapiens
gggctccagcacatcctgggtgggtaccatctgggacttagagcatggtagtataaaaatgaactccgtactggtagttttgaagagcaacatgttcctactgagtcttattaaaacagtaagagattcctggaggtcagctcatctaactgaaaacctctgaataaatcttgtgtatcaccaccaacaaatattaatctcttttcactgtcagaaaaagttactacttcaggaagtagcctacttctgaaagactgaatattaaactgtcttccttaacttacactaaaccaactttttacactggcaaaaacaactctagggcggccaggcgcggtggctcacgcctgtaatccc

SEQ ID NO: 395940 - DNA, 507 bp, Homo sapiens
tgaacatgcagtatatgttcagatagaaaaaggaagtgccagaataacccagctttaaaaaggtcttcagaagaaaggaagtctcactttttaaaataaacaaatgagaaagtgtttttgaagaggagcagaaaatggagcaacttgattccagagcactcgctcccctcgtgatgttgccggccacacgcacctgcgacctcgtgcagaaacgtgcagcagtgctttccagctggtggcaggtgatgtacatggtacggagacagagggacgccatggtggcaggagcagccgtggtggagagcacagggcgacactcggcttggcctggatgaccagtcatgacgagctaaaagtcctgccgttttctgctcacacgtcgttcccacgtctgcacattgagtggtgatgttagccggtgctggctgaactctgttctctggcggagagactgccagtttgcagagtggacagttccagacctctgtgaaagggggatcatgaccg

SEQ ID NO: 395941 - DNA, 559 bp, Homo sapiens
cctcccaaagtgctgggattataggcatgagccaccccgcctggcctatgttgtctttattcttaaacattcagagtgcagtctcaaatcccatcccacagagctgtaagaagctcctaagaatgtgttacaggatgaggaggctgaggaccagcctggacagtaaaacagttcctctgtggtgagactcatcagtctctttgctgtagtgaggtctccctcttggaaagaaaggttaactaccttgtagtacttcaagtcctgtatgaagtctttgttgttcattggtaattcatattaggatttttctttcctatttataacttgaattttgaaatcagtagtgttagaactactgttattactacattcactgattagtacattcctttgtattgtcagattgtaacagttctggggcaagcactcggtttcacctttgtatttgaagtagtacaccctagtctggtcaacatggtgaaacccatcattacaagaattagccaagtgtggtgcacatgcctgtagtcccagatactctagtgactgagatgggagg

SEQ ID NO: 395942 - DNA, 130 bp, Homo sapiens
tacagtcttgggatttttaagaatatcttgtatcatgtgactgaggagatttttcctgaaacagtaaatgtcctacctacctttactagaaatattattatgataactattaagtgggctcatctgtaga

SEQ ID NO: 395943 - DNA, 583 bp, Homo sapiens
agtggccaggcagaggggctcctcacttcccagtcagttgggtggccagacagaggcgctcctcactttccagacagggcggcagccagagagaggtgctcctcacttgccagatggggcagcagccaggcagaggcactcctcatttgctagatggtggggccgccgggcagaggggcatttcacttcccagacagggcagcagccaggtagaggaggcacacgtatttttattgccgcactgttcacaatagcaaagacttggagccaatccaaatgccaatcaatgatagactggataaagaaaatgtggcacatatacaccatggaacactatgcagccataaaaaagcatgacttcatgtcctttgcagggacatggatgaagctggaaaccatcattctcagcaaactaacacaggaacagaaaaccaaacaccacatgttctcactcataagtgagagctgaacaatgagaacacatggatacagggagggggccatcacacactggggcctgttggtgggtagggggcgagaggagggatagcattaggagaaatacctaatgtagatgatgggt

SEQ ID NO: 395944 - DNA, 477 bp, Homo sapiens
aatcattttatggcagttaactcaagccagcagatcagttgttaaatattatcatctagctgagttgtcacatcagttatttatttgtactctttgttgttttttatttatataatttttcatttgtaatgtctatatgctctttgagaacacagtctatacctccttcaccttccagactgctacataaacataaactgttcaataaatggttacttaatataaatgaaagaatacttcttaaggacagattgaacttattttccaaatagtagtctagttattttctttcttggaaatcaccatattgttagtaggaattatgtatttcattttgtttgtttgaatttcttgaagaattttgccaataatagatcaatcttatatagtggtatacctgaagatgctaagaacaagaaaatgcctttaatctaccaaatttgtatgagcttgattccatttctgtgtctttctttt

SEQ ID NO: 395945 - DNA, 543 bp, Homo sapiens
gctcggtaccgattacgctctagacggcagcactccggccccattgggcagtcccttcaccatttcctcctgtgccctctgaaattgcatgatgtgatttctccattcccggggttggggttcttctggttgaaagcattcagaaggctcagcctaaccagcggaggactttccacccctgacaagtgctgaccgtcctgggctttccacccttgcccgcgcctgggatgtttgcttcagtagcagctgtgtgtgccatgggcaagcccttggctggcgagtgggcatttctctacccctttactcttggctgctagtcctgtcctcttacaagaggtgtcactatgccatgcaccattcaggaaaattgctgccaattaagtcatttatgaccaactatgtttaattttcacatcgagtgtagctcatccctattgtgaaagaaaccatgtttcatagaataggatgaaatgtgacaatgcagcctgcctggtgacacgagggtgcacgtgacaaagcacatcagcacttagcacagtgctc

SEQ ID NO: 395946 - DNA, 471 bp, Homo sapiens
tcttcagactcttctggaaaggttaataagcccctgatggaatggtgtggcaagttataatctgctatcaacacaatgcacatcactgtccactcatctttctctggggtaaggttgtacatgtaagtatacaggtaacaaacagttactcctgaatcttggcatccaaccgcaaggacagcatgaatctagcttcctttacttcacagcatgtttacttttagtgtttaggctgtttagcgtggagacctgggtatgacgtattactgaacacgactgctagacatcagtaaaatgggaacggggcctgctccagcaagctttgaccagggacattttatgaaattgctacctagtactaaatgctctgtatcagtgccctttctgggattcagactggcagatctaatgggttctcttagtgcataaagcctagcgttatctgttattctagtgcttatcatttgcaaa

SEQ ID NO: 395947 - DNA, 576 bp, Homo sapiens
ccccagcatccatcatctcatttagtcctctcaccaactctgtaagagcagcttcattatttgcatttttgcagattaaaaaatgagattcataaaggttaagtgccctgcctggggtcagccgctagtgagcaggggagcctagttgcagtccagccccctggctgcctttggcccctgcaacactatctctcactgctctgacaaaatgtcatttctgaggaaggcaggcacacagacccaaaaggaatgggtgccgggggggaggccaggatgagatatttgtgagtgggtttgttctgatgtagcaaaaactctctcgttgctgtgggctgggaagtggctgactggctgcgtggtcagagtttgcaaagcttttgcagatccttttgctagaggggctttaaaagctgcaagcgctcagcagttcctatcagctgggatttttttcctccagattgaatcctgtcagggttttactggctcatctgttcccagaatgacaccatgtcccctcacctgagcagcacggccttgccacccacggtactccctgctaccagacggctcccggaa

SEQ ID NO: 395948 - DNA, 336 bp, Homo sapiens
gtcggatttgatttgctaatttctgtgtctggttttggtagcagggtattgctggcctcataaaatcagttgggaagtgcatactccggctcaattttccagtagagtttgtctagaattggtattattgcttccttaaatatttggtggaattcataaataaagatatccaggcctagatctttctttatgagaaggtttttaacttcaagttcaattattttgtagatgtaatgtatttgggttatttattttgtaagaggtatttagcaattggtatcttaaaaggaatttgttcattttgtcaaaattgtccaatatatagatataacatgt

SEQ ID NO: 395949 - DNA, 457 bp, Homo sapiens
aattaaacctcttttctttataaattacccagtctcaggcagttatttataggagtgtgaaaacagactaatacaaaaaaatgaatactgcacagaatgttgtcatgtaactaagggaagacttcatggaagctttccatggatggaaggaaaagttgcaaagaagcttcacgtggattggaagggaggttgctcagaggcatgtcatgagtggaaagggaagggtgcagaggttatggatggaagggaaggttgtaccgaaacttatggatagtggaccaagaccagagagaaggaagagggagggaggatcgcctgggtctctagctagttatgggttcttcaccaagtgcagtgtattctgcctgaggagaagtgggtatgagaccaggggccagtcggccaccagaggtgtgaggtcagttccctcatccagctggggatgggctggggacac

SEQ ID NO: 395950 - DNA, 518 bp, Homo sapiens
ggtcagcatctgagggtcctacgaggcaggctaatgttacctatggctcggaacactaatcgatcgccactacagtgtgttgcaaaagacttccggggtatgtaatatcagctcctgttatggccctggctgttagtagatcaaatgtactaaattatctagatataagacttttgagaaaggggatggaagagatgattaggggcaaacagaagcgggttatttcagctcttcaaagtaaaaaaggagataaggttttttttttttcccccttccaaacccccatgtggtccagacgaggccagaggatctcaggggaattccctctccgaggagcctccactgctattgcatggcccccagcatagtcatttgagtgaagagccctccaaaatcattaagctgatttgtagaatcagtttgctgtctgactacctgatgaagatgagaagtggtagacctccccccactgtaaggtcttaacaagatctaggtggaacatgggactgtttgcaagc

SEQ ID NO: 395951 - DNA, 227 bp, Homo sapiens
tggtgaggcctctccatgttccaccctctactatgaactggcaatagaaggttctttgcacatgcacatattggggccacttgacagccttgatgaccttagcaaggatcatttcagtggtgtggtcagcccagaagaaaaagatatcccagaagaaactgaagaaacaaaaacttatggcacgggagtaaattcagcattaaaataaatgtaattaaaaggaaaaa

SEQ ID NO: 395952 - DNA, 427 bp, Homo sapiens
ctctttacagtgtgattttgtcagtcctcccatcaagataaaaagtcttaaatctgatctgacttgctttgacaaacagaattcagtggaagtgatgttgcctttaactttttggaacattgccctgagaccaccctttaaataagctagtctagcatattagaagatgagggaccaagcggggagaactgaggaaccccaaccaacagctagcaccaacttgtattttccaggccagccaatgataactgaatgcagcagtatgagtgaactcaggtgaaaccagcaaaggggtcacccagtcagttcctagaatcatgagaaatcataaattattgttgctttaagctatgaagtttggcgtgatatattatgtaacaatggataacatccttccaaatcccacctcattcacccccctgcaaaa

SEQ ID NO: 395953 - DNA, 503 bp, Homo sapiens
cgacactcttgagttgaccagtattattacactaaggaatctagcgctttatcagaaaagttcttgaaaagggtacatgcaacatcaattacaaatatattttttaaaaaagcaataattaactactacaaaacaaagttataaaagaaaattaactcatagcatgacatttggctcagcagtatagaatatttatctcataacataaaaaaatggattatttggccaagcatggtgcctcacacctgtaatcccagcactttgggaggccaaggcaggaagatcacttcagcacaggagttcaagaccagcctgggaaacatggtgaaatcctatctctacaaaaataaaaaaattaaccaagcgaggaggcacacacttatagtctcagctactcgggaggctgaggtgggaggatcacttgagcctggaaggttgaggctgcagtgaactgtgatcacccactacactccagcctgggcaaccaagtgagactccgtctc

SEQ ID NO: 395954 - DNA, 702 bp, Homo sapiens
tgcactggaatcctgtgagacaagggtggtggccgctctggaggtgcctggggcggtcccctcaaggcccttccgggcttactccgtcttccacactgttgagcagctttcctacctcatggcagaggataaacactgtggtcacatccaggcagacccggcccaggtgggggacaatgccgttgtagaaggccttgagcccttcctttctcaggatttgcagccgcagtcccgtgtgttctgcatttgtgcttttcaggccccgcatccgggtctcgatcccgtgcagtggagcgtttcccaagacactggctgcgcctgcaatggctccgaaggccccagcgaccagcgggttcatgggcttgctggggttgtcccctcggtaccagctatgcaggggggtcaggagaagaagcggatggcctggttccagccctgcttcagcgcgggggccgtgaggccccgctgggtccccttgttcccgcacaatctccctaaccccggtgggagactcctctgcactggacgtctggggaggtctggcggtggatgaacttcaccttgatggcgtccatgggaaatatgaccaccacggccccggccacgcgggcgccccagccgcacagcagcctgcgttgttgtaaggccgtccctgggcatccctcgtctggctgctgaggaacaggaacattcagaacccaa

SEQ ID NO: 395955 - DNA, 280 bp, Homo sapiens
gaaatcaaggtgttggggctgtgcttcctctagaatccttcctggtctagtccagctcctgctggctccgggagttctttggcttgtggcagcataactccaatctctgcctctgtgttcacatggctgcctcctctctgtctctgcgtttcttctcttctttttaaagaatacttactgcacgttggatttaggacccaccctaaatctcggatgtcattctgaggtccttaattacattttcaaagacgctatttttgaataaggtcacattcacagg

SEQ ID NO: 395956 - DNA, 525 bp, Homo sapiens
atcacctgttgtttaatcgctaacactgttacatatcttaatactgtatcacattaagtcattttaaaagcattctgctttcccttttgtttaaaattcctacgatccctgggatattggtagggggttaatggaagtcttgattaaaatcttccaagctttaaggctttcagttcttgtaaacaatttggatctgagagataggcctatttatgactttttactagcctatttacccatttaatgttaagaaaaaaatatgcttattaaaagttttgttataataagtacaaattaaaatgtcttttaaaaaatcagccacacttcgttgtgtgatgatcacagaatttatggtagttcttttgaaaattgtctgaagatgtattataatcattttaaaagtaaaggaactaccctgagtataccaattttccattattttaaacaaaccttttaagttttatatctagattgcttttaagtagttatttccaaacttgaaggactatgaactctaatcataat

SEQ ID NO: 395957 - DNA, 139 bp, Homo sapiens
atgtattattcatgattcttcagagacacaggaaagataggatatatatatatatatatatagagagagagagagagagagagatttactataaggaaatgacttagcagttatggagactggcaagtcccaagagccg

SEQ ID NO: 395958 - DNA, 213 bp, Homo sapiens
attggtggtgctggcaaatgaaatgaagaaaagtcaaatatgtcttggaagtagaaccgacaaaagttgctaatgtgttggatctggatgggtagaagtgaaaaggagaaatcaaggatgacttctagatttcgagattgttttgcaagttgatggtgccttctacaatagggaaaatgttggggaggaaacattgggagcaccaccaataca

SEQ ID NO: 395959 - DNA, 840 bp, Homo sapiens
ggctccctgttcctctacggcaccgagaaggtccgcctgacctacctcaggaaccagctggcagagaaggacgagttcgacatcccggacctcaccgacaacagccggcgccagctgttccgcaccaagagcaagcgccgcttctttttccgcgtgtcggaggagcagcagaagcagcagcgcagggagatgctgaaggacccttttgtgcgctccaagctcatctcgccgcctaccaacttcaaccacctagtacacgtgggccctgccaacgggcggcccggcgccagggacaagtccccggctcccgaagagaagggccgagttgcccgcggctccggcccacagcggccccacagcttctccgaggcgttgcggcgcccagcctccatgggcagcgaaggcctcggtggagacgcagaccccatgaagaggaaaccctggacatccctgtccagcgagtctgtgtcctgcccccagggatcgctgagccctgcaacctccctaatgcaggtctcagaacggccccgaagcctccccctgtcccctgaattggagagctctccttgatgccctctgttagggcccaccccaatcccagggcagaaggacatgagggagcaaagagcttgaggaatgccatactccggctggtccgggacatggaaattcggactcagggaggacccgggctgggcaatgactgggagacttgcctgggttccagggacttgggggtcctgactccaggcctcatcctgcttacccctctgttccaagcccagctttctaagccatgggaatagaatggcccttttttctggtgtccagggtgaacgc

SEQ ID NO: 395960 - DNA, 487 bp, Homo sapiens
agaaaataaattacaatagccactaggtggcgatcgagtattgctgaacggacagcaaacgacaagctgagtctaaactgtggccagaaagatgtgaaactgagcggcaaatagcccaaatatgaaatgttgagggcaacccatgtggttagcgtatttatcgatactacagaagccgcagagaaaaggagagcggacatatattctctctctaaagaatgcgggtgacttaaaaacgtttcccccagaactttactggaacagcgctggaaccagcagcgatagttaaccaggtagtctgaaactgccatagtattcactgcaagtaaagggaaactgaaattaatgaagcagacaaacgtctccgcaggtcatggcaccagaaatgttgatggctgatgtaataccttggttcttatcttcttagtttaaaagaatttaaacaagagacacacagcaaaagaagtacagcataatttattgcaaa

SEQ ID NO: 395961 - DNA, 449 bp, Homo sapiens
ctcttatttgaataagtgatcttggagtgtttacccattgtaacaaaactccttttctcataattagaatcattaagaaatttctcctacattttagatgacggaggtgtgtgtgcacgtgtgtgtgtatgtgtgtgtgatcaactcattgcatatttcttaaaccacaatattgtttaaggaattttagaaaataattactcaataggaaaatgttggccaatcctcagatatttagataaggctgattcaaatgcctattctttcactgttctcactatgacactcttatttttattattggcctgacttccgcagttattttgaagttacagatttttaaattttgagttgaaaaaaaagagcaaatttagattaaggaatgagaagtagtcctcgcagcctcatgaatctcctgaaatttcgaacggcaaaatctaaaatctaca

SEQ ID NO: 395962 - DNA, 400 bp, Homo sapiens
aagagtttgacacatttggacttgcacagtaataaatttacatcatttccttcttatttgttgaaaatgagttgtattgctaatcttgatgtctctcgaaatgacattggaccctcagtggttttagatcctacagtgaaatgtccaactctgaaacagtttaacctgtcatataaccagctgtcttttgtacctgagaacctcactgatgtggtagagaaactggagcagctcattttagaaggaaataaaatatcagggatatgctcccccttgagactgaaggaactgaagattttaaaccttagtaagaaccacatttcatccctatcagagaactttcttgaggcttgtcctaaagtggagagtttcagtgccagaatgaattttcttggtaagt

SEQ ID NO: 395963 - DNA, 243 bp, Homo sapiens
tctgagcaattttccagcatcctggtgtgcagatgaaagtccagggtaagaaggaaataaaaggtaaattaaatgaagtagcaactatttctccagccttttaccatgcaggagcagctttgtacagcaccatcttatctggtcttactggccaaggtagacaccagtgagtcctaacacagtccttacagtcctagcttgtaagagagaagaaatacctactatttagttaacagacactac

SEQ ID NO: 395964 - DNA, 131 bp, Homo sapiens
ggatagatggatgatggatggtggatggatgatggtggatggatagatggatggatggatggatggtggatggatgttggatggatggtagatagatgatggatggctggatgaaggatggatggatggtg

SEQ ID NO: 395965 - DNA, 546 bp, Homo sapiens
aacatagcaaccgcacccatacacaaggggtataacacacgaatatctaacgagctccacaccacgtctataccgagcaaaacgactaatcacatacaaggatgagcaaccgataatactagacattgctcaaacgaagacatacaaggacgggtgtggtacctgcagtactgttagcggttaggcgtacggacagggctattggttgaatgagtaggctgatggttttgataatcaactagtatggggataaggggtgcaggtgggtacttattcaagttgtagccttcatagttgataaaaaatcagcacacattaagaaaacaataacagaactattttcttcacatgacttttattccttaatccagactgttaaaaggactgcaagacaaattgtttttcaatcagatttttttctccaccagatgtctatgtgaatttcatattgttttagacaaaaatgctcattccttcggtctaagtactatgtcatattttgttttttcaagccttcaaattttgtgctggtggttacttcatata

SEQ ID NO: 395966 - DNA, 645 bp, Homo sapiens
tgtctagacatatgttatgtaatcctacatagttatgtcaagatatgttatgtaataccacacagtaatgttgttgtacctattttgtaccttcctaatatctattttgtcatttgagtctcacaatcttttttgtgaatctcaagtaaaataaaccatatgagatgcggtaactataactggatgtacaattgcaaggtatcccaacatgtatcaaatgtatattgactaaagaaagtttatttctccttattcaaaagcagttacataaaaagaaagaaaatgcatttttgatttttggaatatgctagaaattgtatattatctcatttaatcctcacaagttaatcaagcatccccatttctcaatgaagtaaatgaggtttcaagacattaggtaacttctcaactctacagcataaatagatgtacttgtttcactcctagatcttctaaaattaataattatgctctttttttctactatttgttacctatgttttagaattatttttaactaaactgatatatagattatgaaaatctttactttttactatcaagcactatataacataaattagtttctcggcctggcacagtggccatgcttgtaatcccagcactttggaacactttgggtgg

SEQ ID NO: 395967 - DNA, 603 bp, Homo sapiens
accggaccggactccttggtgtgttgctcgctgtcatatgtgcacgcacacatacagacagagcctaactctctgtggccacctggatccttgctagtccaccaacgagccaagcacactcccacccaggggcctctgaacttactttttccaccaactgctacgttctgctcccacatatctgcatggctcccttccttctggtccctactcaaccatcaccttgagggggaacagagtggcaagtccaccccccaacatcccagtgttcctaaccctttaggcttccctgtcttcttcatgaaacagaccaccttgaatattatacatttgtcactgatatcttctccactagaatgtaagctccatgaaggcaggggctttgctatactcactgtggtatccccagtgcccgaatcagtgcctggcatggtcaatagacatttattaggcgaatgagtaaagaagggaaggaaagatggaggagtgctgtaactgtggatttccctccctttccttcctcctccggctcacagcaatgatgggagggggccttttcagtttccaaagccctctctcccctacacactcatttactcctca

SEQ ID NO: 395968 - DNA, 560 bp, Homo sapiens
actgttttgagccaggtgttcatgccacactttatatttctccctctagcatttacatatttcatggtgatttttctcattaaatatctttttccaagactaaaatgagctctctgaaggcaaggcaatatttaatttactgctgcatccatagcatctagcacagtacctgaaacatagtaggcactataattgttgctgaataaaaccagaggtcagcttagctcatatgttgacatatgtgagcactctgggtcacaattagcatcagctggttatgccacctcctgcttctcctagtacctgcatccctgaatcattaagtctagctgcaatagaaagtggggtatggttgaaaggtgggaggagtggttccctctgatttgcttttccttagagaatcttctcaactgtaaaataattgaaagttgcgttcctttctagactcaacccgaactttgttttggtgcaatgtcaccattggaagagaaggctcaaaaatttacctttcattgtgtgttatatgaaatatatctcaataaagctgttacgaacgtaaa

SEQ ID NO: 395969 - DNA, 680 bp, Homo sapiens
gtattacagaactctgtggcattacttaatagttctcatacatcattttgttttcatttcttatcatctgtcccaacaggggcagtcccctctctccctcctatctgcctgacatccctgttccctactctctaggcacttaactcccaaacactattcttaggctgctcacagtctgcccaatcctggtggtgcctaatactaaaatactaatagtatctcatttttccccctacaaatttgaatgtccagggttactttattaaaccacagcctgatcgcccaaagtaattttcaaatgtgggtaacaaccatgctatatctggaaggcagggccctttctcttccacagatgaccgtgctcaatttacttatgccagtgtggagtaactgcgttgccttggcctctgtcccccctccttctgtatttatagcaccccagtattcctctgggaaatcatccctccctgactttcagaacacttattttacccactgtcaactctactctggggctgggtcaggtcggcttcagggattatctcaaggatgagcacaggcttcaacaaagagccaatgagaaccatgctgagggcttcccttcaaaatcttggccaagtcatcccaccaatgtgaaggaaaagactgcctgagaatggcgccagcctagagaagagtgg

SEQ ID NO: 395970 - DNA, 326 bp, Homo sapiens
actcctaaggagacaaaaaagccacaaagaaccctaatctaatttagagtgtgatgcagggcatggtggctgatgcccgttatcctggtacttcggaaggccgaggcaggaggattgcttgaacccagtttgagatcagcctgggcaacacagtctctaccaaaaacaagcaaaattagtcaggtgtggtggcatgtgcctatagtcctagctatttgggaacctgaggtgggaggatcgcttaactctgggagattgaggctatagtgagccaagatcacaccactgcacttaagcctaggaagaccctgtcttaaaacaaatac

SEQ ID NO: 395971 - DNA, 1738 bp, Homo sapiens
gttcctgttgttcttcctgcagagtgtgtcccagccgctgtggtctagggtgaagtgacaccttaagcagatggcagctgggccagccagctcactggaccgatgggggaaattggatcatagagattctaaaacgtggcccaccaaagcacaatagaccaaaaaagagaaaaaactgaacactaaatctgcacaaatcatttctgaccacactaagcagtgcctgcacgatgcctcgtgcgacgcatttgatttttggaagatattcttatctgtcacacagcactgagagttagggaaaactaaaagatgtgcatgtgacggaccccagccttaaagttgaacgtgatgaccctacaaacacccagaaacacaggcactcttcccagcggcgcggacctcctgctcccgggaacacacccgcgctctccgtccacccacccctcaggtgaaggcacagctgtccagagctgaggcttcctagaggcagggctgccagctgccaggtgtcaggtgtggcagagccgtcttctgagctccctgggagagggggtcgcgccacctcatgcctctgagtgaggcctggtgcacaggtgtggaaattgccacgcagccctcttggccaggcgcagagaccccaggcctccatgactcaggggccgctccaccccattgtgcggctggtggcttggggaagagagacgtaaaaccccaagttaggaggtctgtgccgcgccttgccttgcctcaaggtcatccccagcaggtgagcgtggcccaccctacacactcaggtttctcagggtgccactccgtgcctggcgctcagcacgacatggtggattcacacccaagccccaggtgccaggacaagaatgccagcgctgggcatactgccggcccattccccccggcccgagaccctggacacccgcccccccccccgccagctcaggcttctaggtggaatgtggagacgggtttcagccacactcccaaccttagctgttgagactcaactccaaagacggaaagttagaaaccccagggcagagtccaggagccgacctgggtctcacacaggtgtcccagaccagcgtggggatgcccaggtggccaggcccagcctgcggccgctgaagttacacctgccgggtgagtagggctgccgggaccccaccttgagtgggagacccccagtgtatcccagaagtggttaacaagcaaactgctttccatgagcctccttgatttgttaaatattgaaggcacttacctaaatactgccgtgttgccagtagcgtgccggttaccagtttggccgttcttgtacacaatgtgtgagtaatgctgtgctcgtcagaggggagacttttatattcagtaatttgttttataaattaaagtgaaggatgtattgaagtgtggtttgaaaaatcctgatatttgctaatggctccggtcacgacggtgtcttttggaagtggttctcgaaaactctggtgacttgggggctgcacagtgggcctgcgtgggcgcggtgcggggcaactgcccatggagcccgtggctggccggctctcctgtggatgacactcacccttgactgccagggtcattcaaagtcttgcacatccatgaaagactttaatggaaatgttcacattattattttcattaaaagcaggtgtttccaagaagcaaaggtttctgaagccattttctttttttttttctt

SEQ ID NO: 395972 - DNA, 621 bp, Homo sapiens
gctgagcttacaggtacctgccatcatgcccagctaatttttgtaattttagtagagatgaggtttctccatgttgggcaagctgatctcgaacacctgacctcaggtgatttacccgcctcggcctccaaaagtgctgggattacacgtgtgagccactgcgccttaaccactttcaggcatttgaacttgcagttcccactgcctcaccttgtttcctccaagacatccacatggtatactccttcctcaactactttatctcaaatagcggccccatcactgtcttgctccacgccctcatactcatcacatgtatgggtcattgtacttcatatcaatgtgtttatgtgtcagtgtcctgtctcctgtactgaaaggcactccccatgcagttgagaaattcatcttgttatatgcccagcacagtgaatttcacctgcgtgaaataggggagcactaaatattagttgagtaaatgcatgaatggatgaacattccttaaagtgggaatgtctttccatgtttcagaattctcatctgccatctctcttcccatgcatgaagataagcagtagactatccactcctgcacctgttcatatacatatagaaacacgc

SEQ ID NO: 395973 - DNA, 341 bp, Homo sapiens
cctttgtcttgggctgaagcagttctcaacccccagatggcttgtccctactcccccaggcaagagcccatacctcaagattataaagagaggttttaaatagaagattgttctatctaaacatgtgcctaactgacatctattttgttattatgtgaaacacatccatatataatgtatatgtatccataatgtatgtacatatatgtatttcccaactctctcatgtctgaatattacatcccttgactatcttctgtggctctccgagtccacttggcatttggttatcagcttatacttaacagcaagtgtcggtctgcaggcccatcacctatttt

SEQ ID NO: 395974 - DNA, 638 bp, Homo sapiens
tcctcgtggggagactaggctccactggggtcgacttccttgtttttatggaccgagagaaaagacagaattgaaagagactgagggctaaagcgagaggggtctgtggaagacacctgttggcggagagcggtccacgcaaacatggtcatttttaagaaaactaagataagtgctttggaaagaaaatttgctaacaaaatttgctgttaaatggctttgaagtgcttttaggttcactcttctttggcagacactgttgactgggtaactccacacctttttcccacccttttcttcctgatctgcttctgctacagatgctggaaagctaagtgcatgaattcccaagctgtcttcgtggctggatatgtctatgacccacttctgactaaagagtagctaaaaatctgatggggaagggggcagtctgagaaaaattgctttcctgatatagtggacagatgtacttcagctttttcctgccttgaatatagatgttatacccagaggtgcagcaaccattttgtgatcatgaggctacaagccaacattgaagactaatagaatggaaagagagacaatgcttgggtcttttgcggaatcacggagcaacattgatgttggaatgtctccct

SEQ ID NO: 395975 - DNA, 280 bp, Homo sapiens
cttacttttacttttctttgttgttctatatacagtctaagcaaagtctctctgaaaattgtgtgttctaacagcaaatcttaccaattttcttccttgtttgaaaataaatattcaaaatattactttccttttggggcatatatacgtttaacatctcatccttgaagttttcctgaataatgatgtcaaaacaaagcgccttacttgtattattctaagaatgtttggaggagaaaaatagcaatttttgttagagagagttttaggtttatgtgaa

SEQ ID NO: 395976 - DNA, 411 bp, Homo sapiens
gaaaaccagcaccataaaatggagtcaccaaactcacgaatcaggactaatgcccaaggaagcagagtaactaggagttaaagaagaacaaagaaaaattgaaagggaaattgacctaaaacatcgataacagtacaccatttctcaaagttgaagaaagacaaaagtcttcaaataaaaatcacataccagtcactgaaaaagatagtttaatataaagatatctgtacctaagacacatattggtgaaatatgagaactccaaggataaagacaacaaaatttgtaaaagtttccaaagcaacgagcaggctacctgcacaggaaagagaaccaggctagtatcgattgctcattagcaatactcatgttcagaaatagtaatggattagcttcaaatttatgagaaaa

SEQ ID NO: 395977 - DNA, 240 bp, Homo sapiens
aaaatcttaattttttgtactccaaaatgacagataaatattttatttgtttgatactgagtgttctgcatctgacatcctaatgaacactgaacatatttccattcactaatgctgttaaaagaaccacaggcttggttttgcaaaaagatgtatctttgcaaccaacagacttacccattactgcagagatgagaggactttctgctgtttgaatgtatgcattaaccaaaaatacag

SEQ ID NO: 395978 - DNA, 269 bp, Homo sapiens
ctcctgaaaacctgtcctcaactctcctgagcactcagaagggaccctgaaccagctttagtctgcaagactgcacggctggcctctgtcaccttctcctaacacgggagcccctggggctccctctgctgctgtctcccaaaggcctgtagatgacttccccaacaccagcccaatgctgcttgtttcatttgctcattgtgcatgtactgtctgactgccccatgaggatgtgagctccacaagggcagggaacgttgctctggctg

SEQ ID NO: 395979 - DNA, 254 bp, Homo sapiens
gatggcacccttaggggcagagccactgactatgtggcaatggaaagggccctgaaagaaggtggcaggtaggaggagctgaaagccaggcaggaggcacctgtgtgttggtgtgtgggccagagaagaagaaagagcctccaggtgacaagagctgcagaatggggataatgataccctgacaaagcagcagagcttggagcccagcccagccagggggtctggaacagctaagccgcaatgcaccactcaca

SEQ ID NO: 395980 - DNA, 380 bp, Homo sapiens
atgttttggcatcataagtatgtattgacagcctcagtgttagaggctcagcactgtgatgtgcacatgtaagttcacataggaatgagagttttcaagggcagggatttatctttgtttactgttatatcccttttgtctacaacagtgcttggcacgtaagcatgctaaatagattaaagtaatgaatgtgagggtaatccatactctcctgagggcgagaatcctacctgtcctgtacagctctgtgtctgcaatccctagaacagtgtttgcctcccatttgttgagtgagtgaatgtacttcagaacttggtccttgccattaaagagcttgaatctggtttggaagacagattgcaaaatattgaagagcagta

SEQ ID NO: 395981 - DNA, 383 bp, Homo sapiens
ccagcctgggcgacagagcgagactccgtctcaaaaaaaaaaaaaaaaaaggcaaaccaggagaatttgccgcctttcagcccatgaattgggaggacaataaaaaggcagaatcctagaggatattacatttgggaatggaaatcagtagagctctggaatggaaagaaaacattgggttgcactgtaactcatcactggccttatggttgatagatgacaaatcaggtggcatacactaacagaagaatagacacacaggaatgcttgtgtagtacttgttctggttggttactatctctgtagcatttagcttttttcatttttttctaaaatgacattttgaataaaatttttacaaaagtcagtacattactgtaatt

SEQ ID NO: 395982 - DNA, 154 bp, Homo sapiens
tgcgctttgctctaaaggagtatgaatcttaacacaaattacagtgaacacttttcttaattagataagaactttaatttgaagcaagtgctctgtgtcatatctgaaattttcaattaggagcaaagtcttctgcttttattccatgaaactg

SEQ ID NO: 395983 - DNA, 747 bp, Homo sapiens
ctgcagagggagtgtggctgttatggactctggaactgagtacatttctattgtttgaagacaccacctcgtgataatttccacggcagccgcaggagactaattcagagaaagccacaataagttgctgatgtatttgggtggtgatgcagagaaacggaaggggtcaggaatgactgcaggcctggggctgctcggtttggggtggggggtggtgtctcgggacaggctggcgtagctgctgtggtggcacagagcagaggctgtcaggtcatggggggcaatgccaagcctggagtgtcccacaggttggccggggatacggacagcacaccggggtggggagactcactgagcacgggctgcctggagatcatggagaaaccaagtcaggacacggggggaagggagagaaggaaatggggcaacgctttttgctaagtttctatcgttttgtttgcttttctgtgtagcgaaacagaaaagatggatggtagctggggacagagcaggccgaggaagtccttggattttcatgtggaggtgtagcgggaagctgccggacagtggggctgcagggggtggggaagaggttggccatttcccagcgcagggctggttcctccagggaagagtgtgaggtttgcgctgctgctgcgttaaccgtgcctctgagcccccaacccagccactcaggcaggtggggctgcttcaattcatgccttccccagggaggaatctgaagaa

SEQ ID NO: 395984 - DNA, 1037 bp, Homo sapiens
acaagagtgttccctggtttcttgagggtgtcaattcaggggttgcttcccgttttatcctataaatacttctggctgcaaagagcctacaagcagtctgtttcctgttgcagtgtggtaaggtaaccttttaaggtggagaccggtggcctgtttggggcagttcccctctagagggagaatttgtctctgaagtaccaggagactgcaggagattttcctgtgcttttcctacccagacaccagcccagaactcaggtgacttcaggagcgttcacatcctgtttggaaacaaagtctgcaaattgtttaataggccgagccttgatatccgcatccctctcagctctatcacaggtctgctttgctgttttctcttggctgtgacagtccgcctgatggtcattataacagcagttcaccattagtacaaacaagagtaccatacataaattctgtgcgcggtttaccaacatcatcaaaaagttatattgttctactgttctcattctttacttgatcaccatcataatcatatcaacatcctaatttctggcctaaaccaaccacagaaccattgttagccccttatactatccattgtcaccaagagtccatttgctagagcttttagtgatattttatctatttagaagagcactgcagcatggattctgtgttaattcatgtactcattgatggacttgttgcttgtgtagcccagttaataagaatagctgatgagcttttacaattcattctacaagtacaagaagttccttatgtagaagaaaatggtagagcagaagagactgaagcagatgcacctcttcccgaggagccttcgctacctgatctccctgatctctcagacttagactcaatacttacaccaagagaggatgaagacctaatatttgatatagatcaggctatgttagacatggataacttatatgaagatacagtctctggtataaatgatgacttaacaggtgactaagacccaatttctgcccccgtccccagggatgtga

SEQ ID NO: 395985 - DNA, 85 bp, Homo sapiens
aaatggatagaatttggaagaagaccaagtgatgacatgatgagaattcaatgtgttgatcagcctctgtttgaaagaatcatta

SEQ ID NO: 395986 - DNA, 362 bp, Homo sapiens
tcacagggtcctcaggatagtggtcggcacatggtaggcactcagtaaatatctcacgaatgattcccattaccatggctaaaacatgagtcttttaagatgtcttactgtggatctgtctccaacttcggaagaaattgccaccacagtcatcatcatgaattatgttactatgaataactggaactagcagcaaattgctttaattttaatgtgggccaaataagttctgcttagatatttaaatagactttacttaaacattctgaaggatggagatttcaaagctggcacctccctacctgtgaggcataataatggttccccaaagatgactactttctactccctagaacctgtga

SEQ ID NO: 395987 - DNA, 191 bp, Homo sapiens
cactggcacaggataggcataaaaatcaatgaaacagaattgagaatcctgaaataaatccttacatggtcaactgattttcaacaaaggtgcttagacaattcaacagagaaaaagacttttcataaatggtactaagaactggatattcagagcaggggggaaaaatgaacttagatccttacttcaag

SEQ ID NO: 395988 - DNA, 327 bp, Homo sapiens
ctgagcctttcctggaatgtggatataaatcaacacaagatatgaagagcagaaagaaaaggaatttgccaaattgctgatatttaagagtaggagtgttaaacacagaggttgggagagaattaacctggcataaaatggatatttcaaattgattattgacttcaaagtctttttttctgtgcagctctggcaaactctaaaataatttgagattgaaatttggaaagaagagtcccaagtccttgggagtttgacccctatcaggtactgtgagctagagagactcaaatgagacctagtcatatttttatttctaaaatgctc

SEQ ID NO: 395989 - DNA, 467 bp, Homo sapiens
tggtttctactatagctccaacatctagcactacctagcacatagtagacacttgatcaaatttgtttcataaatgtacaaaggaatgaattttatagaaatgacagaaggctcatggagattttggaatgagtggccacactgtttttctgtctttaatgattttaatttccatatctagactttaagacggtacttaatttattttcttagaacaaaggagtaagaattattccaacagccttttgcatcacgaccctgtattaatctaataaaagaaaggttacactcctatttgttgatgaacagcacattaatgagatcttcttgaaataatcccatctctattatggaggcaaaattacattttccagcataattactgtgtcagtcaagctcccaaattttgatattaattttttcccttgcaaaggcaatattaacttattagtttgtcaaacctctgg

SEQ ID NO: 395990 - DNA, 695 bp, Homo sapiens
atttcgtgggaacacggatggtgctggaggctattatcgttagcaaactaacacagaaacagaaaaccaaataccacatgttctcacttataagtggaagctaaatgatgagaacttacaaatgcgaaggagacaacagacactggggtctacttgagggtggagggtgggaggagggaaaggagaagaaaagatagctattgggtactgggcttaatacctgggtgatgaagtaatctgtacaacaaacccccatgacatgagtttacctatgtaacaaaccttcacatgtacccccaaacctaaaataacagttttttaaaaataatcaatattgtcccagtcctccattttacagatatggaagttgtgattaaaatgtgattaatgtcacagaaatactgggaaagccaagcttctaacagtcattccagggtcattgccagggtgtcaaatcctatgtcactgcacagtattactataacaacaaagtgtccctttcctgacttcctattccccattcttgatccagcatctttgggatccacttccaggcattttctctggggtcctgctggcttaagtcagccagatcctgcagcgcctttgccatatgatcctcccctcccttaacagacactgtacttacccagttggattatactgaaacttagtcctcatactgtctggtatcg

SEQ ID NO: 395991 - DNA, 631 bp, Homo sapiens
ggctccaggaccatgagagagaaccctcacacatagggctccaggaccgcgatagagaactcaggaccgtgagagagaacccttgcacgtagggctccaggaccatgagagagaaccctcacacatagggctccaggaccgcgatagagaacccaggaccgtaagcgagaatccttgcacttagggctccaggactgtgagagagaacccttgcacatagggctccaggactgcaagagagaacccagaaccatgagagagaatccttgtacgtagggctccaggaccatgagacagaaccctcacgtggggatccaggaccgcgatagagaactcaggactgcaagagagaacccaggacccaggaccgtgagagagaatcctcgcacgtggggctccaggaccataagagagaacccttacacgtagagctccaggaccgtgatagagaactcaggatggtgagagagaatccttgcatgtagggctccaggaccatgagagagaaccctcacgtagggctccaggaccgcgatagagaacccaggaccgtgagagagaatccttgcacgtagggctacaggaccgtgagagacaaccctcacacgtagaactccaggaccgtgataga

SEQ ID NO: 395992 - DNA, 694 bp, Homo sapiens
tggccctaacttgctcagtgttcttattcagaatctgaatgaagctgtagacttgaatggcaagtctgtggatgacacggaactataagaaacagctaacgtgatatgactcacataaggaaatgtggagctcaaagtcattcacacaagctgaggccctgtgttctctcctctataccctgctacccactcatcaaatgaggctggggcacaaacaagggagtgcagaagagacagaagagtctgtttccttcccaagatctggtccacaactgacctcatttatcttcaaacacctttctctctttaaatatcaggataacctaactttcatctgccagctttaaatacaaaccagtcatcataatttcacacaatgggcactattcttgaccatggagttcacctaaattacttctattccttaactaacattttgttgtaaattttctttgtagaatgcaacctaatttttaatttaaaaaaattaaactcaacataaaccatcatctttactaggcattttagggaaactgaaattttgcatgtcaagcctgcttacctgcagaaaattctttgtacttgaatgtctgacagtgacagtgataaacaacatattgtgcttctcttccagctctaaaaccctatgtgtttaagagttagaggcaatactaacttgggatgcaaccaagaa

SEQ ID NO: 395993 - DNA, 396 bp, Homo sapiens
agagtgagactgcaggatatttggtaaacagcctcgggttcctgttaggtggacatacaggtattagtccattttcatgttgctgataaagatatacccgagactgggaagaaaaatgtttaatggactcacagttccacacggctggggaggcctcacaatcatggcagaggatgaaaggcacttcttacatggtggtggcaagagagaatgaaagcagaaaccccttataaaaccatcagatctcgtggtgctctggtagtgcaccagagcagtctgggggaaacagcacccatgattcaactatctctcaccaggtccctccctcaacacatgggaattatggagagtacaagtcaagatgagatttgggtggagacacagagcccaaccata

SEQ ID NO: 395994 - DNA, 420 bp, Homo sapiens
gggcaacatggtgagaccccgtctctaccaagaaaaaaaaattagggcacggtggtgtgtgcctttagtcccaactactcaggaggctgaggtgggaggattgcttgagcccaggagatggagatttcagtgagccataattacgccactgcacttcagcttgggtgacagagtgagaacctgtctcaaaaaatatatatgttccaagactcaagtttacagttggaaaggatgcatgggaagacagagggtagctatgtgtaatggctgctcagttcttaataaggttgttcagacactaataaaattcagccacttaaaagagatatgtaaaccatgcctgacttaagtatcttgcttaaagtgttgaattcagttactttaaaacaagatagagaaatgagaaatgtcttgtaggga

SEQ ID NO: 395995 - DNA, 188 bp, Homo sapiens
gagaataatttattgaccaatacaaacagacaatttacatttctgagacacaattttaaaggaattattaaatacagcttctaacaaagaccataatgacaactttatgcagaaccctgggagctcaacagaggaagacacagcttattttccagatactggttccatatggcctcccaccagtcaca

SEQ ID NO: 395996 - DNA, 179 bp, Homo sapiens
tatgaataaaatgagttttcatgttttataattcagaccttggacatagtaattgggactatgtgatagtaaataccaaagtgcgaggtttgaatacttgtatactcgtaaaagccatttagctattttaattttttattcatgtataatacaaatagaaaaaagtacacatgatacat

SEQ ID NO: 395997 - DNA, 543 bp, Homo sapiens
gggaggtgtctagaggatccctgctatcatcggcacatacagttaattacgtagctttgtaataggtttgaaatcaggaagggtgaggtgcaaagaaatatcattgggattttggtaagaattgcactgaatcggtaaatgctctgggcagtatggctgtctttacaatattaggtcacttcatgaacatagtatgtgtttccatttatttgtgtcttttttttgtgatggggtcttgctctgttgcctaggctggagtacaagggcacaatcacagctcactgcagctttgatctcctgggctcacatgatcttcccacttcagcctctggagtagctaggaccacaagtatgcaccaccatgcacagatatttttattcctgatatttggttgcacagtacaatagggactgcattcttgttcagcaggagagcacccctttcaccccgcccctgccagaaatgtcaggcagccatcaggtgatgggtttggcagttatcacacatacagttatcacacatacagttatctcacacacaca

SEQ ID NO: 395998 - DNA, 651 bp, Homo sapiens
aaaccaaaaatacccaacaaaagcaaactctcctcctaaggcaagtgcgaacatcattggtaagttctgacgtggcctctgtatagtctgttgtcctggctctgagaaacgtaacttaaaacctctttgaaacgtcttaatctttgagcaccctaagtccttgagcacccattcatttttgtctttgaccttctaagtgtcagattggtttccagtttgaaaccaaacaaacttctttgaaattcttgaagacgtagttccaggggagcatagcgtagcttccaggtggctactgaaatggctgacagttactaaagatggtgaggatagagttaaaagcagcagcactcccattttctgatgatggcaggtgataaccttggaataagaagctccaaactatcatgcctgcttaggcactaacttcctgtaattgtaataaaattgttggcattgctgagacctactgacaccttcagcaaacgttagtaaggggcatattacgtgtccagtcctctgcttggtgatgggatttgacattgaatgggttatctttctcctcactccactcccatctctctggatcttcaccaattcctgcccagatagatgctgtatgtcctgctatccgcctcgtccccagccttgctg

SEQ ID NO: 395999 - DNA, 350 bp, Homo sapiens
atttatgtgatttttaaaaagatttttaaatgtggaagatagtggagagaatcggcaatttaggggctctgaagcagtttaggaaagaaacggaaatatttggtatccgatctcaatttcaaaaaagggtgtagaaattgaacgttcaatttctacgcagtagcaaccaaatgttttagcagagaacgatgggtgtttcaccacaagactctttcccaatattttgtgttctgtggcagaaaagcggatgtttcttggcaagatgaacaggtttgcacatgtatctgtctctaggaattgccataggcttgaagaaccaggccttcctccttgatggtgtagaacttgaa

SEQ ID NO: 396000 - DNA, 392 bp, Homo sapiens
ctgtagattggcattatcactgtaagataaccttaattctaaaactcacagttaacaaaatggccacactttctttctcaagtcaattaaagttgattttaattttcctaatgttacatgactgaaaaaagttgagacaatggaaagagttttaatcaacgcagtaaataacctgagttttaataaaataacttggtgtgaacaaatgtttggctggcacagagcattatgcttttccagctgttaaaattaatttgagaatatttattttgctttatttggtagaaagtataaggttgttaacgttgtatattcaagaggtcattccccttcctcccctttgaagtagtcacaaagtatttgaagtgccttttgatactagaaagtgattt

SEQ ID NO: 396001 - DNA, 199 bp, Homo sapiens
atttactccgtgcccatcatgtgccagacattacactgagccttaagatacttacatcttcaacagcattattgcaaccaatatttaagtatggtactatgctaactgcttgacacacatcatctcatttcagcctcagagcaaccctgcaaggttgtgtatcgttatccctattttacaagatgaggaaactgagggg

SEQ ID NO: 396002 - DNA, 329 bp, Homo sapiens
tgcagtggtgcaaccatggcgtgatactcctgcctcagcctctccagtagctgggaccacaggcgtgtattttttatttttagcagagatcgggtctcactgtgttgcccaagctggtctcaaactcctgggctcaagccttgacatcccaaagtactgggattacaggtgtgagccactgcgcctggcattcttttataatggatgaacatttacaaaatagtttcccaatttagttgtttggatgtttttgtttagactcttagctaaatgattctctactgtatagatttatctcatgcttttcaaaaactgtatatttttatagt

SEQ ID NO: 396003 - DNA, 336 bp, Homo sapiens
cttaggagatattactgtagcctaggccagggcttggcaatctaccactggtgaaccacttgcctttgtaattagagttttgttagaacacagccacactcatctcagagtgagactcttgactcaaaaacaaaacaaaacaaaaagacaagctctatatgaaattatcccggttccctttaaatgatgcctctgggcttccagatcttttaccttcctcattttatttttgagatggagtcttgctctgttgcccaggctggagtgcggtggcgcaatcttggctcactgcaacctccgtctcctgggttcaagcaattctcctgcctcagcctc

SEQ ID NO: 396004 - DNA, 364 bp, Homo sapiens
acagcagcatctcactcccattaccaatgtactgtattagtcccttttcatgctactgataaaaacatacccaagactgggtaatttataaagaaaaagaagagatttaatggactcacagttccacatggctggggaggcctcacaatcacaattgaaggcaaaagccatgtcttacatggtggcagacaagaacagaatgagagactaagtgaaaggggtttccccttataaaaccatcagatctcatgagacttattcactaccatgaaaacagtataggggaaaccacccctgtgattcagttatctcccaccaggtccctcctgcaacacatgggaattataggagctacaattcaaga

SEQ ID NO: 396005 - DNA, 971 bp, Homo sapiens
gccttccgcttttattggatttcatttcttttgctactttttaacatggaagctgaggtccttcatttcaaacctttgggtttttttcccctaatatggggaagagatgttaatgttaaaaatctatctgagaactgctttaattacctcccatcaagcttgatgtggtttcatttttttttttgagacagtgtcttgctctgtcatccaggttggagtgcagtggcgcgatctcggctcactgcaagctctgcctcctgggttcacaccattctcctgcctcagcctcccgagtagcttggactacaggcgcctgccaccatgcctggctaatttttggtatttttagtagagacgaggtttcaccgtgttagccaggatggtctcgatctcctgatcttgtgatccgcctgcctcagcctcccaaagtgctgggattacaggcgtgagcccagccgatgtggtttcattttagttgagtttaggatgttttccagttaaaaaaattcttcttgacacatggctctttttaaatgtatgttatttaattcctaaatatttgggggattttgcttatctttctggtagtttctgcaataattccatggtggtcagagtacattaagacttgaattatttacatttattgagatttgctttgtggcccagaatatgggctatcttggtatgagttacatgttcacttgaaatgtatactgtactctcgtttgatgaaggggttctacaagtgttgattaggtaaaaatggttgatgttatttaagttttttctatctttattgacattctgtggttttggttctagcaattattttaagaggattgttgacatctctgaatattaaattggatttacttctctgcagttctgtcagattttgcttcacatattttggtatgtttttattaggtgaataataaatatttcctattttatgtccacttgatgtg

SEQ ID NO: 396006 - DNA, 852 bp, Homo sapiens
  misc_feature (267)..(267): n is a, c, g, or t
  misc_feature (282)..(282): n is a, c, g, or t
  misc_feature (286)..(286): n is a, c, g, or t
  misc_feature (301)..(301): n is a, c, g, or t
  misc_feature (315)..(315): n is a, c, g, or t
  misc_feature (374)..(374): n is a, c, g, or t
cgtgtagtgccgcttctgtggagtgtgccgctcctgtgtccccgagtggttgttcacagtgttgttgtgctattcactggagcctggggtatttgcggtttgtctttccgagggggccttcttctcgttgtttccgacccttggaggtggtaattctgcgatgatttccgggcccctcggctgaagaagtataagaagtgctggctgggatttggcctagagcatgacagtcagccttagcctcccagcagcacgcaggagaggcanccagcccccagatgnactncccagtcctcacagncagatagggtgtgnacagcctcacaaaaatgcctgggtccccagcactgcagagtcttcagcaagttgctggncctagagtcgtgacgactaggcatggtggccttctcagtggctcgtgccgaattcggcacgagtatttgggggattttgcttatctttctggtagtttctgcaataattccatggtggtcagagtacattaagacttgaattatttacatttattgagatttgctttgtggcccagaatatgggctatcttggtatgagttacatgttcacttgaaatgtatactgtactctcgtttgatgaaggggttctacaagtgttgattaggtaaaaatggttgatgttatttaagttttttctatctttattgacattctgtggttttggttctagcaattattttaagaggattgttgacatctctgaatattaaattggatttacttctctgcagttctgtcagattttgcttcacatattttggtatgtttttattaggtgaataataaatatttcctattttatgtccacttgatgtg

SEQ ID NO: 396007 - DNA, 654 bp, Homo sapiens
  misc_feature (69)..(69): n is a, c, g, or t
  misc_feature (84)..(84): n is a, c, g, or t
  misc_feature (88)..(88): n is a, c, g, or t
  misc_feature (103)..(103): n is a, c, g, or t
  misc_feature (117)..(117): n is a, c, g, or t
  misc_feature (176)..(176): n is a, c, g, or t
aagagaaaagagacgctggggagccgtagaccatgacatcaggcttaccacctccactcggaagggcanccagcccccagatgnactncccagtcctcacagncagatagggtgtgnacagcctcacaaaaatgcctgggtccccagcactgcagagtcttcagcaagttgctggncctagagtcgtgacgactaggcatggtggccttctcagtggctcgtgccgaattcggcacgagtatttgggggattttgcttatctttctggtagtttctgcaataattccatggtggtcagagtacattaagacttgaattatttacatttattgagatttgctttgtggcccagaatatgggctatcttggtatgagttacatgttcacttgaaatgtatactgtactctcgtttgatgaaggggttctacaagtgttgattaggtaaaaatggttgatgttatttaagttttttctatctttattgacattctgtggttttggttctagcaattattttaagaggattgttgacatctctgaatattaaattggatttacttctctgcagttctgtcagattttgcttcacatattttggtatgtttttattaggtgaataataaatatttcctattttatgtccacttgatgtg

SEQ ID NO: 396008 - DNA, 630 bp, Homo sapiens
catgcctgtaatcccaacactttgggacgccgaggcgggcagatcacaaggtcaggagatcaagaccatcctggccaacatggtaaaatcccttctttactaaaaatacaaaaaaattagtcaggcttggtggcacgcccctgtagtcccagctacttgggaggctaaggcaggagaattgcttgaacttgggaggtggggattgcagtgagctgagatcacgccactgcactcaagcctggcaacagagcaagactccgtctcaaaaaaaaggaaaaaagaaaaggtccatagcaagccatattaagcaatttcaggatctcagggatacagaaggcactaaaaagcttccggagacatgtaaaaactggttacatgaactgtatcacacaatggcaacagattcaagaatactataatgagaacataatagagaaatgtcttcagaactatgaaatttagagtgaacctagcattttatactcttatgaaataggaagctttggctaggtgcagtggctcacacctgtaaccccaacactttgaaaggctgatgcaggtggatggcttgaggccaggagtttgagaccagcctgagcaacagggcaaaaccccatctctatgaaaaat

SEQ ID NO: 396009 - DNA, 500 bp, Homo sapiens
tgcagggcttcctcctgctgccgcccacgccaggatcagcctcctcttgccgctgcagccccgtcgctgcaccggtttcatcggtctgaagtccagctgctcctccttggcctctgcacctcagcacaggctactgcctctgaggggccgcccagccgtcgtcctcctcacaacctcccatgatcgtggccctgaggtcacctttccattggcgatgaacaatcccattgtcactccccatgggtgtgcccaccggaagctgctcatgggcaggaggggaactgttcaagctggtttttccagcccctaccacagcgctgggtgtgtaggtggacaagaaagtcattacgtatgtaaatgaggaagcgcatgaacacctgagcgtgtgagaattcggtggggtgaatgccactccaaatgtgtgtcaaatatgatgggactgaatgcaaatgaaagtgggtcaaggagatattcagaataaaatgagcaacttttcctca

SEQ ID NO: 396010 - DNA, 459 bp, Homo sapiens
agggtcagtagcctgcgaagctccttgtttctgttcactggagtcaggctgcggcaatttaggaatcaggcagtcactccggaggtcctcttagttatgcaaacctaggacgtgtcctcccccattaccctggagagcaatctgcttttgtttaacagagaccatccctttttaatggccaggtggagcagggttagtttgcataagcagtctttccaggaagaaaggaataaggtcccagccaagtacaccagcttttacactgtacatacatctgggtcgcctctaacctaggtcgctgcagacatcagctcttcaaagggggaaatcatagacacacgttgaacccaaggcaggacagccagggtgaaacattttgggggcagctttgattcagccttgaatgtggctgacaatctgagccctttatcaccctggacggtgaatggaaaagtgaat

SEQ ID NO: 396011 - DNA, 611 bp, Homo sapiens
ctctatgtgattgcatcttgtatcttccattacccaaatccaagttttctctttctgagcaggttgactttaacaaacacaaacagaaactgattgttggtctcgcttttaagtaatttgtgaaagacgacctgctgataagaataacattaacataatgttatctgtttaaagtgaaattcttattccctttgggaaaacagacatagataccctaaaatggtaaaatttccttgcttatgttgataggccacacctgacaggtgtgcttacattgacaagccatacatcttatcaaaagtggtcattttgttggctgaactaaagagcatttcatcattttccctgatattaactctttgactatgagatgcaactgtcagtgtgaaacttggcatttgcccagctcttctgataggaatggctgttctctcaccttgtgggatatttttacaatcttgactctcttttccaatatcactttcacatatagtgctggtaggccaagggaagacttctcctctccactgtacagattcttgggcccagcatcttttctggaatccccaaactagtccctcaccagctccatccttgtgtctttgagtact

SEQ ID NO: 396012 - DNA, 211 bp, Homo sapiens
tcaggaggctgagataggcggattgcttaagccttggaggtcaaggctgcagtgagccatgaccatgccattctgcactccagcctgggcgccagagcaagaccctgtttcaaaaagagagagagaatttctttgagttgaattatgtagaagtttgtcactgacctatgttcctaaagtatgaagcatacatatgtgggctaagaaatag

SEQ ID NO: 396013 - DNA, 538 bp, Homo sapiens
ctctcaatgcatgactacaactgtttcgaaacaatagagaaaagaacaagatccacatattccctcaatttgggaaactttatgccatcaattcttagtatctatatttttgtattgatttttacataaatcgaagattttattattaagcaagtttttgcttgtttccacaaaacaagacactgcatagttttcaagtatgggaggtgaggatcacttattatggccatatctgtttttctctcccccagactatcccttggctcttgtaacacacaactttgtttgtttgtttgtttttggagacagggttttgccctgttgcccaggctggagtgccatggagtgatcatagctcaaagtgatcctcccatctcagcctcaccagtagctgagactacaggtgtgtgccaccacgcccaacaaatttttgtatttattgtagagacagggttttgtcatgttgcccaggctggtctcgaactcctgggataaagtgatcaaatgattcacctgcctccacctcccaaaatgcggg

SEQ ID NO: 396014 - DNA, 478 bp, Homo sapiens
tggacaaggtgtgactaacgaggcaatgaggctcagctgtcattctgcttattggcaaacaggccagaactcctgcctctaaataaacaggtccttcctgggagtcagcacagatggctacaggctcattcaaacctggtcatcactgcttggattattttggagctgttctttgggaactttccttataaccagttgatcagccacatgggaacattagccacttgcttcatagtctgcttcagaattaatatttaaaagaaaggcaggaagctaagttttgggagtctcaccaaggggtaagagtgcaacagatgcccagtactaaggaagccactgggcccagacagtgtgagctctctcagggacgtcacagggccaggcatcctctggtgcccagagcagtgcctgacacacagttggtcattagtaaatactagtagaaaaaaaattgagaaaaaaaaagcagcaacattat

SEQ ID NO: 396015 - DNA, 556 bp, Homo sapiens
gtttatattgattttctcaaaatcagttgtttattttcaatgacgacgcctctaccgccaccaggtcaacaaaaacgtacttgcttttgcatttccgggactctagcatttcagagcaggaattaaaggccttgccaaggcttttaagcgattgatggaaacaaaacaaaacacagaaggataaattttgaatttgctaagacaagaattcgcaccaaggcagacataagacatgaggatgtcttcctgacttgcgtccttggctcgaatcgttcttattagcccttttcaaaaggcagctgtgacctccatttctggctaatcaggccacttttgttccccccgaggcgtgggaggacaacagttaagccctaacagcctgcgaagcagctcctcgacgaacggcggcgtccccgtcgcctgggcagtgggtgtgggaggtgacagcctagtcctgagcctctggagcgggcctatactgcaccgccgtacgtgaatttcaggagcgcgcaatgccgccaccatggcggaggggagacgcgccctcagcggccgc

SEQ ID NO: 396016 - DNA, 813 bp, Homo sapiens
tccagatgattctacaaacagttcgcctagggacaggcctgtccctcccacagctctaagctatgacacaccccgcaagtcatgaggtctctttcaatagagagctcatttcctccacatagtcatattgaactgagtgtttctggatatttctcctttagattccaaataaagcaaacattttctgattaggggttgagggaagacagtatttttaaaaaaaaaaggatatggccattagcttttccaaatttatgacaacccaagaggtcacttatcatcaggtagagtaggcagagcgctgaagtgggagccaggagacttggttccggtcctagccttgcctaccgctgatcctcagctcctgcaggatcaggatcctcctctgtaaaacgagggactggactcaatgtccctgaaattctctgccagagtaaagattctaggttcaacaagatacatactttttgttctttgttcccgctgcttctcccaggaaattccacccaacataggaaacaaaagggagtctggtccgcgggttcttttcactgtacatctcaagccaatcacaacataagcaacgtactgaagttaaccagaggaaagtccataaaccaacgacaacccagactacatcacatcaccatccatcacagatgtcctaagtgccaccatcccacaggcagtaatgcttccacccattggccttcttgaagccttgcacaccacagctggatttgcctacacatgtgccccagcccacctaccaggatggggcattggctggaatctgctggagctctcatcaga

SEQ ID NO: 396017 - DNA, 95 bp, Homo sapiens
tcaattttcaggtagataagtagttaatgactagatgcagttgggtaaacattatctaggatcaaccaagatgcttaatctaaattattacaaca

SEQ ID NO: 396018 - DNA, 798 bp, Homo sapiens
acattccctaacagactactgatttactgatgctacctctgaaatatttctcccatttattcccattcttgccatttcgatttgtttcaggaccccactatagctacctaattatttccccactccaaatacatgctacgcacaactactgggttagttctaccgcaatcctgctcaaaaactttccgttacttcccaatttctataaagtacaaattccttatcctgactgggtgcagtggctcatgcctataatcccagcactttgggaggccaaggcaggtggattacgaggtcaagagatcgagaccatcgtggccaacatggtgaaaccctacctctattaaaaatacaaaaaaattagctgggcatggtggtgcatgtctgtagtcccaactgctggaggctgaggcaggagaattgcttgaacccaggaaggggaggttgcagtgagccgaggttgtgccactgcactccagcctacatgacaatgtgacactccatctcaaaaaataataataataacaatataagaactagctgggcatggtggcgcatgcatgtagtcccagctactcctgaggctcagtcaggagaatcgcttgaacttgggaggcggaggttgcagtgagctgagctcataccactgcactccagcctgaacagagtgagatcctgtcaaacaagaaaagaagaagaaagcagcattcaaatgtaagacaactgtcaaatatcgagccccacttggtctacaattcagaaagaagaacgcctgtacatcgcctttttataagtcct

SEQ ID NO: 396019 - DNA, 446 bp, Homo sapiens
acattccctaacagactactgatttactgatgctacctctgaaatatttctcccatttattcccattcttgccatttcgatttgtttcaggaccccactatagctacctaattatttccccactccaaatacatgctacgcacaactactgggttagttctaccgcaatcctgctcaaaaactttccgttacttcccaatttctataaagtacaaattccttatcctgactgggtgcagtggctcatgcctataatcccagcactttgggaggccaaggcaggtggattacgaggtcaagagatcgagaccatcgtggccaacatggtgaaaccctacctctattaaaaatacaaaaaaattagctgggcatggtggtgcatgtctgtagtcccaactgctggaggcacggagctgctataatgcgttatcttcgaatactctgga

SEQ ID NO: 396020 - DNA, 757 bp, Homo sapiens
aaattaggtggccatggtggcgtgcacctgtagtcctagctgcttgggaggctgaggcaggagaatcgcttggacccagagggcggaggttgcagtgagccgggatcatgccactgcactccagcctggcaacagagagagactctgtctcaaaaaaaaaaaaaaaaagaatcgttctcattacagcctaatttcttaatagtccccagttgagtcttcctcttcagtagttttttgtttttgtttttgttttaataattgtagatttacaggaggtttcaaagaaatgtacaagagaagtcccgtgcacccttctcccaatcttaatgtttcacacaattaaagtataatatcaaaaccaagaaattgacattggtacaatccatagagcttatttggagttcaccagatacacatgctgtcaatatttgtgtatgcgcgtgtgtagctgtatgcaattgtatcacatgtagccttgcataactaccaccacaaccaagatccagaacaattccattatcacaagactcctttgtgttacccctttctggccacacccatcccctcccctgtccctggcccctggcacccatttatctgttatgtatcactgcaggtacttcaattaacatcacctaaatggaattgtgtgctacgcatcctttttctttttttttttttctttgagacagggtcttgttctgttgcccaggctggagtgtggtagcatgagcatggctcactgcaatctccacct

SEQ ID NO: 396021 - DNA, 336 bp, Homo sapiens
caaccttttcctttacagtgaaactgtcctcttagcagccttgttgtcctggactggattcccagtcccctgtcaccgtgtccgctgtgtcacaagtggtcattaaagggagagtggaatgaaccaaatggacctggagatggatttcaagatctttcccatatccatttgcctcacaaatctatttgatttgtgctattatgtgacttgatttcccagatcatatagatcatatcatatttagtcacgttatatttgtgactaaaatttcaggcttttcacattatgctgaatcatactttaaactcattcagattccctaattcagaaactatg

SEQ ID NO: 396022 - DNA, 452 bp, Homo sapiens
ggcagatgagaccaatttctctctgaataacaaaagctgaggcaaacatttaaaaaaaaaaaaaaaaaaaaaaggagggctgggtgccatggttcacgcctgtaatcccagcagtttgggaggcagaggcagatggatcacctgaggtcgggagttcaaggccagcctgaccaacatggagaaaccctgtctctactaaaaatacaaaattagccaggcatggtggcacatgcctgtaatcccagctacctgggaggctgaggcaggagaattgcttgaacccaggacgcggaggctgtggtgagccaagatcatgccattgcattccagcctgggcaacaaaagtgaaactctgtctcaaaaaacaaggagttggctaacgttctctcaggcctcttactgtgagtgtacatgagagggagaaaaaagcaaaagaggagaacaagatgaga

SEQ ID NO: 396023 - DNA, 422 bp, Homo sapiens
ctctttcaggaagctctggaggttaggcttcaccaatataagcgtggtcactaaaaaataacaacaaaaaaaagaggaagacatgaaataaagctggagattcagacaagaaggaaatctccagaatgatgatgaagagcgatcccagaaagctagctgtctaccaagattagagaataatcagggcagattccaggagagaattctccaagatgatattgatagtatagctgatgactggagagactgactgtgtactgataggaaattgggacaattggcagaatttagagttgaattaggagtaagtacaataatgcctacgtgatgaagcctacataaaaacccaagaggatggggtttggagagcctcctaatagctcaacaggtgaaggtcctgtagctaacacatctcttcaagt

SEQ ID NO: 396024 - DNA, 536 bp, Homo sapiens
agctcggtaccgtctacgccacaaggattccaactaataaatgataaagcaatgctagatttagaatattatcactttcaaatctccaatgaaacaaatgatacaggcaatttttttagtctagccaaaaaatctgaaaaaggaacaactctatcaatgaggcatcagatagaaaattacaagtggcaataaaaaaaaactataagatgttagcacaaaataaaacaatgcaaattaaataaagcatttttcacctaccagattttcagatttaaaagcctaataatgggctctgcacaatggctcatgcctgtaatcccagcactttgggaggccaaggtgggagaattgcttgagttcagcaattctcagttgagaccagcctgagttcctgtccaggcctatcaagccctccccaccatactttggcctcctcctggcctctgtggggcggctctcacattacctccagaaaggctgcaggctctcacccaggtaggcgcactctttgcttcagtaatccattagtcttctct

SEQ ID NO: 396025 - DNA, 499 bp, Homo sapiens
aagctcaggagttccagaccagcctgggccatgacgaaaccctatctctacaaaatttttttttttaatttataatgagaaaataaatttacatttccttcttaggtctctagaggatccattttttttctgcaaagcatctgtccacaccctcttaccatgcttgtatgccttaaagatctagcttggcctgtcagcagtgtgcttcattgggaatcgatgcagcaccctcctgcctgcaagctgactaaaagccttttccttctccaaagactttgggaccatttgtattcaccagggaaagggtcaaacaactcctgcatcttcttcccctgcttttcttggcacatctactgatactagctcctaatttgggcaagaaaaaagtcaacaactggaggtagagtgtgttgaccctggactcaccctgaaaggtaagggcacaagagatagttgtatttagctgtatcttgttagaaaaatacatttgtgtagccag

SEQ ID NO: 396026 - DNA, 294 bp, Homo sapiens
ctagtaggagtttaaactggtacaactacttgggaaatctgtttggcagtattgactaaagctaaacacatatgtatcctataaaccagcaattccaatcctggatatgcagcaaaagaccaccaaaagacatatacaaaagtgttcatggcaacattctttatattggtgaaaacactgaacaatctcaaacgtcagccagacacagtggctcacacctgtaatcccagcactctgggaggctgaggcaggaggattgctggagcccaggagctcgagaccagcctgagcaac

SEQ ID NO: 396027 - DNA, 632 bp, Homo sapiens
atagaaaactaatgtttctctgggtcttccattttttgaataaaactgactcttaccacccaacacatggatttggaaggatagcagtacaccaccttcttagctcacttggctggaacatgagctgatgaagtcctagtctcaagtttggccttcaagaaaactagataggcttgccctatgccagagccaatctagacctgccatcagttctgtttcttctttgtgtgtgtgtgtgtgtgtgtgtgtgtgtgagagagagagagagagagagagagagacagacagacagacagggtctcactctgtttcccaggctggagtgcagtggcatgatcatggctcactgtagcctcaaccacccaggcccaagtaatcctcccacctcagcctccagagtagctggaactacaagggcatgctaccacacccagctaattcttgtattttttatagatacaggatcttgtcatgttgctcaggctggtctcagatgcccaagctggtcttgaactcctgggctcaagtaatccatccaccttggcctcccacagtgctgagattacaagtgtgtgcaaccacacctggcccatcagttctgtttcttgaccaatgactatacctttaatgct

SEQ ID NO: 396028 - DNA, 952 bp, Homo sapiens
tatacctatggaagatagaaggtacacaatttttttttactactttttcctacaactttgaagattggaactcattttcagataaaaagttttaaaatgcatggaaattatcaagtagatatcacaaaatgtctgtcaaaggacatttgctcttaatccccagtttgtctttatcttttcatgtgtttggagatgatatctctgctctttcttacagatgaagttgtttatttgtctaatatttgatgttgaaacaactgctgtcaaagattgtatgggactctagccatatctttgagtttagacaaagactggaagagtttagatttactgtcattttactttttgtcagatcagagctttgatagcctagtgattccagctttttaatactctgagatctccaaaatggatgatgtgcacatgtgtaagatgcatgaggcccagcatttgggtgtgactctatcactttttgtcccactcaagaaagtaaactggagttcaagttaatgagatatctgttgtcttttaagtaaattgcaaacctcgatattataattattgttaattataaattcctattgacacttatctcacaactgactataagtaactgattaagaactaatgtagtaccctgtgagatgaaggggtggaggataatggccggaggtaaacatgacaggtcctctatgtgggccagatcttttttatattcatcttgctgaactttcttttgggctgacagttcattcgctcattcattcattcattcattcaacacatatttgttgagagactgctgtgtacactaggcttgaggtacatcagtgaacaaatgataaaatgcttttcttaatggacccaaacttctagttgggagagaaagacaataaacaatgatgataaccaaattctgtagtatataagaaagtgataagtgatagagaaa

SEQ ID NO: 396029 - DNA, 213 bp, Homo sapiens
ggaggccttgagtattaatttacagatcagagaggtaagaaaaagctaaaatgtctacactatgttgtagagcagtgatttcctaataacaagtgaggcacagataattaaatcagattcagttgtgtggagcgagatgagagtaggtaaggaagacattctctctcttttttttttttttttgagacggagtctctgtcgccaggctggagc

SEQ ID NO: 396030 - DNA, 584 bp, Homo sapiens
gagttttacaagccactgagtcgacctcatctaatctctaaaagaaaggagttgcgcatgtcttaatgcccactgagctctgcttgctctcttttgaagccttttttgtgggagggtaggttactagcccaaagccacacagctgcttagcgaaagagaaagggagactaggacccagccctcctactgcccttcccagcacataattgtttctttgctctttattcttaatgtccttctacaaaacaaaaaccagtttgtaatgtcaaaattgagtggttttgaaaataagcttaagttggccgggcgcggtgggctcacgcctgtaatcccagcaatgtgggaggccgaggcgggcggatcacgaggtcaggagatcgagaccatcctggctaacacggtaaaaccccacctctactaaaaaaatacaaaaaattagctgggcgtggtggcaagtgcctgtagtcccagctgctggggaggctgaggcaggagaatggcgtgaacccgggaggcggagcttgaagtgagcccagatcgagccactgcactccagcctgggtgacagtgagactccgtctcaa

SEQ ID NO: 396031 - DNA, 212 bp, Homo sapiens
tatgtagttggctgattggtgaaactgatttattttgagttcttcatctattagaaatgacataaattaaaccacttctttagcacaggttctgacatgtaattaatacctagtaaatgattctcttaatatagccatgcttttatttgtagtttgatatcttttactactagtaagtgttctttctgtgtctgcatgtctaaggtctctaa

SEQ ID NO: 396032 - DNA, 556 bp, Homo sapiens
  misc_feature (70)..(70): n is a, c, g, or t
accgccctatatacctaccatagctatgtatgttttaagaggttctgtttctcatattctaccaatattntgttgtactcagtctgttcattttagtcttttcaggagcataaactgagatttactatgattttaatttgcatttccctattgtctaagatgatgaacacttttcatgcgcttctatcttcctttgtgaaatgtctgtcaatttttttgccatttagaaaactgagttcagacagaccccaccctctacgaaaaataaaattaggccaggtacggtggtttacgcctgtaatcccagcactttgggaggccgaggtgagaggtttgcttgagcccaggaatttgagaccagcctgggcaacatagcaagactctgtctctacaaaaataaaaatcaaaattttaaaaaatctgtgcatttcactgtatgtaagttttgatgccaagtaaagggaggagaggaccctgggaaagatgaaaatgactgagccattggctgctcatccttctcccctgctgtcattgcacgaattctgatgtggagaga

SEQ ID NO: 396033 - DNA, 293 bp, Homo sapiens
cagtatgtcattgtaatcgttctattttgttaatctcttactgtgcctaattttacatgaaattttataggtatgtataggaaaaaacagtatagtcatgcgcttcataatgatgttttagtcaatgatggattgcatatatgacagtggccccataagattgtaatggagctggaaaattcctgttgcttggtgatgtagccaactaaatgtcatagcacaacatttgtggtgatgctagtgcaaactaaacctaccatatttccagtcacataaaattcataataaaccac

SEQ ID NO: 396034 - DNA, 275 bp, Homo sapiens
ttcccaatttagtgcttgtggatttatcattcctcctgcctagaatgtcctttcccactctcttctccaagttaattcctactcaaccttcaaaactcagtttaaatataacctcttcccaaggccttccccaatctctccaggtggagtcaagtgctcccacaaggccaagtaacatacatcatgttgtctgactattattaggtcctctggactgtgaggggctgaaggacagcagcatgttatactcttgtcatttatatatacatacgtgt

SEQ ID NO: 396035 - DNA, 546 bp, Homo sapiens
gatatgaatatgcaacattgtgttaaatttaataaaaatgctataaaaatggagtgttaatttatagatgattctcagatattgtctaagaataaaggagagaatgtgtgcctcaaaggagagctgcatattgatgaaatccttttccgctgtggaattggtgctctctctaaatagatgattttggccttggtttaatttttacaaatctttatagaatattaagtaatattttatagacttgagatggctcgggctgtggaacagtagataatctctccatgatcctgcccaacgcagaccttggttcagtagggaggaccttggagtgcacggtttgggagcagaggccacccatggtgaggagaggggccctagaaagctgacttgctcagccttcttcaggattccagatgagtcaagacaagccctggcatggagataagaaaacactacctctgctgacctcctgtgagatggcttctattttggcctcttccaggatccctaggtccatgtagaatatatttaagaagggaggggaaa

SEQ ID NO: 396036 - DNA, 276 bp, Homo sapiens
gaactatacctggtctttgtccctggttcctaacacagagcacctaaacgccttagaatttcttaggagacacttttatcttttgctgttcataataagcctttgttcacaccggaatttatgctaatgaggtgactcacagtggggctgctatgctagcctcaggatgggattggtcaccagaaagaccaaaaatgtgattagagggtgggaactatcggccccaccttcccacctgtaggaagaggatgagctgaagattaagtgctataaaaa

SEQ ID NO: 396037 - DNA, 366 bp, Homo sapiens
ttttcctaatagttggcttctttgaatcaggatccaaacgagggtcttttctcccctctggcccctcccagcctggtgaaggagcagcccagctgtcctgcagccctccccatgggctctgatgtctcccaagctgccgattcatcctgcctgccccctccttcttatgaactgggtgctaaatcggagagcagagagggtgccgtggtcttttagcaaaaatatatccgaagtattgccttaatttgtatttctgggcatcttgatattcccataagaccacaattcggaggtttggagagcaacaacagcctgacccttgtaaagctcctattatccttccgatggtttcatcatttaattagg

SEQ ID NO: 396038 - DNA, 310 bp, Homo sapiens
cttgcaaattgtgagtgaggcatatcagctggtgctttcttttctctgtgggctgccatttatgaatctcttggtttctctctgtctctgtccctccacttttctctcctttgctggtgtgtgcattccctctgacgccctggctctcactctttcattctgttttttattctggctccctctgtctttgtgtttttttttttaattttctttttttgaggtggggtcttgcactgtcacccaggctggagtgcagtggtgcgatctcagctcactgcaacctcttcttcctgggctcaggcaatcctct

SEQ ID NO: 396039 - DNA, 839 bp, Homo sapiens
  misc_feature (24)..(25): n is a, c, g, or t
taggctaggtacgaggctgggtgnntgagatggagtctcactctgttgcccaggctagagtgcagtggtgcgatctcagctcactgcaccctctgcctcctggttcaagcgattctcatgtctcagtctcccgagtagctggggttacaggcatgcgccaccaagcctggctaattttgtatttttagtggtgatggggtttcaccacattggtcaagctagtctccaactcctgacctcaggtgatccacccgccttggcctcccaaagtgctgggattacaggcgtgagccaccgcgcccggccactatatgcttatttaagagggtaaatattatggttatgtgaattttatctcagaaatttttttacccaaaaggtgcagaaaaacatatctggtaaaattcagccacatatgattcaataaacaaaaaaataaagtcttcagagaactaagactaaacctgataaagaccatttacaaaaaaagcctacagctaacatacacatagtgaagaatgctttcctttaagactgggagcaaggcattcttattcaacaatgtagctcactgtgcaataaggcaggtgggaaaaaggcccacagattggaaataaataaataagactacttgatgatatgaatgcctacatagaaaaatcaaagaatctcaaaatactagaataagtgaatttagcaaaattagtatgcaaaagttgactgtacttctatgtagtagcaatgatgtttagaaactgagatttttaaatcaccacttacagatttcagaaaacatgaaatctaacaaagatatgtaagatctgtgctgaaaagtaaaa

SEQ ID NO: 396040 - DNA, 252 bp, Homo sapiens
cctgctcagagcccacaaaatcgtattgaaattccagggaacaaaaggcctccaactctaccactccccagtgcaacctgtcctcctgccatcccaaatcccttgccagtctccacacttctattctcctccctcctccgggcctctgcgcgtgctgttcctttatctgcctcccaacagggctcgcgttccttgagaccatctgcagctttgcatccccagcacttgacgcgtagaagtgaagtcttgatg

SEQ ID NO: 396041 - DNA, 407 bp, Homo sapiens
cattattttaatttgcattggttatagtgccaacacaaagaaaaaacacactcaagatcttttttataaagtagggatttaattctaaatcttagtcatatcttacaatttataaattctttaatgttgaaaaatattttctttgtagaactaaaaccattctctctctctccctccctccctctctctctttctctctgtctgtttgagaacccaaaataaaatgtagtttataatttgtgattatgatttgaacttttcaaaaaatgtatgagtcatttcttgccctttgataatttccaaatgatgatgctttgcttttgcttttagagatcagtctttgcttttaattatttccatatattttggttgggagtgagaaaaataaacggaaaatgtcactcatg

SEQ ID NO: 396042 - DNA, 297 bp, Homo sapiens
cgatagttagaccaaaatattataatagaaatctacatttgctaagatctgatgtaatgctgaaattaacaagatttttttttcttttgatttatcaacatctatctacccacaataaaagaacacagaatactgaggcaggttagcaagctctgtagactaaagctgtgttactgagaaataatctcgaacaattgtgaaaacattcgcacatttcaaaatgactgtctctcttggtggcctgatctcccagctaggaaagacacactgatgttactctcgaggggacagaggcag

SEQ ID NO: 396043 - DNA, 184 bp, Homo sapiens
acagagaacatgggagaaggaacagctctgagggagagaagatactgatttgttttgttttgcttttcttgtggttgggtgaggatttatttaattatttgaaagtgttaagatactgccatagctatccttttgggggaattattttggggacaatagttttcattcttcattcacttattta

SEQ ID NO: 396044 - DNA, 686 bp, Homo sapiens
tagctgttcagaggattaccaaagatcttggagcatcaccctttatggacacaggattgcttccaccttctggctactgtgaataatacatgtatgaacatgtttatacagatatctgagactctttggggtatatactcagaaagagtattgctggattatgtgggaaatctatgtttaatttttttgaggaactgctatattttttcacggcacttggcacaattttacatgaccaacagtgcacaagggttccaaactctccacatccttgccaacacgtgttactctgctttccaaaaaaaagtttttaattgagatgggatctcacacatagtgagagacccagcctggtctcaaaactcaagtgatcctcctgcctcagcttttcccagagtgctggaattacaggcgtgagccaccgagcccagccttgaggctcattttcaaaaggagaagggtaatgaactaggatttatgccccaaattcatatggaagatttaattatgtatgtcaaagggtgctgtcgtttgcatatttagccatgggtttagggttttaacctatggtttgcatgttgatgttacttttagatgctggcaatcaaccattggaggacaataatgtattgactggaatgttgacacaggcgcttgaaagttgacgaaagtaagagaaacgagaa

SEQ ID NO: 396045 - DNA, 413 bp, Homo sapiens
tcccagaaagccaggcaaaaggcaggaatgaggagcagcggatagtgacaaaaaggggcttggaggaggggttttgcgcccctgcccttgaatgtccgtctgatgtacaaaacagtcgttttcttaatcttatgcaaaggactatgagcgtgcattttcaagccctactaccaccaatggctgtcgctaacccacccaccgctcactatagaaattttggatcctcgcttcatgtataagaaacaggttgacctttctctagtccagagggaagcaaagggccagtcttggcgcggcttaacctgaacaaagttcaaaagtatttccttgccctccaagaaacataaacttcctggtgttggaagtattgatacactcattataataggaataaaaattctgctccttcatag

SEQ ID NO: 396046 - DNA, 332 bp, Homo sapiens
caagaagaggcaaccaactgcaatggaaatgaaaagcagaagtaacaaaatgccaaatcaaggcaagatcaaatgcatagtacacatgtatggggatggatccaaatcaatgtcttcatcaacaacgttttctcttagcttactgtagatcctcactggtctctcaggtagtgttaccttggaattaccctggaatccttcagagcctaacctgttcctaagtagctatctttcagatgtcctgtttcctagaaagagaaacgacctcatgctgcaaagcatgctcttgtctttccagtttgcccactggctaaataaaaatccaaaactag

SEQ ID NO: 396047 - DNA, 450 bp, Homo sapiens
ctgttctcctcatgtacttacatttcttccctgctctacaaacccgattttagtcagtcaggaggatggatttgagactgatctcctatctcctcggctgcagcacccaataaagccttcttccctgacaataatcattgtttcagtgattgattttctgtgcagcaagcagtaggacctaaccagaacccctggcatttcagtaacacacatttctctactgtagcactaatattgtaattagtttaattattactttacatatcttcttcactagactgtgaattcatccaaagaggccaagcttaatgacctgccacagagtctagcatattatagctcagaaaggcataacagtagaagttctcctaaccaatctctacttaatgatgacttattggtgaactgaacattctctgtagcacagtgagtacatacacctagtaggcg

SEQ ID NO: 396048 - DNA, 276 bp, Homo sapiens
ttttttctctctctctctctgaaaacctctaggatcttatttttaccttcccacattccaaaatttcacagtgaaagggtggccttccctacccacccatctaaaatggccactcacttcttgccattttttagctcattttcctgcttaattttacttgtttttttgttgttgtttcttgttttgaaatggagtcttgctctgtggcccaggctggagtgcagtggcacgatctcaactcactgcaacctccctctctcgagttcaagtgattct

SEQ ID NO: 396049 - DNA, 401 bp, Homo sapiens
ttcaagcaattctcctgcctcagcctcccaagtagctgggattacaggtgactgccagcacgcctggctaatttttgtattttagtagagatggagtttcaccatgttggtcaggctggtcttgaactcttgacctcaattgatccgcccaccttggccccccaaagtgctgggattacaggtgtgagccaccacacccggccaattttacttaattctttcaccaaatatgtgactaagcacttacaatgtaccagacatggcactatgccatgtggatacatctatgaaagaggcaggtggaatcactgctctttccaagccactgcgtgtgcatggggccagggataacaaacagaggagcaagtacatttacaaaatgtcaggagattagtgacaaa

SEQ ID NO: 396050 - DNA, 287 bp, Homo sapiens
aggacaaccaatgaacatgatataggacaaaatacaataaacaaaacttttacagggattatgggaaagattataaaaagataatagatttgtttctgatccaatttatgtatgcagaattctttggcattctaagctaaaatttttagttcataattatgtgattcatattataactaaatgcctttatgtttcctaaaaaagtaagagttaatgcagataatgggtaaaagaaaatttcaagcaattaaaatttttccaaagacatagctactacagacacacac

SEQ ID NO: 396051 - DNA, 240 bp, Homo sapiens
acctagaggaccccggatgaggggaataaggaaaccatgaaggcatcttactgacagaactgatgaaaaaggatggtaatggagagtgtaagtacagggatgacaataagtagattaaaataaagaaattggtacaaaggagaccaggaaagaaaagtaattatttgagaaagtatacatggctctggaacggcaagcttagatatgaccctcgggtcttaatttttttttttttttttt

SEQ ID NO: 396052 - DNA, 376 bp, Homo sapiens
atgggaacgatcacttataaagttaaaatctgtttgtttttgttttaatgtaaggcttgcttttccttctacaaccatgaacaagcctggcctccctgagacacactgcatcctgtttaagttaatgggccttgactttgtcctttgtcaggagctctcccatttatcttcagagaagcacgcttggcacagttccactgactttgaagtcaacattttaaatatttcagagttagaattcctagtggaaatatcttaagacataggaagaagataaatacacaaggtaacgtgaatgttaactgaaggatgaggtctgaggatactgagaaatcctactaactttataaactttagataaacattaaaaaaataa

SEQ ID NO: 396053 - DNA, 472 bp, Homo sapiens
acccctcaaaatcatccacatggatccacttcctccatccacttcttagcatccacttcttctaaattagcatccacttcttccacattcctattcatgttgatattttcacctcctctcctgagtcacaaatgttcttactggcatctacaatggaaggttttcagtttactttgcccagatccaacagaggaatcactgtctattgcagctatagccttacaaaatgtatttcttaaataatgtaacttgagggtcagatatggtggttcacgtctgtaatctcagcactttgggaggccaagggaggaggattgtttgaggccaggagttcaagaccagcctgggcaacaagagcaaaactctgtctgaaaaaaaaaaagttacttttatactatactgtagtctattaagtgtacagtagtatgtctaaaaaaagtacataacttaaaaatactttatttgctgaaaa

SEQ ID NO: 396054 - DNA, 438 bp, Homo sapiens
caggaaggctcgggaaggcaggcatggtgatacctgtggccctgcatctccagagaagctgttccagctcctcgggagcaccactgagtccctggtgacctgcagagatgcagggatggcctggccagagctctggtcccacttctgcccttgccgagaccacctccccacccctcagagcctctattttccccttaaaatgggaacaagctcatctggaggagtcatagggttggacatgtaagggagggtgaagggctgtgtggccctgcacggttactgccatctcccacccacagaatgggagcattcacttatttcaaaccaggagagaagggactgcgtgtattgcatgtgtatgtgtttgtaggccctgtgcttagcatgaggtgggcctggcacaagaagcttgtcatccctcgcccttaaaattccagt

SEQ ID NO: 396055 - DNA, 539 bp, Homo sapiens
agtataagcatattctagatcttcttacaggcgtgtcatttcactgtctgaatttgggtttacacacatgaaggcacgatggaatgctattttcactgtctccggttaatgacaacagaagcgggctgaacttcgtgcacacatgatgcccctgtgggagctgcaggccaaaggctgctgaacaggaacatacaaaagaactgcagaaattcaacagagaaaagggatgggcaagactgtgggggtcggcaaacaaacccaaatgaacctgccatggagcagccaccaccatattcatgatttgtgcaagagtttagatttaagaaacattattggccacattaagttaatgttgttcatttgaaggtaatggctttgccatttttgtatttaatttgtaaagatgtttggctttatggttgtataatggttgtcaacagaaggagtttagtcctattttatttttacacatatttaagtaacattataatcaaaacaatttagttcaatactgcagtaccaagagattgtctttctat

SEQ ID NO: 396056 - DNA, 262 bp, Homo sapiens
ggctgaggcatattgcatacgtgcatgcacacacacacacacacacacacacacacacacagggctgtggccgaggcatatgcatatgtgcacacacacatcatcacgcactttctacccgttctacagacacacatcatcacgcactttccacccgttctacagacacacatcatcacgcactttccacccgttctacagacacacgtcatcacgcactttccacccgttctacagacacacatcatcatgcactttccac

SEQ ID NO: 396057 - DNA, 307 bp, Homo sapiens
ggcttctagggttagccggggagtacctccggcatagactgggggccacatggactcaacatcagaccacagacctgttagaggaggaggcgaagccgtcggtggaaggcacacgagggatctgagtccttttcctccctgcctgtctgtggcccagggagccagtggtggagatgacactttttttttttgagacagaacctcactgtatcttccaggctggagtgcagtggctcgatctcggctgactgcaacctccacctcccaggtttaaatgattttcctgcctcagcctcccacatagctg

SEQ ID NO: 396058 - DNA, 1716 bp, Homo sapiens
  misc_feature (1053)..(1053): n is a, c, g, or t
  misc_feature (1059)..(1059): n is a, c, g, or t
  misc_feature (1136)..(1136): n is a, c, g, or t
  misc_feature (1345)..(1345): n is a, c, g, or t
  misc_feature (1373)..(1373): n is a, c, g, or t
  misc_feature (1414)..(1414): n is a, c, g, or t
  misc_feature (1637)..(1637): n is a, c, g, or t
  misc_feature (1652)..(1652): n is a, c, g, or t
  misc_feature (1656)..(1656): n is a, c, g, or t
  misc_feature (1715)..(1715): n is a, c, g, or t
agcggggcgtgctgggcgtgcgcggctgcggtacggcgtgttggtcccagcggttcagctgaggtagggacgtgccgtaggccggaatgttaccggctgttggatctgtggatgaggaagaggatcctgcggaggaggattgtcctgaattggttcccattgagacgacgcaaagcgaggaggaggaaaagtctggcctcggcgccaagatcccagtcacaattatcaccgggtatttaggtgctgggaagacaacacttctgaactatattttgacagagcaacatagtaaaagagtagcggtcattttaaatgaatctggggaaggaagtgcgctggagaaatccttagctgtcagccaaggtggagagctctatgaagagtggctggaacttagaaacggttgcctctgctgttcagtgaaggacaatggccttagagctattgagaatttgatgcaaaagaaggggaaatttgatgacatactgttagagaccactggattagcagaccctggtgcagtggcttctatgttttgggttgatgctgaattagggagtgatatttaccttgatggtatcataactattgtggattcaaaatatggattaaaacatttaacagaagagaaacctgatggccttatcaatgaagctactaggcaagttgctttggcagatatcgttctcattaataaaacagacttggttccagaagaagatgtaaagaaattaagaacaacaattagatccataaatggactaggacaaatcttagaaacacaaagatcaagagttgatctctctaatgtattagatcttcatgcctttgatagtctctctggaataagtttgcagaaaaaacttcagcatgtgccaggaacacaacctcaccttgatcagagtattgttacaatcacatttgaagtaccaggaaatgcaaaggaagaacatcttaatatgtttattcagaatctcctgtgggaaaagaatatgagaaacaaggacaatcactgcatggaggtcataaggctgaaggtattggtgtcaatcntagacnaatcacaatcaagtgattgtccagggtgtccatgagctctatgttctggaggagactccagtgagctggaaggatgncactgagtgaacaaatcgattggtcctcattggcagaaatttagataaggatatccttatacagctgtttatgagctactgtgtacagacaacagaaaagcagtggatcaacacatttcaaagaagatcgagagtttgtagcataacactagtggctatttcttatcaaaaggattggaaaataaaaataagtttctactgggtatatntcaagcactttatttattactttagttncgaattccaatatacttatacaatatggtatttgttttacngcattatcatatagagattgtagcaaattcagtatcgtgtataagacattttacattcatagcaattttatataatattccttttttttataagaattggtattttgcatcatataaatatcttttgaaattggcttttgtgatgttctacatatactgaatcattgaaagtttatatataatgatgatactaactttcaacatttgtctattttttcttagnacttcagctgtattncagngatataatgattacattgttattaaatttttttaatacaagtaatttctctattttttnt

SEQ ID NO: 396059 - DNA, 1319 bp, Homo sapiens
  misc_feature (656)..(656): n is a, c, g, or t
  misc_feature (662)..(662): n is a, c, g, or t
  misc_feature (739)..(739): n is a, c, g, or t
  misc_feature (948)..(948): n is a, c, g, or t
  misc_feature (976)..(976): n is a, c, g, or t
  misc_feature (1017)..(1017): n is a, c, g, or t
  misc_feature (1240)..(1240): n is a, c, g, or t
  misc_feature (1255)..(1255): n is a, c, g, or t
  misc_feature (1259)..(1259): n is a, c, g, or t
  misc_feature (1318)..(1318): n is a, c, g, or t
ggcagagaggcagaaggcccatgaggggaaggtgcagtggcttctatgttttgggttgatgctgaattagggagtgatatttaccttgatggtatcataactattgtggattcaaaatatggattaaaagtgaaataccactaaaggcagaagagaatgaaatcatcccacccactgacccgttcccaatctgagcatatggatagggcccaaagcacatttaacagaagagaaacctgatggccttatcaatgaagctactaggcaagttgctttggcagatatcgttctcattaataaaacagacttggttccagaagaagatgtaaagaaattaagaacaacaattagatccataaatggactaggacaaatcttagaaacacaaagatcaagagttgatctctctaatgtattagatcttcatgcctttgatagtctctctggaataagtttgcagaaaaaacttcagcatgtgccaggaacacaacctcaccttgatcagagtattgttacaatcacatttgaagtaccaggaaatgcaaaggaagaacatcttaatatgtttattcagaatctcctgtgggaaaagaatatgagaaacaaggacaatcactgcatggaggtcataaggctgaaggtattggtgtcaatcntagacnaatcacaatcaagtgattgtccagggtgtccatgagctctatgttctggaggagactccagtgagctggaaggatgncactgagtgaacaaatcgattggtcctcattggcagaaatttagataaggatatccttatacagctgtttatgagctactgtgtacagacaacagaaaagcagtggatcaacacatttcaaagaagatcgagagtttgtagcataacactagtggctatttcttatcaaaaggattggaaaataaaaataagtttctactgggtatatntcaagcactttatttattactttagttncgaattccaatatacttatacaatatggtatttgttttacngcattatcatatagagattgtagcaaattcagtatcgtgtataagacattttacattcatagcaattttatataatattccttttttttataagaattggtattttgcatcatataaatatcttttgaaattggcttttgtgatgttctacatatactgaatcattgaaagtttatatataatgatgatactaactttcaacatttgtctattttttcttagnacttcagctgtattncagngatataatgattacattgttattaaatttttttaatacaagtaatttctctattttttnt

SEQ ID NO: 396060 - DNA, 1572 bp, Homo sapiens
  misc_feature (909)..(909): n is a, c, g, or t
  misc_feature (915)..(915): n is a, c, g, or t
  misc_feature (992)..(992): n is a, c, g, or t
  misc_feature (1201)..(1201): n is a, c, g, or t
  misc_feature (1229)..(1229): n is a, c, g, or t
  misc_feature (1270)..(1270): n is a, c, g, or t
  misc_feature (1493)..(1493): n is a, c, g, or t
  misc_feature (1508)..(1508): n is a, c, g, or t
  misc_feature (1512)..(1512): n is a, c, g, or t
  misc_feature (1571)..(1571): n is a, c, g, or t
agcggggcgtgctgggcgtgcgcggctgcggtacggcgtgttggtcccagcggttcagctgaggtagggacgtgccgtaggccggaatgttaccggctgttggatctgtggatgaggaagaggatcctgcggaggaggattgtcctgaattggttcccattgagacgacgcaaagcgaggaggaggaaaagtctggcctcggcgccaagatcccagtcacaattatcaccgggtatttaggtgctgggaagacaacacttctgaactatattttgacagagcaacatagtaaaagagtagcggtcattttaaatgaatctggggaaggaagtgcgctggagaaatccttagctgtcagccaaggtggagagctctatgaagagtggctggaacttagaaacggttgcctctgctgttcagtgaaggacaatggccttagagctattgagaatttgatgcaaaagaaggggaaatttgatgacatactgttagagaccactggattagcagaccctggtgcagtggcttctatgttttgggttgatgctgaattagggagtgatatttaccttgatggtatcataactattgtggattcaaaatatggattaaaacatttaacagaagagaaacctgatggccttatcaatgaagctactagatccataaatggactaggacaaatcttagaaacacaaagatcaagtttgcagaaaaaacttcagcatgtgccaggaacacaacctcaccttgatcagagtattgttacaatcacatttgaagtaccaggaaatgcaaaggaagaacatcttaatatgtttattcagaatctcctgtgggaaaagaatatgagaaacaaggacaatcactgcatggaggtcataaggctgaaggtattggtgtcaatcntagacnaatcacaatcaagtgattgtccagggtgtccatgagctctatgttctggaggagactccagtgagctggaaggatgncactgagtgaacaaatcgattggtcctcattggcagaaatttagataaggatatccttatacagctgtttatgagctactgtgtacagacaacagaaaagcagtggatcaacacatttcaaagaagatcgagagtttgtagcataacactagtggctatttcttatcaaaaggattggaaaataaaaataagtttctactgggtatatntcaagcactttatttattactttagttncgaattccaatatacttatacaatatggtatttgttttacngcattatcatatagagattgtagcaaattcagtatcgtgtataagacattttacattcatagcaattttatataatattccttttttttataagaattggtattttgcatcatataaatatcttttgaaattggcttttgtgatgttctacatatactgaatcattgaaagtttatatataatgatgatactaactttcaacatttgtctattttttcttagnacttcagctgtattncagngatataatgattacattgttattaaatttttttaatacaagtaatttctctattttttnt

SEQ ID NO: 396061 - DNA, 1804 bp, Homo sapiens
  misc_feature (1141)..(1141): n is a, c, g, or t
  misc_feature (1147)..(1147): n is a, c, g, or t
  misc_feature (1224)..(1224): n is a, c, g, or t
  misc_feature (1433)..(1433): n is a, c, g, or t
  misc_feature (1461)..(1461): n is a, c, g, or t
  misc_feature (1502)..(1502): n is a, c, g, or t
  misc_feature (1725)..(1725): n is a, c, g, or t
  misc_feature (1740)..(1740): n is a, c, g, or t
  misc_feature (1744)..(1744): n is a, c, g, or t
  misc_feature (1803)..(1803): n is a, c, g, or t
agcggggcgtgctgggcgtgcgcggctgcggtacggcgtgttggtcccagcggttcagctgaggtagggacgtgccgtaggccggaatgttaccggctgttggatctgtggatgaggaagaggatcctgcggaggaggattgtcctgaattggttcccattgagacgacgcaaagcgaggaggaggaaaagtctggcctcggcgccaagatcccagtcacaattatcaccgggtatttaggtgctgggaagacaacacttctgaactatattttgacagagcaacatagtaaaagagtagcggtcattttaaatgaatctggggaaggaagtgcgctggagaaatccttagctgtcagccaaggtggagagctctatgaagagtggctggaacttagaaacggttgcctctgctgttcagtgaaggacaatggccttagagctattgagaatttgatgcaaaagaaggggaaatttgatgacatactgttagagaccactggattagcagaccctggtgcagtggcttctatgttttgggttgatgctgaattagggagtgatatttaccttgatggtatcataactattgtggattcaaaatatggattaaaagtgaaataccactaaaggcagaagagaatgaaatcatcccacccactgacccgttcccaatctgagcatatggatagggcccaaagcacatttaacagaagagaaacctgatggccttatcaatgaagctactaggcaagttgctttggcagatatcgttctcattaataaaacagacttggttccagaagaagatgtaaagaaattaagaacaacaattagatccataaatggactaggacaaatcttagaaacacaaagatcaagagttgatctctctaatgtattagatcttcatgcctttgatagtctctctggaataagtttgcagaaaaaacttcagcatgtgccaggaacacaacctcaccttgatcagagtattgttacaatcacatttgaagtaccaggaaatgcaaaggaagaacatcttaatatgtttattcagaatctcctgtgggaaaagaatatgagaaacaaggacaatcactgcatggaggtcataaggctgaaggtattggtgtcaatcntagacnaatcacaatcaagtgattgtccagggtgtccatgagctctatgttctggaggagactccagtgagctggaaggatgncactgagtgaacaaatcgattggtcctcattggcagaaatttagataaggatatccttatacagctgtttatgagctactgtgtacagacaacagaaaagcagtggatcaacacatttcaaagaagatcgagagtttgtagcataacactagtggctatttcttatcaaaaggattggaaaataaaaataagtttctactgggtatatntcaagcactttatttattactttagttncgaattccaatatacttatacaatatggtatttgttttacngcattatcatatagagattgtagcaaattcagtatcgtgtataagacattttacattcatagcaattttatataatattccttttttttataagaattggtattttgcatcatataaatatcttttgaaattggcttttgtgatgttctacatatactgaatcattgaaagtttatatataatgatgatactaactttcaacatttgtctattttttcttagnacttcagctgtattncagngatataatgattacattgttattaaatttttttaatacaagtaatttctctattttttnt

SEQ ID NO: 396062 - DNA, 482 bp, Homo sapiens
cttctactgtgtttacagaaaaacaaaataagaccctcattggctgggagatttgcccaggatagtagagtgaatttttggcaaaacgggggctagaatccaagtcttctgactcatctctggtggtcttctacagctctgcccactggaattctagtgaatttgaattccaatatttgaatgccaatatttgtgtagaagtcttgaaattgagtgctttgctcatttatttggcagctttttattgagtgcttaagtgcctgttctgggcctgtgctgagctctgggaatgcagagatgaataggtggggtccctcttctcaaagaggtcttagtatggtagcttaaagctgatagattatttgtggataggagtcaggtcttaaacttgatgtgagtggcaggtgtgtcctcaaactattgggcctcaacctcgagccattgctgttgatggaaagggtggtttattaaattaagaacta

SEQ ID NO: 396063 - DNA, 297 bp, Homo sapiens
acataaagaaagccaaagataaagagtagaaaatcttgaaagtagccaaaggaaaattatacattacataaaagtaacaataattccagtgaccactcactttgaatcagaaaccaaggatgccaggagatcgttataacagcatttggaaaaaaaaacttggctgggcctggtggttcacgcctgtaatcccagtgctttgggaggcggaggtgggagaattgcttgaggctaagagtttgagatcggcctgggcaatatagcgagactctagcgagactctcgtctctacaaaaa

SEQ ID NO: 396064 - DNA, 537 bp, Homo sapiens
aatcaacttacacaaaagaaaactatgatatttttgctgagtaatagagattctgaaaggcaatggagaggaggaggatgagctttgtaaaatcagctaatccagatagaaagtgtcagttaatttaacatatttttattgacggttttacatatgaacaccactgttgtaggaatggtgaatcaatcataaatcttgtcttaaaggagcttctagtaagggctagaatgcacgttcataaataacaacagaaagcagaaagtcttaagtgtcttgtgaaaaaaagttcaaataaattacaagagggagaattactttttagctggagagtaaatttggatagacttgaagcaaactattgtttgagcaagatcaaaaggttggataagttttggagttaagaaggaaagatattccaggatcgtatctgtagcagcacaaacagatgctatagaaaaatgaatttctgagtttctagtatgtaggctgcacagaaggtagagtttgtgtgtgtgtgtatgttatatatatgtgctg

SEQ ID NO: 396065 - DNA, 348 bp, Homo sapiens
gcatttctgacaagcctcttggtgatttcagtgctgctggtctgagaacggcactcagtagcgagaggctagagattgccatggggcatcttggagaatatcccccagcagagagaaagataaaagaaggctcagccaagcaggcaccatgctgaggataagtaaggattggtcagatgagaagcagtgtttgggtgggcgggggtggcgatggcagaggtgacataatgtggagaccctgaggaaaggcaaagagaaagagcttcgattagaattgacaaggaattgctgtcattgccggagtgcagaaggagtagatgaaaatatcccgctcttggactgtggttt

SEQ ID NO: 396066 - DNA, 508 bp, Homo sapiens
tcatgaattttggagaacacaaacgttcagaccatagcaaaagcagagtttttgtttatttttccttaaaacatgcagtagtctctgggcctgctctatcaactggaaatgtatcacacaaaatataaccatcgaaatcatacatataagaaatatcagaatttatttaaaattacagtttaaaaaggtagagttcatcagttaaatgtctcaaatccaaatatgttaatattttgctataaaatgtaattataaattacatatttttcagtcatttagtcacaactaacaagtgctaattgaccctattttattttgttttgttttattttatttttagagacagagtcttgctctgttgcccagggtagagtgcaatggcactaatcctagctcaatgcagcctgaggtgggagaatcacttgaagcccagaggtggaggttgcagtgagccaagatagtgccactgtactctggcctgggtgacagagtgagactctgtctcagg

SEQ ID NO: 396067 - DNA, 661 bp, Homo sapiens
agggatgaatacattttttaaatgtggtaagtatgtgatagatatctatatctacctacacacacacacacacacacacacacacacacacagatgtataccatttaatatttagcctttaaaaagcaggaaatgtcatttttgtcagcgtggatgggcctagagaacatcatgctaagtgaaataagccaagcatgggcagacaaataccacatgatctcacctatgtgtggaatctgaaaaactttaattcatagaagtagagagtagaatgtggtttccagaggctgggaggctgggggaggagggtagacagagaaaagggaaaaggtcttagctaaaggttacaagtttcagttaggtagaaggggaataagttaagatgatctattatacaacttggtaactatagttaataatactacattgcatatttcaaaatagctgagagaatggactgtaaatattctcaccacaaagaaacaataagtatttgtggtaacaactttggtagcctgatttgatcattccacaatgtatacatgcattgaaatatcgcattataatccataaatatataaaattattacttgtcaatgaaaaataaaactttaagagttttgaaaaagttgtaaagtagaaataaaatgtgtctaagatt

SEQ ID NO: 396068 - DNA, 195 bp, Homo sapiens
gttttgacagcagccataaatggcaaggatatccatagttctcaaaactattcccaacctttctcctgccccagttgtcctcttcttatttggaacatcttcttgatgtatcagtgaggttaatgaagaattcattttgctgttgcccaggctggagtgcagtggcatgatcttggctcagtgcaacctccgtcc

SEQ ID NO: 396069 - DNA, 619 bp, Homo sapiens
gactgaaaaggaaccctcatagagaacaccagaaaagggtgttatagacaccagcttcctaccacctgagacattaccaattgcatttctaaaatacaagcatgagctcctccaggaagctggtcctttacctgtccaaatccttcccactcccacctgggttaggtctactattctctggctggcatggcatcctgtgcatacacatacgataacacactgtactggaactgcctgaacactgctttgccagtcttcattaccataggagtatcttgtgatcagaggcttatgtcttactcatcttctaccatcttctacctggcatagttggtgcttagcaccccccaaaatgaatacttaaatataaatctaacaaaacacgcatggtattgatatgaggaagaactaccaaactccaatgaaagatagcaaaaaaagtggtaaataaggggagacagtgcatgtacttagataagaagactcaactttgtcaagatatcatttttttcccaacttcatctataggttcagcaaaatccttatcaaaatcccagcaagttattttgtggatatcgacgaacttgattctaaagtttacatggagaggcaaaagacc

SEQ ID NO: 396070 - DNA, 522 bp, Homo sapiens
atctaggacctttgatccctggagtctgcagatgtcgctgttataggcttgtccccctctccaccccagacgtctaccaccaggtctcctttcccgggagcaagcccatccctggacgctgccgttcagcgcttgggagactgcaggggcggggagcgttgtgtgcctggttttggggtgctggggggcgagggcttgtaggtcccgcgacccacggggagggggcaggcgagcaccccgctccggcctccggctaatcccccttctccagcgtcggttccccggtcccgtgttattcaagacagaaaatattcagccccagagcctcccctggggaggggaggggaaggaggtggagtgggaggaggtggatccagggaggaagaagcgagaaatccgcccccgggaaacagctccgcgcggccacggagcgaggcgcttctgtcacttggcgttcgcgggcgccggagctgggccccggcccggcccggcgaggcgaggggagagtccggcggccgccgc

SEQ ID NO: 396071 - DNA, 447 bp, Homo sapiens
aaggccaatttaaagaatcccccgaccatgtcgtggttgttcgtttaaagagaatatagagtgacaggaggtggaaaccctgcttttcgtagcccaacttccgcagaaggaaatgctggtggcccaaaagttgcaacaaacctctttaaaaagctcttaatacggctgggcgcggtggctcctgcctgtaatcctaccactttgggaggccagggtgggcagatcgcttgagatcaggagttcaagaccagcctggccaacatggcgaaaccttgtctctactaaaaatacaaaaaaattagccggtgtggtggtaggcacctgtaatcccagctactcgggaggccgacgcaggagaatcgcttgaacctggaaggtggaggttgtagtgagccaagatcatgccactactctcccagcctgggcaatagagtaagactccgtctc

SEQ ID NO: 396072 - DNA, 381 bp, Homo sapiens
aataaagaaataaagcaggtacagtgaggccaatcggccaatataaagcatctggctaacggggcagggggaaaaaaagaatcaattagaccaatgggcaataatgagggatgatggtcagagacatcttcccaggcaccgtgctaagcaattttataggaattatctcatttacttcactcaacaaccctgtaacataggctgtgtttttaatctcacttaatagatgaaaaactgaggcacaggttgatgaaataactgaatatacctctgatccctggtctgcctgtcaccggagcctggctataaccaccacagtagactccccagtggccagctttggtcagcacgtgaggtgctgccctcagtcccttgcattta

SEQ ID NO: 396073 - DNA, 209 bp, Homo sapiens
agacaacactggaccttctcaggtccagggggcattcagtgagctaatgcacaaaagatctggtccacagtgactgcttaaaaaacatccaacaagcgcctctgaacctgtctctcattctgttcattatgctcattccatctctctggtctgctagccaatgaccttcttctaaacacagcaatatttagaagaaggtccaggtattc

SEQ ID NO: 396074 - DNA, 246 bp, Homo sapiens
actcacagccaccctgtgatgcaggctccatggctgtccccatgttgcagatgaggaaactgaggcactcaggggttaacatcgcttgcccaaggccacacagccaggaagtcacagatcagaattgcagccatgcgcagttcccaggggacggcagtgcctcccataggagctgtatttatatgtccagtggtggtggtgcctgcgtgtgccctcctcaaattctagacccctcctggcccaggt

SEQ ID NO: 396075 - DNA, 481 bp, Homo sapiens
gagagcaagacggtttggagccagcctgcctgggttcagatcttggctctgctctttgtaggcagtatgatttggggcaaattatttaacctctctgtgcctgtttcctattctgtaaaatgggaataatacagagtgcctacctcgtaggctagaataaggattaaatggttgattatttgtaaagtgcttagaacagtgcctgatacataataaacactatgtaagtgttcgtaaaataaatctaacaaagaatctagcaaatgaagagcctgccttgtaaagcagtaaactcttcaagggctcatgcaaaggctggataaatctcttttaaggatggtgcagggatatccttcccttctagtctacagatgtatgcttcttaaacttcattatgcacagaaaccacagagggatcatattaaaatgcagattctaagccaatgagcctgaggtggggcctgagattcttttttttctt

SEQ ID NO: 396076 - DNA, 276 bp, Homo sapiens
aaggaagagtgtcctttaagcaaaaggaaaataatcaaaaaaagaaacttagagatataggaaaaaaatatagagcaagggtaaaggagatgcatgggtaaatataagcaaatattgacattataaaatgaagatatgtatgtgttttacagaagaatggaaaaaatgttagtctattaattgaaaggggaataaatggagttaaagtttgctgaggtccttgcattattctgaaagtgacaaaaataataatttatactaaattttaagtcagga

SEQ ID NO: 396077 - DNA, 553 bp, Homo sapiens
aataataaaaatatgcaaatcaaactacaaagtgaacatcttttcctctcataccaaatgcttttcggtgaatattcttgcctgaaatttcatgttatttgcgtatgactggaagctagagttttatcatgaggagagctattggacacagagacactagtcacagtagggttctcaattccttcaaccaactcagaatgcccttttccccactcatcaactatcagatttaatatagtgatcatctttaagtaggtcgacaagtaatttgacattccagaacacagaacctgaatatatatgatacactaaaataatccttccataagccaaaagttggctatgataaaacagataagaacaacaacaaaacctctgttaaagaggccctagataaaatggatttcctgtggctgaggtgctcaaagttaaaacagaaccaggcagacatagctcggtgagggagcagtcatgtactctattctcagagagatgtaaaaatatcacaggacctcccctttcagtcttatttataaaataaacatctaacaga

SEQ ID NO: 396078 - DNA, 766 bp, Homo sapiens
gtctcgaacacctgacctcaaataattcacccgcctcggcctcccaaagtgctgggattacaggcatgagccactgtgcccggccgtgtttggcttcttttatatggcataatgtctgcaaggttctaccaggtggtggcatgtgtcagaatcttcttcctttttaaggttgtcatgttgctgtgtgtctcgtgcacattttgcctccgcacctgtccctggatagaggctcggcctgttcccacctcatggtggttgtggttcatgctgctgggaactggggtgtacagatgcctcttgaagaccctgctgccagtgctccagaagtggaattgctgtttctcgtggtaattatgcttgaattttttgaagaatcatcctgtttttcccagcaccccaccatgctaccgaaacctcacttgaaattccatattgactttccctcagcagccctttccgcagctcctccagctccaggcgtatcctctgccgcacatcacctaccttgagtgaatgatgcggctccgactgctgcattgaaaaggcctggggtcagaggcggaggttgcagtgagccgagatcgcgccattgcactccagcctgggcaacaagagcaaaactccatctcgaaaaaaaaatgataaaagaaaagacctggggtctctcggtatcacctcttcctgtctgttttcctctgaagaggagaagcccacctgctgtgcagtgctgaccgtccccctccctgagacccgctccacccctagc

SEQ ID NO: 396079 - DNA, 320 bp, Homo sapiens
agcaattggaattggaatttttcattagcaccaaaaaatgaaatacttatgtgtaattctaataagacatgtataagatatatatgagaagaaccacaaaactataatgaaagaaaccaaaggagatctaaataaatattccatgttcatagataagaagactcaatattattaagatttcacttcttctcaacttgatctatagactcaatacaatcccaatcaaaatctcagcaagttgtcttgtggatactgacaaactgattctaaagtttatatggaaaggcaaaagactcagaataataaacacaatatggaag

SEQ ID NO: 396080 - DNA, 367 bp, Homo sapiens
agtaatctaagtcaaagtccatgcttcttatccatgctcactgaagcatgttgcacagcctgcgttcagaggcagccacattctcagaaataggctaaagagcctccgagaagctgacagcagctcctagacttcccagaccctttctacaagaacctggtgattgcaatgcaaatgggtcatagatgagaaataaatgtagtgtagtgtctggtagctccactggtcatagaataataggtggttttcttttatgtctccttccgccacccaaatttactctctctgaggaaaataatcactaaacatttgaggaaatctcattagcttggagccagaggacctgcattctagccctgcctctaga

SEQ ID NO: 396081 - DNA, 458 bp, Homo sapiens
gatggcgccattgcacaccagcccgggcgacagaccaagactctgtcaaaagaatcatgttattcacatcatccacgtcctactctctcaactgtgtgatgggaatcactcgtaggcatatggcatagacctctaatgcattgttgggattttttccccaatatcatactataataaattttaaacataaagaaaagttgaaatgaatctacagtgaacatccacatacccttacctagatttcttttaacgttttacacatatctgcccatagatccatcccgctattcatttagcaagtcatcttaattttcctgatgcatttcaaaataagttacagacatcagtacacttcactccaacaaattattattaattatttagcgtgattattatcagctagagttcaaaatttatgttatgtttgcctagaaataaaaaaaaattgtttatgggtt

SEQ ID NO: 396082 - DNA, 462 bp, Homo sapiens
gccgggcgtggcagcatgcatctgtaatcccagctactcaggaggctgaggctgaggaatcgtttgaacccaggaggtggagtttgcagtgagccgagatcgtgccactgtactccagcctgggtgacagagcaagattccatctccaaaaaaaaaaaattctaagaggaagcacaggcatcaaaaaaatgtaagttgaaaagtgattcagaagtagtagaacttgaatgtagacttgttttattttctttttatacatgcagaagcataatatatttttaaactacctaaatgatgtgtaaaacaactttttttatatataaaataaaaattctaataggaaaacaacaacaatgaaggctttaaacgtctataggtttgaaaggtctacagagttaaatgcttgataacaatggtgtagtcactgggagggaaatgagtgggattcaagtgttcaagatc

SEQ ID NO: 396083 - DNA, 262 bp, Homo sapiens
ctggccccagcacaccagcgaaatgtgcttgtcatctcctaagcatttgcgcaaactggctcttttcatctaaaaacaaggctgtttgggtagtgacagttactctcctagggaaagtactactatgatctctttctgcccctgaggatggcagagaagggaatcatcagcatggaagggacctggacgtgagaatgccgcagggacccagcagaggcagggcaagctaggagctagtggacttcagagggagccgtgagga

SEQ ID NO: 396084 - DNA, 380 bp, Homo sapiens
acctcaacgcttatacttctcaacgctttatacttctcaacgctttatactgctcaacgctttatacttctcaacgctttatacttcataagaaaataccctgaacaccaatataatacagagtttttgaattgaaggtaaacctggtatttatgtagtgacgaggttattttattatgaagtacagtagcttttaaatgagcaaacatttttaaaatcatcggatatacgaggttgttacatagtttgagtaacaggaagctcgatcaatcagaggagtaaactttggcatagactattaaaggatagttagggctaaccatctttgttacactgttccgaaatagatatcactttgctgtttggtaagatttcagaag

SEQ ID NO: 396085 - DNA, 567 bp, Homo sapiens
catggagagagacttgggtaggtcactgtcgaggctttctgtgatattgttgagactaggaagcctaaggaaggctctggccaccaacaagaccattgaatttgccccatggaatcttctcaggccttgcacgtcatctctgttgtggtaacttcactccccaatgacctgtcacatttataactacagctgtgattgctcctctaagtcctacacttatatccccctgattacttgatattttgacttcattatcagggtctctgtctaaagtcttctcccaaacaagctcattccaatttcccatccacatgcacttctctgccatctcttcgtgttccaatgaaggacacccccttcacacagatgcccatggaggcctgaccccttatcctggtcctgactcccctcttctttgcacccatagacatcagcaagtctcagggtctctgcctccagcacaggtcctggacttcaccccatctctccatcgttacctccactgccccctaggtcaatccatcaccttcctcaacttcgattcactggtacggcctcccagctggt

SEQ ID NO: 396086 - DNA, 138 bp, Homo sapiens
tgccaggaggaaactgatgttcagagtacttaaatggggagcccagagacagtcccgggtctgggcttctccgctctcaagtccatgttttctctctagggccacgtggggagccctgcgagatgggcctcaatatag

SEQ ID NO: 396087 - DNA, 318 bp, Homo sapiens
tctccaatctcaatataaccacatgactactattagacttttattgactgcccttctacaatttatatgtcttaaaaaattgaattgtacatacttttttggtaacccttttttttcctctttacattttaaagattgtaataacctaagctaaatagaatttttaaaacaccttacataatcaatacctgttcttaaaatttaaacgtatcatgaaatccttccttatatttagtggatataaattattccatggccaggcatgatgactcacacctataatctcaacaatttgggacacctagatgggcagattgc

SEQ ID NO: 396088 - DNA, 490 bp, Homo sapiens
tgcaaattgggatatgtgaattggggtatgattggctcctctccttggcaggtagaataacaccaggcagagaaacagcagccaggcccttcaccaaaccaaaagatagaggatgggtgcctttcagtctggtattttgctggtctagtctccccaagaataggttgatttaatggttgcctactaactgggagattcctagaaaccctggcctggtcccagaaaccaggacagacaccaccaggtggcaccaaactgtagccaaactgagaagagattggactggaccctaaaaactcccagcgtaggcttttgttcatctgtctccatttatacaaatggacgtgcgacatttaaggcgggtgatggaagtcttcaacaactggattgtggtgctggttgcacagctctgtgaatcattgaattgtacattagtgaattttatggtatttaaattataccttaataaagctgtttaaaaaattataat

SEQ ID NO: 396089 - DNA, 558 bp, Homo sapiens
gaaacagtgcagcaatatcatgagctaattcctatatttattttacttttacggtatggttaattgctttgatggttattcacttaaccttttattaatttattcatttgttcagtaaatatttaccaagcttctactatatactaggaaaaaagaaaggtgctagggatatacttggaaacaaagtgcttaatttttttcatattgtgtgataactcaaaaaaatataagattagaattaatgtgaaaaatactataatgaagccagggtaagatactaaaagagtacgaagaaagggcatataactaaagtggagcattgaaaagtttcttagaaaaaaagatatctgagagaagggttagaatgtttaaaaagacagagcaagagtgtgctggtcaatatctaatttcaatgttcgaaatagagaacaataagaaatggtcccagaaaaattcaataatatgcataatttacatagttttggaaatcacattcacaacatttgtatttatcttaagagcaaaaagaaaaacaccaaattaatccaaagagattgc

SEQ ID NO: 396090 - DNA, 347 bp, Homo sapiens
aaatgtgtgtcctgcggaccacttggatgctcagttctgccccctgcctgaagaggaggacacagctccctccaggctgttctggggagccggccttctccgggaggagctgggtggaagctcagcaaatcatcattccatggaggaaggcccttggggacaggggacagaacagcctcccacactcagtacatctggatgtgctctgagatatacgccctagcaccagagatggactctggagtcctcgcaacagccttggcctgaatcttggcctgtctttctgtctgaaaagcaaatgtagggagttggggaccctagagaggaagcatttcccctcacctata

SEQ ID NO: 396091 - DNA, 242 bp, Homo sapiens
gagtgaagtgagaagttccagaacagaatgcaaagaccgaaaagaataagcgtaatgtgttggagttatacacatcaagtaggtagagtaactgccctgatagaaatgagctaagtaatgtattctaaactccagaggcaagaataggaaaatcatttaaaaaccttaaaactctccaacattgactaccaagaatcctaattagattaagaactcaatttttatgcgtccctttagctacc

SEQ ID NO: 396092 - DNA, 496 bp, Homo sapiens
taaatggaatgatgaaattttcattttgtcttagacatatcactctggtgtctgcatggatggagacaagttaaacttctatattggtccacaggtgggagtttggtagctcgggtaggactatagcaatggaaatgatgaaaagtagtcatacttaggatatattttggaagtagagctgacaacatggaccaattgaatgtgggctataaagaaaagagaggaatcaaggatgactccaaggtatggagcctgcataacttagtggtctcttgctgaaatgggaaatgcatcagggcagaaaatcagtggttctcttggccataatgatgtttgaagcttattctatattaatgcaacaaataataattgggggccgggtgaggtggctcacgcctgtaattccaatactttgaaaggctgaggcaagaagatcacttgagctcaggagtttgtgaccagcctgggcaacatagcaagaccttgtctctactac

SEQ ID NO: 396093 - DNA, 290 bp, Homo sapiens
tgagcaagacagagaggtgctggtaggtccctgaaaaatgctagagggaaaggatgctcaggaaagcatattgacaactggcaccatgccttcaagagtgtgaaacctattgactgtggcacaaatttgccctggcatcttcttgtttagtaagtcctggcttccagatgtctgagctatctccacttgttgagcacacttttactcagaagaaaaatgttttggaagaatactgcaaatgcaagcaccatcgcccttggtttttctttcatagacaacaatggcataca

SEQ ID NO: 396094 - DNA, 566 bp, Homo sapiens
aacaatagtaagcggccggtttattcatcggggctggtttgatcttatttatgtgccgtcgtcggcaacacaagagtgtatcttaaattcctggcctcaagtgatccttgtttgttatgctatcttttatgggttgaattgtgttccccgccaaaaagatgttgaagtcctaacccctagtagctcagaatatgatcttatgtaaagtttggaaataaggttgttgcagatgtaattagttaggatgatgtccttataagaagatggccatgtgaagacagaaacatactgggagaatgccatgtggccacggaggcagagattggagttttgcagctgcaagccaaggaacgccaaaaattgctggcaaaccaccagaatctaggagaggagaggaaggattcaccgacaggtttcagagggagcacggccctgcagacaccttgacttcagacttccagcttccagaactgtgagagaataaatttttgttgttttaagccactcagttggtggtcgtctataatggcacttctatggagctaatacactatcctcttaaaatg

SEQ ID NO: 396095 - DNA, 259 bp, Homo sapiens
ttaatctaactaaaggccatatcattagttctagttccaaagccaccaattttaactactgaagctttaccttggcataaccaaaaagatccaataaagtggttttctccaaacaaaggagtctgccctcaaaggaatattcaagcttcggggatggggggaaatgcctgaagcttttaatatggcagtttttccacgtctagccaacagtgtttctccaataaatcttgggatccaatctggcttgatttgtgggctt

SEQ ID NO: 396096 - DNA, 210 bp, Homo sapiens
ttttggattcctcagttcccagcaatcgactccagccattaagagttgaatctttagaagtcaaactttaaaatgcaaattttctaaaaccgttctgtggagagagggaggcttcctgtgaggcccacttcctgtgaagcgtttggtctatggacagcctatttttaaaaatgtaagtccttcctttgaggccccccggaactggcagca

SEQ ID NO: 396097 - DNA, 661 bp, Homo sapiens
tcctggttcactttagcatttagccccaccttgggcggagatagcaatcttgcaattgttccatgcccttcagctctccttggcttgaggcagggaggacctggtctttaatctgtcttgtctttaaccttagtcaatcaggagctgctatgtggtctattcttgttagaccagaggcgcctggtcgcatggctctttttgggaggacttaggttgataatggcaacctcatgctttagggcggacacggtgaacaacagacaacagagggctttatgcagcccgcatagcagcagcacacccctccagcaagcagttctgcttccccacatggtgctagccatgggggaagagccacagcaagccacacgcaggtcaaaggcattttgttgtgccccttgtggttgtgaccacacaccctgcttgctgtgccagttgtatttttctctaatttgatctttcctctaatttgctcctgagacagacagtagctatgaagtctagcctgtcctgaaggggctgccctgaagaggatgcttatattgtgtttttcacagaatacttctttatcctgacctaatgcctgattgtccagcctgtatccaggtgtccctctcacaggaagcttgtttatatgggcaggtgcccttgtggctcttgt

SEQ ID NO: 396098 - DNA, 206 bp, Homo sapiens
ggagagggttctgcgaggagacgggaccagtgagacaggcaggaccgggtggaggcgtctctacgagcaggagggcaaggaagatggggcaagacgcggggaggctgcagaggaggagcagggtggggtttggagagaatggagcctgcagaaaggagcggcagaaactggcgctggaaggctcaaaaaaggggccctggaaagga

SEQ ID NO: 396099 - DNA, 405 bp, Homo sapiens
tctgagccaaatatgagtgaccaaggcccatgacacagccctcaggcaatcctgagaacatgtgtccaaggtgcttgggttacagcttgattttatacattttagggtggcagaagttatagataccagtcaacacatgtaaggtgaacattgtttcagttcagaaaggggggacttccaggtcataggcagattcaaagattttgtagttaagttaccctctgaagacctggaatcaatagaaggaaatgtctgggttaagataaggggtgggggagaccaaggttcttatgcaaatgaagcttccttgtagcaggcttcacagagaatagattgtaaatgtatcttatcagtctttaaaaggtgccagactgttagtggattctcttctggatcagggaaaag

SEQ ID NO: 396100 - DNA, 224 bp, Homo sapiens
caaccggagccaaaattacagagaaaagttttgttgacattggaaattacatgatgaaattcttcagaaaatcttccaaaagtttgcattgtttcaacttgtaatttcctcttgctccccctgcaccgccccccccccccccccacctttggccctgaatctgaagcagtttcctcttatcccatagttaacatttttagtacaggaacatctgacattgaatg

SEQ ID NO: 396101 - DNA, 637 bp, Homo sapiens
gatcttgagtagtctgatgccatattgaatctcagtcctttatatttaaactggagttcttacaatttctttatcctcattattctgaaacacttggtgtgggtctcttttagttattctgctaggttcttagtaagggtctttttgatctgcaaaattatatcatttgattttgggaaatgatcttatattagttcctcaataatttccccttttcccccttctccattttttctgttttctcaattagtccccctgttttctgttccatgtctcaccttctacctggtgcctccttccagagcttgtttcttattggtacttccttctaaagcaacttgctcttcagccttttctgctctgcttatatttccttttcttctgctaagaatctgttaatgaatctatgcttgattttagctgaaaggctgagaagcaatctgttaatgaatctcagacagttttcttttcacctcaagatcattttattctacttattatatattttagtttttatttttaattctttttttttttaaatggagtctgactctgtcgcccagactggagtgcagtggtgcagtctcggagtctcggctcactacaacctccacctcctagattcaagtgattctca

SEQ ID NO: 396102 - DNA, 197 bp, Homo sapiens
ggtctgtttacccaagtgccattccccttttacttctgcccctttgacctccacaataggttagcaagtacgtttaatctccaaagtgtgctgcagctaatacaagacttaactgtgtcatgtaatgagaaaagccttaggatataatgaaaaaagtgagatacttaaaaaaagaaaaaaaaaaacataaaaaagtg

SEQ ID NO: 396103 - DNA, 443 bp, Homo sapiens
caccaaaaccctgatgatgttgaatctcactccaagtaaaaggcaaagtaaatccccgtgccctgtgaagtttggtggatttgtccccagttatttctctgatcatatatgctactacacttctccttgctgatctgctccggcaccctggtcctcttgctgcttgtcaaatatgctaggcctgctcctacctcagggccttcgcatctgttctttcctctgcctggaattcttttatctccagatgtctatatgacctttcacttttattgattctctactcattgaagtcttcacattttttgattcttaacttatctaaatcttcctggactactctttataaaattccaactccacacgtcccctctctctccaacactccctactcactttctatgatttatttttctccattataaacactcttatatttttgcatt

SEQ ID NO: 396104 - DNA, 260 bp, Homo sapiens
gtgcttagaggatccccccaccttatgcgtgggcgggatggtctcgatctcctgacctcgtgatctgcctgcctcggcttcccaaagtgctgggattacaggcgtgagccaccgcacccggccttttggtcagttttttttagtgcgcagtacttaattactataccttcaaaactaaacaattactataccttcaagactactggatttgattttaagttttactacatggcctgttaattcagttatctctcccccca

SEQ ID NO: 396105 - DNA, 402 bp, Homo sapiens
cctgaaataaatctatcgatacagatgaatatatgactacaggtttctcaacttcagatccatgatgtacgtagccaggtcattctttgtcatgggtactgtcctgtgccctgtaggatgtttagcaacattccttacctctatccattagatgccagtaacaccccccgccccaccccacaacacctgcaaatgtggcaagccataaagtctccagatattcccaaatgccttatggggtacaaaattgctcccagttaagaatcactgaaaaaaatacacctgtgtaggccagacacagtggttcatgcctgtaatcccagcgctttgggaggatgaggtgggaagaccacttgaggccaggagttcgggaccggcctgggcaacacagccataccacat

SEQ ID NO: 396106 - DNA, 528 bp, Homo sapiens
aactgctttctgtgggctggtggttctaacacctattcaggttatagagcactttcatgctacaaggatctctgcaaaatatcctaaaatagtgaaatacttaactctaccgtgtcaactaggaataatatcactaactgaagatatgacaaggtatataaggctccatatttaaagagtaacgaagcaatcttacgaaaaatacatttccaaaatgtccaactattagttgtttgctatttgtttttctgttttgttttgctagcattctgcggcaaaaatgggatatcaaactttaagaaatttttacaggagaaaaaccttaaaattgagaacattttattcatgatcttctctctttgaactaactagaaagagactgtcattttctagaaacaaaacactaaggccaggctatggcacacagttgagaaccactgctttgagtaaaaggctgtttagcatcagttatatctaaatctaaaaaacatttggggcaaggaattctttgaccagatctaaggtcca

SEQ ID NO: 396107 - DNA, 532 bp, Homo sapiens
ctcagcctcccaaagtgctgggattacaggcgtgagtcactgcgcccggcccatcatatcctttatgaataagaatttctagtcactaggtccaggagtctgtattttgaaattcctaggtgattttggtgaccatccaagtttgagacccactggccttaccgtcatgcctcaattttcaaatgaggaaactgaggactagggcgggaaagtgatttccttgcaattaaaggcagccagtggtaagacgagaccaaggacctttcggaggtcccttgcacccctgagagtcagtgactctctgttttcaccttggactgccgtgatgtctgactcatactgtagtcttcttcctaaaatcctcttctttttattttttatttttggcagtgtgttgaattctcctctagtttcattcagtgagtgctatttcttgcttcattataaaaggtggtgtgtcacaggtcctgtgtgatcacacaggctaagtgtaagctttgagaatgatctcttggaccctttttctcagatt

SEQ ID NO: 396108 - DNA, 597 bp, Homo sapiens
cagagtgtcaacccaccatttaactcactgtccagaggcttttttaaaaatctccaaatctccttctaatccactaatctcttcaggaccacccgacacagttctcatgctcacatacctctgcttataagatttagtcgtcagagggaatctaagatgcaaaataacctatattcaattaatcgacttggcaccaaaaataacttaccctgatttattacaaattgagtatgtaagtgtataaatgaatgggaactgatagagctatagtttgaagagcaaattgctggagttgccggcttgattttacattacactgcacttacattttactcctgaacatttggcactagagagttaaataactgatagcttgaaacaattaatcacagcgatccacgcacctggtgaattacgagttcatccatcaagagagcataggttcaactcaagagatatgatgtaagaacaacacagctccaaagccatgtgtcagagtttctttgccaaccataattagtgaaattactgacaccattcaagtgccaagaggttcaaagaaataacgaacaacacacacccatttagccctttgaa

SEQ ID NO: 396109 - DNA, 612 bp, Homo sapiens
aatgacaaccaaaaccccctttaaagacacacaagaaaatatccatgttacacggaatgaggttcttcaaatcgtaacaaaagaccatttttagatcatgaaaagaattttttcagcatgaaggctcactttacaaactctatcatccaaaatatcgtctttcaggttaaaaaaaaagaaaatctcaagtagcactgaaattaaaaagtgaaacaaatattctggcaagaaaaagaaaacttcagagtgatacaaaggacaaagatgtaaaaagacattatgtgaacaattaacctcacttagaaaaaaatctgctctgaagaaatggaagctggtaatacttggtattatctgagagctatcatcaagttttctggaaaaaaattttatatacatatactatacatatatatgcatatataagggttgaacctagcatataagttatgtttcataaatctgatttatgggtacttgctactactactcaagtaatacccaaagaacatcagctgtactcagaagacacgcctcattttgatggaaacttgcaatgattcttacacaagacgtgttcaaaatgttataagatactatgcgtaaagagcaggt

SEQ ID NO: 396110 - DNA, 231 bp, Homo sapiens
gccaccgcgcctgacctggaagacatttatatatgacaaatttggagaggcaaacaatagtgaaagaaataattttacaataaatagctcttgggaaaaactagataacagtgtggaaaaagtgaactcagatttatatctcacatcatatgttataaattttagatgtattaaaaagttagttttacaaactcttaaaactcagagggagcggtggtattttttcctcga

SEQ ID NO: 396111 - DNA, 493 bp, Homo sapiens
tctattccaaaactgacaaatgcttatttgacatcctgggaactagggccaagttcattcagatctaggaatcccttgagcagaattttaacctcattaaattagttccttgtttaattctctgcatgcttcatacttataacattttgattcactgttagtgttgccagtcaggttgagtctttgctctttgttctatcagtagttgggaagagggatctaattacaaggtctctaattgaataatccaggaggtcatttggaaaatagaaaatttcacgttaatgaacgttgatgaagcatttctgagctgagcatggtgtatgctgggcattctgtaagcattatctcagtaggtgcttagatagacattacagacatggaaagtgagtattattaaacatttagtcatttcagggccattgttgttttttcccaacacgtcctattcttcaactttctttcttcctaaattctgtggactcccctcgcc

SEQ ID NO: 396112 - DNA, 327 bp, Homo sapiens
ccacccagagcgcagtggagagtggactcaaacggggcacccaagacgatcgcagactcggccacgagccccaagctcctctatgtggatagagttgttcaggaaattctggaaaccgaaaggacttatgtacaagatttaaaaagcatcgtagaggattaccttgactgcatcagggaccaaacaaaacttcccctggggaccgaagaaagatcagccctttttggaaacatacaggatatctaccacttcaatagtgaacttctgcaagatttggaaaactgtgaaaatgatcctgtggccatagcagagtgttttgtgtccaag

SEQ ID NO: 396113 - DNA, 356 bp, Homo sapiens
tcaactccctttatcagggttaagttcacagagaaatactaacttggataaaggatcaggtggtaaatatgtgtcctactcagacacaaggatttttattgatagttggttaaattcccatctctctccacataatagaaaaaaataaaccaagccaggcgcagtggcacatgcctgtaatcccagcattttgggaggtgaagagggggtggatctctagagctcaaaattccagaccagcctgggcaacatggcaaatcctgttctctataaaaaatacaaaaattaactgggcatactggcaaacgcctatagtcccagctacttgggaagctgaggtgagaggattgcttgag

SEQ ID NO: 396114 - DNA, 464 bp, Homo sapiens
agactggtctcaaacttgggccaaagccatccacctgcctcggcttcccaatgtgctgggattacatgtgtgagccaccacacccagtcatgagaattattttaaatcaggtaaacaaaatgtctgtgggaatattgagctttatgatagatacctaagttttcccaaaaataattgtgttagcatttcagtgaatcactatacttaacctagaaatctaggttaccaataacagtctctttcaggtttttttcttttcctgtgtctttctttttactaaaatcattcataactgggatgacttatggagttgataccttaggtcaaatcccaatttagaaactcccaaaagcctgtcaaattttgacacatactttaaatgaactgttattgagtagatataatttagttgtaatagtttaatagtgtttgacctatccaaacagataaaagaactcatttta

SEQ ID NO: 396115 - DNA, 598 bp, Homo sapiens
tgcctcataaataacaggtgactagttttcttattacatctttgttgacatgtaattcatgtaccatacagtgaaccccttttaaaggatacaattcagtggtttttagtatagtcacagagttgtgcaacaattacaacagttttagaagattttcagggtgatgagtttttaaaagcctcccatataatttttatatgctcatctaagggggcttatttttttcttctcacaaattgttcatctgctaagaagccaaaagtatggaaatgtcatatgtgttttgtatatgttgaattactcgtgactttggaaaaatttggtgtaaaagagccaggaatagatgaataccaccaagaggccagtagataataggacaggagattgactatggaaggtatgggttatatgcctcaaaggaaaaggaatttaaatctgaggataagggaggaatgatgtcacagcattgtaagcgctaccctcacctcctgacttggggtggatgaggtaggagagaataaaacacctgtatttgaggcctgagagaagcactgtctttgggaagggagtagagctaccgtttccattatctgagagt

SEQ ID NO: 396116 - DNA, 339 bp, Homo sapiens
agggggcttcagtatgctacgaaaacacctgtgactggccactgcactccaacctgggtaacatagtaagaccctgtctcttaacaaaaaaggaatgttatgaaataataatttaggctttacctgtatacagggttgtttagaggagaggaagtgtgtaggaaaggcaaggaggagatcattttggaggcctcttagaaatagcccaggcatatggtaatgaagatgtaaactgatagtcataaataggcatggagaggaaggatccagtgaacagtagtgtggaagcagaattcaaaagacttggagacttgcattctgggagcaggagtaaggcat

SEQ ID NO: 396117 - DNA, 327 bp, Homo sapiens
catgagctgctgcaccaggcctcgagttgatttttgtataaggtaagagatgaggatccagtttcattcttctacatgtgagttgccagttatacctgtatagctgtgaacaaggtgatagctcttttggggcctcaagtttcttagtctgacaaaatgattgaaaaatgctttctaaactgtggaagcctgcatacttaaaccaagaggcaaattgtataggcagtccatctttcccctcacattatacctagaaagaaactggaatgtgatcttaccgtagctgatcactttatatagggtaaacactgcgattagaggttgggt

SEQ ID NO: 396118 - DNA, 260 bp, Homo sapiens
ttaaaaagacatcactcttgagacaagcactgattaatgaagggacatttctgctatacgatgtcactccccttagattatccaagcctgatacagtgggagttgtgaggctacgacagtatgcccctgcattgggatttgaaaatgcagaacactgaatcagtgactatctattcaacttctactctgtgtacaggcctgtcatagatgcttttacaagtatgaaatcattgagtcttcacaaccacactgcgaagtta

SEQ ID NO: 396119 - DNA, 193 bp, Homo sapiens
acaccatcgtagtactctttatggcaccaaaaatggttttaagtgtttgtttatgtcactgtttcctcactagattatacgttgctcaaaggcagggactctatccttcttgttcaccgctatgtctctcagttctataataatatgcctggcacaaagccggcttctagaaatacatgtttgaagttgtaac

SEQ ID NO: 396120 - DNA, 235 bp, Homo sapiens
ttggtgatcaacttcaccttcagcccctttcccctcctgggaggttgtgtggggtgggctgaaagtcctaaccctctaattatgcttttggtctttccaatgaccagctcccatccttaagctatgtaggggctgccagccatgaatctacccattaacatacaaaaagacatctctctggagattctaaggattttaggaattatattttaggaattatatgttaggaaactgg

SEQ ID NO: 396121 - DNA, 470 bp, Homo sapiens
cagctaagctacaccccccattcggcgcctcaaaactctcagttccttctgagaatttccagccttaccttcacacagtccattaacatgaaggtgacatcattttgttaatagaaattagcaggcaactttgttctgctttggtaaagttttatagattgcttgctgaatatgatcttttctttataagaaagggatttggattgcagagatctcactgagtatttgattctcccagaggcattgtgcccactgctgtgggagctgcccctgcagtggttgtgtgggctgcatccagcatgggcagggtagagagacggaacccctgatcgcagcaaggacggagtccaggctgggcgcagtggctcatgcctgtaataccagcactttgggaggccgaggtgggcggatcatttgaagtcaggagttcaagacaagtgtgactgacagaaaccccgtttctactaaaa

SEQ ID NO: 396122 - DNA, 323 bp, Homo sapiens
catgtggagtgcagggcgacttctctctgcttccagctgccactccctatttctagcgttgctgccaagaagatgggttattagtttggccaaagctaatcctaaaggaaattgcaggtaccagagagagagaagggagagcaagagagatttcaaacatgaaatctcatttttaaaaattgcatgtgtggttttgtttgtttgattttagagctggggtcttgcgctgtcacccaggctggggtgcagtggtacgatcatagcttactgcagccatgaactcctgggctcaagggatccgcctgcctcagcttcctgagtag

SEQ ID NO: 396123 - DNA, 1046 bp, Homo sapiens
ctcatgcctgtaatctcagcactttgggaggccaaggtggccggataacttgaggtcaggagttcgagaccagcctgaccaacatggtgaaacccccacctctactaaaaatacaaaaattagccaggcgtggtggcaggtacctgtaatcccagctactcggaaggctgaaacagaagaatgccttgaacccggggagcggaggttgcagtgagctgagatcgtgccactgcaccccagcctgggcgacagagcgagcgtctcaaaaaacaaacaaaaaaaatctgttgcataactaaaagaagattgagacttagtttaagaagaaatcacttaaaggcaatcctccagattaaaaccttgggattttatttaattacaaattcatcataagccaacattacaagtcgactaaaaaacttacagcaacttcagactgcattagtgtccagatgtgcaacatccagatccaattcagctaccaagggatattatttccagttccaaatacattttggaagggacattaacaaagtttaacatccttagggagcaatcgggatgataaaaatgataccatatgagaaatagttggaatagcgaaggatatttatctcaaagggtggaaaaactgtgaggggaagggtagagaggatagactaactaccttaagatatctaaaagattatcatgtagaaaacagatccaaattttatatagcttgagggcagaattaaggtcattaaatacaactgtaaatagtagattttaacccaaggatgggctttataacaatcgatggtagcaccaaatggattgggttgccttgtagattatgagttcctcctatcacttaaaggaacttcagcatggactgggagactgggttaaacctttccaagtctataattatcctgaagaattaatgctcagtataattcaaaacacatgagaattgccttccctgaggtgttaaattttatttcaagtcaatcaaaatagatgtaagtggccaggcacagtggctcacgcctgtaatcccaaca

SEQ ID NO: 396124 - DNA, 507 bp, Homo sapiens
agtgacctttgcagggacagctgaattgtatttaaaaacagaagtgtggttggttttctgaagagctatgaaaaaatatggattagtcccatatactttttttactttaatttgtaacacaccaccaaattcgagtagattagaaataatgaataacccctagaaacagtgtaagacagtgtaaaaaggcagtatagaaatgattgatgcttgagcaggccctgattttgacatgaaagaaagatggtggtgctgttgtggaaagtagctgggcaaatgtcatgtagttgagaactactgcaaccaatgaaaacacagcactcctctaaaaacagagtaatttctctttaaactcttaatcgtgtatgtgattgactacttttcaagatttgaaaaatatctcacaaaggtaaattcatttaacacaaactgaccttgtgtttaaccccaaacttctaaggataaatatcacaaaggtacctttttaaaaacctaaaagactatgta

SEQ ID NO: 396125 - DNA, 501 bp, Homo sapiens
gcgttatgtggatgatttgactcagcatggaagactgaggttgtcttacacccattatttcccaccccactcttaagtgccagcatagtgctaaacacacagtaggtgctcattatttgtctagttaaaaaacaaattaaggctgtagcttaatatagcctcaggatatgtgtgtgcctgtgtgtgtgtgtgtgtgtgtgtgtgtgtgtgtgtgtgtgtgtttaaacataagcttacatataagcgtatgtaagttaatgcacaaatatatttcctcaaattcacataggatactcaaatatagatgtataattttgtagtcccactgtgattctccatatgtataacaagaaaattaaaggcataatacagctgtgaaatagctgatgagtttctattttaagctgatttttcaccagaagtatagtttctgctgccaaagtaaagtataaatgtatttgtatatgtgtggaaaataaataatttgtgacatgtattggt

SEQ ID NO: 396126 - DNA, 408 bp, Homo sapiens
ttaaaagacaagcacagaagggattgaggcccacagaaagaaggaaccccatgtggtgctcatttgagttgaacaaagggacctgcactgatgaatatatatgggactggtcccgtacctaagttcccatccagaagagaagtcagaggaaaccagagaacttcagaagagcttggtgagcgccaacgggctcacacacacagggctgtgggagcctacagcccacagtccgcagctctgagaaacacattgtgttccgcctgtggggcagtgtcctcacagcaatccaggtgtgtttgaaggagaacgcctagcagcagctgaaataaccaaaaacaaggtggtaaatggctgtcctgggccaatacagggacaaattggcaaagtagaatgttcctcgcagagctc

SEQ ID NO: 396127 - DNA, 361 bp, Homo sapiens
ttgcaaagattcttaacaagaactacttacattggaagaaaaccacagagaattgtaaggagctatgtgacagagaggaccaggatgccatgaaaacggccttggctacatataggtcattcgatccttggctcactggcatctctctagattttcaataatacaatgttcaatatgctgtgcaaggtaatttcatcttgcaaagattcgatgttacattttaccacacatacaactgaattaaacttttacagaattggaaatgcacatcactgatcaaaataaatgaaacatgaaaagagtaggaaggaatacccagtgatggaatagcaaatatgaatggaaacagaataggactgct

SEQ ID NO: 396128 - DNA, 711 bp, Homo sapiens
aaacggaaatcagcctggcaactgacagggagagatagtctagtctatttttggaacccatcttttcattttttgaaatttgaaatttttttttcttaatttacttcttttgtttagttctttgttttatttggccctaaattgttctggttgtaacaactctaaggaaacaagtaattctgaagatcttttgcttccacatcgtgaaaggtcttttggtagcagtaacatgatgtattttcacttccagactaggggttggcaacccttttctgtaaagaaccagacagtaaatatctcaacctttctagtttttgttgcaactattcaacctgtcattgtagtaggaaagcagtcacagcctgtgtgtaaagaaataggcatttcaaattaaacttaatttacaaacacaggcaataggccccagttgtacacggataggatttaccaatgcacaagagtgaaaagatcacagtggaagtttataatttcctttgaatttttatgcctaagcaacagaggggaatatatggaaatattcagatacatgttcctgtgcatgttacaagcacagcagggtggcgtattttactatgtccctctgcttcccctgtttgtttttttaaggcatcaagccagtaacgtgaagttgcagttacaatgcgtaattgccatgtaggtctgatcggctatagttcttttgcctgctgt

SEQ ID NO: 396129 - DNA, 444 bp, Homo sapiens
ttgccaaaggagattaacatttgagtcagtgggctggggaaggcagacacacccttaattgggtgggcaccatctaatcagccaccagcgaacataaagcaggcagaaaaatatgaagaggcaagaggggcctagcctcccagtctacatctttctcctgtgctggatactttctgccctcgaacatcggactccacgttcttcagtttggggacttggactggctttcctcgctcctcagcttgcagacagccttttgtgggaccctgtgattgtgtaagtcaatacttactaaattcccctttttataaacatacatatatatcctattagttctgttcctctaagaaaactctgaccccagactaacacagactctggtaccaggagtggttccagaggaacagaatgttaaggatggagttcttttgttggtttgggggt

SEQ ID NO: 396130 - DNA, 911 bp, Homo sapiens
caaccgagaacatcaaaggcttctctgcagtgtcaatccgataaagcatgtaaagtataggacacagtcttgcaattgcagtgtaaaagatggcagcgattctagttactattcactggccttccatattccagcagagtttggactgccaccagtgtgtgcctgtattgaggctcttattgtgttgtgtctacctacatatctcgctttctctttagaacaataaacattgtcaaacgaaaaaaaaaaaaaaaaaaaaaaaaaaaaaaaaaaaaaaagggcaaaaaaaaaaaaaaaaaaaaaaaaaaacaatttgggggggggccagccccccgaaaaatatctcaacaccccactctgtggggggagcgcccagccccaaacagtaagtagagcaaaccagctgcgtcatcacggtgttcccacaaaaagaaaagccccgggagcacaaacatacgcggggatgagtcacccaccaaacaaaaaacccgcgcgggcggacacaccagcggtgtttgagacacaacaccaatcgagggcattgcaaaggacaccaacgctgagcttacaacacaaggagacaccagagagggacagtaaaaaataaccccgcccggcagaagcaaaaaccaccagaaacagtgaccaagacgaaaacacaagaaaaaacaaaagagcaaaaagagaggaaacaagaaaagaacaagaataaaaaaagaacaccagagacaaacacaaaacgaagagaagagagaaaaaagagcagagacaagaagaaagagaaagagaggaaaaacaaaagaaaaaagaagagaacaacccacaaaaaaagcacaagcaaaacgacaaagaaaaaaaaaacaaaaggaaacaagagaagaccaagaaaacaaaaaacagcgcaaggataa

SEQ ID NO: 396131 - DNA, 213 bp, Homo sapiens
tgaggtggtagggatcgcttgaacctgggaggtggaggttgcagtgagccgaagtcgcaccactgcactctagcctgggcaacaaagtgagaccctgtctcaaaataaacaaagttccttgctgcagagtagcggggagattggaggggtggggcaggaagccagaagtgagtttagaggggcttgccatgatccagggatagagggtagtca

SEQ ID NO: 396132 - DNA, 833 bp, Homo sapiens
tgtggaagactccagcaggaatatcaaagaaaaatagtcactggcagcttcagtgagaaaccagagctcatggagatgtcttagaagttactgcttctggctgcttgattgggattagagatggtgaggtctgtgcagtattcatctgagattaatggcttagtgcttcacttctgcctttcctattccattcaggttttcctttttttttttttttaacagcattttaaatttttttttatttttaatttattatctatttattttgagaccgggttaagagacgggctaatttttgtatttttggtagagacaggttttcgccatgttgcccagtctggttttgaactcctgacctcaagcagtccacccacttcagcctcccatagtgctgggattacagttgtgagccactgcgcctggcccattcaggtttttctcattggcaaagtttagcaagaaccatacaggaaacgccttctggaaaacagttctgagcaccagattgcagtggtggtactgttaagtggacaaaggacattgcagtatagaaaagtagctgagacatattgacctcaaaactggagatggttttagaaactttgagagggaatgcaaatggtgcctaatgtctttgttcagttgttttgggtacctgcagtattattcttttaggaaatggtgactgggtgccatgttcaaatgtattccccaaaagttcatgttggaaattgaatcctcaaatccatatgttgatggtatttagaggtgggagcctttgggaggtaattagggatagatgaagttatgggggtggctccctatgttgggat

SEQ ID NO: 396133 - DNA, 439 bp, Homo sapiens
gcaagggggaagtgactcatcaaaaagtctttgcttaggtgtttcagcccaatcagattgctttcctaagcccctatttatgatccacatgagaagtggggagcttttcagaaaagagaaaaagtgatgtaactgtggaacatgtgacattagaggttaggcaagcccaaggggactcgcactgagaaaaatttcaaaagccaaagggcagtgtgaaggcattacatttttgtggtgtaacagagggattacaagaagatagatgttagtagcagaggtgaaaaagaacaaacacttaaattattttaaaatcggactttgtgttggccattttcctattttttgtatgtctagaatgatatagccccatataagaaaaacagggctacattttaggactggacccaggactagctggtagggcaacagcagagtgcat

SEQ ID NO: 396134 - DNA, 361 bp, Homo sapiens
aaggagtggaatttatgaaatgtttgctgcatccagcaagcagagctgctataatacagctgcctcctcagtggtttgctttgatcctgtggaatgaaaggacaggaggatcagctcaggtctaaatgagattacagctggttctgcagcttatctggtctattgccaactagtgtggctttgcacgtcctaaggggtttacaacagaaactgtttattgagtatcatcggtttactcaacacaagcaggctaatccttcccagcctcagcatgttgtagaattgtgcaggagccaaaccaaaagctggtgtagccagaccctctagagccctttgtctcgctgtatattgatttttacct

SEQ ID NO: 396135 - DNA, 614 bp, Homo sapiens
gtcagacagatgtgttttctttgcatggcagcattgagatggatccaatctgcgaaatttgctgcccaaatagcatttctaatggaaactggaactaaacaagggcacggatatgggagggaggggagaagagagaatacacgaagaagagtatattcagagccactgcatggcattttgagtacaggaggttttcaggaacgatctttgcttcattagtctcccctgtgggctcctgatgtagggagctatcagggtataccaagatgagcactgagacaggcctttctaggtctgaggctgaggaaagcagcggcaacttggtgcctgtcccccagagctgtctacagttcagaagccaaaagcacagctacttctaatttggggatgcagtagagtgcctactgatccaggtatttgtgaaagatggaattcttggtgctatcatagtatacattgctaaagagcagatgaaatcggctgcttaaggaggcctgataatatttatgttggttaattctcatgataatgataactgcacttgtctagtattttcagaatgttaaaattaccagtgtggcttaatgcatgtttacaataaatagagagggaca

SEQ ID NO: 396136 - DNA, 714 bp, Homo sapiens
aataatttgtcacacaacttgtaaatcttcatttcttttaggtcagccacatgaactttattttgtttctttggtagtctcatgtttccttgattcttcatatttttaaagttttgtgttgaaagaagcagtcacattttcaagtctttactatctgtcttcaaagaagaccttcacaagtcagcttaactagagattttgagggtctctcaggccttttttatgggtttgcccaccccactgctcttttttcctcctatgaggaagtcctgggattgtgtgtcttctcttgatcctgttaagtcaagccaggtgttgagagcctcctctttatttttcacatggcaatgccctgaagtatttaatcttgtataccttttcccagtcctgcagagttgagctggctgctgatctacatgcactctctgtgagtatttgctcgcaccatctcagcagcgcacatagaatgaagagggtgcatattagccagtaagggacactgcagatgaggttttccatagagctcacgggtgggcctcttggtggagtccataagccacttagtaggatatatggccatattttgagatcttcacagtggttgttttgaagcctcatcccttcttacctgctcctagttccccccaagactatttagtcatgccaatcacctcagtaatctgggagtgggaagaccagtgtaagcctcttggg

SEQ ID NO: 396137 - DNA, 426 bp, Homo sapiens
caacaacaacagcaagaaaaacaatgataacacccaaaaataatccttggcttattaaaatattggcataataaaatggggacagggaaattttcataaaataaagagaaatatcaaggaaataaagagcatgctagaaagcaaggttttaatttattcttttaatttattattttccagctttattgaggtgtaattgacaaataattgtatctattcaaggtgtacaacttgatgatttgatatatgtgtactgtgtaatgattaccacaatcaatcaacatatccatcacctcagatagttacccttttgtgtgtgtgtggtgaggacacttaagatctgctctctcagctgactccggaggcttacggttggggaggatctctttgagaccggggggatttaggctgcagttagccatggtt

SEQ ID NO: 396138 - DNA, 177 bp, Homo sapiens
ttgacctactatattttactgattctactgatcctaagacatgttttcccctacattttcatttctctaaaactaaagtgcaatctaaactaataggttacactttagttggcaccattttttctttctcattgatacataaaataatgggcacatcttacaacttacaactttgac

SEQ ID NO: 396139 - DNA, 335 bp, Homo sapiens
ataccccatgcagcacagggtgttaaacttgttccccagctggtctagggggcgaggttggcccacagcagcgtccttcgaagctccttttctctattaaaagtttgttcaaactcagcattctgttccattaacgtgtagcagcagttattggaactgtcaggttttattatcaaaataaagccttccctctagtcttcagacaaaatagatcttcagaaagatgcgtcaggctgagagcctgtagtttctagcatgccatggcacacagacacactctgagggccactgcacagctgtgcatgttgtgcactgtgcaaagtgcctggctgaga

SEQ ID NO: 396140 - DNA, 309 bp, Homo sapiens
ccagggtcgtgagaaatagctgtgtccattttaaagcaagaaaacaaatggcacgattgctctgctgttcctgtcctagggcagagagctaagtcaagcactcagtggactgcgtctcgtctcccttggactggtagtgacagggctgccctgcacgccacactgctctcctgttcctgtagtgtcgctcatgtaaaatgcactgcaggctggtgctgctgaatcggctcactttctcccatttccttctcctccactttcagatttctttcagcactctccaacttaccttcagaaatgcaacaatgg

SEQ ID NO: 396141 - DNA, 362 bp, Homo sapiens
caacattaggaggtatgaggtccacttcctgttttgtttgttgttgttcataaacctgagacttagaaatcaaagttaacttgttcagggtcacagaggctagttaaggggcaagccagcatttgaacctggcttgccactgcaaacaccctgcctgctatactggttaaaaacattgtttcttccaggtgtggtggctcatgcctgcagtcccagctgctgaggagactgaggcaggaggatcccttgagcccaggagtttgaggctacaatgagctatgattgggccactgcacccagccccagtttgcatttctaacagccttctgggtattgttgatagcttgaggtaatccgtaggg

SEQ ID NO: 396142 - DNA, 227 bp, Homo sapiens
acttaccacatttgcctcaagccagttactaactccaggtagtcactaactttcccttgggaacacttaacctggttgtgagtaaaaaaagaatgaacatttgagatgttgaaacaactatcgggaagatgtcaatgaacagctcaagactggaattaattccacagagaaatgatgactgaatagtcaatttagaaagtaaaaacttggacttaaattccaaaatg

SEQ ID NO: 396143 - DNA, 397 bp, Homo sapiens
aactcaaaatatagaagaaaaaaacagagacttcagaaatgcataaccccatctatctgcaacgaaacatccaaaaatcccaaatgaggaagattctacaaaatgtgtgaccgctgctgctgtcaaggtcatcaagaaaaggaaaaaaagaaaccatcacaatccagaggagcccaagaagatatgacaactaaatattaggtagccacctggatgggatcctggaatagaaaaacggcagtagggaaaaactaatgaagtaaaattaaactctggagtttagttaacagtgatgtacttaaattggttctttcacagtgacaagtatactatagaggttcttaaaattgacattttattgaagagagtacaataaaattataatcaccaaaccaat

SEQ ID NO: 396144 - DNA, 573 bp, Homo sapiens
ataaactccaaaacaatgcaacttttttctctctagttttatcttcagcacagcttgactcatcataattttacctttaagtatcacctgcattaataaacatacaactaggtatcaataaatttctgtggaaaaggaaattatcacaagatcaaaattgaagaaccagtctcatttcatctaatatgaaaatgatcaacatatataaaattaaatgcataaccccatctatctgcaacgaaacatccaaaaatcccaaatgaggaagattctacaaaatgtgtgaccgctgctgctgtcaaggtcatcaagaaaaggaaaaaaagaaaccatcacaatccagaggagcccaagaagatatgacaactaaatattaggtagccacctggatgggatcctggaatagaaaaacggcagtagggaaaaactaatgaagtaaaattaaactctggagtttagttaacagtgatgtacttaaattggttctttcacagtgacaagtatactatagaggttcttaaaattgacattttattgaagagagtacaataaaattataatcaccaaaccaat

SEQ ID NO: 396145 - DNA, 397 bp, Homo sapiens
aaaggttcttctcgtatgtaagcaacgcggggtttgaaatgcataaccccatctatctgcaacgaaacatccaaaaatcccaaatgaggaagattctacaaaatgtgtgaccgctgctgctgtcaaggtcatcaagaaaaggaaaaaaagaaaccatcacaatccagaggagcccaagaagatatgacaactaaatattaggtagccacctggatgggatcctggaatagaaaaacggcagtagggaaaaactaatgaagtaaaattaaactctggagtttagttaacagtgatgtacttaaattggttctttcacagtgacaagtatactatagaggttcttaaaattgacattttattgaagagagtacaataaaattataatcaccaaaccaat

SEQ ID NO: 396146 - DNA, 426 bp, Homo sapiens
  misc_feature (20)..(20): n is a, c, g, or t
  misc_feature (65)..(65): n is a, c, g, or t
taaatgaagaaattattganagtgaatggatgtaagagaaattaaagaaagaaataaaaggctanaaatgcataaccccatctatctgcaacgaaacatccaaaaatcccaaatgaggaagattctacaaaatgtgtgaccgctgctgctgtcaaggtcatcaagaaaaggaaaaaaagaaaccatcacaatccagaggagcccaagaagatatgacaactaaatattaggtagccacctggatgggatcctggaatagaaaaacggcagtagggaaaaactaatgaagtaaaattaaactctggagtttagttaacagtgatgtacttaaattggttctttcacagtgacaagtatactatagaggttcttaaaattgacattttattgaagagagtacaataaaattataatcaccaaaccaat

SEQ ID NO: 396147 - DNA, 390 bp, Homo sapiens
agttaatttcattcaaaatttcaatattttccctcagaaatgcataaccccatctatctgcaacgaaacatccaaaaatcccaaatgaggaagattctacaaaatgtgtgaccgctgctgctgtcaaggtcatcaagaaaaggaaaaaaagaaaccatcacaatccagaggagcccaagaagatatgacaactaaatattaggtagccacctggatgggatcctggaatagaaaaacggcagtagggaaaaactaatgaagtaaaattaaactctggagtttagttaacagtgatgtacttaaattggttctttcacagtgacaagtatactatagaggttcttaaaattgacattttattgaagagagtacaataaaattataatcacc

SEQ ID NO: 396148 - DNA, 450 bp, Homo sapiens
attctatgagacccccaaaggcaaaaagcaccccacattttggaccagcagcttggcactcagcctccttcagaggggcttcaccagccagccccagcccaactggtttctacctaaatactcactccctatgcactatagctactgactttgcctcaaagtgatttctctctcaaacgcctagtacatcaacgtcaattggcactggtttctgttaacgaacagactggcctgcgccaaccacagcttaccacacgtgtactcggcctacttccctattttcaatgcctaatgatttttgctgcgcctgaacacatctggagggagccaggcccactggctgcctctcgtcccactccaggccctcctacaaaggtgcactcagcaaaccctccaagtacagacaggttctacaatgttgctccaagtcagagaggaggcctcaaacaa

SEQ ID NO: 396149 - DNA, 382 bp, Homo sapiens
cgctacggacgctgcggagcacagacgggcgctgcgagagacggccctgcacaaaagacaaaaaggaccaaggcggcaggaaaaggagaggaggaaaaacaagcgggcagaggccgctggaaattgtcttccacctgatgcatggggcttaaagcctaggagacagagcctgcgtccacgcagcagggagggccagtgtggaggcacacagagcgacccgagtttctgtcttgtgtctggggcacccaacaacagtgtctcgcacacagcagatgcccagcaggtgtctgatgcgtccgtagcggccactgggctctcctggatttcccttggtgtctgcattgttccaccatcaatggcccgccagtgtctattggtgtgt

SEQ ID NO: 396150 - DNA, 463 bp, Homo sapiens
cactggcatatggtagactttcagttgtcactgtgagcagtcatttagctggtatttgttttatgttaatgtataacagcttctaggacattaaggttcacatctctgttttctagattatatagagatgaaagtaccattttacccaacaaagagatacacgtaacaattttaagtttgaacatttttacagttgtattaaaaatagaaataagattttataagactctcatttgaagttagcgtttagaaaattttcaatagtatgtagctttgtcagagaatagaatattgagttggcaggaatcaaattgtgttttggattgttttgtgattacagaaggtctgagtgcttacaatttaaaaccccatgtccattgatgacaatagaatgtagaattgggagatgatgtaatcctttctatgttttgatatttaactatatatatgacattgatatcca

SEQ ID NO: 396151 - DNA, 406 bp, Homo sapiens
taaatccaagatccaattaaggagcatacattgcatctggttgtcatgtctctccaatttcccttatctagtctggaggcaggagggacgggactggcttttggacgttgacatattttgaaaagtgcctgccagttgtcttggaggaggtcccccgtaagttggatctgcctgttccctgtcatgagattcgggtaatacatgcttggtaaacacagttcctgggtggtatgtgctttctactgtattattaatcagttattgataatgctaagttcgatcacttggttaaggtggtatctgccaaatttctccactgcaatgatatagtttctcctttgtaactaataagtaatctgtactgcaatttgagattttaagcatcttgttccctaacaaattttca

SEQ ID NO: 396152 - DNA, 531 bp, Homo sapiens
gttatgacttagtgaccaggaggataaatgctgattctggggggagaggatgtagagcagcaccctgagaggtgagaggggtacagatcaagagattgatacaagaagttgccttggagaggacagtctgtttactggaaggaaggaagtgaagattattgaacacctgctttgtctacatgaatcaactcatataatcttcaccccaagctgctgaggtagatgtaagtattttctccattttacagctgagcatagagcttttcaggcacttctgtaagatctgagaaggggcagatgcagcatttgagcctaggcagtgtggctccaaagcacttgctcttacccaccacaatttgcagagaaaatagttacagatatagggtgcatgtatatttgacaatgggaaaatctgatatcctcttctgattgcatcagttttctctatgcaacaggaaccaaggccattagccaggagtagggaatagggagagtgctggagatgaagaaggatggagaagacatagtgtg

SEQ ID NO: 396153 - DNA, 574 bp, Homo sapiens
atttttgatttgcatgctaacattatcaaaaatgtcccactttttaatttgtagcctaagtagtgatactcatgtgctttacaaaaataatcagattgactttcaaataggagagaagctcaccgctgttcctcatgtgtcactttccctgtgtccataaatagggccgccggcacttcaaccttgtacacctcatttatatgccatttgctgcctggatagacttacataatgaaataacctggttttttatgttccgtttcttgtatagttaaaaaaaaaaatatgatcgggccgggcgtggtgctcatgcctgtaatccccagcactttgggaggctgaggtgggcggatcacctgaggtcaggagttcgagaccagcctggccaacatggtgaaaccccatctctacaaaaaatacaataattagccgggcatggtggcccttgtctgtaataccagttatttgggaggctgaggcaggagtatcacttgaactgaggaggcagaggttgcagtgagccgaaattgtgctactgtactccagcctgggcaacagagtgagacttcatctc

SEQ ID NO: 396154 - DNA, 349 bp, Homo sapiens
aaaacattccctgatcgcttaagactgaggtaaaagatgttttccttcctctctccactcaacgcaattgaacactttattcttccacaacacctgggttatactctgttatgtcttcatggttggcaaacggttcatggcttggcagctggctccccatctacagattccttcttggccgaatctgtatcttgtctcccgagcaccctcatgggacccagcacagctttacacccataggtgcttcatgcacctttgaataattctcataacttgatcttcttttaagccccaaaaggaaaaacaccaccacctccacagagcctgcaattcatgtgaatcttttttt

SEQ ID NO: 396155 - DNA, 659 bp, Homo sapiens
gtataaactacatgaggacaggaattctgtctatccttttacagatgtatcctcagggcctatcacagtcccaaatatgtgacaaatcttcattaagtattggtcaagaattaaaaaatgaatcactaaatgttatagtactctttcttaaaatcttgcaatatcttgttgctgtcaatttctccagttttgtctctcccttttctccaccatgctgttgagcctgtaggtgaggtgaagatatagaggaactggagctttcatacgttgatggtggaaatgtaaatttgtacaagtactttgaaaaactatctggcagcttgctaaactttataactaaagttgaacataggtctggtgtatgcctgtcatcccagcattttggaggcctaggtgggacgattgtttgagcccaggagtttgagaccagcctaagcaacatggcaaaaccccgtatctacaaaaaattaaaatattaaccaggtgtggtggtgtgcacctgtagtcccagctactcagtaggttaaggtgtaaggatcacatgagccagggagtcaactctgcagtgagccataattgcaccactgcactccagccttggtgacagagcaagaccctgtctcaaaaaaataaataaagttgaacataagcatacctga

SEQ ID NO: 396156 - DNA, 362 bp, Homo sapiens
cgagctggttgttaaatgaggccctgggctgtctgtgccagtacagaccctgctccgcagccccacagggcctgagtgacagccagcctgtgctagcctgtgagacactccccagtcagaaaagagggtcactgacagcagggccgtgagtgggtttggcttccagagtggagacacaggacaataccagtgattctaagaccccaagacctcgctgatgccagacacaatgacagatgccacccatcaagccgaggcggataagggcatcataacttgtcacaacccgtcggcacatttttatttccggagagtctttgtatcttataaccgctttccacatgctaaatctgagttcatta

SEQ ID NO: 396157 - DNA, 559 bp, Homo sapiens
ctttattctctctttagaaaaaaaaaaaaaaaagtagtgggagaaatcttagttctttacagaggtaattgtgataactggtgaggaggagataaagacgagaaagttagaatttgaaagcaagagaggccaggaagagaaatgatggtaatacgatgtggggtggagagatggaaggcaagccagaaacaaagatgtatgaaagcatgtattttcctaaacagactttcattatgtgtgttggacagtaagcaaatgcaaacactgagctaggtgaagcagcatttataacacacatgacaaaccaatacttaaaccatttaaataccaagacactccatgcaagttttttgaaagtgaaccacatgaaaactgggcaatgattatgaatgagcagtttgccagagagaaatagccagtaaaaaggaaaagttaatctcagagaattgctaagtaaaataagataggtttttctcccctgggatgtaggcacaacttaataatatatgacatccaatgctgttagaatgtggagaaatgctaggagctatatatattg

SEQ ID NO: 396158 - DNA, 431 bp, Homo sapiens
ggcctcctttaaagaccaccaatcccattcacaaggagggggacctcatgatctaatctccccccagaagtctcaccttttaatatcaccagcttggagattaagtctcaacaggtgaattttggagggacacaggcatttggatcatagcaccgggggactctggttttcagaatgaaagtaggggccttgtctatccgctcaagctgcctcctctgcactgaaaacgatgcctagcccaacatggatggatcagtgtttgctgaaatgctgaatggttaaatgaataaataaatattgctcatatagcaggcaataaaaaagcatacagaacctatcactaagtgaatgaagctactctgaaaaggcatatgctgtatgatttcaactatatgtgacattctggaaaaaggcaaaactatgaagacagt

SEQ ID NO: 396159 - DNA, 184 bp, Homo sapiens
agtaaaataacattcagaattcacacagtaggtaggtagtggggccaggattcattctaacaccagaactcatactcaggctgcactataaatgactgagtatgacctgcataccttccatgagtggtgcctcctggaattgcccatcatgcagaactgaagccttatcagtgcacaggactgt

SEQ ID NO: 396160 - DNA, 266 bp, Homo sapiens
attaataatctctacagtcaacttgaatttcccaagttttctgtctttgctagtagttccaatgtttattagtcacctacacttgaatctttgaggctgtctttgactacttaattatctatatcctatccattagcaaatcttatcaaatcttagaactatttctcctttctgtagccattcattacatttctactaccatcacctcacaccttaatgctgtaacaaccttctggaaagcttacttgtacctcattgttattctc

SEQ ID NO: 396161 - DNA, 411 bp, Homo sapiens
caaaattcaacatcaatgttgttagaagtgtataaaactctaataagctctaaaatgcagtaaagcattttaatttggcactatgaaaccatgacaggttatatacacaccaataacaatatagtgtgctaaaatagtttaattaaatttaattcataaaataaatataacatctacacataccaaaattttaatctaaatgaatgtgcttcactgggcataattcataagaaaccactaataaaacataataatttgtaaaaatagaactgtcaatcacattctcccacaaacaaaactagaaataaataacagaagttatttaaatatcagcaagaatatatctataatacataaacactccattcctaaataacatttggtcaataaatgagaaatataaacccatta

SEQ ID NO: 396162 - DNA, 303 bp, Homo sapiens
atactgcaccactgcatttcagccagggtgacagagtgagaccccatcttggaaaaaagaaaataagattggaagtctgtcagtgtgccattgtaatttattggtggagtgctatcattggtaacaatatcatataaatgtatttaacccctcctagcttttgaagtaagattcatgttagagctagaatttgtctgggtgcagtggctcatgcctgtaatcccagcactttgggtggatcacttgagcccaggagttcaagaacagcctacgcaacatggcgaaacccagtctctacaaaaa

SEQ ID NO: 396163 - DNA, 616 bp, Homo sapiens
aaaggataaagtacaatgtgtccaatgcatatagacaaaattttggtgtgtcatgaggaaatacagattcaagctgttgaaattcacacttgaatctgaattccaagacttggaataatggaacaattgtggtttggcagacttgtatagcattacttccccgaccaaacacctaaggcttcagaacacaaaataaatctcattgactctctataaaaagttaatattgtaatattgcctacaaataattcaacttcagtaaaacaggagaaatagataaaggaaaatattagtatgatttcactatgaaacccactctatttaatctttagaaaagatgatacggccgggcgcggtggctcacgcctgtaatcccagcactttgggaggccgaggcgggcggatcatgaggtcaggagatcgagaccatcccggctaaaacggtgaaaccccgtctctactaaaaatacaaaaaattagccgggcgtagtggcgggcgcctgtagtcccagctacttgggaggctgaggcaggagaatggcgtgaacccaggaggcggagcttgcagtgagccgagatcccgccactgcactccagcctgggtgacagagcgaga

SEQ ID NO: 396164 - DNA, 318 bp, Homo sapiens
ccctgtctcaaataaaaaaagaaagatacaattttaatttacatactagaaagctcaccctttaaaagtgtataattcactgggttttagtgtatttgcaggattgtacaatcatcaccataatttcattttagaacatttttatcaccctaaaaagaaacctgatatctgttagcaagtcactctctagttccccagtccccagtgtcttttttttttttttagctccagataaccactaatccacattctgtctgttgatttgcctgttttgtgtatttcatatttatagtgtcatatagtattggtcttttgtaa

SEQ ID NO: 396165 - DNA, 699 bp, Homo sapiens
attgcattttaatccagactcataaccagttactattttgatatctacttgggatctcaatccatacatgaagaaaaactgagctgctgatgttcactttcccattttgaaacttattagtcttgcaatagtctatgtctaagttaaatgcattcagttgcttacgctaaaaccgagaagtcaaccttgattcttctctacttggctattctctactttcccattcaattctcatcacttctatctccgaactgtatccaaaattcaaaagcttcttaaccgttgcactgttaccattctggccaaagccatcatctatcaccttaattattgtaatagtcttctaattgctgtgcatgcttctatttttttccccattttagtctgctttccagagatcattcataattatcctcttaaacctaagacaccttgggccaattctctactcaactcaagttaccagtgaatttaatggaaacttctttaaacatactgcaaattatttgacacttctcccatcaaattatgtaaaatatgtcctttcaccttaagttgccttgtgtctcatttgactaatcgagaactgcagaaatgatgctatgtgtcttcgaaaggtagatcttaaaagatcatgcagctttcgccttgttcactggaatgctctctcacagcactgagtctgtattaactgattcg

SEQ ID NO: 396166 - DNA, 361 bp, Homo sapiens
ctgcggcgactctagaggaccccaagcagttatacagactcagtctagttcctttctcccccatgttctagagcttaggattatgagtttggtggatctgtggtttttaacttttcaccaaatatagaaaatttacagccattattctccaaatattttctcttctcccctactcctttcataaattccaattacatatatcttaggccaccttaagttgccttgtgtctcatttgactaatcgagaactgcagaaatgatgctatgtgtcttcgaaaggtagatcttaaaagatcatgcagctttcgccttgttcactggaatgctctctcacagcactgagtctgtattaactgattcg

SEQ ID NO: 396167 - DNA, 731 bp, Homo sapiens
acatctcccctcttggagaaaccactaggggcagccgtcagtgtgatgggtgggcgcctggccccagagcgggctccacactcggctgggcacctccctctccagggcctgttccagcactgagtgcgcctttggggatcgtgcaccgtgagcagcacagctggaccccaggtgagggcacttcacctcccaggcctggtctccacacccgggtcacagagagacatgtcagctgaggaagcagggcaggcggcctcttccttcaacacctttaacttcctttaaatggagaagggaggctgctcctggggaacacagagggccgctccactgtaaaaccacagcagctgtgcaccaggatgggcctcagggaccagccagcccagggatggccggtgcccccaccctctgacaaatgcacccaggagtcaagcatgggggtgtcctcggcacctggattggaaggttcttgccattgtggatggggtctaacctcctggacttcagtgggtaaccgaaggctccagcacgcagcttcagaaagaccagagccaggcccaggtgccctctccagccgacatccgggctgtggcctctgggctgcttctccttcctgtggcttccaagtcccagggtacatcggtgcccttctgtgtcctggcagttttagagaaaaggaatgaagcagctgtattcacatacatgtagtaaatgtgaaattttcacagcag

SEQ ID NO: 396168 - DNA, 416 bp, Homo sapiens
ccagtctagtgtcctttcttggactagtgaaaaataacacctatgttttaggacttcatacctgacatgaaagtagttacacagaacagggaaactaccactcaaatatatttcttttcataaccctgacgtatggtcatgattctctttaagaagttaattccattttcagtctatagtacctcttaggttgttttaaatcctgccttattgaagtttctaatattttttgcagctacaaaaatattctgtcctggctttggactacatgaaatttaaggagtttttcagtggttctatttcggcatttcccatgtgtgttaatagtcatgtaagtttataggagagaagcaagggcaccagaaagaacatgtgcttcagttaacaagttcctttcaagccgagtggagtagatg

SEQ ID NO: 396169 - DNA, 984 bp, Homo sapiens
gagatctgatggttttataaagaggagttcccctgcacaagctccctctcttgcctgccaccatgtaagaagtccctttggtcttcctttgtcttctgccgtgattgtgaggcctccccagccatgtggaacttataaaataataagatggctgatcctgcaaagaggcgcggtgacatcaacagtgactcagtctctatgatggtattagtaactggcagctgactctcctatttatcatcaagttatgttccaaataagactttcaagtctgagaaaaatgacaaatcccttccaggcatggttcaagttaaagctgaaactgtgtcttcgtttcagctcaagagaggttttgattgtgtcgtggcttttccttgtgtattggttgaggaactgtgccttggaggggcggggagtcttgagaatgggtcaactgatggagggggagtggaagacattggttgcccaagaaaatatgtcaacatctgtccatcactgcaactccggcctgattatcattttttctgcttctgtaagcaccaatgagacaatgccactgaaccacattctttgttgcctgcagtatttcccaccactgcgccacctctgatatgctaatgaggaagcccagggtttgtgtggctgaaaagcctttcaggcacaatcagtgggtcaacaatctcaactctgtacagcggctcagcctgctctgtgagaggctcctctttcggaggggtccttcctcacaccttttctgtgaagtgcgtctgtgcttaaggagggcattaacatctggctgttgtccctggagaaattgaccgaacatcaaagaataaatcataccttgaaactgccagtgggcatgactgtccggtcactggggggaagccctaaccacggttgatttcaatgccccggccgggttgaaattggaaacacgactcggaccggcctctgaacccacaaggcgaaaacccggcaacc

SEQ ID NO: 396170 - DNA, 297 bp, Homo sapiens
gatcatttatctagaataatccttataagattcctttgattcctgttaattgcaatccaatacataaatattgaaggcttattatgaggatcatttatctagaataatctctattttctagaattacttaatgatcattgtctttattcagcctaagtaacattgaaatttttcttcattcaaataaattcatactcatgaagcctttccccacttttcatttcatattctgtttctactagtattgttaaccattgcaaagaaatactgttgccctccattaaaacctgaactgcc

SEQ ID NO: 396171 - DNA, 1764 bp, Homo sapiens
gagatctgatggttttataaagaggagttcccctgcacaagctccctctcttgcctgccaccatgtaagaagtccctttggtcttcctttgtcttctgccgtgattgtgaggcctccccagccatgtggaactgtactcaaactgtggcccaagtgctggtagcattagcatcaactggaagcttgttagaaatgtagaatctcagatctcaccccagaatggactatggactcagaatctgcattttaataagattcacaattcacagtataaaataataagatggctgatcctgcaaagaggcgcggtgacatcaacagtgactcagtctctatgatggtattagtaactggcagctgactctcctatttatcatcaagttatgttccaaataagactttcaagtctgagaaaaatgacaaatcccttccaggcatggttcaagttaaagctgaaactgtgtcttcgtttcagctcaagagaggttttgattgtgtcgtggcttttccttgtgtattggttgaggaactgtgccttggaggggcggggagtcttgagaatgggtcaactgatggagggggagtggaagacattggttgcccaagaaaatatgtcaacatctgtccatcactgcaactccggcctgattatcattttttctgcttctgtaagcaccaatgagacaatgccactgaaccacattctttgttgcctgcagtatttcccaccactgcgccacctctgatatgctaatgaggaagcccagggtttgtgtggctgaaaagcctttcaggcacaatcagtgggtcaacaatctcaactctgtacagcggctcagcctgctctgtgagaggctcctctttcggaggggtccttcctcacaccttttctgtgaagtgcgtctgtgcttaaggagggcattaacatctggctgttgtccctggagaaattgaccgaacatcaaagaataaatcataccttgaaactgccagtgggcatgactgtccggtcactggggggaagccctaaccaatggtctgaatctaaaaatgacccagtggcaccggtttgtagtaaaactttgaagatagaactccatgcaaattctgactccatagtgctggttcttgatgtaaatctcccaatgtaactgtcaaggtttaaaaatatcttacgtaggtgttcagaatcataaggtcatagaattataaaatgttaaccggcagaagtattttcatctttgtcatacgaaaaagagtaatttgctcataataagccttcaatatttatgtattggattgcaattaacaggaatcaaaggaatcttataaggatcatttatctagaataatctctattttctagaattacttaatgatcattgtctttattcagcctaagtaacattgaaatttttcttcattcaaataaattcatactcatgaaaaaaaaaaaaaaaaaaaaaaaaaaaaaaaaaaaaaaagagaaaacaaaaaaaaaacacaccaaaaggggcccaaaaacatatacgtgtaaccaccagagatagttcaggaggaacaaaacagggggcccccaaattaggagaagaaccggtagataattgaataagcgacaagcgcaaactagggtcacgccgtaactaaaacaaaaagcgtccagaaacagcgggaaaacacggggacaaaaaggggaagaactatgagcgaacgaaagcccactctcgtagaggggcgaacaatatggggaccacactatccaaa

SEQ ID NO: 396172 - DNA, 1857 bp, Homo sapiens
caggaaacagctagtacggaagaggggacagtgcagattcaggaaggtgcagtggctactggggaagacccaaccagtgtggctattgccagcatccagtcagctgccaccttccctgaccccaacgtcaagtacgtcttccgaactgagaatgggggccaggtgacgtacagggtgatccaggtgtctgaggggcagctggatggccaaactgagggaactggcgccatcagtggctaccctgccactcaatccatgacccaggcggtgatccagggtgctttcaccagtgatgatgcagttgacacggaggggacagctgctgagacgcactatacttacctccccagccatgtggaacttataaaataataagatggctgatcctgcaaagaggcgcggtgacatcaacagtgactcagtctctatgatggtattagtaactggcagctgactctcctatttatcatcaagttatgttccaaataagactttcaagtctgagaaaaatgacaaatcccttccaggcatggttcaagttaaagctgaaactgtgtcttcgtttcagctcaagagaggttttgattgtgtcgtggcttttccttgtgtattggttgaggaactgtgccttggaggggcggggagtcttgagaatgggtcaactgatggagggggagtggaagacattggttgcccaagaaaatatgtcaacatctgtccatcactgcaactccggcctgattatcattttttctgcttctgtaagcaccaatgagacaatgccactgaaccacattctttgttgcctgcagtatttcccaccactgcgccacctctgatatgctaatgaggaagcccagggtttgtgtggctgaaaagcctttcaggcacaatcagtgggtcaacaatctcaactctgtacagcggctcagcctgctctgtgagaggctcctctttcggaggggtccttcctcacaccttttctgtgaagtgcgtctgtgcttaaggagggcattaacatctggctgttgtccctggagaaattgaccgaacatcaaagaataaatcataccttgaaactgccagtgggcatgactgtccggtcactggggggaagccctaaccaatggtctgaatctaaaaatgacccagtggcaccggtttgtagtaaaactttgaagatagaactccatgcaaattctgactccatagtgctggttcttgatgtaaatctcccaatgtaactgtcaaggtttaaaaatatcttacgtaggtgttcagaatcataaggtcatagaattataaaatgttaaccggcagaagtattttcatctttgtcatacgaaaaagagtaatttgctcataataagccttcaatatttatgtattggattgcaattaacaggaatcaaaggaatcttataaggatcatttatctagaataatctctattttctagaattacttaatgatcattgtctttattcagcctaagtaacattgaaatttttcttcattcaaataaattcatactcatgaaaaaaaaaaaaaaaaaaaaaaaaaaaaaaaaaaaaaaagagaaaacaaaaaaaaaacacaccaaaaggggcccaaaaacatatacgtgtaaccaccagagatagttcaggaggaacaaaacagggggcccccaaattaggagaagaaccggtagataattgaataagcgacaagcgcaaactagggtcacgccgtaactaaaacaaaaagcgtccagaaacagcgggaaaacacggggacaaaaaggggaagaactatgagcgaacgaaagcccactctcgtagaggggcgaacaatatggggaccacactatccaaa

SEQ ID NO: 396173 - DNA, 1628 bp, Homo sapiens
gagatctgatggttttataaagaggagttcccctgcacaagctccctctcttgcctgccaccatgtaagaagtccctttggtcttcctttgtcttctgccgtgattgtgaggcctccccagccatgtggaacttataaaataataagatggctgatcctgcaaagaggcgcggtgacatcaacagtgactcagtctctatgatggtattagtaactggcagctgactctcctatttatcatcaagttatgttccaaataagactttcaagtctgagaaaaatgacaaatcccttccaggcatggttcaagttaaagctgaaactgtgtcttcgtttcagctcaagagaggttttgattgtgtcgtggcttttccttgtgtattggttgaggaactgtgccttggaggggcggggagtcttgagaatgggtcaactgatggagggggagtggaagacattggttgcccaagaaaatatgtcaacatctgtccatcactgcaactccggcctgattatcattttttctgcttctgtaagcaccaatgagacaatgccactgaaccacattctttgttgcctgcagtatttcccaccactgcgccacctctgatatgctaatgaggaagcccagggtttgtgtggctgaaaagcctttcaggcacaatcagtgggtcaacaatctcaactctgtacagcggctcagcctgctctgtgagaggctcctctttcggaggggtccttcctcacaccttttctgtgaagtgcgtctgtgcttaaggagggcattaacatctggctgttgtccctggagaaattgaccgaacatcaaagaataaatcataccttgaaactgccagtgggcatgactgtccggtcactggggggaagccctaaccaatggtctgaatctaaaaatgacccagtggcaccggtttgtagtaaaactttgaagatagaactccatgcaaattctgactccatagtgctggttcttgatgtaaatctcccaatgtaactgtcaaggtttaaaaatatcttacgtaggtgttcagaatcataaggtcatagaattataaaatgttaaccggcagaagtattttcatctttgtcatacgaaaaagagtaatttgctcataataagccttcaatatttatgtattggattgcaattaacaggaatcaaaggaatcttataaggatcatttatctagaataatctctattttctagaattacttaatgatcattgtctttattcagcctaagtaacattgaaatttttcttcattcaaataaattcatactcatgaaaaaaaaaaaaaaaaaaaaaaaaaaaaaaaaaaaaaaagagaaaacaaaaaaaaaacacaccaaaaggggcccaaaaacatatacgtgtaaccaccagagatagttcaggaggaacaaaacagggggcccccaaattaggagaagaaccggtagataattgaataagcgacaagcgcaaactagggtcacgccgtaactaaaacaaaaagcgtccagaaacagcgggaaaacacggggacaaaaaggggaagaactatgagcgaacgaaagcccactctcgtagaggggcgaacaatatggggaccacactatccaaa

SEQ ID NO: 396174 - DNA, 191 bp, Homo sapiens
ctgtatccaggaattataggagatacaaaatgccgaggaatgcactactcatgatcttttttgatccttttaacaatccagagacatgggctgtgtaaagccacagtgcaaaatacaattaggaaaacacagcaataagaccactgtagctttgaatggtgctgttcactaattattacctccccacccat

SEQ ID NO: 396175 - DNA, 346 bp, Homo sapiens
aaatcccctgccttcctacttctgtatacagaggagagaggaaagggatgggttaatgcttcaagctctagtctccagtctcagaaggaagccagtgtgcatgtgaggcactggaaatcaggggagtgagaaaactaatacttaaaggtcggaaacgtccagacataaccctttaaatatgccttgatctgaggtctctgccaaaggctgaatttcagaactccttctggccatgccatgcttggttaaagacagagtagaggtctgggtgagtgatcatctgtacttcaggcacctctgcccatcacagaaagcattaggagtcatagagctcccagaagcagga

SEQ ID NO: 396176 - DNA, 221 bp, Homo sapiens
cagtggaggacagaggaatggaacaggcactgaagagcttacacttgaggacagagaaatggaacaggcactgaagatcttacactggaggacagaggaatggaacacgcactgaagatcttacactggaggacagaggaatggaacaggcactgaagattgtacactgtaggacagagaaatggaacaggcaacccagtgctttaacaaacacataattt

SEQ ID NO: 396177 - DNA, 328 bp, Homo sapiens
cctccagccttcagtcaatgggaatcaaaacaatgatttcaagctattttattcagtctacaggcaggatcactccatggaggcctgctcctttccttccttttcccccatttctaaactgtgatccatgccccactctgaaagaaccattttgacagtctattgtgtagccttcttaggacattagccaccccaacgcaaacaccccggcaatgggagttttccagaggcttctccccggcccccgccctccctgcttcttcaaatcctagaggcaatgctgcagaaacctataagcagagaggatttctaatgcctgccacttgct

SEQ ID NO: 396178 - DNA, 347 bp, Homo sapiens
tggtactaccaatcttgaaaccttaagtaggttcagtagtacacattatgatacttctccagtctggttaaggatttagctttcttgggtctgctaagtccaacctcatgtagccatctgcttttcaacttccaaaatgttgtcatttctgctcctttctattctttttttccttctgggcttatgatttttgacaaatcctgttgctttcatttttgtgacaatccaggacaggatatagagatacacttgcatttggtctgccatttttaaatgaaatcctcattaaactaattttataaagaagaatttccatcgataaattgtatcatactttgtctcaatgc

SEQ ID NO: 396179 - DNA, 335 bp, Homo sapiens
caaacccacccagttaactgtgttttgaataacatattgtcttagcgcacagaataatatttttatgtgttataattgtatcctttttgcactatatttttcaactaacattaaaatactctccaatattttatgtagctttctggaaagaaaaaactccatgtgcatataaagattatacaatacaccattgtgtttctatgccacaagttacttaaccttgtcttataatttgatttgttatgtaagttatgttacataaaacaaaacttgatatttgatttgtttataagcttgactattataaatgttaacaatgtatatccttggaagta

SEQ ID NO: 396180 - DNA, 335 bp, Homo sapiens
cacatttcactttggaaacacagtagactctatcgaggccaggcttggtcacttccttcccatcagttctgtgttgagttgccatctctcaagatggtaaattgtttcctgctcgcttttatcctctctggttctcttacttttaggacccttttttcagtaagtaatttgtttattagccaggacccaagactaagttatttacatgtccattgtaaatgcaatgtaaatgagagttctgataaaatatttttgtattttgtaatatcaaaggaatttctatatcgtaggactcagtggggacttgcatgcacatccaccattgtctctgagta

SEQ ID NO: 396181 - DNA, 848 bp, Homo sapiens
gtgtatttaaccaatagatagtttttcagtcctcaccctcttccctccctccagtcttaggtagtttctggtgtctgttattcccttctttgtgtccatatgtcctctgtgtttagttacaagtgagaactaataaggttttctgtcctgtgttagttcacttaaaataatgcctgttttaaattttattaatttctgctctttattattttattccttcttgctttgggtttattgtgctctttttgttgagtcttgaggtagaagcttaaataatcaatttatttctctcttttttaatgtaaacagttagtgctataagttttcctcttagcactgcttttgctgtgccgctctattgtttccaaactgtttctttgctatttttacttccctgtgtcattagcaaaactaaactccaggaaagcagggaaaggtacttgctttttgcttttcccagtatatagcatagtgctgtgtatttgaaaataatttttgagctttaaaacttagatctcagcttggcagcttacatctgcttataaccaggaactggaagaaacacaatacaaatattccctaaaattagaagaaaactatagagggtttattgcaagtaaaattctacttaataaatttatttttgtttgttgaaaagcatatggaaaacactgtatgggttaagtctttagcagtgtgttttttgtgtttaagaatttatatagagaaacatttgagttttttaatggcaaaattaaagagcagaggcatgaatatttagtctgaaaccagttccaatctctcagcaaacattaacatcctcccagtccattcttagagcccgtgga

SEQ ID NO: 396182 - DNA, 591 bp, Homo sapiens
tgtgggcctctccatagggctgttcacaacatgtcagcttgcttcagagccatcgaggaagaaagtctgctagcaagaacattataattctttgtaatgtcatcatggaagtggcattccattgttttccatagtctgtggttagaaacaaatcactggtcctgcctgcacccaagggaaggagagtactcaagggcctgatcaccaaggaggcaggatcactggggaccatcctagagtctgtctgctacagtagtcatgaggacagatgaaaaggtccacttaacttggtagttaattggtagtatatagtatactccttgtgtatgtaatttgcccttcatctgttgtattttctgtgcatttttattgtgctctatgagtcttctgcaactcacaggtaatagatgtcacaggcagactaaaaatcaaccttgagaatgttttatatacagctgtaattctcaatgcactgtaactgccccagaatcataccatttcttctcctctaatatcccttctgcatgtttggcaatatctctaaaaactggttttggaacatgatgaacatatttggtaccaaaaaagctg

SEQ ID NO: 396183 - DNA, 352 bp, Homo sapiens
caaatgtctggtgggttgagtgggcattctgatatcacagctcctcctctggctgattaatggggaggtacaacagacatccttgcagtctaaggtgacactttaaaaataaaatctcttctatcaggtaagaaaaatacatatatatgattcaactgctgaatctacaagatccgatctcagatggaaaggactgtaagagacatcccttcgattgaagatacaaagagattaaaaggccagaaaaagatatagtatgcaaaaataaaccataaaaaaagtgaagtggctatactgacatcagacaaaatagactttaaaacaaaaacatttatagagacaaagggaaaca

SEQ ID NO: 396184 - DNA, 411 bp, Homo sapiens
cctttcttgccctgaagggagttactgttgtttttacagataaggaaactgatgcttggaaaagcatagggggctctatgccttatctttttgaggatgtcttcatgggttcactcatccattcaagaaatgtttattgagcacctactgtgtgttaggcactgttccaggtaccgaggatttagaaagctaagacataaccccaagactttggtgcctagttgaggagaaaggcaagtcaaaaacctagagtgaaggctgggcatggtggctcactcctgtaatcccagcactttgggaggccaaggtgggcggatcacttgaggtcaggagttcgagaccaccctgaccaacatggtgaaatcccgtcctaccaaaaaatacaaaaactagccaggcatggtggcgcac

SEQ ID NO: 396185 - DNA, 405 bp, Homo sapiens
ctttttgtaaagggcagtgacctatgtggtgggcttgtccactgcccgagtctgcggctcccacaggtcactgcccggctcatatccttcccctttggaattggcttggagcagggtctctcctccccggcccctatgtgcccaccatctctggggtcagtggcccactcatgactctcagggcggggagggggcttggagttcagtaacagcaccctgggtcattcttgcacctgtcaccctgagagccactgaccagttttctgtgcctagaatcgctgcttgcggcctttctcaggggctcaatggattgtaattgatgtttgtattttgcacttgcccggaggtgtttcacgggaagtgagcattttttaaaacaaaaatagaatttagaaaaaaaaaagg

SEQ ID NO: 396186 - DNA, 642 bp, Homo sapiens
tccaagcttgtattgttgtgagaatgtggtctacatcacagacataacagctaacatttattgagtgttatgttctgggtactatgctaaaggttttttacctattatctcacattattatgtattatcctatgtattatgtattatgtattatcctaacattcccattttacagaaacagaggtacctaagtaacctgcttaatgtgacagacctagtaagagggagctgggaagttgaacccagcaatctgaaaaagcaggatgtgatggggctaagagaaagccatgtgcctagccgggcgtggtgactcacacttgtaatcccagcactttgggagggccgatcacttgaagcctggagtccgagttcagcctggccaacatggtgaaaccccgtgtccactaaaaatacaaaaattagccaggcgtgcacacacctgtaatcccagctacttgggacgctgaggcacaagaattgcttgaactggggaggcggaggttgcggtgagccaagatcatgccactgcactcgagcctgggcaacagagtgagaacctgtctcaaatacataaaaatacattgtgtcatatcgatttgtgaaaagttcctactttaagagagcttacatgtaacagaaaac

SEQ ID NO: 396187 - DNA, 490 bp, Homo sapiens
aattgatgttcctcaaagagaccagaacaagtggaatgaattctaccaccaagatttcacataatttttagattaaaagggctatatgcccagaatataccagctgatgccaagaataatcttaaaatattatgtattttaaggtaagaaaaagaattggcttaataaggtaaaaaaaaaaaccagaaagtttactgaaaaggagaaaaatctacctgacctcaggcttgctcttgcatactcttgaattcaggagatgttgaaattaatatctactgttgtgagggttaccgcctaagcatgtttttaccagaccaaggcagtgtttacataagaagaaagtagaaatcatcctcaaagtggaaagaatataaaatatttccacctaatagctgcttgaaaaaaaaaaaagacctgaaagattccttagttggaaataagcataaagaaattaggtgagcctggacaacatggtgaaaccctttctcta

SEQ ID NO: 396188 - DNA, 283 bp, Homo sapiens
ctgacacatcagagaacaagtaatcctaagaaaaatttattttctaaaataaacacattacacatttattactttacgtaggaaaagagtatttgtaaaagaaagaaaaactcaaaggttgataatgaacaaaatgacaccagctggtatttttaccatcaccctagaaaaacaatttctttccccccgcgaacagaacaaagcaaatcacaaaaataagtctattaaaattcctaagtttacaaaaataaggtccactggatcaagtgtatacccactggat

SEQ ID NO: 396189 - DNA, 265 bp, Homo sapiens
agatttgtaactctagtccggaactttcttttgagctttagacttatacctgtctacttcataccccattttgataagccataggcatctcatacgcgttccacattgaactgctgattttcttcacttttcttattagccttttctgttttaatgaatggtacctttctctatccagttcttcatgccaaatttggtattctttggcactgtcctctttctcaacctccccacatcaaatttattacaaagtccgttgattttt

SEQ ID NO: 396190 - DNA, 171 bp, Homo sapiens
ctgcaaagaggcatcaaggagggtggctcaaaggagcctgcagaggaggaggaagaggaaaatgaggctggaaatgtgaagggagaaagaccacagtctcaacagctgtgaagaccaaggaattagcctagaacagaagaagaggtgtctttcctgtgaagaagaaaggat

SEQ ID NO: 396191 - DNA, 236 bp, Homo sapiens
ccaaagatatggcaaggccaagaagcacatgacaagatgctcaacatcattagtcacgagggaaatgcacatgaaaacaacagcgatatatccagtaagactgctagaatcaaaaagtcctataaactccagcggagatgaggaaatggagaaggtggaaccctcatacgctgttggtaggatgaaaatggtgcagcctcttcagaaaacagcctggcagttcctcaaaagcttaa

SEQ ID NO: 396192 - DNA, 298 bp, Homo sapiens
aacaacaacaacaacaaagaagcaacaaaagggaatttgtacttttagccatagagccttcaagtttgttataaccactggggagaaaacccttcatttctacttcattcctaaaatgggttaatcactgattatacatagaaaatttactcaaatgaaaacaaaccaccaccagattttacctttaaatatattttcttggtattattttaggttctggtagcaaaaggtgcagagataaggacatgggttaatgacatgggttatttattgcactctgcatacagcagcaagaatg

SEQ ID NO: 396193 - DNA, 566 bp, Homo sapiens
ttatcctagaaccacacagagcacaagatcaagatagaaaatcatttgcatttctttatactgacagcaaacatttggaaacaagttaaaagcacaataccattggcaattacaccaaagaaagtgaaatactatggtgcaaatctgacagaagatgtaaaggatctcccttctgaaaattacaggggccttttcttaactagtgaaagttcctttgggctgttctcatgtccatctggaatttttcccatttcctgcctgaattcctggattctcggatgattcttgtcttcctgtcaaaatcaagagatgtcagatgaggaccatgataaagccagttgtaagttttctgatgtctacaccaagaaactcacacttagtgggatgtctgctctcaggtagaacctaaccaaccagttaggagataccaagagcatagtctttaatgcctgggaggacgggagcaagcagagatcttggttaataaaagcgttcaaaaatctatttgtgaaatcaatgtttattcacttaattagaaataaatatgtaaataaatggaattctgt

SEQ ID NO: 396194 - DNA, 404 bp, Homo sapiens
tcaaattctctagcctcaagatcctttatcaatggttcttaatcctgactgcacatgaaaacacctgggaagcattttaaaaatacatcagtttcacagtctgaagtggggctcagtctggctatgttttaagctcccatgtgattctcatgtgcagccagaaatgacccaaatgatccgacccctctacctgtctaatgtcactcagtattcattctctttgctcattaacctgaattcaagctagttcccatcttcggacttgctcctttctccacctggagtgctctttcccacatttccacatggctccttctcatcctttagaactgagctcaaatgccacgtcctctgcggcgtcttccctgaacctactctcctcacttgaacctgttgttttgttt

SEQ ID NO: 396195 - DNA, 198 bp, Homo sapiens
caacaaattacacaacttatattaaaaaaaaaggaaattcttcaaaagacaaattaccagaacagactcaacaagaaatagaaactctgaatagatccctaacaaataagaaaactgaactacttattaaaaatcttcacactaagaaagcctaggcacagacgatctcaccaatgatttttatgaaatatataagaa

SEQ ID NO: 396196 - DNA, 336 bp, Homo sapiens
aaagagcttctcctctgaaaagccatgatctggatggggaactttgggttggaaacatttgaactgtcacctggatcctttgtgaagtctcagaaatgcaagtgtttctaagcgctagagagaccaggggatttaggggaaacctataggtaaagaagaaaagctgcaagtgaaaagccacaccttgctgtggctgcttcagctctgcctcagtgatcccagcacctgcagacacagtttctttctttctctttttagagatggggtcttgctctgttgcccaggagttcaaggccaccctgatcaacatagtgagccctcatctaaaaaaaaaaa

SEQ ID NO: 396197 - DNA, 348 bp, Homo sapiens
ctgtgtctcctgcccggtgttcacccctttatcataaagctacagaaataaggaagcagcaggagaggggcgagagacaaacctagccctgcccttccctccctggtttccactcctgtttttctgcaggctgcagggctctggacaggtgaggacaccctgctgggagaactttcccttccccatcgtagcttggttttcagggttgccttctctggctggtgagaagccaggcatttaattgaatagaaccatacaaggtggttgctatctttgcatccctgagagctgaggacacctgctgtccatcctgccatggagatgaggccactgaatgttcccaggcag

SEQ ID NO: 396198 - DNA, 438 bp, Homo sapiens
agaaggagacccctacattatttacattcataaggtttctaccatgaattttggtttgaaaaacaaattgactttacacatgaggatttcccatatttgttacaattcagagtatcactcttgtgtggaggatgacttcatacagatttcccacatgtattgccttcatatggtttctcccctgtgtgagttctctgatgattgatgaggtttgacttcacataaaacattttcctgcattcattacactcaaaagggttcttcctggtatggggtctctgatgcacagtgaggtgtgatttcatacagaaataagtaacagatttgctacatttatagggcttctcttctatgtgagttctctggtgaatggtcaagggtgacttataacagaaggatttcccacatttattacattcatggggtatctcccctggg

SEQ ID NO: 396199 - DNA, 304 bp, Homo sapiens
gttttcccttctcttcacctataaggacttgtcattagatttagggcctgccccagtccgggatgatctcatgttgattctaaattacatcttcagacacccctttttttttccatttaaggtcacatttacacgttccaaatggacatatcttttaggggctactattgaaacctgttataactctttttcttccccctgtcctggagaatgctagccataacttttctgctcatgctcaggtaggattcagccactttaagttaccaacaaggtctcaatttagtaactagaatatctaatt

SEQ ID NO: 396200 - DNA, 460 bp, Homo sapiens
cttcaaaacgtgtcttttttcaaactaaattttattgtgtgtatttaaggtagacaacatgatttttaagagccaaagtaattttgatgtattgtaagtttgggaactactggtctaatacccctgacttaatatcacattcctgataaatattactaaatgtaagtcacatcatgtctgattcatcatacttatattttgcaccttcttaccttcttctgttattaatttgttgctttttcaacttatattttagattgagggtacatatgcaggtttgttacatggtatactgcatgatgctgaggtttgcggtatgattgaacctgtcacccaggtagtgagcatagcacacaacaggtagcttttcaactcttgcccccctctctccctcctccaaaatctgtcttaagtgctatggtatatacaagaaggaagacacaaaaccacgtgggctttt

SEQ ID NO: 396201 - DNA, 142 bp, Homo sapiens
gtgaggtcaggggtggtattgacccctcttggtttccatttatttgtgttagtgtttggcatatacaaagggctcaatgctgtgtctctctcttccagaggtgtcctcctgtcctcttttcaaggtttttgattaaaaattt

SEQ ID NO: 396202 - DNA, 164 bp, Homo sapiens
ggcgcgtgcgtcaagaagcttagtatacctagtacatgtaactgatagtatccaccaagaaaaaatctatgagaacgcacaaaagaaaatcaaagcacatcactataataaaaatcaacaacacataaaggaagacaggaagaaaggaaagaagggacaaaaaa

SEQ ID NO: 396203 - DNA, 657 bp, Homo sapiens
gttttatttttttcttcatatttttctgcagtatttattggtttatttttgctctatacatagactccagttgaaaaaagtatttaaaaatatatactataattttctcagactgatagaacatctcaacttgaagattaagcacagaatttggggatgttcatccagatctgtatatttactttgcttttgttagggagtatgtaggtacttcctgtacttatattttactttttgaaagttggcacaggcatgtgctcacacatacattatttcccacatgttagtccaagaattgccaggcttctatttcaatgactgtgtttaaagtaatagtttgccagcgacttggtttacatatccaatcagtgtgaaagttatgtatccttctccatagatacaaggaagtcctctttgcccaatcagtagatcaagaaggcgaacaccttcttaattacaaatgaggttttaaaaagttggcttaacaaatatagctatgtttgcttaacaaatatacgccatatagcttaacgagtatagctaaggagacctacctgaggattcttctggtttagaaaagaattatttctgatagggagacaatcatgttgggtgtattttaaaatgcttgatataatcttcaaaatttattatgaa

SEQ ID NO: 396204 - DNA, 226 bp, Homo sapiens
tggaagtgtctcagctgtgtgacaggaagacaagaacacaccaccagaaggaataccatcttgaccgttcataaaacttccagtggcagcatggtggctcacacctgtaatcccagcacttcatggggctgaggtgcatcgcttgagcccaggagtttgagaccagcatgggcaacatggggaaatcacatgcctactaaaattttaaaaaattaagaccaggcgc

SEQ ID NO: 396205 - DNA, 262 bp, Homo sapiens
cagcagactcagcacagatgagaggtgagcgaaatctccaggatgatggtaaatgggacagccatgtatcagagctggagaatagacagattgaaccagaatgtgccagaaaggtccagaggaaacttcttcaagaggatgaaaggatagaatgcttattgtgaatgcacttcttgcgaggtgatttagataagtggaagagaacttggattgaattggtcataaagacatagataaccaactgagctgctgctgctgcttt

SEQ ID NO: 396206 - DNA, 496 bp, Homo sapiens
tcagaggagaggtaatacaggcctgaatttggaggatagagtagggataggaactggagaggcaatagaggaagtggttaagaatactgactctggaatcagacaggtctttatctgagtcccagcttagacatttactgactgagttacattgggaagattatttaatatccctgagcctcagatttctcattcatgaagtaaggataataacatttagcttagagagtggttatatggattaaatgagataatgtaagtaagtgtttagcatagtagcggaaacatagtaaaaacaggaaattgttgggctgggcgtggtggttcacgcctgtaatcccagcactttgggaggccaaggcaggcggatcacgaggttaggagactgagatcatcctggctaacacagtgaaacccctcctctactaaaaatacaaaaaaattagccaggcgtggtggcgggcgcctgtagtcccagctactcgggagactgagg

SEQ ID NO: 396207 - DNA, 427 bp, Homo sapiens
tgctgtcctccagctgggatttgaggaaagtcatttcttccagcttccctaaaatccttctcagagagccaaggacctctcctttcgtgggtctgaaacatctcagggttccatgagtggcaactggcttctctctctaagagctctttgtctggcctgacacggaataaaagtacctagcatcaccaattctcccacctctcttcctccctctcttcctctctactttcttccttctcaccttccctccctctctccctcacccactgttcctttcttcctccttactttttgaaaaaaatgtgctttccgcccccacccccatggccatatttacattcctctgttattaaatgttagggaatttttacattgcagaaatttaccttaaacccctcctctttcctgattccaggccatccccacc

SEQ ID NO: 396208 - DNA, 434 bp, Homo sapiens
ggataaagagaacagaagccagatggctggcagcaacagttgggtgacgaggccatgatggaacattagaccttggatcaaggctcaaaaattcagacaccagcgagcccaggcaggtaatggaagcaactgtagctgactggacctaagaagcagtggcacgggtgccaggcaccccagctgacctgccttggtgctcagagcagcagggctggccatggtcagggagtctggggaggtcatgctctgtccacagggttctagccagcttctgccaaattgtctgttttttctcaagagaagctgggaaggccagttgtggtgtctcatacctgcaatcatagcactttgggaggctgaggcaggaagatcacatgagcccaggagttcaagaccaggctgagaagcatagtaagagcctttcccttaaaaaa

SEQ ID NO: 396209 - DNA, 366 bp, Homo sapiens
ggggacttgaaagaagatgagacaggcttaaaagcctgtgcctgggagatggatgctattgacaagatcaatagagaattcaggaagaagaccatcagatgtgtgtgtgttgttaggattgagttttctttgttggttggttcagaaagaggagataaaggtgtgtggagtttggggtatgtgagatttgttgtgccagtgagactgcttgtgtagatgacacagcactaggtactgtgcttaggattcatgcattgggaggttatagttgaagccctaggcatggatgagactgtcaaggaaaatcgtccttataggaaagcggagaggttaaccaagatgaaaccttgaggaacacttactctt

SEQ ID NO: 396210 - DNA, 355 bp, Homo sapiens
cagtgtgattcagagtaaccagatcatcccaggaaataaaggtaatgagccctgccacagattagtaagaaagaattatctgaagaagtaggttttaaagaatagagtgggccatgatggtgggggaatagttggaagaaatgcctggggtttctttttcagcttagaagttacagtcataagagtcctctttgagtttatggtgagacgtgattgtgccactgcattctagcttgggcaacagagcgagaccgtgtctgtaataaaaaataaaaagcctttatcatcccaagtcatttagatttgcctttggtgggtgggttttctttttcagtactttcccattttgaagccc

SEQ ID NO: 396211 - DNA, 151 bp, Homo sapiens
gctggacacggaagggaacatactcctgggacctgggattaggatggggacatcttgggcggttgctgtcatgctgccttccacacactggccatcaagctctgcggcccccaggcagatgctgtgctgcagtcagagggcagagaagctg

SEQ ID NO: 396212 - DNA, 372 bp, Homo sapiens
gatgattggcagacaactaattgacttagacaaccaatcaaatctatccagtaacttgttaacagtgttattgttccattaatatgctctttatgttccattttatatttgtcaaagctatttcacttttgcggggggtgcagaattctcaaaatgacatgagccaatcagggaagataaaaccccatttaatagatgagaaacctgagtcccagaggtttaaagtgaaacctaaatcagagtccaaaatcaaaccgtatatcagcgtgcctcaggaactgcatgcagggattatgacaccaagtccaggatcctttttagatgccagttgcacagttttaataaagcttttcaaaagccctgtttggctaa

SEQ ID NO: 396213 - DNA, 440 bp, Homo sapiens
ctgtccggtatcaacaatctttaaactataaatttaacgctgctgaagaaaaggggaaataacattctcattgtactgtcctggtatcacacttacaaaatgaacaaataatcagactatttccacttatctagcactctgcatctgaggatctcaaatggcctgacaaacgttaattaactaagctgcacaacactcctgtgagggtggcaggcagcatgatcctctccaagcgacagatgaacggagatcctgggaggcccttcctttgaaagtcagtggctcaacttggaactcaacttccagaacttggaactcaactccccaggcccatggttgagcatctccgctgaagccaagtagcacaaaatgtagatgttacaactgacagacttttctaaagaaatttaaactggaaaccaagatcaatctcaaggaga

SEQ ID NO: 396214 - DNA, 465 bp, Homo sapiens
tgtctgtatgtgcatgcatgcttgtgtctgtgtgtgcatgcgtgtatgtaggtgggtgtgggtgtacatgtctgtctttcctgggctcccagtcttttggtcaggtgggctttggtcctgcagggctgagtgtgacacctttccctgtgggccctgcctcacctttacaagtgccgcacctaagcaggagcttgatcaaatgtgccattgatagaatgcacttttggatcctctttgctgccctagagtcttcttttctccttgccatttgggactagcactggaacatctgctcagtatgtacgtgtgtgtgtgtgttcagccaggaggcgggctgactgggccaaggaagattgttcaggagagcttgcagggaggagaaaacaatttccacgtcaaagtaccttgtttaaagattagagctgtatcagcccagaagctatctcccaaccctccccaccccac

SEQ ID NO: 396215 - DNA, 414 bp, Homo sapiens
actcacacttccagatttcaaaacttactacaaagctacagtaatcaaaacagcgtggcactggcataaagacagacatatagaccaatggaatacaatagaggcccggaaataaatcatcacatgtatgctgaaatgatcttcaacaagcgttccaaacattcaatggggaaaggatagtcttttcaacaaatggtgctgggaaagctgggcttccacatgcaagagaatgacactggatcttttcaccacatacaaaaattacctccaaatggacctaaatgtgaaatggaaaacttaaaactcctggaagaaaacatggggtagaagcttctcactgttggatttgaccaggcatggtgactcacatctataatcttagtactctgggaggccgaggcgggcagatcactt

SEQ ID NO: 396216 - DNA, 454 bp, Homo sapiens
gtactaaccatttggccatcactgcccaactaatgaaagaagtgaacactgaagaagatgctacatcaaaaggatcaaatgttttcaaaaaagaaaagaggactgcaaagttgaaggctgatttttaataacaggtatctcaaatagagacaaattaaccagacagaagaaacccaaaagtggtaacagttctaaaaatctaaaagtttttagagctgcagtttaaaaaccaagaggaagtcctgaaacaagcaagcatctgctttgttcaaaggcaagaagtatatgaactcagtaataataatgactgtgaaaaaccagttgggaggtcgagcgtggtgacttacacctgtaatcctagcactttgggaggctgaggcaggtggatcgcctgaggtcaggagttcaagaccagcctgtccaacatggtgaaaccccatctctattaaaaata

SEQ ID NO: 396217 - DNA, 453 bp, Homo sapiens
cccgtcatacgctgaactatgcgaaatttaaattggaatgtattctttaaacattaaatgtgaccatcctgaaagaaattctcctttcttgataggttcaaggaatagtcagaatgctgccaagctccttgaaaccatgtagtgagaaatgtagagagaattaagggtgaggggagatttttttttgctttgaaaatgtagtcatgcttattaaagaaaatttgagaagtttagaaaagtataaagatgacaaaaattgctcatattcctgctacctcagtgctaaccatgtaaacattttagtttaatgttaaaaggtcactcagggttattgtgagatttgatgagatcatggctacaaggaacctttaactgtatgaatgaaaaatctaatgaaactgcaaagtcactcctatttactaaaaccagtgtagtggctgtttctgcctcttt

SEQ ID NO: 396218 - DNA, 302 bp, Homo sapiens
ccctctccgatcagcatctctggtctgctgcactgtaatcctatagggacagctctggcttttattactgacaagcagtgcactgtgcagccataggcaccataataggaaacaccgtggcctgtcataaacaggtctggagagtagaaagtacaggcctgatgggagcaagatgcgcccatcagatacacttaagtcacagcacaagtattatttgtgtaaatattattttgttgaataatttttaatgtagtaaacaatactggtaactgaacatttttcaattaatagaagtagaggag

SEQ ID NO: 396219 - DNA, 490 bp, Homo sapiens
gccattttgccgtacggcactggctacgcccggactccggtgcgcagccagtggagctcttttcacccggtgcttctacgactccgccaatcagaaacttcctgcctggggcccaaccgccggagagtagcgcgtagggaggaccgagcctcgtttccaaggaggggcaggggaaccgaacagggtggattaggaattgggctttccaaagctgtgcagagtttcagggaagggcagaagtctcttaaaagggaagtaaaaccttttctttcagttgggctattggcaagctatctggccctgctttcctgtcccccaggttcccatttccacggcttattcggctgacccagccccttcccctgcaagggcggcgcgctccttgccgctgtccagcagctgtttctactgccaggtgctgcgtcccgcgatcgttataacacatgcgtacaaatgagcacaacgcgccataaaagtgttattgttatta

SEQ ID NO: 396220 - DNA, 130 bp, Homo sapiens
gacgtgttgtgctgggttgccatccagaggaaattttgagtgggtgctctctagtcggaacgaagtagatccccaaaccactggtgggcagggccagacagacccagtcgcactgaaaatgtatgtgttg

SEQ ID NO: 396221 - DNA, 591 bp, Homo sapiens
agtaatgaagaggaagaaggcagtgtttaccctcaaggtgttgcttgtctgaccaagtaagacagtgccgtgtaatgagtgcaacaatacgggtattacaaggtattcaggaggcagagagaagcaaaggatgaattctttcttgcatagagggggataatgagggcttcttggaggaagtgatgctggtgctgatacctgaaggacaagcaggagcccacccacaagacaatgctgggaagcacgttctggaccaagatgtgtaaaactgtgttaagtgctgggagaaaccttaaatattcctgtattatcagagtccaggctgtgcaaaggagagtgtctaagataacaactagtaccagatctggaaaggtccaagtgcactgctcaaatatatttagaatttattgtgtacattatgatgtcttaaacttctgtcattcatgtagccccttagtgattttcttcatatcagctacctgagttttttgcttcattttttttagaagttcaactttttaacagtgcaggaaatagaaaacatggatcctttgttaaagaaataagaacaacaaaacccaaatgatgtta

SEQ ID NO: 396222 - DNA, 293 bp, Homo sapiens
cttctctgtaaatgggggaaggagagtggtggtaaaaagaataaatgattaagtactctataattgatagcaattactagagtagcatcattggattttgtatgagaggatgaggacactgttaatagctcctcttctcttttcagactgtcagcatctccctactgtatacatgcttgattaatgctattaaatatggtaggttcactaaaagaatgcctttgttggtgcagttaaaatggtaatttgcatcactgtgagtagatcaaagtgagctaaaaagttgcaagttt

SEQ ID NO: 396223 - DNA, 188 bp, Homo sapiens
atgacaactagtccttttgaaaagttcagatacatcactgggagggcataggctgaacacctagtacaattgaatttacagctgtacttgctataaatcagctcagcagattgaaaactgctcagcctttccagggcaactgagtgtgaaagcaaagatctatattatctataaactataaactctca

SEQ ID NO: 396224 - DNA, 193 bp, Homo sapiens
acacatggctggataccagtgaaaaatgtggcttgatctttgtaagtggtttgtgttatacctggtgttcccccctcgcccaaatcatatataagtatatactcacaaaccaagacttctccttctctctctcattgtcttaaaaaatatcatttctggtttggcgcagtagctcacacctgtaatcccaata

SEQ ID NO: 396225 - DNA, 479 bp, Homo sapiens
caccaggcaatgtgaggtatatttgtaaatttcatgagtatttttgtgaactcacaaatgaaaacagtcctaattttaagactaagtactccatcatttactttcctaaaactgtatacatgcaaaatggcaaaaacatcttaatttgtacattagttcagatgttatagctgagttttttattgaaacaaaaatggaatcatatgaaatattttaacttttttcacttagtatataatgttgtcatcagaatttctgtaatttaatttttaattagtattttatgaacagatatatcttaaaactgcccgatagacacagttttgttatcaaaaacacatctaaatctttacacgcttccatgactcaggtgaaggtcacctttttaactgaagggtggaagtactgttctcttttcctctgtgaacacattgccacatcgattaaagtgtctacccaacatttatctctctctcctt

SEQ ID NO: 396226 - DNA, 454 bp, Homo sapiens
  misc_feature (421)..(421): n is a, c, g, or t
ccatgacaacaacagcatggaaggcaggaagggagtgaatggagttgattcttgcattatctgggaagtggtacattttctgatctaaggtagattgataactggatgtatgttactaaatgaacaaaaaagaaagtatgactaataatgtaataaaaaggagaaaatgtaatgataaaataattacttgattaataaaatagaatgcaagacaggagaaaaaaggaacaaaaaagagatgagataaatagaaaacaatgtggtaatctggtttgatatatggaagaagaaaggacattatagtggaaaaactgcagaagtccaaatcaagcctgaagtttagtatagtagtattgagtgtttagtacctatgtgggtttctaagttttaacacatgtactgtgataatgtaaaatgttanattaactgaaagaggagggtgttcgtaatccga

SEQ ID NO: 396227 - DNA, 586 bp, Homo sapiens
atcagcaataggtctacaggtgatgtggatattgaggttatttaactaactataattaatagatttaaaaagtagattctaaaaatagagactatcactagaaaattagaatctataaaagcatagtcaaatggaaattctagagctgagaggattaagaagtaaaaaaatgagtttaactgcagattagagaacagaatagagaattagtaagctgaaagtagataagagaaaatgtaatgataaaataattacttgattaataaaatagaatgcaagacaggagaaaaaaggaacaaaaaagagatgagataaatagaaaacaatgtggtaatctggtttgatatatggaagaagaaaggacattatagtggaaaaactgcagaagtccaaatcaagcctgaagtttagtatagtagtattgagtgtttagtacctatgtgggtttctaagttttaacacatgtactgtgataatgtaaaatgttaaaattaactgaaagtgactgagggatatataggaatgccttgtactatctttacaatttttccgtacatctaaaattatttcttccaaaaagtttatg

SEQ ID NO: 396228 - DNA, 441 bp, Homo sapiens
tggtttgggcagataacttctaaattacgttgtaaaaacttaaggtaaaaacccttttctcctttaaaatatagattgattatatgtaaatgtgattttatgtactaatcagtcaccaaatatactagacagagaatgaatggagtcactttagcttttcaaaggagtttttatagccagttgcatgcgttggagctgtcgctattgctctgtgcctagatggatactctgcccagaactgcgaattgtagagtaccacgtgtttgctatcttgaggtttaactagctgggtgttaagttcatgctctgcgccatggcagtctgctcagtgagactgccatgcagtgggactcagcatagcccctttcctttaggagcccagctgctaataggaacaccgagaagtcttttgatatttcccctgcagtgcgataaggattt

SEQ ID NO: 396229 - DNA, 261 bp, Homo sapiens
ttaacttagcttctctaacacctaaaaaaattcttctttgtattttcagctaatagaagacagttcttcttcatcttgacacctagagccctctatgtgattcacagaggacttaaaatacttcttactctgttgaagtgtttaattgtacagaatatatgtactctacagtatatgtgaatcagcactcaaagcagagaagtgataacatcccaagcttcccccatacttctactgacatgccctcagtcttgaagaaca

SEQ ID NO: 396230 - DNA, 435 bp, Homo sapiens
gaagtacttctagctagtaattgaaactcataaggtggctggttgctgctttctggccaccaggctgccattcacagcagagccactggagccactgcagttcacacttgaaagttctggggactgaaactgacctcatgtttttctttctttgttcaatccagctatatcaactgtttgaactctgtgttatggaggaggcaaatttaatttctggagcttactgctagctaagcaaaaatgtgcagcttctcattcttgtaacggcaaatagttaaaatttcatctgtgtcaagtttcttttctgggagtttttgtaagtaaaaagagtaggattagtgagtaaaatcacgaatgaaaaatatttaaatcttattaagtaatttaggatactttttcatatctttagaaaaatatatatatatatatgaaata

SEQ ID NO: 396231 - DNA, 415 bp, Homo sapiens
ccatctctagaaaacattgaaaaattagacgggcatggtgtgcctgtggtcccagctactcgggaggctgagccaggaggatcccttgagcccaggagttcaaaggtgcagtgagctatgtatgatcaaatcactgcactatagcgagaccccatctctaccaaataaataaataagataaattgtgaaaatataagaataggattttaaaatcagttctttccttctagttttaaaatgaaacccagtaattagttttaaatagtaatctctttcaatgttgagtttcagtgtgaagctaacctatatgttacaggaaagaatcagatgtaattatatgttaaattccaattattggctatgataaaaaatttttgattttacttttcattattagacttttggcttggcagtg

SEQ ID NO: 396232 - DNA, 694 bp, Homo sapiens
catggtggctcatgcctgtaatcccagcactttgggaggcaggcggatcacctgaggtagggagtttaagaccagcctgaccaacatggagaaaccccgtctctactaaaaatacaaaattagctgggcatggtgctatatgcctgtaatcccagctactcaggaggctggggcacgaaaatcgcttgaaccccgggaggcggaggttggagtgagctgagatcacaccactgcactccagcctgggaaacaagagcaaaactccgtctcaaaaaaaaacacaaagtgacatattcacagcataaatttttgactcatggcactgacaaagaaagaggcagttactaagtacaacattaaagaatcgttctccatcttaagccaaggttagaaaacgtttttctgtaaagggccagatagtaattcttccaaggccaaaggtctctgttgcaactactcaactgtgtagttgtgaagtgaaagcagccataacctggccgggcgcggtggctcacgcctgtaatcccagcactttgggaggccaaggcgggtggatcatgaggtcaggagatcgagaccatcctggctagcacagtgaaaccccatctctactttagaaaaaaaaaaattggctgggtgtggtagcgggtgcctgtagttccagctactcagaggctgaggcaggagaatggcg

SEQ ID NO: 396233 - DNA, 541 bp, Homo sapiens
caggtgctcagctctgcagggtgggggcaattgaaggcccaagctgcccgagaagagcggagttgccccatggggaccacgctggcctgtagcatgtgcaccaaagccagccccaggcagggcccccacagggcttctgcggagccatcctgaggctttgacatctatgagtgggcggccagcaaaggcgcaggccccagcacagaggagcagaggcggccggaacaccctgtcccttgataccagccccaagcagagccacctcaggataaggtgtttggagccgtcctgcagctctgagatccacgaggtggcggtgggagtagcaccagactccactgatttggagtctgccctgtctgattcaggagacatgactagcagcacatcggcaccagaagacgccagaagagacagggtttcactgtgttgcccaggctggtctcaaacccctggcctcaagtgattcactcacgttggcctcccgctttgttgggatgacaggcaagaaccaccacacctggccttgggagctgctcct

SEQ ID NO: 396234 - DNA, 162 bp, Homo sapiens
tggagggcaatctgttttattcaatctaccaattctaatgttaatcttgtccagatatcccctcacagacacacccagaataatgtttggacaaatgtctgggtacctcgtggcccagtcaagttgacacataaaaaaaccatcacatatgcattcatttct

SEQ ID NO: 396235 - DNA, 646 bp, Homo sapiens
  misc_feature (52)..(52): n is a, c, g, or t
tctcgaggatcccatgcgcgagctccatcaaactgttgcacaaagacacttntagactgggtacagtggcctgtcatcccagcactctgggaggctgggactataggtgcacaccaccacacccggctaattttttatctttttagtagaaacagggtttcaccacattggccagactggtcttgagctcctgacctcgtgatctgcctgcctcagcctcctgagtagctgggattacaggcacgcgccaccacgcctggctaatttttgtagttttagtagagatggggtttcaccatgttggccaggctggtttcgaactcctgacctcaagtgatctgcccgccttggcctcccaaaagataaggagttcaagacctagtattacaggcgtgagccactgcgcccagccagagcctcctatcctggctcttctcactgggctgcaaggctagggccgtcacaacagaaccagtaatacaaaactcatgtttgcagaggaaatgcttcaaaatgttaatgaaacgtttcccttctgaatagaaggcagaacaggccagatggtttttattaacgaggcctgaatttaggaccttctctacttaacggcttctgtcttgatggaagcgtcgcgcatggggatcat

SEQ ID NO: 396236 - DNA, 284 bp, Homo sapiens
gttgagtctgcagtgagccgtgatcatgccactgcactccagcctgggcaacagagcaagaccctgtctcaaaaaataataataataataataattattattataacttattacatagaagtaaaatataaactagatgtcatcaaaaatttgagaattatctttttctaccttgaatttttttggctagaaagaagtatttggttctgcaaagccgtaagaatgatacaatgggttttagggactcagcggaaagggtcagggagagtaggggggtggttagg

SEQ ID NO: 396237 - DNA, 453 bp, Homo sapiens
tggagccaaagactcgaacagacatgcgagacctctaccaactgaaggtttcgtgagcgcactcctttgccaagatcttggtgaatagtctttcactgtgcaattttatcttagaaattgttttacgtttgatcatgattgtgcttggctggatgttttttgttggacttgtgtgttacatgggcacgtttccagagttgatgcctccaactctgaagtggcaggagaggtggcctgttcaggagagcaaaacacaactgaggaggcgggctttaggtgaagatctgctgcagaaccatgtggaagggatataaatatcccccaggagggactccagtggaagtaagcaaggatgatcctggtgaagtaatgcagctgtgaagctcacctgaccagctgtacagttcctgttgttggtttcacataaagtaattgcacattaaattttgtcat

SEQ ID NO: 396238 - DNA, 339 bp, Homo sapiens
aggccacgaagctccttagtgaggagctgccatgctgggccatccaccatctggattcctacgactcagggaatagaacactgcaccttccagaagcacttgtttcttcgtgggtacaccaccagctgagaaagaagcctcatgatgattgttgtcttatggatgcttctcattgcaggaaccatgtggaagggatataaatatcccccaggagggactccagtggaagtaagcaaggatgatcctggtgaagtaatgcagctgtgaagctcacctgaccagctgtacagttcctgttgttggtttcacataaagtaattgcacattaaattttgtcat

SEQ ID NO: 396239 - DNA, 347 bp, Homo sapiens
cttttaagtctttttttgtttccccctcccttgcatatatagctgtacttgtttcaaagcactatggaatttgcaaggggtctgctggagaccgtatttgacttgcggattgcaggccaagtggatcagtggttattggtaggaagggggacggtagggattggtgggaccttttagcagcccttctggtcaccacacagagtggttacccactgggccaatgagtagagccatctctgccctcaaattttctttctgattcagcctccaactctgaagtggcaggagaggtggcctgttcaggagagcaaaacacaactgaggaggcgggctttaggtgaagatct

SEQ ID NO: 396240 - DNA, 412 bp, Homo sapiens
cctcaacctccggggctcaagcaaacctcctgctgcaacctcccaagtagctgggtctacaggcatgcaccaacacatctggctaatttctaatttttttgctggtatataaaaatactaattgattatcttattttgtatctagtaatcctgatggagcagttgattaaaattgtatatcattgcacgtcattctctttttaaaaatccaagcctagtgaaacccatgtttctaaaaaaaaaaaaaaaaaaaattagccgggaatggtggtgcgtgcctgtaatctgagctactcaggaggctgaggcaggagaatctcttgaacccaggaggcagaggttgcagtgagctgagactgtgccactgcactccactccagcctgggtgccagaccaagactctgtctcagaa

SEQ ID NO: 396241 - DNA, 591 bp, Homo sapiens
cgggcgggaggcggggcctggaagaaggggcggggcctggaggaagggcagggccgcgggctcggcactgggaacaaaggggaccggcggaaggaacgcccccagtcgatcccggagcgatgcccgggtggaccaggggcttagctccggagagaggtttcccactggattcgtgcacagcccctcccctgcggcgccggctctgcgagccccagtttcctcatctggcagctggaaacaaatccttccggaagtgtccaggacccacgaaagtgttttaatttcttttagttttggtaaaaagtactaaacgcgaccgggcgtgggggctcacgcctgtaatcccagcactttgggagaccgaggctgacggatcacttgaggtcaggagttcgagaccagcctggtcaacatggtaaaaccccttctctactaataacacaaaaattagctgggcatggtggcgggcgcctgtagtctcagctactcaagaggctgagtcacgagaaccgcttgaacccaggaggtggaggttgcagtgagccaagatcacaccaccgcactccagcctaggcaacagagtgaaactgt

SEQ ID NO: 396242 - DNA, 340 bp, Homo sapiens
cagaacattaatggtggctctgtctagatagaggaattatgatgatttatattttattatttatcccttactgagtttttacaagttttctagttaatgaacaaatattcctttggaattcaaaagacaaaccttttttttttttttaggtatgaaaagagtctgaaaacggcatgccctttagtaaaacctcccagttacaagcaaaaagtcacaggcgataaaatgagaccctcaccttcagaaagtcttttccttctggatagcaacagaacatgggcaaaaaggagaagaggaagcaggaaggggaacagatcgtagatcaatgcttctcacatga

SEQ ID NO: 396243 - DNA, 630 bp, Homo sapiens
taacccaaaccaaaatgccataagagtcctttttttcctaagtagatgcttaaaacaaattcccgatatttttgttgcatttccaaagtatggcagtaagtatcaaaagttagtgcaaaaatctttaaatatctatttttgttgttgttgttgttttgtctcgttctgttttgtttttttgagacggagtctcgctctgttgcccaggctggagtgcagtggtgcaatctcagctctctgcaagctccacctccagggttcaagtgactctcctgcctcagcctcctgagtagctgggattacaggcgcgtgccaccatgcccagctaatttttgtatttttagtagagatggggtttcaccatgttggccagtctggtcttgaacttttgggttcaagcaatctgcccggctcagcatctgaaagtgctggaattacaggtgtgagccaccacacctgacctctgtctctccttccatatctttctcatctcctctgtgccaggctctgtcctgggtgttcatcatacaacaaagagaaaagagacaagattcctgcccctatggagttggcattcttgtgtggagaagagaataaacacctaatatgtggtataacattttcacacgt

SEQ ID NO: 396244 - DNA, 444 bp, Homo sapiens
cagttgaagtcccttgtggaaaacactttcatgagctgacttttaaaactgagtagttctacatcactcacaactggttaaccccactgactcagagtcattcatcatgggtcatttgttaggtagggaagggagaggggatgtagcatttcgtgagctgctattacatgccaatgctatgtttatgtgttttatgttcactcttttatttactgcgagcagtattccagatagatattatcatcagctttacagatgaggaagttgagcctcagagaaattaaataactggtcgaggttgcccaggtgatatatggcagagtgggggcctcttctcagtggccatgcctcccaattgacgtggcatcagccccccaaatgtatatgtaaatcactgagcaataaatatttaccagacacctgctatataacaggtactatgcc

SEQ ID NO: 396245 - DNA, 337 bp, Homo sapiens
gcgagaagacgacagaaggggggcaattcacatagtcacaccctcaccccccaccatctcccagagagagggtagtcctgcacgcgaatgattaaaggccaggtttccaggcttaagtaaactaacttatctagatcaattcccttacacttccttgttatctactctgagagaattcagctgccttcagccaaacccttttctgaagctttcgtaaaaccttccggccttccaagaagctttgcatctttctccaaattttcctaccaccctgaccgatctcctacatcaactcatgatgaccaaatggtaaatagcattaaatgaatgatagagg

SEQ ID NO: 396246 - DNA, 951 bp, Homo sapiens
ggctggttggggccacatgcctttctttcctagatagaatgttttcctgtgcaaatgtattaacttgcccattacctcccctgatgggctccaaaattgttcaacaatgtgtatgtccagcaatgaggaccatcgctggcacatagaaagaactcagtacgtatgtatttattgtattgctgaatgggcagagagctgtagttaacaacatcttctgtttggataggctgctaggaaaagcatgtactattgaacctgtgaggagcactcatatcccacttctaactcctcatttcttcatcggtcagcctggatgtctcttcctttagaagcctttgctgatcactccacttcttccaaatacagtagatgtgtctgctgtgtatttatacaacatcctgaactacttaacatgctgtttatttacttgtttgtattccccattagaataggctctgagaaagcaaagactgtatctgtcttgcttatcattgtatccctgacagctcgcccactggctggcttttaataagcacaccataaatatttacttgaaatactcatttttaaaatgaacagatgaatgaatgatagatggatggtggatggcattatgtagctaaaaattgtgtcctgtctctacctatttttgaagaccatcctttagtttgcgtttcctgccatgtttgaggggcctttttttggtccataactcttgtcttttattcaaattaaaacaccgaacaaaagcacattcgattattgaccatgaggtttttattctgctgtcagtgtcaacctcatgtctaaatcacctgaggtcaaacttacatatatctggatagcctttttgatgacgatggtagtctaatttgtgtgttatgtgctcttgaaatgttttgctgtaaagacactagaactgaattttgctttattgcaatgatgatgaat

SEQ ID NO: 396247 - DNA, 445 bp, Homo sapiens
ctgccctcagcctgactgatgtgatgagggaaggggacaaagaatgagctccgaaaggacatttcgggcaacgaccagaaaattagcaaatgcagtgatccccacttaacaattttataaattccaagactcatttcaagtttctcccaactgaaagaaaataatatcaagggccgggtgcagtggctcacgcctgtaatctcagcactttgggaggccaaggtgggtggatcacctgaggtcaggagtttgagaccagcctggctaacatgggaacacggtgaaagcccatttctacaaaaaatataaaaattagctggacatggtggtgggtgcctatcatctcagctactcaggaggctgaggcaggaaaatcacttgaacccagaaggtggaggttgcagtgagccaagatcacaccactgcactgcagcatgggtgacag

SEQ ID NO: 396248 - DNA, 505 bp, Homo sapiens
aggtaggtaagtgggtaagtggatgaatgaacagacagatgacttaatatggggtggatgaagaagagagtgagtagatgggtggatgggtcagggatggatcacagatggctagatggagtggtggctggacagatgaacagaaggaatggacaaacatgcaggaagaaataatagggggccagaaagatgatggcggggagtcaggcgagctaacagtgatgaaaccatgtcatttccatattcaaaaccctcccacaggcttattactcacaaaaaaaatcccaactcttcccacacggacataaacaaggcccagcatgacccactcccaccctgactgatctcacccccaatacctctcattagttatgcctaagccacacctaccatctttcccttattaaaaaataccagactcctccctgcctcggggctgctgcacttgctgttccttctgcctggaatgcccttcctcagctcttcatgcaactgtgccttctca

SEQ ID NO: 396249 - DNA, 838 bp, Homo sapiens
agcgaagcgcggcggcggcggcggcgcctaggggagggaggggcggcggggccgagcccacctagcggagcgcgccggccgccggtggccgccgccagcatgccccggcccgcgggccgctccgccgccagccacccccgcggccctcggcggcctgcgctcggcccgggggcgcgggaaccgcagccggagccggagcagggctgggggagaggccgcacctgcgggtgacagggtgtcctgagctccccgaggcctctccactcggagcccatctcacgccttctgcagtcgcaggggtggctgtcaccatccgaggacgggctgtccaaaggtcacacagcttgtgtgggtgggccccaaccgccacccccatggtccctgtcacatgagttatctcctgccggctcagtatcctcaacgagcgccctccccaaccgaccccagctgtctgacacagccctgcggctcgaagagactgcaccaaacctcacagctcccagccagactgccccagcgcgcagcctggtccctgacccacggaaggcctttccccagggtggagaagggtttgtccccgtttcccaggagggcagctcggggtaaaagccagccgcgtcctgacaggtcccgcccacgcggcgcttctcccacgacgatgcggacgtgtgggccgccgtcccgctgcccgccttcctgccgcgctggggctccggcgaggacctggccgccctggcgcacctggtgctgcctgccgggcccgagcggcgccgcgccagcctcctggccttcgcggaggacgcaccaccgtcccgcgcgcgccgccgctcggccgaga

SEQ ID NO: 396250 - DNA, 479 bp, Homo sapiens
ctactagagaactctctatgcatagagaaatgttccaaatccttatttctggccaaagacctgtgtattatttttactttcccagataattacctttaacattattggatttttcacatacagttagatgattttcacactgataatttgggaattacattgcccctaagttaacccttttctacctaaaattaaattttgctgctaccccaaaacatgaggaaattgaatgcccccaagggctttgtagttcaagtcataacacagtggtttaacacctatagaacccctctctgatcttttgggattatttttatcaataaagtgaaaaaatgagggagggaagagggaatacaggagaaaggcatcacactttcctgatatttctcaacataaccagcaactactttccattcctttcaatgcagccactaggccctgaaatacagtgcacagatggtgttagaaaggactcaggc

SEQ ID NO: 396251 - DNA, 511 bp, Homo sapiens
atataatggtcagttgtcatcagcttgcttggttaataccgaaataactagaaattttgaagatttagaatcttggcacattattttatttttatgttataaaatattcttagaaaaaacagactttcaggatttacaactgcattttattccataaagggtgtgccaaagctatctttaataacgttttgggtacattacaaaagaattacagcaatttaatggtacagtgaggtggtgatccaaattctaagataatgttaaaatttgcagcctaactcatccatcccactgtttataccatctatacctataaagcattcttgctagttagtgctggacatcatcttactaagtgggtggcagctgcctgtcatctcaataattctgaaaaaaagccagggaatttgttttaaagcatttgtccagattaaaccacatgtggcctccagggtgctctgggcctaaagcctaagcctgctggctgtgttgagccatcgagcttattcag

SEQ ID NO: 396252 - DNA, 629 bp, Homo sapiens
agacctacaggaccagatactgcatgctaggacttgggaatctataatttaatgtgtttatataggtaatttaaatgtgtttccagtttggggaaccatagatttcgaaagtattttgccctgggagctctagtccattcaacttggctaaacttgttaatcttctattcactttgatagctctgaatgaattttagggctggaatataatgattactgactcagttgacttcatttgaaacaagtgggtgggacttagtgtgctaaagtctgtttatctttgaaatatttgtatcttggtttatagtccagaatttatgcagcattggccccactgcgtagctctgtgctttagaaaaactaggtggagaggattaattaaatgcaaatcactgaatctctctgtgtcactggtcagctaaataaatagcctttgtgtcctaacagcagcagacattttctggtttaggttttccacatggtttattatgaagtatgacaacttgtcatgtgtaatcagcatcacattagtctcaagagaataagctctcctttaatcagctgcttttctttaatctggtggggtgaggcatatggtaaccatgacatttttgtcatttgctttgtgg

SEQ ID NO: 396253 - DNA, 112 bp, Homo sapiens
aaactgccttccatcttacggtcctgaccatggttccaacacacatccacatttacgacctgtgacaccctgggcaagtcatttaaccttgattctatttctattccaattc

SEQ ID NO: 396254 - DNA, 326 bp, Homo sapiens
aggctgtgtggtgctggagagaggcagcaggctggacctggttgggcaaggctgagtggttgtgggataagaggagatgtttcagagcagcacccacagaaccgctgtgatgggagaaacaagacttcgagttaggagagtgggttggactcttggtgcagcctatgtgaccttgggctgatcttgtctcttttgagcatcactttcctcatctggaacctggggctcttgtggcttcctgcctctctcaagggtgattcgggaggaagagtgggagagagagagagagagggagaggatggaggcgagagaggtggagtgggaaa

SEQ ID NO: 396255 - DNA, 568 bp, Homo sapiens
tgtgagtttacaaaatgacattctaaaccaataggaaagccctcaaagtctgttatatcttcaaatgtttggtgaattgtggccactgaattctcttattctataattttgctctagaattttgtccccagtctatttctaacgtggccttatttcccttttggaacagaacttcgcaggactaggcaaactccaattttccaatgaatgcttagcattataaggacacagtaccttcctaagcttctctttaaatagcagtcttatttgaagccaaatatcatatggctatattgaacttaatatgatttctatcagccaaattacattagagctctgatgggaacagggataagtaatttggcaggctttctcttttctattcacctccatttgcttaccttgtttctaagaaaagattagaagacctgacaggttggctttatctcagagagaatatataggtaggaaataacagggagttggaaaaccaatttgtcagcccgaaccaggaaaagagtttcactgatttaaggctaaagcctttaaacatcccaaggtcatctct

SEQ ID NO: 396256 - DNA, 368 bp, Homo sapiens
ccccatgtcccctctggaactcctcacagttcacaccttgaagcccaggcacttgcgatgggaccagcgaggtcaaatgcaggacccctggtcctcactgttaccatgaagtgatgcaaatggccggtcttcagaaaccagagctagccccacccgtgccaccaaggcacaccagcccctgagcagtcgcagggcccaggcagaagggtccggcaggctcctcactcatgacgtggcctgagggggctgggcagctggtcctcggagcccccacctggtgcaccaggccgtgaacctcagcaaaggccccgtctcttgatgcccaaggtttggcaatggttgggggttactttctccagaccacagca

SEQ ID NO: 396257 - DNA, 434 bp, Homo sapiens
tctgtagtaggcaaggcacagtggctcatgcctataatcccagcactttgggaggccaaggcagaaggatcacttgacccccaggagtttgagcccaccctgggcaacatatcaagaccccatctctgtaattaattaataaatatatgttttgcagtgatggcgtctcaatatgttgcccaggctggtctcaacctcctgggctcaagagatcctcctacatcagcctcccaaagtgctggaatgacagatgtgagtcaccacactgcctggcctattctctccttctcacagaacccccattttatttagagtttttagatatttatctccccacattcttccagagctaaggatgtcaatgtggccaataaggtacaagtgaaagtcactgggtggtatttttggaaaagcaattgattacctgattcaaa

SEQ ID NO: 396258 - DNA, 435 bp, Homo sapiens
gcatttacatgtggcagcaacactcgaaatgactaatcactagggtggataaaatgatagggaaaatgctgaagatagaactctgggaggaaacaagcatttttaagggtagaaagaaaagccagtgaagaaacctgtgaaatgtggtaggaggagaaatggtagaatagtgttgagaaagccgaaaagaaagattgtatttccaaggagagataggaaagattttcaaatgtcgtgaagtaggctgagcctggagaataggcctttgaatctggcatgtagattagtcaatgatctgtgagagaaagtagtttgagaagcatgttgggggcacaaatcaaagtggaggatgaggaagtagaggtaatgagtataaagtactttaatgtggacggaaggaaagtgaaaaaactgggtgaagggtgtgcttaagct

SEQ ID NO: 396259 - DNA, 377 bp, Homo sapiens
tgacaatgttccggctgatgggatacaacaggaggatattgtggcagcttcctagaacctcattaacagactgctgatgcatgcccttggtcttcattttctgtgtcctttcctctatccctttaagcctgtaacttaaattgtggaactcaaattttggaagctaccataccaaccatcatcaaagtccaagagaaataagcttctaacatgcatgccactcttatttcatggctcactgccaaatctaacacaactggtatattgaatttgcttagagtctagaaagagaagataggcataactccctggtatgcttcccaaatcttcccccatttacattaggttggacaaaacatgtatagttttgtatgaaa

SEQ ID NO: 396260 - DNA, 409 bp, Homo sapiens
ctaaagaggaaggagtttaatctacctttaatctgtgaatgtagaatttaggtggggagactgtatattagggttctgtagaggaacagaactaataggatagatgtgtatatgaaggggagtttaggctgggcacagtggctcacacctataatcccagcactttgggaggcccaagtgggtggatcactttgaggccaggagttcaacaccagcctggccaacatgaaaccctatctctactaaaaatacaaaaattagccgggcatggtggcatgcacctgtaatcccaggattacaggagaggctgaggcaggagaaatcgcttgaacccggggggcggagattgcagtgagccaagattgagccattgcactccagcctgggcagcagagcaagactctgtctc

SEQ ID NO: 396261 - DNA, 327 bp, Homo sapiens
aagaatatatagtgtgattctatgtgtatgatattctaaatgaggcaaactcgtttatttagaaagaaatcagaataaggatttgagcacaagtagaagtgactgtggagagggccaaggtaacattgtaagttgacagacatgcctgtatcttgagagggaagtgggtgacacaggcatatgcgtttgtcaaaacaaaatacaattcgctgtttaaaaaaagcccaatagactatacactttaaattgtggggccgggcacagtggctcatacctgtaatcccagtgctttgggagtccaaggcaggatcacttaagcccaagagt

SEQ ID NO: 396262 - DNA, 310 bp, Homo sapiens
ttgaaagcaaacagaagaaatcctctatttcaggcagtaaatatgaagcagagagtagatgtaagggatgctcccaaaactggccactctgttaatgacaaaacagagaccagaatccacattctcaacgctcagtccagcgccagacccacaaaaccatttggtttttgcaagagcactgaatttccccaaaataaaacccaaactatcactaacagatgttttagatggtcagtcttcatccttgtcttcattcaatgctcattcctccttttactgcaaaaacaaaaggtggctaaaagagtatcca

SEQ ID NO: 396263 - DNA, 478 bp, Homo sapiens
gacttcagggactatgctactctcaaaaccgatttgagtaactgaaaacagcactctgaatcctataaactaaaacagcatcgtatgaaaaacagtttctaccttaataaagctaaaaatgtgaaaactaacattcttgcggctgtggaaaaacgaatcgcacttggagtattttttctcttaatgtattataaatctcaggttgctgtaggttacacagaaaccaaagtaatcccgactcaattttcaggcctgacaccctccaacatcacccggacttttagatttccgggaacaagcagagaaggagaaaaagtcactgggttgctggtaagtgactgaagaacttgaggagtggagggcaaggtggccgcgcggcctcaaggtccccttctccaccccaacctatgaggcccagagctgcggcagctcctgcccgtcctactccacctcggggcggctacaggcttgcggccgc

SEQ ID NO: 396264 - DNA, 215 bp, Homo sapiens
gacttaaacgtaagacctaaatctataaaaatcttagaagaaaacctaggaaattatattctagaaatactattctaggccttggcaaaaatttcatatgaggtctccgaaagcaattgcaacaaaaacaaaaattgacaagtgagacctaattaaagagcttctgcagcacagcaaaacaaactatcaacagagtaaacagacagcctatagaa

SEQ ID NO: 396265 - DNA, 1683 bp, Homo sapiens
attattaataagacgatgatcatgctaattaagctactttattagagtttgatggattttgtgccagaaattatggtggggtctttgaaatatatagagtattttctcttagagcaagtcgtctagcatcattgaaaactttactgaaaactcttcattactcataacattgctcgtctgtttcaaaatgacacgatagtcactttcacagaaacataatagtatgcaattcaaatgtttaatttgctgctgcaaaagaattcacaatagaattctcaatgtggggttaattacatagtaatgaaagagtaaacctattgggaaaatgctctaagtaacattgctctgtttcctactgataaagacgtgcacgcctgatttattttttatgctgggaaattcagaagtaagagaaaaccttgaaaaggtatgcacatgaataataaagttttttatcatttgtcaacatgatgagaaaatgatgaacgtggataattattatattacaaaggctataatcacaaaatagtaatgtataagaatatagcattctattatacacaggagaacatgatacattaaaatcattgataacataatctaaggaaagacatcgctaatcagaacaaaaaaaggaagaagtaatagagcaggcactcaaaattgtgtccatgttttctacaaataatcttcaccctctctgcctatgagtatagtgttatattgctaggtatgttatgtttactccatatatgtcaaagactccactgggggaattgaacaatgagaacacttggacacaggaaggggaacatcacacactggggcctgttgtggggtggggggatgggggagggaaggcattaggagatacacctaatgtaaatgacgagttaatgggtgcagcacaccaacatggcacatgtatacatatgtaacaaacctgcatgttgtgcacatgtaccctagatcttaaagtataataataataaaaaatttggaccacaaaaaaaaatatggtatcttaataaatatctcaaaacagttataagattgacaatatgatccctactttgttaggtgaagaaaatgacacttttaaaaacataaaaagatttcctgtatgataggattcaaattcatatttgtttgtttccaagggctttttctcattcattatcctatgctgtcatgtaaattaatccatgaatattgcagcttgtatcagaagcttgaaagttcacagaaagaatcattttctacctaaatttgcccatcaaatttgggtggacagtgacagcagcacagtgttaggcttacttttaaatgacattatttaggatagtgagaggataaacaaatagactaaaagaacagaacggagtccagaactagatccacgcagatatggccaattgatcttccaaaaaggcaccaaagtgatgtaatggagaaaggaaaattgttttaaccaccagacctagaaaacttggtatccatataggaaaaaaataaatcttgatacttcataccatacacacaaaagtaattatagatggcacatagacctaaatataaaatcttaagctcaaaagtttctagaagaaaatatagaagaatatttcctggacctgagctaggcaaagatttcatagaaacacacaaacagcattagccacaaag

SEQ ID NO: 396266 - DNA, 286 bp, Homo sapiens
aaagcccctttctctgctgtcatatgacttggactgcacgctctatgtgcacacggtgtaatgaatgccacattatcacccactggctggggtgagccttcttgttatttatttccaactggaacaggatttcacatcccatgctcccacacaaaggtcttagaaacaaccatttcagacagttccttgcatcagagttttagggtactcttctgcacacaaactgttgttggaacatgagcttggatttcttgatgctacatgtcacggattggcaggaaatggt

SEQ ID NO: 396267 - DNA, 291 bp, Homo sapiens
gtcgttgggtataatgtgataacaggagcaagaaatgagtaatcaataaataccaattttattgaaataacagtgtttatttctctaaagaaagtaggagaatgagtctttagacttaaggagcatatactttaatgaaagagacagtacagatatcgtagaacaagtgactgaaagcacatgtctatttgtaaatgtctagaaagaaacattcaccctgagactaatcagtctgtgtagctatttagtgaatatttttcagtcaagggaaggaattaagactttaaattt

SEQ ID NO: 396268 - DNA, 583 bp, Homo sapiens
ggttacttaaatccacttattaggcaatggtgaactaaacaaacagtaattagaaacactccagactaccttttaaatctgttgctaaattatgtttttcctgcaccaaagcccatacacacagcatgtccacaagcatcacaaaaccaaagcctcagaaatatttacactaataagggcataagctacctctgggccttcacactggattctgcagggaagtaagggctgccttagaagaagactattcattactgttatttctcacatctgggtaaataaagcactgcccccatgtggttagaaatcccaggtgaaaatgaactctccaggggtctggaaatgaagaatacctctgatagactgtctcatttcctgaaatgagtcagaaatgaaagtaattcctcagaaaagaacatctgcactatggcacagcttataaaataatgccagatgatacctgtggctaagaagctggccccagagaagaagggagggcctgggaacagcaccagagcctctgcattgcacttaatctcaaggctgccgctgttagcttggagggtctgcaaatccaatgagc

SEQ ID NO: 396269 - DNA, 480 bp, Homo sapiens
cagaaatttgacaagatctgtaaagaggaagctgaatacaaatttaagagcctaataaacaggctcagggttttaaagacaatcttcacaccataaaccacctgggatggtaaacttcgaacactgaagcaccttctactcctcagcagaatgagcaccccaccaccaccatttccacagagcactctgcacacttcaaacagagcgcctgacattcaatttactaatgataattaaattattggtcattatgtctagactgagggcctcaaaagcagacactatgattcatttagctatctctagttcagctagttaccaggtaaacatttgttgaatgggtgatgaatggagcatttaaaacaactctgttatttgcggcctggggtcacgcaaaatggtgatctccctgtatctcagtacacacgtacttatgtgtaactttccaattccctcttgctccagccttgtgattccaat

SEQ ID NO: 396270 - DNA, 539 bp, Homo sapiens
gagttgagcagacttagagaactactgactggatgatgagggctataggtgtacccagctgagcccccctaccccattttaggccgggagaaatagcatggttaggtactctaaaccaacagcaaagctggccaagctgggaatatatctctatccttaccagagaaatacagacaccatgtagtatagtggataaccattcagaatcaggaaccagaccacctgggttcaaatcccagctccactactgaataggtacagcaaactgtgccaccctaaaccttcagctgtcctttctgggaggaagatgaagctgttgacaatagctcagtaaaccttgatgcagctttggcaacacagcaagaccccatctctacataaaatgaaatattagccgggcgtggcagtgtgcacctatagtcctagcaatggggagtctgagaagggaggatggcttgaacccaggagttggaggctgcagtgagccatgattgtgccactgcactccagcctgggtgacagagtgagaccttgtttct

SEQ ID NO: 396271 - DNA, 175 bp, Homo sapiens
accacagtatctgtcttagcttcctcttaacaggacaggtagtgatttacctttaaaaatacaatctctaaaattctgaaatttactcctgcactaaaagtactactctttttcatcttgtcgtcttagctcaacattctaatttttttttagtatttaggatacattgatttta

SEQ ID NO: 396272 - DNA, 659 bp, Homo sapiens
ctaggagagctttgccccagacaactctgcatcgaatcctggtatgactgtcatcactgcccaaactcagtgtcctcatctctccagcaggattaatgctgatctcagccttgcagaactaaccagagaacctttgagacacactcataaaccaagttgttcctgtaaatgtcccgtacctcccaggatgccaaggagaggagagcatcatcctctctggccacctttaggaggcagcagctaggcgctctgcaatgactgcctgatgggaactctggaggactgggttctggtcctgacttggccactggccccagtgtcaccttggacagcccttcacgctcactgggcctcagtctccctcttatgtaaaacaagattatcttttagatctgttttagtcctgccaccttacagtggaatggctgagggatgcttctcaaggtgtgtacagttcccataggaatggcttctcctggcctgtgggccgcctggcgggttgagtatagggtgatcactggagccctgggctgaggactgtagtctggaatcaccagccctggggatgaaccccaagtatgtctccttctagatgtgttattccggagaagtcatttcaacatcctggccttggtttcctcatctgtaaaatgggctga

SEQ ID NO: 396273 - DNA, 501 bp, Homo sapiens
gctcccacctcagcctcctgtgtagctgcaactacaggctcatgccactatgcccggctaattttttggtatttttaatagagaaggggttatgccatgttgcccaggctggtctcaaactcctgagctcaagcaaggtgcccaccttggcctcccaaagtgctgagattacaggtttgagccaccaggcctggcccagcatccaaatctcttggagaaattgttaaaaatgcagacatctgggacccatcccagaactactgggtcagaatctctgggggtttagtgctctggaatccgtgtttagcaagttacaggtaactgatacactttgcaaagcactgctttaaaagaccaggtgaagagggaagagtgggaggaagaatgactcattgtgctgttatagaaaaaaaccatgttcttgtcacacgaccaggaaagattaggctcgtggacacatagaagggtgaggagtggatttactgggtgaaaatttactgc

SEQ ID NO: 396274 - DNA, 358 bp, Homo sapiens
gaggctacagtcagctgagatcatgccactgtactacagcctggatgacagagctagaccctgtctcaaaaacaaaaacaaacaaacaataaacaaatagtttttaaaaattaaaggtttgggctgggtgcagtggcttgtgcctataatgccagtgcttttggaggctgaagtgggaggatctcaagcccaggagttggaaaccagcctggacaacatagtgagaccctcagctacttgggaggctgaggtgggaggattacttgagcccaggagcttgaggctgccagtgagccatgatggcaccactgcactccagcccgggcaacagaacaagaccctgtctcttaaaaaaaaa

SEQ ID NO: 396275 - DNA, 431 bp, Homo sapiens
tcttttccattggtatatttgtctgtttttatgccagcaccatgctgtttcagatactatatagctctataatataaattgaagtcgggtaacgtgattcctccagttttcttttggctcaaaataactttagctattctgagtcttttatggttccatataaattgtaggattgtggctgggcgcggtggctcacgcctgtaatcccagcactttgggaggccgaggcgggtggatcacgaggtcaagagatcaagaccatcctggccaacatggtgaaaccccgtctctactaaaaatataaaaattagctgggtttggtggtgcgcgcctgtagtcccagctactcggggggctgaggcaggagaattgcttgaacccaggaggcggaggttgcagtgagtcgagattgtgccactgcactccagcct

SEQ ID NO: 396276 - DNA, 349 bp, Homo sapiens
ctgaaaatttagctcagtcctagagtgcaggttggcggtaaacaataagattagatatcctggcatctcaggatcagaattgaagctggtttaatttgtggaaactagagatgcaatatttctttcatacatgagcctgtacgtggagggtgaaacccacaaaacagagtaatgagtccagatttgcagccagtggaaacttccatttggaaccatgcttgatcacgaggagcatagtttacttggatattgcagaaagaccatcctgtgtcatggagagagggtgccaggcaccacagagactattcaacaccatctttgtgccctttgaaacctgcctacctgagcc

SEQ ID NO: 396277 - DNA, 554 bp, Homo sapiens
agggcccatgggtgctctgatgtcagtgagcatcttttctgaagcccttccacaggtggccacctctagatgaccacacagtcaccttcctcataaccacctgtgagaagcacaatcaccccacctaatggatggggaatccggggcacagagtgtcactagggaacagcaagtgacatttattgagctttctctgtacagcactgtccgtgcacgtgcactaattcagttcgctgtgtgtgggttcagtgcctgctttacagaggggacattttggcccacacaggttgggtgacttgcgtaaactcacacagctggaagagcacgctaccacttctcagcagctggccccagacaacatgctcagacacgaggctggggacaactcttttaaaggcttatatgttaacaagtaaaaagcactgatcccaggagaggtgccacctggctgcagatctgcggcagcctgctctttccttctttctagaagttcagtgtacaatccaaatgggtttgtattaggcttatcaaaagaggaaactttagacacagtt

SEQ ID NO: 396278 - DNA, 167 bp, Homo sapiens
tttagaggacccccccgctaggggcaacaccggactcctcatcagcagcactcagctagagaaggcaaatacagcacagagtcccttgtactcaacaccggtatcacaacagaaatgctttggccgggcgcagtggctcacgcctgtaatcccagcactttgggagg

SEQ ID NO: 396279 - DNA, 143 bp, Homo sapiens
accacacctggccccaaaataatgttgatcccagtggccgccactgttctgggcagtggggttagtcagggaagaaaccactgatgccccttgggggctgggattctcagagaaggggcagtgagcgccgggcgcggtggctc

SEQ ID NO: 396280 - DNA, 312 bp, Homo sapiens
cacagaactcctttcttctggttggtatcaaggaaggctttgtggacctggtagcacttgagttagctctggaaggagaggcaggatttggacctgtggcgatatgggctggggaagacatgagcttggcatgtctgacagtcagtgaggacctcaggttcctggagcttaggatgtgtgatgcagaagaagtctggaaaggtaagaaacagaattgtaaatgatgctatgaagatatgccttagttctttaggcaatgaagagtcactaaggttttgaacactggcgtgtatggtgggttgtggggagaca

SEQ ID NO: 396281 - DNA, 869 bp, Homo sapiens
ctcatgatccacccatctcggcctcccaaagtgctgggattacagccatgagccaccgcgcctggcccattctgcttttaagaattaattagttaattaatattttttagaggcagggtctcactacattgcccaggctagtgttgaactcctgaggccaggagtttcctcagcctcccaagtaactgggactacaggcgtgcatcaccttgtccagcttctgtttcccttttttttttttttttttttttctgagatggagtagtggcgtgatctcggctcactgcaacctccacctctcaggttcaagtgattcttgtgcctcagcctcccaagtagctgggattacaggtgtgcaccaccatgcccagctaattttttttgtatttttagtagagacggaggctggttttgaactctcggactcaagtgatctgcccacctcagcctcccagtaaatgctggaattacaggcgtgagccactgtgcttggccggcctgaccttgcttttgtctccctttgctctttcttgttctttattcccattctgcaattaacccataaccttgaagctccttttccctgtctcttctgtacttcgcacactccacttactctactagtttgatttttgagtgtgtattgagcacttgctatgtgctaagctgccttcgaggtgcttattcactagcagaaagagtttataaataagggcaatgcaatgttacagttgctctgatagagttggaagagagtacagcatgggcaagggtggtaatgagacatggattctaccagggtggtgactagactttgcagaatgagatgggtgacgaattgaatggctttgatgactgactaggcgttg

SEQ ID NO: 396282 - DNA, 909 bp, Homo sapiens
attctgtccgtcctcaggctaatgctgcgtatgccttgagtttctcatagcattcactgtcaatgcaaacactccaaatacagtcgaaactctgaaatttgacctctaagcaaaacttttggtatttggaattttcaagtattttgatagatgatcccagattagcgctcaatggaatcttgtatacacagggcagaacgctaaggagtgcttttacagaagccaggaatggctcactgtctgctgccctttctactccttcacacacattccagcctcctcatcagtctgttcagagggagccaaggtagttctgccaactgggaaaatgtttgagatacaagtggcaggcagaaaaatgcagagctgatttggaaggctgctttcgaaattacatgaacccaaagattgtgggttgatgtcaaagccttcctgtgggctctgaaggccagcatttgaggattttcaccgattgatttgtgatgtgtgtgcccaactctgtgccaattaactttcccaatctgcatgcaccccatgtcccatgcccagtgcagacaagctggtgacactaacactggcagctttgaccaggactccatgaaagagcttggtccagatcagctttcctagctccagaccacagctctcatctggagtccagatcctgccgcaaacacttgtaagtggtaatagatttcctttactttgtctctcagccctccctactgtctggtgcattcccatctatgggcctccaggagcatgtgctctcccgtatgccattccctggggatgcaaccatcagctccagcccatatgacagtaacctggtctgtcctgtcctgggaccattactacacccacgcactccagccaaaccagaattctttcattttctcagttgtttca

SEQ ID NO: 396283 - DNA, 425 bp, Homo sapiens
taccaaccaactccaagtaggaacaaaggccccctggctactttcttatctctaaccacaaatggtttctctctaacagaacgcatttgaatccaataggtcaggcagtagaaacagctacaaagtttcaccctgtctggaaataaaaccaacatttctgggaatcagaacagttttggaaaatgactgagtgaagtaatggtgcacagttctaagaaacaaaacctggaactatctcagaaattcaatgctaggaattatttattttttcaattgttgcctctgactcaaggaatctgtcccctcatttctaaggacattagttctgtatggatgttgagcgtggtaagaaagggctttttgcatagtgcttttctttgggacttcccttacccaggaggtgggggagctactgtcccaaatgc

SEQ ID NO: 396284 - DNA, 410 bp, Homo sapiens
ttacatgatttaactacatgcacataataaaaagtcacagaaatagcatgtatattcagataattttcctttttatataaaaatggtttatttactcaattcatatgaaatataggtggataatatagtttcattatgtaacagttgaaaacattccaaattttcacaatttgtatggtgtttacaagacagcaaaaatgttacacggaagtgtaagggttataatatttgcagtatgttaaattagtgtaaactttttaactacaaaacaaagaatgaaaactagaaaacataatttggaacgcaaaaacgagaaactccctgattggataaagaacagatcagtgcgctcctgccctttaaagcaaattttttaaaaagtaattttgaaaagcaactgctatggtttg

SEQ ID NO: 396285 - DNA, 417 bp, Homo sapiens
tgggccagtgggaccagaggcttctggtttcttggcttggtctttgggatacatgaagagaaatggatacagcaaacctagtgggcaaagcattctgaaactctccacaaagcccctccagctcctccaagaagaatttctcccttcttgagatctgatatggtttggctctgtgtccccacccaaatctcatcttgaattgtaatccccatgtgccagaggaggggcctggtgggaggtgactgaatcatgggggcggacttcctccttgctgttcttgtgatagtgagtgagttctcacgagatctgatcatttaaaagtgtgcggcacatcccccgaaacccgcctcctgctccatcatggtaagatgtgtttgcttccccttcgccttctgccatgattgtaagtctcctgag

SEQ ID NO: 396286 - DNA, 481 bp, Homo sapiens
cagaactcaaagtcctccttctgctcacatgagacaaatgccatgtctgatttccttcctctgacctattgtttcactaaagccaaactaaggtagaagtggcggctactctacgccaccccacatgtagattgtgtttttggtgaaaggctggctgatcagagactcaaaagaatgcaaacatttgtctcttacttacctatgacccagaagtcctttaccccactttgagttgtcccacctttctggaccgaaccaatgtataccttacacatattgatgatgtctcatgtctccctaaaatgtataaaaccaagctgtgccccagccaccttggacacgtgtcgtgaggatcttctgaagctgtgtcatgggtgtgtccttaatcttgggaaaataatctttctaaattgattgagatctgtctcagagacttttgggttcacacccatatcctgaaaactacaaaacactgcttaaa

SEQ ID NO: 396287 - DNA, 391 bp, Homo sapiens
cacacgtgtttactgtgtgcgcatgcgcttgttttgtgtgtgcatgcatgtttagttactgtgtgtacctgcgcttgttttgtgtgtgtgtgcatgtgtgtagttaccatgtgtgcatgcgcatgtgtgttaccgtgtgtgttcgtgcacttgtgcgtgcgcatgtgtgtttagttactgtgtgcctgcgcttgttttgtgtgtgcgcgcacatgtgtttagtaccgtgcgtgtgtgtgtgtgcatgggcatgtgtgtttagttgctgtgtgcgtgtgcttgttttgtgtgtgtgcacgcatgtgtgtttagttactgtgtgcgcgtgcgcttgttttgtgtgtgtgcatgcatgtttagttaccgcgtgtgcctgcgcttgttttgtgtg

SEQ ID NO: 396288 - DNA, 525 bp, Homo sapiens
atgcagaagccgtctgcgtatggctgttctttgcatcagtcctcaataaaatccaagggcatgactttaaagggtaacaggctgatgattattacatttttatggatgacttaagcatctttctccattgttgtatgagaagagagtcaaatgagagatcatctggcttagggtataactgaaaatatcccccagtaaagagaagaatccatgcaacacttataattcttctgaaactctcctatgtataagtttgtacacattgtcatatagcaaaaaattaaaatagagcacactgtaatattttagtgtgaataaaatacatttttgctccgtggtccatgctatcatggaacggagacaataatgaccttcatctataaaacaatcagttatacaatatacatctaaattactaatgtgctaaaatgatatctcagaagaactgaatactagcaaaataaagaaaattaacaattctgtagtatttattttgagtgtcaaattacttgataagcatgtaaa

SEQ ID NO: 396289 - DNA, 769 bp, Homo sapiens
attacaagagggaacaacttgcagctcatctgcatatccgtgaagagaggaaccagtgtatgccattctatgactatcaagaagacacaacttttttttcctcctaaatgcatatacatagattattagaagcatctaatatatgacaaagacatatgtggcctgtcaatgaagacaaatatgctggtctcttctctgcaccatgcactgggcttgcccatgtggaaggatgcagcaggcagaggtatgtatgcagggtccttattgagatgaatggagggtccttattgaaatgaatggaggggccttttaaaggaacactgtcaaccagagtaggtcctggtggaaattaccagcttccctagaagcaaagggatacttttttcattaataaccacctccatcagaaaaggaaggtctggcttttattttcttatttgcctcctgatgaattttagggacaaagaaggcatgtggattttaggcttctcttcattactgcttagatgtcaaaaatgaccacaggtcatatcccatggtagcacaaattcttatgagataaaagagaagattacccaaatccagccaataatcctctttttaaattttatttttgagacattgtatactaccaatataaataacaaagggagcctgtattagtctgttctcacactgctgtaaagaaatacctgagccgggtatgatggctcgtgcctataatcccagcacattgggaggctgagacaggcggatcacctgaggttgg

SEQ ID NO: 396290 - DNA, 230 bp, Homo sapiens
ctgagatcgcgccactgcactccagcctgggcgacagagcgagactccgtctcaaaaaaaaaaaaaagaaaaagaaaaacgtatgaccacggtgttactaccacaactaaaatactgattgtaatgccctatcatctattaggacttttagtactcctgccattttccattttaaataccatttccattttgttgacaagtgaagaaaaaccagtacagtgatcgaccaa

SEQ ID NO: 396291 - DNA, 678 bp, Homo sapiens
agcttcacgagagggggcacagtcgtgcagcgggaggagcgagagtcggccactgtttgggtgccatgggtgtcctgggtagagttgagggcctcccccgggaaggataatgctgagccccaataggaaacactgccctgagctatctgatggccagccctctgtccatgggggagccatttcttttccttatctctaagctaatacccctctttcctgaggttctctcttactgcctaagctgtttggctctgggagttactggctagcttgtccccgtcgggatctcatccccatcggtatctctggcagggcttcttgaccagctcccccctggacctgcggctggagacggagttgtgccgctctctccgtcctagtttgccttttgaggcttacccactcctccacctgggctgttttaaaatgattagagcagaacctttcaatcaattctatcaaatgcatctgtagagctaagggggcggtcccttatgtgaaacctaatctttatagctaggccgatgggtgtgctcaccgccgaggcacgtcattacgatgctctttggctagtcattgtcattagaaatgtaaacactgattggggaccttcccgcaggagctgtctgggctgcctgctgtctccaagctattcaacttccaggtttacctttgcag

SEQ ID NO: 396292 - DNA, 159 bp, Homo sapiens
atgctgaaacttcagggaaaaaaaaaagaactttggaataggtaaaatagaggtaaatataacagactatcatactacgcatgagtttctttttatctttttttagttctgcttactaaggaagagttcttaaatcatatttgctggttgaagcaaaat

SEQ ID NO: 396293 - DNA, 509 bp, Homo sapiens
gcctgttcaagcccctagtaataggcccactaacatggtccccattgcagacccagcagcagccacgtaactcggctgcaaccctactcaactgcaatcctggaggcaatcttatcagcttagggacccaaaagaagaaaatctttacctaccaaaaccagtctgtaatgactggaggaagtgtctgctcatccaaatgcacaaacacgaacataaggctatatagttagtgaagaatcaggcaaacatgacactctcaagaaaatgaatacagttccagtaactgactccaaaaaaatggagatctgcaaatcatttgataagtaaatcaaaataattatctttaagaagctcaatgagacgcaagagaacacagatatgcagttgaacaaatcaagaaaaacaatgcattaacaaaattagaagtttaataaagcaatagtaaatgctaggcatggtggcttgtgtctataatcccagctacttgggaggctgaagcaggtggatca

SEQ ID NO: 396294 - DNA, 475 bp, Homo sapiens
aacttacaaatgtatatcaacatattataattcaaaagctgtttttatttgggaaataaataacaatgtgtaaagaccgggaatttgttctcctacctaagcctgatgattaaaagacagtgtaactatgcaggtgttaaacattttctatattcttacagccatctctgttcatatatccatttttaactccacgcccctgtaagcctttgagtttgtgatccctggtgaagacagtgacccacattgattttttttttttttaaggtttctctctctcttttttgctttttctctcgaatataggacctatatctttgttaaggcaaatcctttataatattcattactcaaaagttaaaagttcctgagtagtagtatgaaagaactagattatctttggagagttataatgacatgcctatatatgtagcagtaatttagaataggcatctatttagcttatgtgaaaatt

SEQ ID NO: 396295 - DNA, 545 bp, Homo sapiens
caaatgctaataagtcttttattagaatgatggcgtcttcataccatgaaggtgagtactgaaagatatataagaagaatatctataaatcaaaagaaaatagtaatgacatagaaaaatgagcaaaatcagttattcaaagaaaatatactagtgctaataaatatctctaaagatggctaaccttagggaaatgcacgttaaatgattttttttgtttgcctgtcagattgacaaaaaattaaagttcgataatgctatgcttatgaggttatgggagaccagattccctcatacactgtaggtgggaatgtaaatggtatagcctttttgtcagaccagtttggtatatgtcagaattttaaatgcacataccctttggcattccgtttctgtttctagcaaactgctcacattttgcggtctgctcaaggtcatggtctgctcataaccttgtcctgcttggctatcaaagatttataaattgtgttagtactatttctgaatttaataaaatacttcattgtcctgttcagatttttttt

SEQ ID NO: 396296 - DNA, 479 bp, Homo sapiens
ccagccacgggcgcgcctgaaaatattttctaaaaagataaaaaatatacataacgatgaaaaataatacaaggtttaaaaaccaatacagtataacaactatttacatagtgcttacattgtattaggtgttataagcaatctagagatgatttagcaagtatacaggaggatgtgcctaggttatatgcaaatactgtgccattttatatcaggaacttgagcatctgcagatattggtatcgggcggcggccggtggctcgggggccccccagccaggggccccccccagacctccagacattgggatttgaccctctctcagaagaagcggtggagcagctggaaggcgttcttcggctactgttgggagcgtcagtacagtgtgagcaccgggaactcttcatccgccacatccagggcctcagtctcgaggtccagagcgagctggccgctgccatccaggaggtactgagac

SEQ ID NO: 396297 - DNA, 312 bp, Homo sapiens
aaaaattcaagctctgttaagtacatgtctctgttaaattccatggcaagtctgggtttttccctgactcaagggttttatttagtccagatatccactcctgtgaagtcctcatctgaaccagtgtaatgggcagaaagaacttacatagaagtcaccagaaaatggttcatgctctagaatggtggttgctaaggtgagaagcctgaaaagatccatgcgtaagaggaaaaattatcagtatcccaagaaattttttatctttaaaaaaaattgagtttgaccaataatttagatatggattgacactgg

SEQ ID NO: 396298 - DNA, 253 bp, Homo sapiens
tgaaacggagtcttgctctgttgcccaggctggagtgcagtggtgccatctcggctcactgcaacctctgcctcccagcctgggtgacagagcaagactgtcacaaaaaatacaaaacaaatgtcgcattttatcaaatccctttttattatctattatcatgatcacatataccttttatcttttgacctattgatatactaatagttttattaacattaaaaaatcacattcctggaatacatccttccat

SEQ ID NO: 396299 - DNA, 607 bp, Homo sapiens
gtgtgagtaggaagcagaaagatcagttagaagggcatcgtccaggtggcgttgatatggtccaaaccaagccagtggggatgcaggggtgctacaggaatggggcaatgaggagggagatgagcttgagatgcctgtgggagatctgtgcagacacaacggatgcaggaagaaaggcaaagatctgagagtgcaggctgggggagcagagccagcagctcaccaccagaggatgcgaagtcagaaggaaccgtggaagaggcagaggagagccaggacaatgtgccaccttggaagccaagttgagaggggtgcagatgagaaggggttagtcaatattgtcttattctagaaagtggtcacacaggatgggagttgagaagaggcaacttagaagatgtgcctgacccttgaaggaaggatgtttcaggacagtagaggggatgaaattcagagtccaagggactgggctgagacagaagcagactctgggagaagtgaatatagccggctcttcaagtagcttagcagggaagagagggagataaacagcagtagctcgaggcaaactcaaacttgagagaggtttggggtttttttgtttttt

SEQ ID NO: 396300 - DNA, 612 bp, Homo sapiens
gggaagactagggtgggaggagcagataggggggtgataaccaagaattctgctttggacatgggatttttgagatgtttattcaaaatctactggagatattgtgtagacagttggataaatgagtacagaatgcagaaaagtggttgggcttgaaaatagaaatttgggagtcatcagcgtttcaatgaaactcattggcttggtaaacttgagtaattatagatcatgcagaaaaggcgagtctcaaacccataagacacatgggaaaccagaagatgctgaagatgtggtttgagaggcaataggacatagaacaattaagagtatggcctctggagccaaattatttaggtttacatcctaattctgctacttcctagctgtgggtctcatttctctcatctgtaaaatggaataatagtaggacccattacttacagacttcttacaggaagtaaatgatttaatatatgtgaagtacatcggacaatacctggtacattataaggagttatataaatgataactgccattatttgtaatggcattttaattgcattttcaatataattgaccactggaagtgaataaaattatttagagggactg

SEQ ID NO: 396301 - DNA, 944 bp, Homo sapiens
acgtggggattacaattggagatgagatttggacagggacacagagccaaaccaaatcacttcagacaaaagtgaagcaaattaaagtccatcccgccatccttccaaagagcaaagaaagtccatggaaattcatcaacatccagggtttcactcgcccaggatggggggactggcgcgatctcggctcactgcaacctccacctcccacgctcaagtgattctagtgcctcagcctcccaagagactgggattacagatgtgtgccatcacactccactaatttttatatttttagtagagacagggtttcaccatgttagcccgactggtcttgggctcctggcctcaagtgatctgcccacttcggcctcccaaagtgcttggattacaggcgtgagccaccacacccagccttaaccatctattactaagcggaaaaaaggaagaggaaatttggacacacaaagtgacaccacggctacagatgcataaaggaacaaccatgtgaagacatcttgagaagacgatcacctgcaagccaatgagagaggcctcagaagaaacgaaacttgtcagcaccttgattttggacttccaacctccagagcagtgagaaaataaatttctgttgtttaagccagccaatctgtggtattctgttatggcaccagctttagcgaactaatacacgtaataaaatgtaaagaaaacaaaaccaatgtaaataacattttctaagttccatctaaataaagttttccagccttccaagatgaatgcttacaccacttttttagaaacccgctgtcttgagtttagatcttttgatttcttcaactgtactgtaaaaggttttccttaatgtcttcacaggatgtgtttagctttcatacattctgagtctataagaccattcccagatgaaacactgagacggtgac

SEQ ID NO: 396302 - DNA, 659 bp, Homo sapiens
tatttttcaactttgtcacatcaagacttaattctccatctatatagataaaaatgcaatggagcttaaaaaccacaaacaacaattatccatagattgatgagcaacatctagagcttcctgggaataagtcaggcagtataattcattagtgcagagttaatgaatcatgcaggttggaaaattggtaacaatttaatttcatcaaggataatactttaaaactgcacgttatggccgggcgcggtggctcgtgcctgtaatcccagcactttcggaggccaaggcaagcagatcacctgaggccaggagttcgagaccagcctgaccaacatggagaaaccccgtctctactgaaaatacaaacttagccgagcatgttgccacatgcctgtaatcccagctacttaggaggctgaggcaggggaatcgcttgaacccaggaggcggaggttgcagtgaaccgagatcgtgccattgcactccagcctgggcaacaagagggaaactccatctaaaacaaataataataaataaatagataaataaataaaaaataaatacaactggaatttacaatgaaaatgtttccaaaggacataatgaattgtccccattatactttcaccatttatgtttaatatacttccatctcagac

SEQ ID NO: 396303 - DNA, 405 bp, Homo sapiens
ctgtgcagggagataggaaatagacagatgagagacaggtgtaaaaaggaaacttatttaccaagtacctttgaatttttaaccacttaaatatattacctattttaaaaactgaatttaaaaatttaaatgttccttaaacaattatttgtagcaaacagctgaaaaacaagaaagccaaagaaaggaggtattagaacgaagtaccaagagacaaagaaaatgtaaagtagccctgagaagtctgaggcaattcaaagagaggatgattcagattgtttgcagggaccagctgaaaaagtcagtgtgaaacccaacaaggacctcagatacttatgatagccaaaccagtaccagctggaataaataacagtatctcgaaaacgtggtgcacaacttttaggg

SEQ ID NO: 396304 - DNA, 445 bp, Homo sapiens
ccaaaagaatgagatgttatgtttggcctaggcctggatcacatgtatcgtaaaggctaggatggaatcagcctcagtccagtcccagagtctaggattgagaaaaggcagcagtagggagctgctgaaagatttatcaagagcagcatggtctgatttgcatttcataaagatcatcctggagcagtgcagaagacaagttacagaagttcaagcctggagggaggtacacctataagaataagggaggagaccacccctcatattgtcttgtgctcaatttctgcctccaaagaaagaagtaaaaactaaaaggcagaaatgaaatcctcaagcagacagcccagcgccacaccctgggcctggtacttaaagatcgacccctgacctaatcagttatgttatctatagattacagacattgcatagaaaagcactgtgaaaa

SEQ ID NO: 396305 - DNA, 376 bp, Homo sapiens
ccactcctcactcctcagagaagtactgaagctagctagagatttctgcagggtgtggaatggggagaaaggcagcgtgactgtgtgtcacatttgtttctgacacctttttgtaggtctgaaatgcttttaaataaacatttttaagtaatatatacgtgacaaaaattcaaacagcagcaaagtacagtgaaaagtcctccctcatccccagtgccctcccaccccaggtaatcacagttaccaggattcaatgcacatccaaacacaaacaaacacaaaccatggtgtgtttattgcccatggaggctctgtctcaggtccctgggaatcattgggagttgtggatcccagcactttgggaggctgaggcagg

SEQ ID NO: 396306 - DNA, 454 bp, Homo sapiens
ttgaagaacacattaaattagctctcacactgtggtgtggacttctttctgttttccaccagtgttcttcagggtgatttttccagtgggcttgattaggactgtgtggatcattgtgatgctttgttctcagtggggattttccagcaaagatgagcttcattaaacaatgactgggttcatggatttataattggagtgattttcttcaaactgtaataaatttcagtgttacctttttctgaacgccctttttaaaagggattccatagcaagtcttctggaataataccttttatataattctttaaaaactgtaatttttacatactgattcctgttaaggcagatgttattgtatcaagaaaagactcaaattttgaacatattaaaaatagtgtttcttcagatctggtggataggtgatgctcaatatatatttgtttaatggaat

SEQ ID NO: 396307 - DNA, 520 bp, Homo sapiens
gaatttgtttcttggattctaagtgcccattaccccacttaactcatcaaacattcattgtaagagctgggccataaacagcagcgaccgctatgcagagatatgagagcatggtggcttttctccagcatcagtttctagtccagagaagttctgtcagattgccctgctcccttggaaggagggtctgaagcataccttattactaagaattaaaaattgcagagtttgtgaacacctttgacttttgttttctaagcatagatttggtatcttctgctgttctttcttgatggcaagaaaagaggggtgcaggtagaattagctgagtacagttcagagcttggctctcccttcagacagtccttagtttgaatgccagctttgccactagtcagctttgggacctcagacaggtgactttaattctgcaagcctcagatgccttgtgaagtacccagcatgatgcctggaacctcggaagtgcataataaatgccaggcacagttgctatccttac

SEQ ID NO: 396308 - DNA, 357 bp, Homo sapiens
ggcatttcagagatctttgaggcagcccctcccatcacaagcccagatgtctaaaaggaaagaatggtttcagaacccaggcctagggtgccactgccctgctcagccttcaggacactgctccctgcatcccagctgctcaggctccaccctcagcaactagggccccagatacagcttagaacacagctctggagggtgcaagccatgagccttggcagttttcaagtggtgttaaatctgcagatgctcagagtgcaagtgtgaaggaagcttggcagcttccacctagatttcagaggatgtatagataagtctgtgtgcccaggcagaagtctgctgcaggggcagagcccc

SEQ ID NO: 396309 - DNA, 480 bp, Homo sapiens
ttggaaataaatgaaatattgttgcctattgtctgccttccccactacacagtgaactttctgagggcatggttggtcttgttgtccagtgggaccgccctgctcactgtgaatgaaaggatggatggatgaaaaagcaatgaatggatggacgtgtggatgaatagatgaaataataatagatgtatggatggatgaatagatgggcaaatggatggatgaatgtgtggacgaaaagatagatgaaagaatggatggatggatggatggaataatggatggatggatggatggataggtaattgtactgatgggagaagacttgtcttgctcccatcagccccctgagtagctggggttataggtgcacgccaccacacccagctaatttttgtaattttttgtagagacagggtttcaccatggtggccaggcttgctctcatactcctgacctcagtggtctcctcctcacctccca

SEQ ID NO: 396310 - DNA, 854 bp, Homo sapiens
atttctgtattgtcaggggagatggggttttgccatgttggccaagccggtgttgaacccctggcctcaggtgatccacccacctcagcctcccaaagtgctgggattacaggcatgagccaccccatgcccagctggaattttttaacttaaaaaaaaaaagtttcagtgtttgtccttacccattatgtgcccagttagttctataccagtgaaagttccccccaaaagaaaaagaaaaagaaaaaaaagactgtcattttcttgagcagctttcttgagctctgtgtgtgtatgcctatgtctggggcatacacaaggactctggcaggcccactaaactctaccacgtagttgccagatatgctgtaaactgtcacctggaagttgggatttactcttttatttttctgtttattttgcatgagtactgtatgtataaaaaagtagccacatatggatggtcaaagggtttcctagaaatatggatagtcagagggcttcctagaaatatggatggtcaaaggtatcctagtttttcaggtaaactccactagaaaccagaaccatatcccaattccatagcctttattatttcagatcaatagaagcagaatcaaaatgcatttggagcttagaggtcaattgatttggaaaccactccggtgcaaagaatctctagattcattgattttggagtattgtttgaggggaaaagaccctggttaagacagttttagggaatccagggtgtacatcaatgcgttattcacaaatttaaacaggtaatactgaactcatttgctagatttgacacagaacttgaagactccataatataccttgtcagaagc

SEQ ID NO: 396311 - DNA, 433 bp, Homo sapiens
gtctagcttctgacaaggtctgaattacttaaaagtgaaataaggatctgagaaaatacaacgtaattttgcaaggtagaatgattaattgataaatgagtcaaatcctggttgtgttttcaattcaaacaaaacagtgtcttcagggactgcagtgatccaagaagactgcagaggaaggaaaatttgcatttaaccttatagcgtggaggggaattagacatgaggagaggagatacaggaccatagcatgggagattacttcccacttgtagaatgagactattaccacttgctaactacacgacctatcatgttttcctgattggcagccagactgttctctgtcttttgtacataaacctgcctggggcaatactggtgccacctcccagtcaaagtctaatccagagtgaacaatccaggctaacac

SEQ ID NO: 396312 - DNA, 231 bp, Homo sapiens
agggcacatgtgtgtaatacgtgcatgcgtgagtgtggatgtgtgtgtgcacatctgtgtgtgggggttgtgtgtttgtttgctgggaccaggccctgacgccctctgcacttagggttggctgtcttcgcaaagcctggtcagtcggggggagagggggagcctcctgtttcttagtgagaagctgaggccggggaggccacatgacttagctaaggtcatagatctcaa

SEQ ID NO: 396313 - DNA, 681 bp, Homo sapiens
  misc_feature (525)..(525): n is a, c, g, or t
  misc_feature (527)..(527): n is a, c, g, or t
  misc_feature (576)..(576): n is a, c, g, or t
  misc_feature (586)..(586): n is a, c, g, or t
  misc_feature (605)..(605): n is a, c, g, or t
  misc_feature (609)..(609): n is a, c, g, or t
  misc_feature (642)..(642): n is a, c, g, or t
  misc_feature (652)..(652): n is a, c, g, or t
  misc_feature (675)..(675): n is a, c, g, or t
ggatttgtcctggcctcacttcacgtgcttataggcccctgctaagtggcgggcagtctccaggacattaaggacacagtggtgaaagacactagcccaatctatagagaacttcgagacggaaatagacaaacagctccaacaaggcaaaggaacccatcttttacttcggtgatgtggaatactctgtggatgagagtgctggctatgtggaagtgcaggtgtggagaacgggcactgacctgtccaagtcttctagtgtcacagtgaggtctcggaaaacagatcctccctctgcagatgctggaacagactatgtgggcatcagccgtaatttagattttgcacctggagtcaacatgcagcctgttcgtgttgtcattctggatgaccttggacaaccagcgctggagggaattgagaaatttgaactggtgcttcgcatgcctatgaacgcagcccttggcgagcccagcaaagccacagtgtccataaatgactctgtctccgattgcctaagaagcnanttcaaagaacgaatatttactggccagcgaaagtgatgggccagatagntaccatgatncataggagccggggatgtnccgnacagaatctttagtggggagctacccccccccngggtcttgcncagggggatgatggacctttaanaacgcc

SEQ ID NO: 396314 - DNA, 362 bp, Homo sapiens
atctgcacaggttttcccattttttcctcacaccactgtggtaaagcagggggatctgtcacctccactgaggagactgaggctcacaagaggtgataacatataaaactctatcagtcatttatggagtggagcagaggctctcaaagttcagcatgcatcatctgtaggtgtataaacactaattgctgggccctgcccctagagtttctgattcagaccatctggttgagacccaaagatatgcatttctaagaagttcccaggtaatgctgatgctactgctctagggaccacagtctgagaaccactggtctggctaatagacaaacaaacaaataaacaaaacagcatttattctt

SEQ ID NO: 396315 - DNA, 305 bp, Homo sapiens
gggtgctaagacaattcactgggggaaagaatagtattttcaacaaatggtgctgggacaactagatatccatacggaaaagaatgaattagacagtcacctgcatctcacaccacataaaaaattaactcaaggccgggtgcagtggctcacgcctgtaatctcaacactttgacaggccaaggtgggtgtatcacgaggtcaggagtttgagaccagcctgatgaacatggtgaaaccccgtgtctactgaaaatacaaaaattagccaggcgtggtggtgcacacctgtaatcccagctact

SEQ ID NO: 396316 - DNA, 516 bp, Homo sapiens
cttgccttagcctcctgagtagctggcattacaggcatgtgccaccacgcccggctaattttgtatttttagtagagatggggtatctccatgttggtcaggctggtctcgaactcctgacctcaggtgatccgcccactttggactcccaaagtgctgggattacaggcatgagccgctgcaccggcatccctgtatccacatgctttgctatatgactttcatgccctcccattctgatgctgtgcttggccatgtgacttgctatggccaatagaatgtggcacaattgagaggcacatgtatgttcctgaagtctcccttatgcctctgctatcatcagatgcaacagtggagctgagacctccactgtcatcccagctgaagccaataccacacacatgttcattcctggccaagatcagcccagcccagtctgcattagcaaaacctcacagacccgtgagctaaatgaacatccattgtggaggccactgagctttgaaattgttgtta

SEQ ID NO: 396317 - DNA, 439 bp, Homo sapiens
gggcaaagcggaggggctgacccaagggcagtgtggggatgattactccacagcctcggggagagggcaaaagctgagaccaagttctgatggaaagatcaaaggtggggagtaggagcaacgaagagcatgactgaacaatgacggggtcaggccgactcggcactcagacacagcagagccattctctggagagactcttagggtggtgctgctgggactcacaggaagacttcagatcttaaatggatattctgcactgccagacaatcctagtaaagtcatgttcctacactgccttttaccctttaccgccttcccctcttctcagatctccacatccccttgcaggcttggctgatgatcttgtctcatatttcacagcaaaagcagatacaaatggtcaaggatgacctcttccctccactgatttcgccag

SEQ ID NO: 396318 - DNA, 418 bp, Homo sapiens
ctctaatctagcccatatgcttagctgagttttcttcatatcactttaaatgatgatgtcccttgttcaacaattttctaaacattctttagataataattttatgggcattctttattgcattaggcttaaatttaatgcatcttaaggttttattgcaaaatattgccttgtttcctttttaagatgatacaatttataatatgcaaatttgctgtctgtcccctccctttatgtacatagaaaatgagcaaacaggtggccatgaaacagatggtcatagaattgtttcagtgcttgtgagtgcagcaacccaagagtgtcttatctgaaataccaccaggaatgtctggacacagtagacaaaggtttttcaacaggatgccttaggatacatgcttccaaaaacaaagtagcc

SEQ ID NO: 396319 - DNA, 488 bp, Homo sapiens
tgagaatttctctatggctagctcttacacagaaaggcaagggaaggttagagtaatatttctaggttttatggctggctttgagagagagggtttctagtttctatcacctgccttagggaagaggaattctagtttctatggcctgccttgggagagaggggagcaggagagatggagacaggaaaaggtcagtaacatcttgcttctgagccccccaatgtccttcagttcaaactactcagcatgacaaagcaccaaactttgggatatcattttctgagccccaaaaagacactgcgtgattcagtttgctaatactctgtttagagtttttatatctatactcattagttacattgacctgacactttcctctttggtcctgcctttgtcttctggtcctgagggtttttgttgatccagataaatgttctgggcactaaggtagtgtcccctgcctatctagaccatggggtatcagacca

SEQ ID NO: 396320 - DNA, 462 bp, Homo sapiens
attaacctttacaaaatcagtgtccttgggaaaactgaaatataagacagatacttatctctgagattgctgcagtgtctgctgatagaggaaattcataagaagcagaaactattatgtaaatctcagtaaaacacttatttataatggtcaaaaatggaatattggtaattgaacatttgggttagttgagaatattttttaaaattagggcaaaatattaatgctaaaggtgttctgtatttaactcagtcatttattcaaacccagaatcctgcagtttctcctgattaacagctaagtaaattctatagcactgtactgaaaatataaaaaatttagaatatagggctgatcatccctgatcctaagattgtcctctgaagttgattttcagggtaaatctttcatatccactttttaaattgccgattgtttcttatgaaacaagtagtaaaatgt

SEQ ID NO: 396321 - DNA, 498 bp, Homo sapiens
ctaaaatctagtccaatgtcatacaagtagagaacagtggtgccaatattcaaaatcagtagttttatgaaaaataaaatagaagtaataatccacaaagtaggcaatgaaactcactgctacaaattctggttcccacaacatgtggttctctccctaagtaggaaagggtctttatctggaccagggattcctactccaaagcccaaaggcagtggctggctctgcagctatttgaggttggtatattagttaggggcttcagctgatgatccatgcatggatgtaatatcacctagtgttttataagttattcttcctgcctccaggtgaattgtccatcccccattgtatatgatttggacagaccaccctctgtttgcttttaatatccagtatctgtctccatctctctctctttctttctttctctctctttctcagtgactgaaactaaggaaaacagggtcagataactcttttctattttctacaaat

SEQ ID NO: 396322 - DNA, 615 bp, Homo sapiens
tttcttattttgtatcccttaaaaaacaacttctgaaattctcgccaatcccccaaaaactcatctgcactagacaaaaactgcttcctccagttctttttgcctgctagttaaaaatatacagtcttagccccaaacctagacctgctgaacccaaatttctatggaagaggccaggtaattttcgtagtttaaaaagaccatgggtaattcttataatcaagcaggtttggaaagcactgctgtcttgaactcttgttctcagcttggttgcacactgggatctcttgggaagtttaaaaaacccctgatgctggtgcctgctccccatcccatgttctggcttaattggaaaggaacaagtcctggacatctatacttttaaggctccccaggtgaccctaatgtgcagcagagtttgagaaccactggttttctgcaacctcatgcaaatattgtcccagatgtagatgggagaaacactgcaggcatagctgaggatataattggaagaaaccaaaaacccttattatgcaaatatttgccctaataagtctgcctgcaaacaaatataacaaagccaatttttcttcaaaaataaggagtcagcatcta

SEQ ID NO: 396323 - DNA, 378 bp, Homo sapiens
atctcttctctgttccctccacactcttcttttgctcctcttcctgtatttcagagtggttaagatcatggaagtcagacaagctatgggctctctccataatgtcactcacttcctaggcttgtggtgagtggcatatgaggtaatggtgcctggtgtagagtaaacactaaacacacaatgagtgaatgatattacagttttcttatttaaatccttattatatatatctttatccccattaagtaaacaaaggacaactgagaggctcagaacatcaatgtcattgtactcaagggtaagcagatgctaacaggcagaaccaggatttggaccttgatgtatataataataaaataatttttcacatgttttaac

SEQ ID NO: 396324 - DNA, 459 bp, Homo sapiens
attttccagattgggcctggcttttcttcggtcagtgtgctgaattagcactacaaaacgtcattagtggtgtgtgatttagtgaagatttttagctgaagattctgtcagaaggagttaatgtcagttctaaaattgccaagtttctgcctggagagttgcgtacacattgaacattgagaccattgacttcactactggttttttgtttttctttcttttctttttttgtttaagatggagtcttgctctgtgacccaggctggagtgcagtgacgtgatctcagctcactgcaacctccgctgcctgggttcaagcagttctcctgcctcagcctcctgagtagctgggattacaggcgtgtgccaccacgcctggctaatttttctatttttagagacagggtttcaccatgttggtcaggctggtctcgaactcctgagcttgtgattcacccg

SEQ ID NO: 396325 - DNA, 231 bp, Homo sapiens
tttatgccctttggcttgctgccaggtgctacctttcacccaaaagaaccacaggctcctcacggattttgcattccttcagggtcctgccagttactggcaaattcaatgataattgtgctcactgtataaaatactttctggaataaggtaaaatatgaatgaaaaaatgcacaaatgccaaacaaatacagttgcttgtgctgagattttgttttaaagaagaaagag

SEQ ID NO: 396326 - DNA, 469 bp, Homo sapiens
tccctctggccactgagcacacagattcaccccaccctgtgaactcggggactgtgccacccctgctctcccacgcccctttccctcacctgggcagcattcacatgccacctgtggtcagctctcagagactggaaggcccctcctcagctctccagagctgtttctttatggaactccctcttcttccatatttttctttgtacattccagccttcctggagccccttaactccacactctgtctccaccaggtcctggttcccctccctgccctgtggctggagactctgcaggtgacacgctgggctactgaggcctcacttccctcatgcccctctctggtcactgtccacacggcctgccaccagtgtctgaagcctgtggcttcatgcacttttgtttggctttctggttgattaaggtaggctgtgaaatttggtctgtatcttccaccatggctagaagt

SEQ ID NO: 396327 - DNA, 621 bp, Homo sapiens
aagttcctcactggggcctgtaaagcgccataggatttgggcccagtgaaccccatgtccaatgtcagccctcaaagcacagccctgcccactcgccaacttctccctgccttaggacccctcctcaagcctggaatatgctcgccaggctctgtgcacggcagatgcctctgcttcccgcagtgtcagctcaaacctcgcctccctggagaggccttcctgagcacccagcaccagcccacccaatccatgtcctctgcagcactcacagtgtgcacgtgcgtgtgcacctgtgggtgaactctctgaagtgtgcccgtcactagcacaggagccccaagacctcccctccttccagggttccacagctgaactcacaaataaataaggacaggtgtgctcggcggtcaccgtgccttcaccccgcaccatggtcacgaccgtgcttgccatcacagccccatgaaggaggtgcactggcccaagtcgcaggtgaggaaactgaggctcagacccgctgtttcttgccaagggcacaaagcccatcctccgaggcagggctgggttgcaggggagagctcagcccaggctgcccctttctgctggagacacctggccccg

SEQ ID NO: 396328 - DNA, 659 bp, Homo sapiens
atggatgggtgggtggatggacgggtgggtaggtgggtgggtgggtggacaagtcgatggtgagtgaagagacacatcaggctctgggcatagctcaatgcaaaggagagaaagcagctagtttaggggctcagttcttgggcaggtagaaggtcatcctggtttctagtccttgtagcagcagcactgtgcctgcacagccctggggcccctgggcatgactgagtgacagcccatcccatggtacagtaactcatgcatgtcaagtaccaagcccagggcccatccacagcagcatgtcacacctgtggatgatgaaaatgagtctaagtctagtgatttggtctgtttctctatgcagacagtgtacaagctgcaggttcacacagtgctggcctgtgcggtgtttcacaatagtcataaacactgaaaagtggaaagactttgcataggatgccaatatttatctagatgttattgaaaaaaacatagggagatacaattccagaccctcattctcacccagtaaaccctcagtctcacaggtgggtggtgggtggaggtgacctcctttccagaggcctgtgctctccagtttgccacagtaccccgcactccctacacggcgcccagctgggaagagtgtccactgccatctc

SEQ ID NO: 396329 - DNA, 620 bp, Homo sapiens
atgacattaggcgcgtctgcgtcctcaaatgagagggaaaaaactccgctagcgaactcagcacatggaccctgacagcgaacgtgccgagtgcccatgaggatgggcaagtcacaggcattcaggggccatcccaagggttagactatggagaggaagccagggactcctggctgcaaattcgtctgctagtgggccaggcttgaagggcttctgccacaaaacagcaacttcatcttgccccaattactcttaaacttgaaaccaaatgtctttttaaaataccttggtgtttctattttatcacgcactttccctccgtctgaatgaatgtgattttaacacatttacatggcatttcatggagatgtgcctgatctttgttggtactaagtttctacagtacctaagatttcaattatgtttccagaattaaatagataccagagaccctgccctaaagaagttacagattatgaagacgcaaaccgtcactaagccagctagggaagaacacacctttgatcttcagaggagcttatggcaaacactgggacagcccgctggctccccacaacacacacagcacgcagacgcgcctaatggtaccgagctcgatt

SEQ ID NO: 396330 - DNA, 645 bp, Homo sapiens
atgacattaggcgcgtctgcgtcctcaaatgagagggaaaaaactccgctagcgaactcagcacatggaccctgacagcgaacgtgccgagtgcccatgaggatgggcaagtcacaggcattcaggggccatcccaagggttagactatggagaggaagccagggactcctggctgcaaattcgtctgctagtgggccaggcttgaagggcttctgccacaaaacagcaacttcatcttgccccaattactcttaaacttgaaaccaaatgtctttttaaaataccttggtgtttctattttatcacgcactttccctccgtctgaatgaatgtgattttaacacatttacatggcatttcatggagatgtgcctgatctttgttggtactaagtttctacagtacctaagatttcaattatgtttccagaattaaatagataccagagaccctgccctaaagaagttacagattatgaagacgcaaaccgtcactaagccagctagggaagaacacacctttgatcttcagaggagcttatggcaaacactgggacagcccgctggctccccacaacacacacagcacgcagacacacacaaacacacacacacagacatcggacacaggtacacacaagcaga

SEQ ID NO: 396331 - DNA, 389 bp, Homo sapiens
aacacacacaaatacacaccagcagacacacacaaacacacacacagagacacagacacacacagatacacacacagacacagaaacacatttacatggcatttcatggagatgtgcctgatctttgttggtactaagtttctacagtacctaagatttcaattatgtttccagaattaaatagataccagagaccctgccctaaagaagttacagattatgaagacgcaaaccgtcactaagccagctagggaagaacacacctttgatcttcagaggagcttatggcaaacactgggacagcccgctggctccccacaacacacacagcacgcagacacacacaaacacacacacacagacatcggacacaggtacacacaagcaga

SEQ ID NO: 396332 - DNA, 201 bp, Homo sapiens
gacctccaagctactgtttatatatcaaggggtttatttcttcagtatcttaacttccaaaacaatagtttggatagtgtttcaatgctaatgtgacatgagcagacatgttgtatgggttcacaatattaattagcattaaccatagtcaagtaagcttcaagtccacgaaaacagcatgaaatgttggtgtcctgacct

SEQ ID NO: 396333 - DNA, 330 bp, Homo sapiens
tagctgggattacaggcgtgcaccaccacgcccagctaatttttggtatttttagtagagatggggtttcaccatgttagccaggcttgtctcgaactgctgacctcaggtgatccacctgcctcggcctcctaaagtgctgggattacaggcgagagccactgcacccggccattgattttttttctttatagatcattgatgtcaagtctaagaattctgtgcctggtcctagattctgaacattttgccctattttttctatatgttttatgattttaggttttacctttaagtttgcatccattttggattgatgtttatataata

SEQ ID NO: 396334 - DNA, 210 bp, Homo sapiens
caagaggatcgcttgagctcaggaggtcaaggttgcagtgagccatgattgcaccactgcatgtcagcctgcgtgatagaacaagaccctgtctcaaaaaataaaaaatgacaataaagattgcttgttaaataaaatgtgatttatttactttgcataaatactatgccttctgagaatgctgtaggtgcgggcatattttgtttttat

SEQ ID NO: 396335 - DNA, 317 bp, Homo sapiens
attagttgtagggcctcgggcaaaccacctaatctgtctcagctagattttattttattttatttttattttattttttgagacgaggtctcactctttcacccaggctggtgtgtagtggctcgatctcggcccactgaaacctctgcctcctgggctcaagcgattcttccacttcggcctcctgagtggctggaactacaggcgtgagccaccgcacccggccaggcagtgcttctcagcgccttccttcaagtaaatgagactcagagcccagagcccagtaagggaggcgacacacatagttcagcgtctga

SEQ ID NO: 396336 - DNA, 337 bp, Homo sapiens
accatctctactactaaaaatacaaaaaattagatgggcgtggtggcaggtgcctgtaatcccagctactcagagggctgaggcaggagaattgcttgaacccaagagatgaaggttgcagtgagccgagatcatgccattgaactccagcctgggcaacaagagcgaaactctctctctctctctctctcgctctctctctctctatatatatatatacacatattcatttgatcattatactaggttgaggatttaagttctttccaaaacatttatgtaaggccgttgatagatggtgagaagtcttaatctaagtatcaacgtattttctaaa

SEQ ID NO: 396337 - DNA, 743 bp, Homo sapiens
ggctcactgcagcttcaacctccctgggctcaagtgatcctcccacgtcagcctcccaagtagatgggactacagacgtacaccaccacacccagctaatttttgtattttttgtagagacacggtttcgccatgttggccaggctggtctcgaactctggaccttaggtgatctaccctcctcggcctcccaaagtgctgggattacagacatgagctacctcgcctggcctgattctaaatttggctgttgtgaatagtgctgcagtaaatatggagtgcagatatctctttgatatgttgatttcctttcttttggatatatacccagtagtggaattgctgggttatatggaagctctatttttagttttttgaagaggtttcatactgctttccgtagtggcagtactaatttatattcctaccaacagtgtacgaggtttcccctttctccacatcttcatctcatgacactacttcagagggttcttgttacccataggatatgttagtgtctagccaaacattgtgtcacaggtgcttaacattatttctaatactcacaacagtactaattattattatggtgggctcaatgagttctgttaagggtccaataaggtcttggagatgtttgaactagaatttgaaggatgaacagaaaaaagggtagcaaagttagggggtggtgtgtgtgtgtgtgtgtgtgtgtgtgtgtatgtaagggtagagctggtagg

SEQ ID NO: 396338 - DNA, 479 bp, Homo sapiens
tctgatgaatccgaggaagatgagtttgcctctggctgatgtagtaacatgtggtatcctgccattcacatcactgtgcttgtgagtctgaggggcaaatttagatccccccaagatgattcctccctatgggtacttgtggtcttccctaagcatcacgtctttggctcctccatgagccacgtgccttttcttcaaacggctgcacagattatgtgcgtaacactatgctttaaaccactagagagtgatccaagagaacatataattaagtgagaaattgtttggcataaactaaaagtgctacagaaattccgagagaataaggatcactgtggtgggcaattatccaaggagagcttcctaaaggcctatggtgttaagagggaacttgatgtctgggtaggatgtgggtgggtggaaagaaaaggaaggcattttttttttttctttgagatggaatctcactcagtcgccca

SEQ ID NO: 396339 - DNA, 606 bp, Homo sapiens
  misc_feature (534)..(534): n is a, c, g, or t
tcagtgttcattgagttgttctaatgtgacgtttgttcttatgtggagattttcctataaggtatttaaggctgaagttgggagcatcgtagaatgcaagagtttgggaaaaactggagataccagtcaagatggagaaaaggatggagttcaagggtacctgggcttcctgtcttcactgtgaagatggatttcaccatgagatctttactaggcagaaaagatggaacatcctgcagtagtgttttgtcatcgagcccacagccgaggccgaacagaagctgtatgttgttcctcaatggttgtgtccaaatgggaatgagtaagacttcaacatttctgaagatggatggtcaccattctcaattctgttttatgtatctggtgggccgttgagcagaagagatcccagatgtcaggggagaagatattaaattcatgtaagtggaataaaagtgtcatgaatggacttttcaactactttctctacagcttttcatgtaaatcagtcttggtgctgaaacttctctaaanggaattgtacatttcttgaaactgattccttattccctcttggcagctaatgggctcttaccacgtttacat

SEQ ID NO: 396340 - DNA, 677 bp, Homo sapiens
aaagtcttgtgtaatactatttagtacaaagcaattttttttatattctctccttattcaagaaagacttaagttcaatgtgaatgatatgagtacttccaggagataaaaagttgacttcagaatttcaatggcctctgtgacaattgcttagaatccttgctgtgagttcatttgactttagcatcttttttgaggctactttttggacagctgaaattctgtgttgcataaagtttttcctttttctctgaagtctcttaagggaagaatatatattttttttatcatgtgttcagcatgttaatcattttggtataagtcatttagctatagcaaaacaaaggtttaagattcattagatgaacttagatgaccgcagggccagccgtctcgctaaccataaagactacaagcagaaaacacttgtaggtgtaagattgtacatgtgtctcctgccataactactttcagtttaaaggacaaagactttcttccttatttgcttttagaacacgtgtattacagcctatactctgttggattaattgcccattactatttattgttcttattttctattttaaagtggcagttactttgatactgagaatattttgggaacagagcaagtttatgtggtaaattctgggactttagcttttagtatcaaagaa

SEQ ID NO: 396341 - DNA, 343 bp, Homo sapiens
aggttgcagttagctgagattgtgctgttgcactccagcctgggcgacaagagcaaaactccgtctcaaaaaaaaaaaaaaaaaaaaaaaaaaaattcagtgcagtaccaggcactgttaacactagctgcatgttctatgacatggacacaaaaggacatgagtagactgaggctcaaacaggttaagttgctgcccaagattgcacagtggcaggcactcaataactgagcgccccttcctctgaaatcacattagtgttttctgttgttctctcactgtctcaaatgcatggatcctgtttttcctaccacactcggagctctttaaggaaagaacagta

SEQ ID NO: 396342 - DNA, 419 bp, Homo sapiens
tctattgagaaatattcatttgtatgaactattatttcatttattagtttatctgctcaatacatattgattcacagatatttattaattttaaaacactaaactgatccaatattctctctctcaaaggtcttcaatagtacctcattttcctgaaaaacaaaattcaaaacccatttgcttaatgttttgttttatccgggaccttgtttcaaactaccttcactgtatttttatctttatataccacctgtcttttagataaactagatttctcatctttctaccataattttacttatgacatttcttccacaggggttgaattcccatcctcgcatctatcaaaatctcagcctgtattttccagatcaaatctttagaggcaactttggccaggcgtgttggctcacgcctgt

SEQ ID NO: 396343 - DNA, 541 bp, Homo sapiens
acctcctaccccacgattggaatcagagtttatataagcataatatactcagtgaagtgttttatctgccacaaacactgttctatttttataccatcattcagcatgcattcactaagcacccatcacaggtcaggctgcgggtggtaggagggataccaagaagaaccctgtggtcctttccagtcctttcccttcaaacagctcttaatcccatgaaaagacagcatgtacattatactgcctggtatgtactgtaataaaaccatggacaaaggccatggaaacacaggggataaaccagccctctttgcctaccagagtcaggagatccctggcagagcaaatgatcacccagttgggtcttcaagtctagttggaggttatgagctgggggatgaggtgagatgctccccatagaagggaggagaatatgcaaaaacttggcggagctggtacatttggagagttgagtgattgcaggggaccaaaggggctgtagcaagaaatgagactggaaaaataagtagaagcttataaa

SEQ ID NO: 396344 - DNA, 823 bp, Homo sapiens
ggtccctggcagcaggcatctggggcatgtagctgcctcttcagctgtcctgccaacagaagaaacttacctcccatcatctccctgagtgcctgcctcagccgccttgtatgtattcattgctgtgtctataataaatcagcgggtccttgctggaagcttggacgtttcaatggagagctttccaaacacctacagcacccttttgaatgcaactggaagtattggtgcctcaggagctacacaagcctgaaccacctgctacttaccagattctgggaaatccaacatcaaggtgccagctgaaaagtttcctggtgagggcactagctctggtttgcagatggccaccttcttgctacaactcaaacttgcaccaccaagcccttgccagatggcagaaagcagggcattggaaggtatttcctccctgttgagtaccagctccacttcaccagccaacccatgagacagtgttctacaatgccacaaagacaaatagccacatgcgtctcccatgtacccggataccaccttgaagggaagggacagaactttgaaagatattacatttcctgaagttatcaaagcagagaaaactgaattatctgatgggacagttaaaactattggattggactgaaatggcaagatggaactaagctttagttcttttcccacatcccagcaagaagaaagtaaatcagctcttctatagacaaaataacaaagctcacattttctctgtatacataaggaaaggtgagggattttggaccctgaaacatgagtttatgaatatacacatgcatacatccatttg

SEQ ID NO: 396345 - DNA, 454 bp, Homo sapiens
gcctaatcctgctcgctctcaaagtacacttaactcttaggtgtcctcatcttcttcatgttgtgaatttgcagccgtttgtgtttgattcataacggacaatatcccatgacttaaaatgcatacagccctttctctacctaaaaataaaacaatgacatttgacgctactatccaaaaaagtttaatgaaacatgacctgtgaaagtgcacagcccctggattacagctttaatgagtgttgagagtggtggacctagttgccatctggaatcctcagccaatgttctgaataaactcacggaggcatgcccgctggttgggtgacagcaactttcctgtaacatccccaagatcgcctccgcaccagtggcccctcagttctccttgggagtcacggctctctctcctcatcccatctcctgtctcgcttccacctgagcgatcagagaaa

SEQ ID NO: 396346 - DNA, 339 bp, Homo sapiens
catagttctttcagaataaaagtgcaagccaaattttggattaataaaaatacattttagacagagtcagaattttttaaatgactttttaaaagcaatatttttgtatttgcaaatctgtttatttgtgagttactaatatgtactccttaactaaatatatgtcataatgtgtaagaaaatttgctgttgaatttactctagttgtttagatttcatttggaaaagttcctaagtcctttatgtttctccgaaagcaccttacactttgttgtaagattctcattagagaatttagatttaaatgtgatgtcaataaagtcattaaaattgttcatt

SEQ ID NO: 396347 - DNA, 974 bp, Homo sapiens
atcccagcacttttggaggccggggcgggcggatcacctcaggtcaggagttcgagaccagcctggtccaacgtggtgaaaccctgactctaccaaaaatacaaaaattagccaggcgtggtggtgggcgccggtaatcccagctgctcgggaggctgaggcaggagaatcacttgaactcaggaggcaaaggctgcagtgagctgagatggcgccgctgcactccagcctgggtgacagagagtgagactccatctcaaaaaaagtaaataaataaataaaaatgaaaataaaataaaatgtatccatgagcaggaatcaacctgtgcccagccagggtggtgcctagaggcacttctgtctcttcccactcgactctaaggagtactgctctctgtgacgtcagcacccagcacagggccctggcacgtggcaggaactcagtgcgtggtgaatgaacgactacatgaatgatcagattatacacagcccagggaagtgccacatagaaggtgtctccaggaatcagccggcatgctccttttagaactgcagtcacatcatagcccttcttggcttagaccctcctccagctcccaacccatccagagtacagaccaaagtcttccccacggccctcagggctctgcacatccagcccctcagttctcagccctctcccctcacttattccccttccctcatttcccacactgggctccctctgtccctcccacgtgccaagcaaattcttgtctcagggtcttggcacttgctgtttttctcactcaggatagacttcccacacatcttcacaaagctttataaatctttgctcaaatgtcatctcctcagagaggccttcccaaaccacactgtctaaatcggcacccgcccttctccatctcctactctgtatgggggatctcgagatgaccccatacagagtatcgcagagagatttggggatcctg

SEQ ID NO: 396348 - DNA, 628 bp, Homo sapiens
ctctctccccatattgttcgtatctaagagactttcaagattttctgacattttggaatcttgcttcatcttcaaggtgaaagatatatttgagtttagcaatgccttaaaatggtgtgtgtgtgtgtgtgtacatatgcactgaagtttgaaagtcgtaatataaattgagaaaacaaatattctttaaacattctatattaagccccttttctgtgcttttttcagaatctcattgtggtgctaaaatttctgaaggattcaatgaaagcagatgacaacacaactactttcagcacacttaatgtctgcttggaaaaagcaaatcaaaacatgaaagagatgatatataaaatacagtcctgaatgcattcacatgtaatttacagagagttgagatcatgaaggaaggaagtagacactgtcggaaatatctaagtttacagaggatacttgtacagccagggttttgtgaaagaattaataacagaagaattatatctataatctattggccgggagcagtagctcatgcctgtaatcccgacactttgggaggccaaggagggcagatcatgaggtcaagagatcgagaccatcctggccaacaaggtgaaaccccatctct

SEQ ID NO: 396349 - DNA, 315 bp, Homo sapiens
ttaagttaatggtttagagtcagccttgaattgtgcctcttcttagctcccagcatttatcatgaataataactcaaagatggagccagtatcttcacatgcaatcatcatttcactgtgaaatttcaagagtgaagctaagtttcaccaaggaaatgtacttcagatttcatcaattgatggtgaagatttcctcatataatgaatataaatctattatacactccaaacaagggcaggcacatattataggccaagcacgtgcctagaaaaaagtccctctctatagtactttacacttgacaaagcaatttg

SEQ ID NO: 396350 - DNA, 464 bp, Homo sapiens
ttccctttaattgtgcctgtttgtaaccaaagcacaagtaacttcttactaatgtggtaagagctttatacagggctgatctgcaaagcagaactggtttgtctggaactttctgaggtggttactttctaaagagtttataggtggaatctttttcttggcatcattgaaccatgaagtctggtccttttgaggtctatggcttggttgttgatttaaccctgctctgatgttgtttccatttctaaatcacactcatgtactgaaaattatatcggttccttgaaattgggcagagttgttagtttggcttttttcaaaactagggtgggactttgccttgcgtatatttactggccactaacaaagaagggtcaggagcaggtctgtcacatccttactaggtaaaaaaagtccgttctttcacagctggtatccaagagagggtcttaattcacttccaa

SEQ ID NO: 396351 - DNA, 227 bp, Homo sapiens
gggggtacagggtctctccttttgaggtgataaaaacgtcttggaactagatagaaacgacagctgcacaacatattgaattcactaaatgtgactgaattatatactttaaactggtgaatattatggtatgtgaattacatctcaatacagtttttggttttggttttgtttttttgagacggagtttttgctctgttgcccaggctggagtgcagtggcacgat

SEQ ID NO: 396352 - DNA, 205 bp, Homo sapiens
tacttcacagagtcattgtgaagatggagataattctgtgtagtacttacagtgcctgctactctgtaagtactaaaaatacaatcagctgttatttttattaccatgtaatctaaagacatgaaagtcacacaggacaatgatgataatcggttgtccccatcctgtgtagacattttatagtcactttagcctgggttgtaaa

SEQ ID NO: 396353 - DNA, 469 bp, Homo sapiens
ggtggagtgcagtggtgcaattataactcactgcagcctcaacctcctgagttcaagtgatcctcccacctcagcctcctgagtagctgggactacagtgagattcctgttttcagtaaaggacatcatctatgaggaaccccaaaggaaggttcaggcccagccaacctctcccgacagagctccagccaccttcccttcccgaggaaataacccgaacttcagctgatcatatgcttgagtgaccagacatctcagttgaatgtcgccgacataatgtaaatcagcttctcagctctgtgctaaaggcccagcttttagaaattttccaactgcctgtggactgatacttctgtgaaacacaaagatgaaccactacaaaaataagatgtaaaatgcaagcataaatttttggatttaaacaaaattcctctgtcagattgatataaaaatttttaaacactctcaa

SEQ ID NO: 396354 - DNA, 1059 bp, Homo sapiens
agctcggttcagttccatttacctgcaacattaaattgatccatctaccaacctgcttctctgatacagcctcaggatacacattctgtctacaaggtgtctcaagctagatattcctatgccagcacaaattagacaatgcaaaaaggagctgttcccccatcactaggctggaagccttgaagtagctgccaaccttcactgtacttcaacccacaataagttggctgccaaatcctcccgtgttccccagcactgaagtctcaatctgccctttcctcctcctgcctctattcagagtcctgtgcctgtcctggtcatctcctcactgaaaccccacacctcttccagctgcccttagtttcctcctattgctataacaagtatccttccagaagtctcacaaaagtttctgtctatatccatgtacaggtgccagggagtcagcctccattcccctcccacttaatcctcctattgtcttccactgtccacatgtggctattgcaattaattaaaaatccagttcttcagctgcactaagcacattttaagtgctcaagggccacatgtggctggtggccaccctactgaacagtgcagctgtagggcattccacttttatgcatttatcccccatacatttatcaactcaacattttatacaacccaacacttttatcaacagcgcagctgtagggctcaggaagttctactggatagtacagaacctatcccctctggcaaacctattcaattcccacaacaaaatctatgagagtaaattccatacccaatcagccctttgaacctgattttttactaagacctcatgtttcaattttaaggaggtcctaaaatattcctccctgagatccaccctaattttaaggaaaaggtatattacacacccgtctccctatcccacataaacatgacttccctttcataaaacttctcttctacgcagagtaaatatttattctgctcagctgttatgcatgagcatatagtcaatgtacttaacatgttgactattttagattgaatggttttagg

SEQ ID NO: 396355 - DNA, 138 bp, Homo sapiens
cccactatccaacaggtgaaggtaactacaagaaaaggggatggtagggtagggattttattgaattagtaaatcctttaaaatcaagtcaatccccaaatatggaaaagataattctctttccatgagagaagttga

SEQ ID NO: 396356 - DNA, 108 bp, Homo sapiens
gttaatgtctaacaactttgtaaatcaaggtttcatgcatttttaaaaccaaagtgctaccacctgtattttgaagagtattgtcaacaaataaaaggtttccaaacc

SEQ ID NO: 396357 - DNA, 445 bp, Homo sapiens
gacagtatagtggatatggctgcaagatgtttctaggaaacatgccaatatcttcagaaatccccagccctttcccctaaccctcctggctaaggaaagcactagcttatgagaaaaaccctaggaagaacaacacagttaagacaatgtagcagcagctgtgggtgctgtgtcctccattggattcgccaactcctaggagaaactctcacagaggaaatgggtcagcagtgatctcatggctctaaacagctatgaaatctgtaaggatatttctatccatgctacctgcatcagtgagtttaaactttaattgtagaaaaaagacaaaacattaatgcagtaattgatacagtatagtttggtgcaaagaaccctaaatccaaatccaggactcagtactttgaagctagtattttaaactttataagtgggtaaagtaact

SEQ ID NO: 396358 - DNA, 326 bp, Homo sapiens
tatgtctttatggaaatcttaataatgaattcagggctgtgcaagctgtgttttgcagattagctcttatgtcttaccatagtacttatcttttttgatttgaggctggtttactgagtcagattacctcttcagaagcctataatttgtaactgcatagttttgcaccagtcctacccttagctccccaaaattcccctgggcacatatacgtatattatgagcatggatgagttgatataataatgcactcaactctttggaaaacacaacagctgataccagagtacctgtgcatatataaaacacattttaaaaatagaaaa

SEQ ID NO: 396359 - DNA, 612 bp, Homo sapiens
  misc_feature (427)..(427): n is a, c, g, or t
  misc_feature (458)..(458): n is a, c, g, or t
ctagagccacatctaaagggcagggaatctccagtgtggttttttgtttttttgttttttgttttggagtcttgctctgtcacccaggctgtctgacaagtagaagacatatccactgtagcaaggaacactatggagtatatgagttagggaaaagagactgtgaagggaagagaacaaacattttgtagacgtttggtgttgaatatatgctatggaggcagtttctatagtttcatttacttcatgaggtttcattttttcttttctgagatggagtcttgctctgttgcccaggctggagtgcagtggtgtgatctcagctcactgcaacctccacctcccgggttcaagcgattctcctgcctcagcctccctagtagttgggactacaggcgtcccccccccccaacccccctttttttanaacaaggtgttaccttggtggccgggaaaanatttttggctggtcttttggtaatttttaaaaaactttaacaattaaaattgggaaacagggggacacgaagaccacacaaaacaaacaaagaaacaaaaagaacagaaacatcactcgcagaacgaccacagagctcagacaatccaacgcca

SEQ ID NO: 396360 - DNA, 346 bp, Homo sapiens
gaaaggttgttcaataattttatttatttttagatcttgatttgcacattaattttggtaaatccttaggtatgagtcttagttctaccctcattagctctattaccttcctcaagtgatttaaactttccacatgagtgtgtcatcatctgtaagatggggatttaactatcttacatggctgttaggaatagaagagatgagacccgtagaccacttagcatactgtccacttcagttcatgctcagtaaatgcaataacaatttatttgtctccttcctcagcctcatcgtccatcactgctctcctcccactttatgctctaggtttcatgggaagaaaggg

SEQ ID NO: 396361 - DNA, 451 bp, Homo sapiens
tatatttattttcatggaaagaggctagaccttaagtgataaagaacttttggttattactctttttttttttctaaaacaccacaacaatattattaccattatttaacactaaatactaagactgaataaattgttccagttattcctaaagaagccagtatatgagcccacttagaagagaatttagtccatttatagactggcattttaatatttaaaatagcattacataactggtatgctgctactccacaattactagagaatagaaaatttaagacgcttaaccacacagtactacaatctcctccaagtctttgtttttatgcattcagaagatgtattaagaaaaaataggaaatagtttacttatgagatctcatgcattgtgggcctgtacttgtgttgtaagcttccagctgggtttaattcttgagtgtagctagaa

SEQ ID NO: 396362 - DNA, 1361 bp, Homo sapiens
gggacggtgttccggcccattccggcccatttccacccccggagctctcacccctccagtgccgacggtagcgaaagactttcctccaggggcttcctcactggggaattgccggaaagagcaaacaaaaaaggcgctggtgtaggctccaaaataaacacatctgaattcatgatggcatcgacagaggctcttattggattaaaagtttcaaaacaaacaataacgctttggaaaaagggttgaatgcaccctcaggcacgaccatggagaaaggtgggaacatacaattggagattcctgacttcagcaactctgtcctgagccatctaaaccagttgcgcatgcagggccgtctctgtgatattgtggtcaatgtgcaaggacaagcttttcgggctcacaaagtggtgctggctgccagctccccctatttccgggatcacatgtccttgaatgagatgagtacagtctccatttcagtcatcaagaaccctactgtttttgaacagctcctttctttctgttacacagggcggatatgcctgcaactggcagatatcatcagctacctaacagctgccagttttctgcaaatgcagcatattatagacaaatgtacacagatcctggagggcattcatttcaaaattaatgtggctgaggttgaagcagaattaagtcaaacaaggacaaagcatcaagagagacctccagagtctcacagggttacaccaaatctcaaccgctcccttagcccacgacataataccccaaagggaaaccggcgaggtcaggttagtgctgtgctggatatcagagagctaagtcctcctgaggagtccaccagccctcagatcattgaaccaagttctgatgtagagagccgggagcccattcttcggatcaaccgagcaggacagtggtatgtggagacaggagtggcggaccgtgggggtcggagtgatgatgaagttagagttcttggagcagtacacatcaaaactgaaaatctggaggagtggcttgggcctgagaatcagccttctggagaagatgggagtagtgcagaggaagtaacagccatggtgattgataccacaggccatggttctgtaggacaggaaaattatactttagggtcttcaggagccaaggtggctcggccaacaagcagtgaagttgacagatttagcccctccggcagtgttgttcccttgacagagagacacagagccagaagtgagtctcctgggagaatggatgagcctaagcaacccagctcccaggtatggagttgtggatttagaactgctttggtggttggaggaattgctactgtgtatgaatagaaaataatg

SEQ ID NO: 396363 - DNA, 1469 bp, Homo sapiens
atccagtatcaccttcttcccaccccttaagtccgccccttttccccgcccttcctcgccattgtgggcagagacatgaccgtccacgtgatgccgtgctcccgccctcctcccgactgaggaggaagagcagagaggggagggggcgcgagctctcacccctccagtgccgacggtagcgaaagactttcctccaggggcttcctcactggggaattgccggaaagagcaaacaaaaaaggcgctggtgtaggctccaaaataaacacatctgaattcatgatggcatcgacagaggctcttattggattaaaagtttcaaaacaaacaataacgctttggaaaaagggttgaatgcaccctcaggcacgaccatggagaaaggtgggaacatacaattggagattcctgacttcagcaactctgtcctgagccatctaaaccagttgcgcatgcagggccgtctctgtgatattgtggtcaatgtgcaaggacaagcttttcgggctcacaaagtggtgctggctgccagctccccctatttccgggatcacatgtccttgaatgagatgagtacagtctccatttcagtcatcaagaaccctactgtttttgaacagctcctttctttctgttacacagggcggatatgcctgcaactggcagatatcatcagctacctaacagctgccagttttctgcaaatgcagcatattatagacaaatgtacacagatcctggagggcattcatttcaaaattaatgtggctgaggttgaagcagaattaagtcaaacaaggacaaagcatcaagagagacctccagagtctcacagggttacaccaaatctcaaccgctcccttagcccacgacataataccccaaagggaaaccggcgaggtcaggttagtgctgtgctggatatcagagagctaagtcctcctgaggagtccaccagccctcagatcattgaaccaagttctgatgtagagagccgggagcccattcttcggatcaaccgagcaggacagtggtatgtggagacaggagtggcggaccgtgggggtcggagtgatgatgaagttagagttcttggagcagtacacatcaaaactgaaaatctggaggagtggcttgggcctgagaatcagccttctggagaagatgggagtagtgcagaggaagtaacagccatggtgattgataccacaggccatggttctgtaggacaggaaaattatactttagggtcttcaggagccaaggtggctcggccaacaagcagtgaagttgacagatttagcccctccggcagtgttgttcccttgacagagagacacagagccagaagtgagtctcctgggagaatggatgagcctaagcaacccagctcccaggtatggagttgtggatttagaactgctttggtggttggaggaattgctactgtgtatgaatagaaaataatg

SEQ ID NO: 396364 - DNA, 385 bp, Homo sapiens
ccaaacatgagccatagattttttttcaatcaattactttcttttgcatctgttgaaattgttttttataaaactctgatttatatggtgaattcatttgattcagtttcaaatgttaaactaacatatttgaggtaaacctaatttagtcattatgtattatcctttagatatattgttagattcaatttactgaaatttggtaaggagtgtttcacatctatattcatgaggggtattgatgaatagttttttaataatgtctttttctggttttggtattgggataatgctggccttggggaatgaggtggaggtgttcgctcttcaattttctgcaaaaatttgtgaagaattaattatttttttcttcaattttgatgga

SEQ ID NO: 396365 - DNA, 351 bp, Homo sapiens
cctaacattagaaaggtatcacgtgtcgaagagcaggtgagatccctgtgtgatgtgagaacatggcaagagtctttcaaggtagcccgactctggaacaggacagtcacaccaaggagaaatgttggggtccttcaccttcacgtcaatcaggcatacttattgacatttggtggctgatttgcaaatcctttttgaagccaagcaatgacttagatgaccctttggaaatttcttacagactcctgagttcaatttatgtcatcatatcgtgattgaatttttgaaattcattttttcaaatgtttggacaggtatttttatctcaccaaaaatgaatacaggaatgtg

SEQ ID NO: 396366 - DNA, 583 bp, Homo sapiens
cttcccgaagtgctgggattacaggtgtgagccactgtgccctcctaaacaagttcttgagtaggaactagcagctagacaagatgcagtgactcaacagaggcaataataggaagttttgggtttgcagctgctggctgatgttttctaccctgtttcccagcaaggaaatcctggggattgtgagcgtgtgcgcagtgactcacatgaccacagcctccctggtttacagtcccagccctgcatacctgttctctcaccgacacacctatccgctcagtgaccacacctcacaatctcaactctgccccagccaccaagccatggctgccactcacacagcctctttttcactctgttgacagccacctccctcctcaaagcccatgtttcctgggagctgtgacttctctgccatcagctgtcaaatcctccgcaggctcttgcataaagcatttttcctgtctgcatctcagatttctgacctgtaaaatgaacctcaggctcactgctcacgcctctttgctgtgtggagcagtgaattaatgtctttaaggaacttgttgcttgttggatgaaagat

SEQ ID NO: 396367 - DNA, 343 bp, Homo sapiens
gggatttctgtctcagggaccagctctacctgacagtggaacctctgaggacagaggaaagctgcccacagcctaagcccttcttttccccagtatgcccgggcctctgaccctcctccccttttgtgtgtttcatcccacctgcttccagcaccagatgggcagcctgggtgttggtggggagaaggaagaggcattaagcatctcccaaacctggttttctagaagacgacaaatagccttctagtcctgagactctgccccacggacatgcctgtgcccttaaggcagagagccaccgtgtcctctgctgggtggcaggtatccagcctgaacccctctg

SEQ ID NO: 396368 - DNA, 175 bp, Homo sapiens
agtgtatatggatgagtcaacgtgaatgtgagtgtgtgtggggtgtacattggacaagcactgacatcacacttgctattttaattataaggcaccctccaaatttggatgcttcttaagaacctgctacttgtcttcaacttctacatgtggtcctttcacaagtcccatcacc

SEQ ID NO: 396369 - DNA, 257 bp, Homo sapiens
ctcctccaaagatgcccccacaacgtgggcaacttcaacccccatgagagctcagaattccacattcagcgacaaagttgacaagagcctctggagatctcaaagacttattaaaagtggaaatggctactgttttactgaggcagggtgaaaacacaactcacttcctaggatcgaacccagcaaattcactcagcccccaggtaactgaggactcagttgaaggaaaataattttgagcccctgaaaatagatgc

SEQ ID NO: 396370 - DNA, 171 bp, Homo sapiens
aacttttctttaaagacatctctgctatacacagacatggtaaaatttttgaattccaatggtaaagacaaaatcatacaaactttcaggaaaaatcagattgacaacaaaggaaagaaaatcagacttgacattattagacttctcatctgaatctctaaatgccaaaag

SEQ ID NO: 396371 - DNA, 432 bp, Homo sapiens
aataaggattctgtttttgttgagtactccatccttagcacctaaaacaatgttaaaacaactagatgatactaaaagcatattttttgaatgcatgaatgatcataatgaagaaaagcttactattttatccccttgcaactaaggaataaggaaggggaaaaaaagtccattttcaccttttgacctcttcttgcccttcaccaaaaactgagttccctggtgttttttctctcatatgctgatgtggtgcaaatagcctaggcttgagggtgagggtgaaggtcgagttcccaccctatgattgtatgctccattgcagctcttgacagtctattagaaatccataaccatagatacttctgcttctagggctttctttgtgagcctaagatttaactaccaacacctatgttgtcatgtggcaaaagt

SEQ ID NO: 396372 - DNA, 285 bp, Homo sapiens
gtgctaaacccagggggaagcagataatgaggaatgaacataataaggaaataaaccatacacgtatgttcaaaggtgatatgcgcaaaggagaaactggagcaggataagggggatcaggagtagggagggggctgtacttttagagaggctgtccagggcagggctaatgcaggacgtgacagttgaacttggaggaggtgaggggtgagccatttagaggtttgggagaaaaatgctctggtccatgcttgggggctttgagtaacagcaagggggccagtg

SEQ ID NO: 396373 - DNA, 177 bp, Homo sapiens
attaattaataaaaaacaaaaacaaaccagaaattttttttttttttgccaagtattgctgctgtacattctagtttggggactgctgacttaataggtaatagttagtggtatgctggtaaactgactcttttttttttttggaatttcccccgggggtccccgcccccaattccg

SEQ ID NO: 396374 - DNA, 268 bp, Homo sapiens
tgaggtcttgaagatgggggcttcatgatgagattaggaccattataaaaagaccagagaactggcttcctctctctctgccatgtgaagacagcaagaaggtagcctccttcaagccaggaagaaagccttcaccggaacccgaccatgggggcaccgtgatctcggccttcaggccaccaaatctgtggtattttgttatggtagccccagccgaagaagacagacattcatccaactggggtgtgttggaggaagagcagctaaa

SEQ ID NO: 396375 - DNA, 862 bp, Homo sapiens
ttaatgaggcacagcacaccaagcagctggaatgagagtctgcccagggtttttctcatctttatttatgaaaggatgcaattagccacttaaaaaagaaagcgcttcattcccagccgtgtgttaccgctgtgctggcatgtgagccagcaggagtgtgggctggggcacttggctcccaaggtcttgggcctttccagcagagggtgttaatggtctgggagaagtagaggcccaaggtcatggggttctgggagagaaagcagacctccatggatcattctaacaaccagttttagttttaaggcaaattctgctaggtgccgcaaggctatagcagctctcatcctgagccctgggcacgcgaaaatgtcaccattctgcccactatttggatgtgacgaggtcaggtcattctcctgagcgtttatagtaggtctttgtctcctcagctcattaatttattctccattgcatcagccaacaacgtggagtcctaacttggggaaatttgccccctcttggagctccctgagtcagttgatacagaatacagccatgtaacaagagtctacttctcatatccctgccaccaaactgcaggacacagtacagctgcaaggcttataccactgatggctaatatcagccagagacatgatctccataagccagctctgccttgtctttttgctagaatgcaaagaaaatgatgctttaaacaaagcaagagccaggcatgaatggcaccaagtgaggacaactccgggggtggcattcaggccttctgtgatttaatgaggagaaatggcaggtctggctaggtctcttgggcttgatgagaacttgctctttcttatgc

SEQ ID NO: 396376 - DNA, 413 bp, Homo sapiens
ccagcctgggcaacagggtgaaaccctgtcactaccaaaaacaatacaaaaattagccaggtgtgatggcatgcacctgtagtcccagctgcttgagaggctgaaacgggagaatcacttgaacccggaggtggagattgtattgagctgagattgagccactggactccagcctggcagacagagtgagactccatctcaaaaaaacaaacaaacaaacaaaaaacaaacaaacaaacaaaaaaacacaccaaaactgatcctcttcagttaatgcttttccattcattcagtcttgtgcttttaacaaaggacacaatgttcggctccaacctcatgtggtcattgacagcctaatcttttattgaggggaggctcaggcttcttaacattaacattaacagagttaacat

SEQ ID NO: 396377 - DNA, 327 bp, Homo sapiens
tagataggtagaatagcaggggaaatgtacctaagtataaacatgcatgatatgtgtagggaacaatgaataaagctactggtacatggagtacacggggaggcactgcagaggtaggttgatactgataacatacttttctgtacataaactaacaaaaagtatgtcatgaacaactgttttataaaagccatcacacttgtaatcatttagtaatttctttccttacaaacagaaatgagcttggtctattttgttaccatggtatcctcagtacctgagcctggttcataattgatgctcaaaaaataaatgaatgtaacaatt

SEQ ID NO: 396378 - DNA, 368 bp, Homo sapiens
aacccagccgctggtgcagagtcccttgaaagctctggatccggctgggtctgttagctgttggaacttctcgcttgtcaaggggacataacacatccctagggcttgtccctagagctgtgtgacaacacagaaaacttctgtttgtcccggcttggttttaaatctgggaaaaataaaaagcattgtctttgcagtctgagtgacccatcgaacaaacaggatgaattatggcatgttgcggtattttcaagtgggtctataatttttggattccagcagccttcatttgttctccagtgtccagccctgggaagcttcagtgaggaaagatcttaagaattcctctcccaacccctcccctctcc

SEQ ID NO: 396379 - DNA, 308 bp, Homo sapiens
ataaggcccactggaagattggaacagctgttggctgactcgcaccctacatccaccaggttccatactatcctgtagataaggcagtcatgcaccaaaacagggcagctgacgacctgcactcagcgtcgtcataatttcctagaatctgtactcacaaggagggtctgcttgtcctgccacatatttctcagaattgcttcaacacaattttgggctcaactccacgttggttgatttgctttactatgagcacatcagaagttaagtcctgccaggcgcagtggctcacacttataatcccagca

SEQ ID NO: 396380 - DNA, 310 bp, Homo sapiens
  misc_feature (36)..(36): n is a, c, g, or t
ctcgtacccaccactcctatagatagttcagcctgngaatttgaggatgcagtgagccatgatctcaccactgcacttcagccactccatcctgggcaacagagcaagaccctgtctaataaattaattaaaaatagaaataaaaatatttcaccattaagtaatgatattgcttgtagggtttttaaatggttattatctattagctcaaggaagttcccttctatttctagtttgctaaggttttttttttttttgactgtgtcttgctcccaggtgggagtacagtggcacaatctcagctcactga

SEQ ID NO: 396381 - DNA, 211 bp, Homo sapiens
ccttaattgttcgaatctttcagggttctgtcagaggcccttaatgtaactgttcttttacttaacaaacttgtcctaccagactgaacccattcccatggttttaaagcactttctttcttttttttttttttttttttggaagggaattctcgtttggcacccagggttggggggatgggaatggtcccgggtccatggacccttcggc

SEQ ID NO: 396382 - DNA, 332 bp, Homo sapiens
agctgagtgataaaaagactgcagtgtgttgaaaggtctaacgcaacttactaggtggacaaagaccacatctgcttaacatactgattgggagagttgtggaatgtacttggctacattagctgaggagagatactaaggatactttttcctctctaagaccctgtgcttagaacctgttgtagaaactacccacaaatatttggaagcatgtatgaaaaacagtttagcacaatatctgatgttattcagcatgaacctaccattacaaatcaccagaattgagcagaagtttagaaagaaataataattaaaaatgcctttaatctaat

SEQ ID NO: 396383 - DNA, 681 bp, Homo sapiens
ccagtagggagctgagcttctggtctgttttatgtcttgacactattcagaagtcaaaaacctgaacagaagagtccagtggcctagttgggggccatacttctggcccttggcaccttagttggcggtcccaccaagactacagataacataggagagataaatctctaataggaaattagagattatccataattttaggagggcaaatgttcttcacatcaagcttgaattaccatttaggttgtatttgtactacttactcttttataaaccatctaattataaggtaatgccccttggattttgtccctcaactgatggaagaacactacaacagagccacaagtatacaaacactacacaccacacaatacacatagcacgcacacacacacactatacacatcacatacacatcacaccacacacacgcacacacacacacacacacacaccccatctgctgaaacctcctggagggtggccagtggcctgtggggttgccagggggccgtgtgtgggaccgggccaggaagggatttcctcaggtgtggagactcggccccggacctgcatgcccctccagtgggaccagggaggaggaggcgggagtgggaagggacccagcacctcgcggggacacagagccagactggaggaggtgggtcagaacataag

SEQ ID NO: 396384 - DNA, 501 bp, Homo sapiens
ggcggcgacctagaggatccccttatgtctgacccaccacatcaagcttgaattaccatttaggttgtatttgtactacttactcttttataaaccatctaattataaggtaatgccccttggattttgtccctcaactgatggaagaacactacaacagagccacaagtatacaaacactacacaccacacaatacacatagcacgcacacacacacactatacacatcacatacacatcacaccacacacacgcacacacacacacacacacacaccccatctgctgaaacctcctggagggtggccagtggcctgtggggttgccagggggccgtgtgtgggaccgggccaggaagggatttcctcaggtgtggagactcggccccggacctgcatgcccctccagtgggaccagggaggaggaggcgggagtgggaagggacccagcacctcgcggggacacagagccagactggaggaggtgggtcagaacataag

SEQ ID NO: 396385 - DNA, 410 bp, Homo sapiens
cttgaattgtaatctccagaatccccagaatccccacgtgttaagggggagaccaggtggaggtaattgaatcatggagacggtttctcccatgtggttctcctgatagtgagtgagttctcacgagatctgatggttttataagtggctcttccctcccaacccccgccctcgactccccgcccattcgctcggcacgtctccttcttgctgccttgtgaagaatgtgtcttgcttacccttcgccttccaccattattgtgagtttcctgaggcctccccagccatgctgaactgtgagtcaattaaacctctttcctttagaaattacccaatcccaggtagttctttataacagtatgaaaacagactcatacagggtgatttaaaagagagttatctgactaaat

SEQ ID NO: 396386 - DNA, 558 bp, Homo sapiens
ttggtagcaagactgagatgaggtggatgcagaaagggagtgggtgtttggttttgatgtggagcactcctcagagtgctcagagagaatggggtctgagtatagggattttggtggagattagctggtaagaggtttaaggaacatagtacgaagacctaacatggattttttgccaggaattaagccagcattaaaaaaaggctaattttttatgtcaagtaaacaactcatgggctatagcaaagccatcagattgcagaatgataataaatgtaactaaagaatgttaagggggagggaccagcagggaatagtatagacaaaactctaccaaaatgaagtttattcaagatttattttgtttaccacatcaattttcagaaagattttacaagaattttgatcagatgttactgtgttatgctctcaaccacaaaaaattaataataaaattcatctgaatagtaaaatccttgagggctgaaacactcttgacatctcagacctactaccaccatgcctagcacctggtagatatccaatgaatgtcaattg

SEQ ID NO: 396387 - DNA, 216 bp, Homo sapiens
agggttttatatttttatagcaaagtattaaaagccattctcatcttaatgtactctcattcagtgtaattacctgaaatttaaaaagccagcagtaattattgtttctctatcccaaagaccagtggttttcaatctgtaccagaaggagcccaggtctacagaggtatctcagaggctgcagaacaggtaccagagcacaaagctcaaggcttt

SEQ ID NO: 396388 - DNA, 657 bp, Homo sapiens
  misc_feature (107)..(107): n is a, c, g, or t
  misc_feature (150)..(150): n is a, c, g, or t
caagcagtaatacagactcagtcaggccagacaactcgagaaagcttttcttgacgcctccagttctactgcccagctgagttaggaactctctacccaagcctgtnatcatgtctatttggttacatttaccacattgatgggtaattnatctatatatgagtttttctccattactagagtcttctatttaaggcaaaaaccatgccttactcatcttggtatccccataacctagcacagttcatggcatgttgcaaaggctcaataaataaaatgaacgagctgagcatggtggctcagctaagccataggcccagcactttgggaagctgaggtgggcagatcacttgagtctgggagtctgagaccagcctgtgcaacatggaaaaacctcgtccctactgaaaatacaaaaattagccaggtgtggtggcatggccctgtagtcccagctactcagaaggctgaggtgggaggatccttcgagcccaggaggcggaggttgcagtgagctgagatggtgccactgtactccagcctgagtgacaaagtgagactctgtctcaaaaaaattaattagttaaataaaatgaatgaagaaatgaagacaagaatgtgactctgcagttcatgctttttgcatataccacatgt

SEQ ID NO: 396389 - DNA, 338 bp, Homo sapiens
aaactcgactctcttctcagagccccttcccctccttgcggcagaaagctaccggggcaaacgggattctccttaacctgagagagagagagagagcgcagctgaaggtcaggagcaagtgaagaagcaggcagaggtcttggtgcctcccactcttcagcaccctccccagctctgtgctagaagacaggcaggtccttagggagcgaggcaacccctggggagagggaggctgcttttcctggtagagctgaatgaattcgtgtctaatgaaggtaattaaagtggttgcatgaaaagcaggagaggagagggggagaggacaggagaggcagaaa

SEQ ID NO: 396390 - DNA, 404 bp, Homo sapiens
ggggaagtgaaacaccaggataagattttttcacatcgttattcttcgttgaggaagtaggggcataaggccgggtgcggtggctcacacctgtaatcccagcactttgggaggccaaggtgggtggatcatttcagcccaggagtttgagatcaccctgcgcaatgtggcaaaaccctgtctctacaaaaactacaaaagttagctgggcgtgggggtgcgtgcctgtggtcccagccacttaggaggctgaggtggcaggatggcttgaacctgggaggtggaggttgcagtgagccaagatcatgctgctgcactccagcctgggtgacagagtgagaccctgtctaaaaataaataaataaataaaaaatgggggcagcaaaccagagactagaaaccat

SEQ ID NO: 396391 - DNA, 931 bp, Homo sapiens
tggctcacgcttgtaatcccagcactttgggaggccaacgtggatggatcacctgaggtcaggagtttgagaccaacctagtcaacatggtgaaaccccgtctccattaaaaatataaaaattagcagggtgtggtggtgcatgcctgtaatcccagctactctggaggctgaggcaggagaatcacttgaactcaggaggtggaggttgcagtgagctgagatcacaccactgcactccagcctgggcaacagagcgaggctctgtctcaaaaaaaaagacatgaggcttttggattttctgtttcttcctttgtcatttttttaaagataggtttgtcgcagaatttcatctaagttatcaaaacaatttacataaatcattcacagtatcctctgtgcagtgatgtccattctcattcctgctctgggccatttgtgttttcttttccccctgatcagactagctaagagtttatcatttttacagatattttccccaaagaaacctacttttgggtccattgatttttttttttctattgttttctttttcattgacttttgctcttttcttatgaatttcctttcttctacctattttgtgttcaatttgctgtccttgttttaggttcttttgatagaggcttagatcattgatgaagaatatgaaagaatgggataatacagttaaaaacttggtctacttatgcccattagagaaaacattcttaagcacgcatggaatcttttaaaaatggacaaggtactaggacccaaagcaaatgtcagtaattcgcagatgataatgtaatgtataaatatatgatatgtaggtaaataatacaaatcacattctttggccagagtgcaattgaggaggaaatcagtaacaaaaagacaattaaatccatttgattcttttgttttcg

SEQ ID NO: 396392 - DNA, 629 bp, Homo sapiens
catcatgtgttcctcaagacaacattctattaaaacaacacataacactaacaggtttttgaaatacatctttttatcttcctgctttagcccaggttgattctagagataaaattgttgcgggaagtcagggaccccaaacggagggaccggctgaagccatgacagaagaacgtggattgtgaagattttatggacatttattagttccccaaattaatacttttgtaatttcttatgcctgtctttactgcaatctctaaacataaattgcgaagagttcatggacacttctcacttccccaatcaatacccttgtgatttcctatgcctgtctttactttagtctcttagtcctgtcagccgagaaggatgtatgtcacctcaggaccctgtaataattgcattaactgcacaaattgtacagcatgtgtgtttgagcaatatgaaatgtgggcaccttgaaaaaagaacaggataacagcaattgttcagggaatatgagagataaccttaaactctggccgccggtgagccgggcagaacagagccatatttctcttctttcaaaagcaaatgggagaaatatcactgaattctttttctcagcatggaacgtccctgagaaa

SEQ ID NO: 396393 - DNA, 459 bp, Homo sapiens
cgcccacacccagcattgctgaggcccatcatcctcctgcagaaaaggaggcatgcagttaaatggagctggtgcttgcttgatagcgcctccttttgtcagaaagacgctgatgtttcaggctggcacacccagaaaaatcccttccttgtggtccttggctgatgatgagccctggatcagagtgtctccaggaccactgagaagctgcagccgtctgggttttcctctgctatgggggatgagttacgtttattccaccatggacaccaagaatgtatgtagatgtattctaaatctgctcattggttttattacaacttttcctggagtcactaagaggtaaaatggtgtaaattagaggttttatcaaagtgtagtaccagaatgccagatgcattactgaagccactcctaatcttaagcaaatgtaaactaggcctcattaaattgtttgtg

SEQ ID NO: 396394 - DNA, 310 bp, Homo sapiens
agcaaagtgcatttccagtctagttcagtgactattaaaattaaagccaacttcaggcaaaacatttccaaaaacataagacaaaaaacaaacacaaagaaaaaggagaaaaaatattccagacttttgaagacatttattaaaatcataaattgatggtatcctctttctcatcttttgatgagtaaaataaagtaccccaaaaattatctacaaatttggtatttgagggttcttttgttgtaaactcagtggttcttgatgagaggaagtttaaagtttatttatggaaattagccaaggtgtcgaa

SEQ ID NO: 396395 - DNA, 327 bp, Homo sapiens
agaacctgtcacagtctccagggataaaacctagcaggggcaggagaaaatgctgttcagaaaaaatagagaaggaaggttcaagataccacgtccctgagctgctttcatctaagaggtgttagagttggaagtgtgtccctaagaattaacgctatcattcacgggccgatttatcctgcagggtttttattgggttagggtttatctactctttcagaccttcaagaatagtaagaaatcatatccatctgcttagggccaccagcaagggacaaaaacaatggaaaccagaggaaaggaaagagagaaaataaaggagcgttg

SEQ ID NO: 396396 - DNA, 653 bp, Homo sapiens
agagaagaggaaagtcgcaggctctccgatcccagggctcattatataccattataccaagccaactcaattctaggccttcccttctccgcaagctccacctctacatcttcaattgcctactagacagtttgcacttggaccttccattgttacttccaccccaaggtgtcaaaagcaaaactccctgaaccagtttttctacctgtcttgctaatttctgttcatggcgtctgtctttcttcaagtcagctaggcttgaaaactctcaggcaagttcaactcttgcctctccctatttcacaggttctgacatttctttcttcatcttgccaattacaattggccttccttttagtctcagcaccaccattttaatactggcttttgtcaccttatcccttactgtcataggctcctaacgtagtctttccttatctccagtctcttcccatcgaaaggcatcctctacaatgcatattgccagattagtctacccacacactgctttcagagtttcactgtcttactctaaattttttcatggttcactattgtccacaagacaagtcaaaatcctttcgtcagaagttcaagagggtctttgaatcttactttccattattccccagtaaaagtctctcttctctagc

SEQ ID NO: 396397 - DNA, 527 bp, Homo sapiens
cccaaaagcattaaattcaacattactcaggctgaaaaaaaaaaaacttccagcaaacaaggaataggcatgaacttctttaatctgactaaacacatctactatgatcctatgataaacatcatacttaatggtgaactctcggatgcgttcctgttaaagtcaaacaacaaactatggaaggctgctatcatcactgtcatttaacatcttgctgctatgatcctagtcaatgaacacagaagggaaaacgggaaggaaagaaaaaaagtaaggaaggaagaaaggaaaagaaatgagaagcagaggattggaaaggaagaggcaaaacagttgtttgcagatacatgatggtctatgtagaaaatccaaaagaaccattaagatgaacatgaaaatggagaaaggtttctgtgtaagaccagatacaagactcaatagcaataaagactcatgtacccattacacatggccgcttttgcttcctctatcttcccacccttttcccccttcatattatctccttt

SEQ ID NO: 396398 - DNA, 980 bp, Homo sapiens
ttctcagtgaggcgcctgcgtggcgacatcaacaagctgaaaatcgaacacacctgccgcctccacaggagggatgctcaacgatgccacctacgactggaggagcggggtgagctggccgacctcttctgtgactcccctcttgcctcctccttcagcctctccacaccactcaagcttattggcgtgactcatttctgtgtccccagcatcacccagccgatatgtttaagttttaagcaaaaggcttttaaacacatctcagaaccccacttccacctttcaggggttctgaaaggtggaagtggggattgtaagattcgtggaatttggtcagagagtagtttagcctctgcctgcactccaaccagatagctcttctttttttcttttctttctttttttctttttttgagacagagtgagacagtctctaaaaaaaaaaaaaaaacaaccctgagattcacattcactagaagggctgtaattaaaaagagaaataataataagtctgggtgaagatgtacagaaatttacagaaccctcatacatggctggtgggaatgtaaaagggtgtagccacttcagaaaacagacggtcagttcctcaaaagatgaaacagctgctgtctgagttagcacttctaccccatgcccatagccattattgggcactaaaaagaaccgaaggacttatatatactaaacatggataaaccttgaaaacgttaagtgaaagaagccggtcacaaaagatcacttgatgattccattcatacgaaagtgtccagaataggcagaaagattaggggttgcctaggcttgggtgtagatggaatgggttaactgctaatgggtgtagggttccttttcaggggtgatgaaaattatgctaaagttagttgtggggtaagggtggcaaactcttggattatttcaatccttgatgtgcatttaatgtaggttaatgggtttccaag

SEQ ID NO: 396399 - DNA, 959 bp, Homo sapiens
ttctcagtgaggcgcctgcgtggcgacatcaacaagctgaaaatcgaacacacctgccgcctccacaggagggatgctcaacgatgccacctacgactggaggagcggggtgagctggccgacctcttctgtgactcccctcttgcctcctccttcagcctctccacaccactcaagcttattggcgtgactcatttctgtgtccccagcatcacccagccgatatgtttaagttttaagcaaaaggcttttaaacacatctcagaacccctgaaaggtggaagtggggattgtaagattcgtggaatttggtcagagagtagtttagcctctgcctgcactccaaccagatagctcttctttttttcttttctttctttttttctttttttgagacagagtgagacagtctctaaaaaaaaaaaaaaaacaaccctgagattcacattcactagaagggctgtaattaaaaagagaaataataataagtctgggtgaagatgtacagaaatttacagaaccctcatacatggctggtgggaatgtaaaagggtgtagccacttcagaaaacagacggtcagttcctcaaaagatgaaacagctgctgtctgagttagcacttctaccccatgcccatagccattattgggcactaaaaagaaccgaaggacttatatatactaaacatggataaaccttgaaaacgttaagtgaaagaagccggtcacaaaagatcacttgatgattccattcatacgaaagtgtccagaataggcagaaagattaggggttgcctaggcttgggtgtagatggaatgggttaactgctaatgggtgtagggttccttttcaggggtgatgaaaattatgctaaagttagttgtggggtaagggtggcaaactcttggattatttcaatccttgatgtgcatttaatgtaggttaatgggtttccaag

SEQ ID NO: 396400 - DNA, 541 bp, Homo sapiens
ttcggacaatgggacccacttcactgcacacatcattaaggggctaacccaagcactaggaataaaatgggaatatcatactccgtggcatccaccctcaccagggaaggtataaagaatgaatcaaactctaaaaaatcacctaaccaaattaatctttgaaacccggttaccctggactaaatgctttcccattgccttactaagaatccgaactgccccttgaaaatatcttggcctgttcccttatgaaatgctctacaggctgccttatctaaattccattactgaccttcctacatttaaagcaaacaaaaaaatcattttctcaaaaaaaatatgtatttggtctgtcttccaccctttcctccatcaggactcaaggcctcctagcgcaaactccacccctcgaattcccagttcaccaacaccagcgcagagattatgtctttatcaaaagttggaaagagggaaagctcaaaccaacctgggaaggaccttatctagtactcctaaccactgagacagcaatccaatggcc

SEQ ID NO: 396401 - DNA, 465 bp, Homo sapiens
ctggtcttgtctctgctctcccctttcccctcaccaatatacctgtggttttttgcagcctgcgaatcgatgctgcctcctgcgccatttgctaagactctatctggacagggtatttaaaaactaccagacccctgaccattatactctccggaagatcagcagcctcgccaattcctttcttaccatcaagaaggacctccggctctgtgtgagtgtgggtcttgggtgacaggatgcatctcagcctgaggtcaggagttcgagaccagccttgccaacatggcgaagccccatctctactaaaaataccaaagttagctgggtttggtggcaggggcctgtagtcccggctccttgggaggctgaggcgggagaattgcttgaacccggggacggaggttgcagtgacccgagatcgcactgctgtacccagcctgggccacagtgcaagactccatctca

SEQ ID NO: 396402 - DNA, 953 bp, Homo sapiens
ctttgaattcctagctcctgtggtctccagatttcaggcctaagatgaaagcctctagtcttgccttcagccttctctctgctgcgttttatctcctatggactccttccactggactgaagacactcaatttgggaagctgtgtgatcgccacaaaccttcaggaaatacgaaatggattttctgacatacggggcagtgtgcaagccaaagatggaaacattgacatcagaatcttaaggaggactgagtctttgcaagacacaaagcctgcgaatcgatgctgcctcctgcgccatttgctaagactctatctggacagggtatttaaaaactaccagacccctgaccattatactctccggaagatcagcagcctcgccaattcctttcttaccatcaagaaggacctccggctctgtcatgcccacatgacatgccattgtggggaggaagcaatgaagaaatacagccagattctgagtcactttgaaaagctggaacctcaggcagcagttgtgaaggctttgggggaactagacattcttctgcaatggatggaggagacagaataggaggaaagtgatgctgctgctaagaatattcgaggtcaagagctccagtcttcaatacctgcagaggaggcatgaccccaaaccaccatctctttactgtactagtcttgtgctggtcacagtgtatcttatttatgcattacttgcttccttgcatgattgtctttatgcatccccaatcttaattgagaccatacttgtataagatttttgtaatatctttctgctattggatatatttattagttaatatatttatttattttttgctatttaatgtatttatttttttacttggacatgaaactttaaaaaaattcacagattatatttataacctgactagagcaggtgatgtatttttatacagtaaagccg

SEQ ID NO: 396403 - DNA, 514 bp, Homo sapiens
tctgcaagacttgagtgtaatttctaaattatatgcactaattgacattccgttttagccatcatggtaaaactatctaaaatagattgccatagaaacacagaaattcttagctatcatgccagtagtctaatatggtttctgtaccaaatatcaaagcatcatcagttctataggattctaattggaggcctttgcacatgaatgtaggtcttaatggaaatgagattttatgcattttccttctgttgcccttattcaaacacaatttttgttgttgttgttgagtttttttgttttttttttttttgagatgaagtcttgctttgtcgcctaggctggagtgcagtggcatgatctcggctcactgcaacctctgcctcccgggttcaagcgattttcctacctcagcctccagggtagctgggactacaggtttgcgccaccacacctggctaatttttgtatttttagtagagatcagatcttgcgttctagatcgcgagcggccgct

SEQ ID NO: 396404 - DNA, 632 bp, Homo sapiens
acccacaagctggcatgcctggaagcattcgtgttgcaaatagacacacacccgtacttatcacattacattacaatccacagtttacataactttcttcctcgatactctctgagcctcacaagcattaaagacacagatcattcatccttgtgtctcagaatagagcacaggacaggtagtaggtgctcagtcagtggtggcctgtaaatggatgaaataccaagaggaatctcatcacccagtcccccaatactaaaacagtgttactacgaaactccaacattagaaacaaaaatcaacagcatgcttcctgtggaaaccaggattcccagaataacactatggcccagaagaccctggtctcttcaggtactgctggcaagttgctctatttctccactcctggcaaaacagagatgcttttgaacttaataaaatagactttcggccaaaaatagcaagcaaaatcagagaagccaaaaaattaaaaataaaacattattttcctttctgtgtgcaggggacggcagaaggggcagggaagcatgttaattagctattctggtgaccacgtatttaagtaacagccacacttaacatatgcgtccaaccagcttcaattccatgat

SEQ ID NO: 396405 - DNA, 530 bp, Homo sapiens
ttctggattttgcatcttttgaatgtagtctgacgatcttttttgtcaacgaagagttgatctgttggctccagtatgaatggaggttttttccccaggtggattttgggttttttgttttgttttttattttttggggacagggtctcactctgttgcccaggctggagtgcagtggcgtgatcacgctcagtgcaaccttgaactcctgggctgaagcgatcctcctgcctcagcttcctgagtagctggggctacaggcacgtgccaccatgtccagctgatgtttttttattttttgtagagacaggatcccactgtgttgcccaggctggttgaactcctgggcttaagtgaaccttccacctcagcttccaaaagtgctgggattacaggcgtgagccaccacgcccagccgattttgtcttttgaccttgtctgtagtgtcagaactcccaggtactaatcaatttctttatgatttctgagttctgtgttctaattatgataaaaacctttctcactgttga

SEQ ID NO: 396406 - DNA, 489 bp, Homo sapiens
aatattaattggtaaggacatgctgtagtgcaggttccctgtggcttatcaattaatacttcacagtttatgggaagaagcattttttaatatgatccctggtggaggtataggaacaagacagttgtatacacaaatgcatttcactggaggatggagctaattacgagagaatcaaatacaaatgtaattttgtatatttaaatatatatggcctgagggccaagttttttcgtagatcatgtactcatgtttaattatggagaatgtttacagcttgtttttatgaagcccttctaatgagagatctaagctaagggattttaaattgaagaggttaaatccccatctacttaacttttaattagttttttgtttgtttgtttgtttgtttgttttttactattttactaaaatccaggcattcatcttactgtttgcataagtacaagcttcactttaggctcaagattgaataaaaatgcatag

SEQ ID NO: 396407 - DNA, 616 bp, Homo sapiens
tgcatctgtaattgttttttaaactgcaaaaatgaattaattaaatcataatggaaataagagtattgtaattttcctacccattacagtgtacataagcatcactataactagtgctatctacataaaatattcaaatcagtatacatattacagtattacagtggtaccatagaaaatattcaaattgaggctgggcgcagggctcacacctgtaatcccagcactttgtgagtccgaggtgggcagatcaggagttcaggagttagagaccagcctgaccaacatggtgaaaccctgtctctactaaaaatacgaaattagccaggcatcttgtaatcccacctactcaggagcctgaggcaggagaatcgcttgaacctgggaggtggaggttgcagtgaaccaagatcaagccactgcactccagcctgggtgacaagagcaaaactccatgtcaaagaaaagaaaaaagaaagaaagcaaatattccagttaaatcaggtcattgattttgactagatgtctaagtgtcatgtacacctaggaggtaatactagaaacaattgggtatacccaaccctcacaccacaatgcaaaagtaacattaattaac

SEQ ID NO: 396408 - DNA, 831 bp, Homo sapiens
gtggaagtcttaatgctcaaaaagtgtgcctgatgcagtctctaaactggcagcctgacggcctcatacaacacggatggtcagtcaaaaaagtctacattagaataagaaactgtccaacgaggtcaagcatgaaaatagggctaggagtctttcatctactcttacaggaatactggtcacataaaatgtgtgggaggcatatcgaaatccagtatggattctattttcattttggaagacatgcttgcccaccccaaattgatacaaggctgggaaggttgggtttttccttaatattagaaaacaagttaatggcaactgttgctcccttctgagctaccaaggggcaactggtacattctctcagcattatctgtaagaatctgctcacaggtttgtctcccttaagactgtcctactctttctctgatattctaaagcagtctctagcaatgaaaaagaacttaaaaatcttttccaccaatgtgctgtgctgaatgagactgccttgctcattcttgccactctatctctactcttttgaaccagtagtttaggtactgctcccaccaatgaaaatctgaggaattttcacatcaactggaaaactatggtttagacttttttcttcaaaaaagtttcattatttagaaggaaattgctaatgtgaatccaacagagaaaaatggttactggtttgagaaacagtaaaaacatgttaattcactcaaaaaaagtaggtgacgaattactcaaaaaacaacattcctgtttccataaataaattcccacattcgtctgttttagttttcttattctaaaaataaa

SEQ ID NO: 396409 - DNA, 129 bp, Homo sapiens
caggaaagacccctgcaaggtggctggcacactcatcacctctcatcaaccaccacctggggcctgtacactcagcccccgcgagtcagcccctggtgaagtgtctgccacagccaaccgccaggagct

SEQ ID NO: 396410 - DNA, 475 bp, Homo sapiens
tcttgactaagatggaccctaacgctaaggaaacaaaagttacctgcggggcagagggttccagcaacttcctaaattcctaaggctacaagaaaaaaacacactccaactccctaatgagaggagcaatcggaccctaactctgatttacaacccagacccttccacttctgaccggacagaggactggccttacatacaccctttcccgatcagcaactgtggccctcagctggcggcagtagctcctggaggctgcggactgtggcctgtggttcaccttctgacttcaagagccaaattccagctcggcccccactaacagaatggacccctcttggccaaaggaaccccagaggcaacttcaaaactgaattctcggccacgacataagggaggttgaacacgcctggcccctcccatttggattttaggtactgatgtcaaagtagacatcacggaagactaatctcag

SEQ ID NO: 396411 - DNA, 621 bp, Homo sapiens
tttccctaccctgaaatgggagaatggaaccaagttctggagaagctcctgggctgctagaactgggtgctggagaaaccaggtatgctgaaggaggttgatgaaacaaacacactgtaatcagaaagagaatccccttcctcctgcagtattccaccaataacttctactgacaaagcttaacattatgtcagctgacttagaagaaatatttgcagggtccagctgcattatccacagaatagtgaatgaaggatggagttggagctgaaagaaaataagctgacaactggcacagtaaagtatttggctccacagtctctacgtatacccttctatacatatttacacttctgtgcaacaatgaaacaactctatatttcacctaaaaagatacagctgtcttaaaatgtaaagaagtcctcagctttgctttacagtgaggagatgcacagtctcagttgtcattattttcatcattggctatatattaaatatttctaaaatcctgtcacagtctctgttacctaaaaataaatttataaaattaacccacaagaacttatatgtaaaataaaaataagaagaagaaaatgttagcttatatgaggggtcttcaaa

SEQ ID NO: 396412 - DNA, 268 bp, Homo sapiens
actacagtgattttttaaaaccatcatcctatcatcccctcatcacccatcttggatggaagctacgcagaatggtaaatcaatgagtccttatggcagagtgcactccgagacaaccgtcagtgaaatacctaagtcgaaggaactgcattttacaaacacaacaaggatcctgacacttggaaagaatcttacagtgttcaggtgcttttccagccattagctcatttggttgtcagagcaaaactgtcaagtaggcatatgaccc

SEQ ID NO: 396413 - DNA, 207 bp, Homo sapiens
ttggcacgagggcccggactaatattggctgtgtgactgctggaccaagacgtggaagtggccctgtgccaggatctgcatctaggccggcatatgccactttctgtatcataggacactccctcatggaatccagccgccacactgcgaggatcagcagccccatggaggggaatcatggcccctgatgaggcaactgaaactcaa

SEQ ID NO: 396414 - DNA, 497 bp, Homo sapiens
tattttcttaaagcatttgggaaaatgtttggcagttactttttcctaaatcgctatgatgaaagcattgcgttaacaagtgtgtcttaaatgaataacatctcattgtttgtgagagcgttacctatcccttagagatacttgtgaaactaatctcagaaagtgattagaattcatgcatgagaaattcataatttaattgcaaattcatacttaatatgtgccaaagattttggtgtatgctagataatcgagcttatgaaacatgatctcttattcaattttctgctgctattaacagaacaccacatattgagtaatttatttaaaaatgagatgtattggctcatggttctggaggccaagaagtccaagatcaaggggccactcctgatgaggtcaaaacattgtggaaggtctcacatagagaacacacactcaagaaagaaaattgggctgaattcattttttaccaggagcctactcccaagataatg

SEQ ID NO: 396415 - DNA, 494 bp, Homo sapiens
cctcggcctcccaaagtgctggaattataggcgtgagctaccacacctggccatccacagctcggttttatacattttcgggagatatgagacatcaatcaatatgtgtaagatgtacattggttccatctagaaaggtgggacaactcaaagcagggaagggggcttccaggttataaatagataagagacaaatggttgcattattttgagtctttgatcagcctttcacggaatacacaatttacgtgtgagaaggggctagaggaatagtcactcatgccttagtctggctcagtgaatctgcacttctacataagcagtagggcagaggaagcaattgagttctgtcctttgtcctgtacttatgaagataagctatcagtttatattgccagggtgagattcagcagagctgttttagggtaaagatcttgaggcccacaaggagttttctcttaggcaaattgtgggagaggtaggtagctttttat

SEQ ID NO: 396416 - DNA, 467 bp, Homo sapiens
atactagaaaatttttaattagagttggatcttgaaaatttttagctgcatgcattcattatgaaaaaaaaaaaaatcggaaaggaggtactcaaagccctgaagacattatccattatcagagtgtgacttgaaattgtttgccgtgcctgatatgagagcatgttctgtacatgtctacctaggcttcacctggcatttacccgagtgaggactatcagtgttccattttatacaaatatctgaacagagcaggctcacatttagacgtattccccatgcagagctacaggcttccaatcaatgagatgtttactagaatatatacagaaactgaaggtaattctttaaattttttgaaaaatgaggttatttggctgcctggtaattgcagcatggtaaaatttgatattgaatgtatttgattgtgtttactgttttcttttagttttaaaaataaacatctt

SEQ ID NO: 396417 - DNA, 354 bp, Homo sapiens
tgttaatgtgtgtttatgttgtgttgacaaaaagtgtaggaagccaagcgtgctggtgtgtgcctatggtcccagttactcaggaggctgaggcagaaggattgcttgagcccaggagttcaaggctgcaaggagttcaaagctatgatcatgccactgtcctccagtctgggcaacagagcaagaccccacatctaaaaaaaatttaaaaaaaattttttaaagtaggattagcagtaatacaatgttatcttctgcctcgtagatagcttgaaaattctgagattctttgctaatatatctaactcttcatccaattcaagatataaaaaacatttttaaattccatgttaa

SEQ ID NO: 396418 - DNA, 210 bp, Homo sapiens
taatgtgcttggttagtatggtgtttggtgtatagctggcattttgtgaatgctagttactatgattttactttttcgtttttccttccactgcccaaaatacttagtgggatgtaatgtgagagaaatagacatgcagatctaagaggaaatattgacaatataagcctgaacaatgtgtccaaaatgaagctctgggattaaataggt

SEQ ID NO: 396419 - DNA, 372 bp, Homo sapiens
acagaaaaacacaattacaaagggctgtcgtagcatgcgttaaaatagtgaaaatcactgactatttcacttgtggtgtcatagacctagtatgatacatagcagatgcttgatacttggtgacttgaaatcaggttcatggaggatcagtggtgaagctcttaggaagttgttgtgcttgatcagaaagtgaagtgaactcacttgaggagcagtaggtgcccccactccggctttccacccccaccggcctgaggctagcgcaactccggcttactggaaggtggaagaaggtaactacctgctagatgcctgggcttttccttactcctgatcagttctgcagttactacatgcatcactgggtaccga

SEQ ID NO: 396420 - DNA, 330 bp, Homo sapiens
ttttcttttatatgttctttagtgagaagctgcaatattcaacagatcagatggtgattaaaccttcctatggcttttcatcgcatttagactaaaacccaagctccaagctccttccaaggcctcctgggattcacgtgatctggctcctgcctcttccttcagctgtattctcaggcctctcccaatttcacctgctccagccatgctgacttgctgttctggtgacctcaatttcttgccactaaggtccttggcattagctgatgaacggccttgaactatgtcccccaaacgtccccaggcttctgttttcaaattaatgaattg

SEQ ID NO: 396421 - DNA, 144 bp, Homo sapiens
tgaaggtacaagagaactgagttcagatgagagataaagagtgagaaagaggtaagagaaatagatggaaaaccagaagattgtggtacacagaggcaaacaaaagggagacagtgaagaagcaccaagaaaagagctgtcccc

SEQ ID NO: 396422 - DNA, 577 bp, Homo sapiens
acgtgtagtcagaaatcctcctgcctgagcctcctgagtagctgggactacaagcacatgtcaccacgtccagctaccttttttttatttttagtagagatgaggttccaatatgttgtccaggctgatttcaaactcttgagctcaagcgatctgctcacctcaacctcctaaagtgctgggattgcagatgtgagccaccatgtccagcccctgcattttaaaagagagtttttacagaatattagtcttatgtcattgtggggctggctaagtagtctctgttgggctgtcatttcaatgtctgatgctggagcttgaagtctacgggaaaggtgaagttaagaagagaagatcatgagcaggctagaacctgtgggcatgagctggaaccccacaaggatggaataaaattgtctttgactttgatagtgtgggtatcctgcagaatctggggccctgtgtcatggacctaaccaacgtatcctggctcaggggttggataagctgacaaaagctccaggagagggtggagcagttgtggcctagccactgctttatgccaatgaggcaagtt

SEQ ID NO: 396423 - DNA, 373 bp, Homo sapiens
tgttagtctgttgtgtgttgctgtaaaggaatacctgagattgggtaattcataaagaaaaatgatttgtttggctgatggttctaatagctggaagtttgggcatctggcgagggcctcatgctgctttgacttgtggaaggcgaagggaatcctgtgtgtgcagagatcacgtggagagagaggaagcaggagtggtgggatgtcaggctgtttttaacaaccagctttcttgggggacaaatagagtgaaaactcactcactgcctcacgccagggagggcattaatctattcatgagggatctgctcttatgacccaaacacctctccttgggccccacttccaatgctgggatcaaatttcaacacgc

SEQ ID NO: 396424 - DNA, 327 bp, Homo sapiens
tcatcgagctcggccctccgtcgtggcttcattatgaataactggaaaagttaaacaagagatttcatccagaaaagaaattttccacacacacaaaaaaacaggtatttccaacaaagctgccatatcacataataaaattatcttgtagaaaaaagcattaacaaagtgttacaacattaaatatccatcttaaatttacttccttaacctctcaaagcctatatcccaaacaaagttacaaaaaaaaatcccagtagtagagcatatgatctctaggtccatggaagagacaccagagaatcacaactcatctgcaacatacag

SEQ ID NO: 396425 - DNA, 515 bp, Homo sapiens
aggtcccttcctcctctttcctgtttggcatggtcccgaacttcctgcaagaccagcctcaatattcttccttttgagccttttctggcagtggtggccccaaatcctggtcccaacaccagggtggatgggtagctttgacttcagtgctcctaacggagccatggatgcacctctacttacagtcatctcattgccttggaattaagcaccccatctcccctaccctaccaccccctggcctccacctgtaagccagtgtcaaccaaggttggggaggtagagagcagtccacctggtacaggttatatataaaggcatgcattatctgtagcaaactttaaaaaaagaagaaatttaacaaaagtcagtctctttgttcattgtcacatgtgcaggtaattctgaataatgtcagggataaaatattctccctcgcaagggcaaatgtctctttctcacaccacttggtgttttgctcctgtggatacttcccagtttcttctgttcaggaa

SEQ ID NO: 396426 - DNA, 496 bp, Homo sapiens
tgacagcccactacttctcagtaaatctttgtcttttatttttcataagaatttgaatgggcatttttcttttgcaaacacaagtgtcctgatgaaatactaattttcccacccttcccaacctccctcatccttggacttccaggacaatgtaatgagcaccaaggatctgaactctagctcttgttgggagcttaagctcccaacaggacagttttaaaagctttggagactgagtccagctctgtcgccaggctgaagctcccaacaagaaggaagacagacttcaagagttatttgagaagctctgctccaatggagatgatttttgaggaacgtgattgtttattcttgctcttgtacagaggcatcttctgtctaatgctcctaaattctctaaaaagtaaccttactttgaggttatagtgagagccaaagtcctcttcatggcttataagagactttattatctgactgccctttcattgtcttgggg

SEQ ID NO: 396427 - DNA, 115 bp, Homo sapiens
tctacaactcttacaatcatttttgctgattctgaaatgcatgttaaggggattaatgccacactctgacctctcagttactcaactcccttaaatccattgatcacagcctcag

SEQ ID NO: 396428 - DNA, 390 bp, Homo sapiens
tctggatggatcaaccaggtaaagattttttgtcagccacatgaggcccccatctatttagctcctctgattttacatgaccatttcagataacagaccccgttaagaatgtatcaagtactactgtaactcttggccaaattgctatttggcaccaaatcaatctttagttggtggtgagactccagacacataaacagataatcttctacggaatactttcactgtggaaagagaatcaggaaaggctaaagggatgtttaaaaatcagacatcaggctgggcatggtggctcacgcctgtaatcccagcactttgggaggctgaagtgggtggatcacctgaggtcaggagttcaagaccaggctggacaacatggcgaaaccctgt

SEQ ID NO: 396429 - DNA, 434 bp, Homo sapiens
ctatctgtgtctctgagtatgtgggaaaaaaaaaaagttaatccaagcaattcattaaagaccattggctttagtaagaatcacttcttccagcctttcttctcaaaatctgtgaatacttcttgcagggaaactttattgtttttttctactccaaaacattatatatgataaaaatttattttaaggcattcatataaatagactggaaagtacatgcatcaaaatatttcactgtttggaagactggtgttttcttttgtgcttgtctctgttttccaaattttctgcaatgagcttgtgattcttctgaagttagaaattctaaaaaccaggctgagacagaattgcttgaacccggaaggcggaggttgcagtgagccgagatcacgccactgcacttcagcctgggcaacagagcgagactccgtctc

SEQ ID NO: 396430 - DNA, 120 bp, Homo sapiens
agcagatacttattaagtattgtatactaggtcttagggacacaggtaaacaaaacctaatctctagtcctggagctttacattcaaattattcctctaaaatatttaacatctcaccat

SEQ ID NO: 396431 - DNA, 450 bp, Homo sapiens
cagatcatttgtgctgtcagatggaaattctgactcagccattttctctttcccaataagttacccactttactctgtggtcgctgataatgatgtagatggtctatgatattaaagtagtacttctgatgtgaggacttatatcatctcagcattttcaaaacccgcttgcctgcaatctggtgtatctgcggttagccataacatatctacttgccaaacaagtggtttaggttaccggggttttcatttaactttgaatttaggggattagaaaaaaaaataactcaggaacatactttgataaattacgtgagaatgaaatgttgggattcaatcagttttacttttcagaatgattcttcgcagtgtgtttgttgaagtgtgcatgtgttgttggcacacatttaaaacttatgcttattacccttgtaaaactgttgatgatgc

SEQ ID NO: 396432 - DNA, 219 bp, Homo sapiens
catttggccccatatacatatatagtatttatatttttatagacagggtcttgctgttgctcaggctggagtgcagtggtacaatcacagctcacgatagccttgaactccttggctcaggcagtcttcccacctcaaccttcccagtaggtggggctataggagtgacaccatgcctggcttaatatatttgttaaccagaattaaaaacaatactat

SEQ ID NO: 396433 - DNA, 334 bp, Homo sapiens
gtaaatgtaggattcgaatccaagcctgtgacacttcaaagttctctcttcccacacagcttcttgaggtccctccccaccctaagattggcaggaaagaagattctatatctgaatccacaacaaatgctgtttccaagtggcccttgatacggactgatggagtcattttgtgagttaatgtgcttactaagtgttaggaaaactaaagtgatgtgatgtcttaaaacatttaattagacctcaagatgggccacagaaaaacgcaatcttcagctacctagacgccacacttcactgccagatcacactctgtcttgttatttcccttcac

SEQ ID NO: 396434 - DNA, 498 bp, Homo sapiens
ctgtcctccgtctgcagacaagccaaggtgtgaaagcctcctcgctggcccaggagcctgtcattgtcctccagcagctctagcctggatgcggtcccagagataaatcatatctctttaaaaagccacagtggcccattatttctgcttgaaaacacccctggctctctgctggtgagctgggtgacaggccccggctgttgtgctcagcgctgcatacagtcacatcagtctgtcgacttgtgtagtgagcaagctggtagcttcagatggcgtgcacatgaaatcccgtcctggcatccaggacttggccgggggttgcagggagccatgtctcctgaacaggtagtaatattttacagtccccgcctcatgcccatgcgaaatgccctgttcatacctggctacatgggcagtagcaaaaaagacacaatggcaatccccgggctaccttttgcaatattcagcaacactttctcaaagaaattgcaatcttga

SEQ ID NO: 396435 - DNA, 378 bp, Homo sapiens
aaaagttcagaaactgcttaaattagaatttaaaaatcatagccaaaattctagatgtacacaaaagtacttctaatgagtttagcatcatctctggtttagaggaggtataaatagcattggactgcaatgctaaattctctataatgacttttctggatcagcatatcatacctacactgacttgccctaataaataaaaacaatgagtcagattatgtagaattgagatatatggaagataactctttaaaattatttgtggccaggcaggcactgtggctcatgcctgtaatcccagcactttgggaggccgaggtgggcagatcacctgaggtcaggagttagagaccagcctggcaaaaccccatctctact

SEQ ID NO: 396436 - DNA, 484 bp, Homo sapiens
aggctttcagttatgggctgagttttttttttttctcttgcatcattttgaagctatgcaggcatatttccagattgcaacaaaattttattgtgaattaaaataaaatcaccttttctatgttcctttggaaaggaaggaaaccttgacttaaattctgagtgccattttcaatgctatttacacagaaatgtagatgaccaaaataaatgtcctcttggttttattcagaaccaggacttaatgctggttaaatacagtcctcacttgatatgcatggaggattggttccaggatccctaaggattccaaaaccctcagatgctcaagttccttatataaaatagtatagtacttgcatataactggtgtacttcctcccgtatactttacatcatctctagatgtacttacaatacaatgtaagcactatgtaaatagttgttatactgtatattaaaaatttgtatttttaaaaattgtg

SEQ ID NO: 396437 - DNA, 443 bp, Homo sapiens
ctgaaacccagcagggcagacattaagccttaaagctaaatctccctttactccatgtcaagggagagcccccatgactgttctcccaggttagagtctgctgcctgtggcttttccaggctgaggatgccagcagctggtggatctacctttcttgggtctggtctggagagtagtggtccccttcccacagctgcactaggcagtgccccagtggggcctctatgtgtgggatccaaccccacatttcccctcagcactcccctagtagagtctctctgcaggggctccatctctgctgcaggcttctgcctgggcacctgggctttctgatacatcctgtgacatctaggtggaagctgttaagcctccttcactcttgcattgtgtgcacctgcaggtttaacaccacgtggaagctgccaagtcttacagattgtgcc

SEQ ID NO: 396438 - DNA, 639 bp, Homo sapiens
cagctaggtttacttaggagctgagtttttagtataacttaattagccacacgtgactaccatactggatggcaaggatttagaagtgcaagttttaatacttcagatagtaataacagaatgtttttcctgaccagtcttgatcagagtttcttcccattttattctatcattagaaatttcattttggtccctagataaggtctattttgaattgaaaactactcaaaaacggaaaccatcttttaagatgaggtaatactctgaaaagtatttggctataagcttccactcagtaattgttgtctccattgagactacacttaacagcttctattttgctgtggggttccccccctcattcccctcctttttccttctctgccttctgggatgtatctcatgctatgggtatttaattcagcttgttatatttggtgaaaagtctgttcagactgattttgtggcttcctcatattaatattttttgaccatcatatggtttctaatttcttgtgttcctctatagaattagatccttatcccagttattaatttgtttgccctttgttttatgacaaaatgctttttttgcatcttttcaatgacttcattttgccagtaaggtttccatgttta

SEQ ID NO: 396439 - DNA, 269 bp, Homo sapiens
aaaatttggtgtaccacctggggtctggattatttgagagaaggttaggggcatttgaaaggcaaattgtaaagctcagttaagtattcatgatgaaaatgattaaatatatagtatgaaattctaaggaggcatgttgtgaaggtaaatataaataatagaaacacattaagggctgacttgtttcagtgcttttgagttttattttaattaaatggttgcctcatttaaacttaattacctaaaaacaaattaagtgattattattg

SEQ ID NO: 396440 - DNA, 321 bp, Homo sapiens
gctgcacaagagttattgacagaacggtggggtgctataattggccagacctgggtcaaatgcccacttatatgcccaagagactctactctgtaactgaagacatgttgggaaagcttacctggcagatccaaaggatacttgtcactgtctgatgtagtgacgcatggacaaaaatggcctcagcatcttccagtctgttctttctcctgtatactcagtcttggttagtagcaccaccttccatctgattgctaaagccaaaaatctctgtcattctggactcctttctttccctcaactcacacatttattcaatca

SEQ ID NO: 396441 - DNA, 497 bp, Homo sapiens
caccagggcccgtcgtggggcccagataaggaagggtggggaggttgtcagggaacagcaggtcaggtggtccagctgctgctgctgaggggagagggtgtggtcaggacccctccctcacttctagcccccagagaattctgagaaatttagttagagttttttactttgtgacacaggggaaaaaaaaatttatttctctctgtctggagtgaaggagaggaagattgtgaagtctagggtgatgggcaggttcacctgacggattctcagctccaagggcccccattacagagcaggaagctcctggaggaagccaaggaagagggagctttgaggctgggttttgagggacgcataggagctcgctgtctcctgtcctgtaggaattcccagcttggagagggaggtaaagctggacaccaaccctcacggccccacgtgccacgggcccccatctcacccacactcatgagcagcctaccatgcctgctttt

SEQ ID NO: 396442 - DNA, 250 bp, Homo sapiens
agcaataatacctcaatagcagagggcacttccatgctcagatcttggctgctaaacactagtctccactaaaaagaaccagggtgccttggagatcctagggtcgtggcaagagaagtgcaagatgagcctggaacatcttgttgtgccataaagtaaggaaacactaggagaaggatggagatggatcaaaaggacacagaggccctccagaaggggctcccactggcagtgtttgggacaattggag

SEQ ID NO: 396443 - DNA, 623 bp, Homo sapiens
tacaggaaactatatatcaaagagataatctgcactcgcagactattcacaatagccaagatacggaattgacctaagtatccatccacaaatgaatggacaaagaaactgtgctacatatacacaatggagtattattcagccattacaaaaaaaagaccaaagtataacacccaaaactataaaacttatagaagaaaacagaatttcaggacatgagatttgacaatgatttatcagatacaacactaaaagcacaggccatggaagcaaaaacagacaaacaggactacatgaaatgtaaaaacttttatgcatcaaagaatgtaatcaacagagtaaaaggtcaacctacaggatgggagaaaatatccacaaattatatatgtgataagggattaatatccagaacataaaaagtactccaacccccagtgaaaatggcttttatcaaaaaggcaataatggatgctggtgaggatgtagagaaaggagaatccttgtacactgttgttggtgggaattatcaattagtacagccatcatggagaacatcattgaggtttctcacaaaaactaaaagtagaaccacaatatgatccaacaatcccactgctgggtat

SEQ ID NO: 396444 - DNA, 514 bp, Homo sapiens
ggactcattagataacctcagttatcaggagcttcttttgcatgaaaggctgtctagggatcattcagcattggacaggtcatgtcgagggatgaaaagaggttggttaatgagtacgtacatagaggtagctagaagaaataagttctagtgtttgattgcacagtagaataactattgttaagaataatttatcgtgtatttcaaagtagctaaaagagaaatgagatgctcccaactcagagaactgataaatgtttgaggtaaagaacattcttggccactcattttcagtctttattacaaactttgtttcttcagattgtcccttaaatattggcaagatatacaatttgtccaggtcccaaagctagaggagacagaacctggactccacgcaatttaaccatgctctcaaccccacattaagctccctttccaggatgccatcctcagcctctgctatgggctgaattttgccacctaaccccaaccagaattcagatgttgaaat

SEQ ID NO: 396445 - DNA, 385 bp, Homo sapiens
tgagatggagtctcactctgtcgcccaggctagaatgcagtggtgcgatcttggctcattgcctcactgctacctccacctcctgggttcaagcgattctcctgcctcagcttcccaagcagctgggactacaggcgcccgccaccatgcctggctaatttttgtattagtcggagatggtgatggggtttcaccatattggccaggctggtctcgaactcctgaacttgtgattcacccacctcggcctcccaaagtgctgggattataggcatgagccaccgcatctggcctaatttctaagtgagagaaaatggtctgagttttctgaaggctttcaagacatagaaaggctttctatgccttgagaaagcccagaaattgc

SEQ ID NO: 396446 - DNA, 523 bp, Homo sapiens
gcattttgggaggccgaggcaggtggattacttgagctcaggatttcaagaccaccatgttgcccaggctagtcttgaactcctgacctcaggtgatccacttgcctcagcctgagattacagacatgagccactgcacccagccttatattgtactactaagatgcaaaaagtacctttaagtgagcgttcgtgtatttatattctgcaaaaccaaaggcaagacttaagtcataacataaagatgacatatctacagggaggaaaaaagataataaagttcaggtttttacatttctaaggatcttatttaattcagagatcacctctggaaaccaggtaacaaattacgaagggctttcagactcattgtctcatttgatcttagcaaaagccctgtgagggacagtgaagggaaagactccctttgggatgatcagtttagggtctcaatgcaaccaataaagtatggaggggtggctaaatctcaggtcatctgagtttcatttcattgcaatcattg

SEQ ID NO: 396447 - DNA, 207 bp, Homo sapiens
gggacaaaatgttcaaaaattagattgtggtgatggctgtacaagcctgtgagtatactactcacatggttaggctttgtgtccctacccaaatttcgtcttgaattgtaatccccagatattgagggaggaacctggtgggaggtgactggatcatggggccagttttccccatactgttctcatgatagtgagtgagctctcacg

SEQ ID NO: 396448 - DNA, 164 bp, Homo sapiens
atgtgctgaattcttcctgttattggcaagggttctaataccttacaaaatattccatgcacagactaaacatcaaatattgtctagctaattattcaagtaagacaaagatggaaattattaggcttactaaaagcagcatatatttagcttcagtagattct

SEQ ID NO: 396449 - DNA, 631 bp, Homo sapiens
acaccaaccatcacagccccccaccaaccttctcccaaccccaaaagcattgtccagggatatagattttaccaaaggcttcctgggaagacgagggagcaacactttagattaaatgtgatcagactttcctattagatatggctcttctgtctcttgttatccccctgacagctctgccataaagtcccttctcctcatccttcccaaacaggctgtataagtgctttgaggtaattaaactctttcctccagtttacaaatatcacttaacaaaaaatataggcattcagccagattaaaaaactggtattcagccaaatagtgacaatcagttgttcttcaagtttttccctttgggaccttggttgttattgcacaacttttattagcaacaatttttggcgtctctgcttaatctacaagttttcgaaatggaaaagagtatcttgcagcttcattttcatgagctaataaaaggggtattggaaggaatctaagaagtcaccattttaaaactgatgatatgttaaaataaggagtatgcagaaggtagagacttttaactgatgataaaaatggtgtttcacaaaatctcatccttaacaaccagaagttctcagtttagggt

SEQ ID NO: 396450 - DNA, 486 bp, Homo sapiens
ttgtactattaaacacaatgacccactcctattattaaaacacaggttttgctggaaactcaaaaaagacttggctctgctggctcacagggaatctgggctccgctcttccaaaacctttgttctccagatgtcagtgcaaagttatgaacagctctccccctgagctaacttaccgagcagtaagtgaggcaagaaaggccactcactatatttctcagcctccatgaagtcgtcactgggagaggagccaagagggagggggcaccttaggagacaagatcgtaactcaccgtcatccggggaagtggagaggaagtcagggaactcgtgtcaggagtggagagctaagctcaatatggacaaggacagagaggggcacctgggatgggagaaatgtggcatcaggacaactgggagtgaaagtttaactgccctcaaagatggctgacaaagatctagcattcctagtggacaccaagctga

SEQ ID NO: 396451 - DNA, 248 bp, Homo sapiens
cccagctgcctcttcctttctaacctttctaatgctttttatttcttttgtgcctgatttcactggctgaaaccttctatacaaggttaaatagaagtgagagcagataatgttgcctttgtcctgatatttggcagaagcattcagtctttcaccaatacatatgattttagctgtaggtttttatagatactctagttgaaggaggttctctcctatttctagttttttgagtacttttatcatgg

SEQ ID NO: 396452 - DNA, 390 bp, Homo sapiens
ttgcctaaggactgtccaactcctcatagaacactttagtcctaggaagcatcaggggagtggggttgcaatttatttcactttatttctgctgagttgccttgggagtctgaactttgatctgggtgggaatcagagaatggcacgggtcagttcaagctcttgtcagataaaatgttctcccttggctcaaagaagaggcctgaactcacttcccgttaacctaatatctgtctcggcacccctgttccacggtgatcccttctcccccaccctatttaatcacctttcctggccactgctgtcctggccatgcagcaacagctacaacccagaagacaggcaggtattgcttcccttcagctactatcttgtaactccctcttaatt

SEQ ID NO: 396453 - DNA, 531 bp, Homo sapiens
taagtttatctagggaggtaatagcaggaatgtcggtttttaggtctatgatctcaggtaacagtataaaatgattatcagattcctttggataatatatttatatttggatagtaaatttagcttaaaagtatatgcttaaggtataatttgatcaattattttctgaatgcatatgatcttacagttgcccatactgaaacccattttcaattttctgcctttcaggtagagtcttgaatgattttcctaaagtttgaatgattttcctgttgagtttcgtgaatgattttcctgttcagttggcaattactcatttgaaaacgcttgggcctcatttgctcataaatcatttccaaagagaatttcagaaatggaagggtccttagagattgtctagtccaacagtctatttcataaacaagaaaactgaaatacagagattgagagacttgtccaagttagtcttcgagggctccaccttgactttcttacatgctctcacataaaccctctccctgccactttcct

SEQ ID NO: 396454 - DNA, 207 bp, Homo sapiens
ttactattccattttgatgataggggttggtgtaaactaatggacatgctctgccctaatagcagaacaatcttgggaaagacattgaactatcctttgcatcaattcttttatatgttaagttctgtcattcttctcttacagggctgttgtgtgtgaattgaatgagttgaagtaaaagttcttggtaaagtgtaaagcattata

SEQ ID NO: 396455 - DNA, 492 bp, Homo sapiens
atgtatccaatatgaccccacttgtgtaaaactgtgtatgtgtatttgtactaacattcacatttctctgtatgtatagaaaagtctggaagtgtagccatcaatgtgttcattatgtttacttctgagggatggaatgggagaagggacaagtgtgcaaggcaaagaggggacttttaccagccccagcgtttataaagatcagtacatgactaatctttaacctacactcctcactccatattattttgaagcaaagataaaaattttaatagatctctgttgcttgaatatttttataataggtctttattatttgataatggttgtgtttactgctggaaactgttaatagatgccgtactcctaatagcaatagctgtcatttcctattacagtgtgaggcactgttctttttttaaattcatgtcttacttagattttgtaggtatgtttaataaatttaatacccattaaatttaaatagatgca

SEQ ID NO: 396456 - DNA, 855 bp, Homo sapiens
agatggtggcaagggaacggttgtaatggtgaaccatgggacgtcagtggggcctgagaagcaggctagctcgagagagcccgggctgggtggcattgagctcagcagtagagcagtgggcaactaggctccctgtgatgccatgcagggcatttggtggaactgttgcctgcgatattgggaaggtgggctgtgtattcctccaaacctgtaatctgggtctggggacatgagagacactcatagtaaccccctgagaagtagcatggtgagatggctacacataaggaagctggagtctctgttcaaatccaggctttgccattttctccttggatgacctggcagcttacttagcctttctgggccttgatcccttatcttcctggggccatcacgaagattaaatgagatactgcacatgaagttcttagcccactggtagacacatagactcaactcagtacagatgctgttgctgcctggctgaaaacagactggggattccacacatcctgctgtccggagtctctgcgtgggagaggacaggcctttttcctcccatctcacttcctctcctcctccagccaccagaatacgacagcctgacactccatgtccccaccgtatatgggaaaggaggtttcccattggccgcaggcagagacaagccacagtgagatgagcgctttggctgctgccatggcaaccagcaatgaccagacttcaattaggaaggaggaataaaaggcatccaattaggagaagaaaataggattgagcctcttctcgcttaggaatgcccagggccaagggaatgcttcgctggaggagcccaggcttgccaaccccttc

SEQ ID NO: 396457 - DNA, 538 bp, Homo sapiens
caatgagctggtgaattagtcactacagacagcaggaattggcaaatgttttttttctgaaaagggccaggtaaatgttttgggctttgtaggccaagaggtaaaatagagtaaccagtctcctgaaaggctagagtccttttctaaattaggagttaaaaatgccattcttagctcacaggccatataaaaatgggtatagggctggattcgacctgtgggctgcatgtggtctgctgaccctcagcatacagcactgtgaccagtgaacaaattaggaaaccaaggctcagggaagctatgtgactctacacaaatgacattttccttagcctatgtggctgatacgtgggcttccaacttccatcatgatggctcaacctaatacaggtggttctcagcttaccatggggtttcatcctgataaacccattgaaagtagaaaatacatttaccacttacaatattgtcatctgatgtaaccccaacataagttgaatgtattaaatgtgtactgcttttatacaattgtaaagtc

SEQ ID NO: 396458 - DNA, 494 bp, Homo sapiens
tggacctccctacttttgtaacataatattttactgtagtgccctatggtgataaaccttgagtatctaaagttgtcttaggattattttctagttgtataaatatttttataataaagacatttggtataagcttgatgggttcttaactaatatattaagtaattacaaagattcatttttttacaaacttttaagctattttaataaaatggctatagacctcactatacttctatttatctgtgcattaataaaaacctgttaaaatttctttagtacttctgaaaaagtctagtcaaataagatcactaaaattaccagaaaagctttgaaatactgattgcagattcatttcaaagtagatttaacacctttcaggatctggtgtttaaatcatgaatgtcttcaccaacttcagctctgaaaatataaaaattttagccagtgctggctatagttaaacagtagtggtattatttgaaaaaataaaa

SEQ ID NO: 396459 - DNA, 782 bp, Homo sapiens
  misc_feature (782)..(782): n is a, c, g, or t
aaagtcataaaggagaaaataatgtaattattacataggttattaactaggctaatacatactgaaagattgccgtgttaataatggagattcaacaaactgcacaaagtaacttttttttctgtcttctcagtgttttaagtggtagatagcagcaaaaaggtcaagttacagttaagtcttgagactttgataagccacagactgaactctacctacatgttaagtagttaagttggcagtattgatgttgacttaattgctattaaaactatatcttttgccctttgaaaaacccagggcatttggatttgccctaaatttaagcacatctggtttttagtttaaatcctttttatatttagatgatttacttgtgagaagacttaactgtttttaagtataagtgagcatttctaatgcactaaaataggattgctttacaaatcagttttgaattcctctttagaaacccttgtggagtaaagtgaggtactatttacaattagatttgttttgacttcagtccatttagcaacttacatttgagctttatttcaatcttgacctattcttatcggagccttctggaccaaaatgcttctgcacggtcctacatccatatccggccaaaaacacaacgagacgacacgcgcgggacaccgtggcaaacaacgcgggaaaccaccacaggatcgaaacacagcgcacacaagcgtgaagaagagccaacaataacagcgcagcacaaaaggcagcttgttatctcagcaggcgacgcn

SEQ ID NO: 396460 - DNA, 134 bp, Homo sapiens
tatgacatttgggaaaatgcaaatctatgggggatagaagttggtgggtttccagtcacccaaactcttgtagagagcatggagggccagggaaaataaaatgatagtgaagctgtggtcagagttttctgatg

SEQ ID NO: 396461 - DNA, 472 bp, Homo sapiens
cttaagctctttgtaccattcttaatgtctatatgattagagaaaaaaatatgaagataagcaggaagacaaaaaatctgcttcagagcagaaactaattgtagtagctactataatgtgtctgcttcatgtaaacacagtgatcctgtttcttgaatggcgactcactctattccttacagcctgcctcctttcctcctgaaaccagtgtgagccatcactagtgatatttaaggtgccaaatgcaatatccattctttttctttaccttccataatttctgactctactgatgctctcttctctattggtatctaggactcagtattttcctggttttctttcttttttggatgctctctctttctctgatcacttctctgattcctcttcttcattctataccataaacccaggtgcactctaagatctatccttggccctgttctcttcctgctctggtaatcttaca

SEQ ID NO: 396462 - DNA, 740 bp, Homo sapiens
ttccgcggtccagggatgtggcttttgtgactcagccaacattcctattaattcaggtggcaacagccttcattgcttgccaaaatttgctgcccctgaggcaaggttgcctctctcagggcatgaggagagagagagatggtgaagtccatatcaggttgccaccctgattaaaaaaaaaggaacatctaggctcttaattttgagccactttttaaagctttttgaaggtctaatttgtataactgacatgcaacaaagtacacgtatccaaagtgtacagtttggtaaagccatgaaaccatcattacaaccataaaaatgaatttgtgtgtcacccatatatttaccttgtatctttttataatctttctcccttccccagctcttcaggttcaactgatttcctttacagtaaattagtttgcattttctggagtttttactgagatacatacacacacacacacacacacacacacacacgtatacgcatatacgtatacgtatatatatacatatgtgtttatatatgtgtgtgtgtatatatatatacttactggttttcttcatgctgtataattattttgagattcaaaaatgatgaatctttgtattgctgagtatcatgctgttctatggataagtcagtgtttatccatgtgtttagggacatttatattatttatagatttttgtatattacaaataaagctgctgtaaatacttgaattcatttc

SEQ ID NO: 396463 - DNA, 231 bp, Homo sapiens
gggtttcggcaaaggtgggcacaacgttgacaaagcgccggtgtactgcatccgccgcttagcccgacctgtcttcttcttcttcttctcctgttcggccaaaggctgagcctcccactttaaccagccaaggcagatgccagagggtctggatgaggagagcctgcctctcgggactgtctgccaccagctcactacctctctgtccctgagacttttctctttggccaa

SEQ ID NO: 396464 - DNA, 702 bp, Homo sapiens
gccattcaccttaggcacgcgtagagaagaagcggggtcctgcacagggttctttgctgctcaccaccctgtgtttcttggaatttgggaacaggcacatgggaggctgaatcgtggtcttcaaagatatccgggtcctaatcaaaatttgtaacttctagcctatatggaaaaagtgcctttttggacatgattaagttaagaatcttgagatggggagattacgttggatcatccaggtgggcccaatttgatgagtagtagccttataagagggaagcagaaaggtcaaaggaggaagcaggagatggaatcgtggaagcaggaggatgtgaggagagagtcacaagtccagggatgcaggtgcctccaggagctggaaaaggcaagaagacgcatgctctcctagagcctctggaggaaccagccctgcccacattgtgatgttaacccatgaaactgaggctggacttctggcctccagaacacatttattgcaagacaataaatgtgtgttgttttcagccatgaagtttggggtaatttgttatggcagacccaggcaactcctgcaggtggcattcccgttcacacctgtgtatggtgcctgccagcacagactgtttacctactcaatggctgatttgattaggcacagtttctcaatcctgataaaaccaatcgcttggtgaattatgcgcc

SEQ ID NO: 396465 - DNA, 525 bp, Homo sapiens
cgttgtgtttgtcgggaagatagacgagggacagagaatactcaggaaggcttcacagagggagatgacagttttgatgagtagtagccttataagagggaagcagaaaggtcaaaggaggaagcaggagatggaatcgtggaagcaggaggatgtgaggagagagtcacaagtccagggatgcaggtgcctccaggagctggaaaaggcaagaagacgcatgctctcctagagcctctggaggaaccagccctgcccacattgtgatgttaacccatgaaactgaggctggacttctggcctccagaacacatttattgcaagacaataaatgtgtgttgttttcagccatgaagtttggggtaatttgttatggcagacccaggcaactcctgcaggtggcattcccgttcacacctgtgtatggtgcctgccagcacagactgtttacctactcaatggctgatttgattaggcacagtttctcaatcctgataaaaccaatcgcttggtgaattatgcgcc

SEQ ID NO: 396466 - DNA, 477 bp, Homo sapiens
gcagctgcttttgattgaccatcactgcaatcttccccaggctttagatattttttttgacaacatccagatcagaaccaatttaattttgaaagatagctaatcaggtaatttgctgtagtacctctcttgtttttgattttgtaaaggaggctgggaggcttgcacgaagaaaccagcactttattgaagattacgaattgacccttcaggtatcataaaatgtttacctataatctccagaaacaagataacttctgtacattcatttcagcaacttgagcacttcagagagctgtgtgaaatggtggtacctatttacatggggaaagcttgaagctccaaacatttttttattatgtgatacttcctgatccccttaatgtttttagtgacttacgtagataaactctcaattttgaaggagaggagttgaacagtctcataatcttgattgcagtgatggtcagcagcatc

SEQ ID NO: 396467 - DNA, 370 bp, Homo sapiens
tttattataaaagtataattattccacaggagatttaagttaaaaaaaaaaactggttcactatagccatgtgatcataatttgtttaattaggaaacggtataaaaaattgccttgcggtaacggaattgattgagatttgaaaccgaaaaattcacgacttttgataatgaaagtgcctttttcctaattgtgattccagagattattgatttccttagaagtagaaaattttgactgtaccagcctaggaattctcacttgacatcatttagaagtattttaacttcaaaggatgtgttatttgctgaagagtggccactgggacgcaatatggctcttgacattttgaacagtgttaaatgatggg

SEQ ID NO: 396468 - DNA, 210 bp, Homo sapiens
cgcacccagccgcaaggcctattccctcctcaccttcttgtttgatgattcaaaagtctgggccttttcctgggtggtttttgtgagaaaggagtccttgctttcctagagggaggagctttatccaaactctgcagacgggctgagcactccctgtgcctgcgggcggtgaggaaatccaagtgccaggtccctcctatgtccctcctt

SEQ ID NO: 396469 - DNA, 230 bp, Homo sapiens
gtagtcccctcagcgctctgttgcattgagatcccaggaagtgccatcttggaaggttgtcattttgggggctgatgaggaaggtgaaacaatatttccctgtgtttactgtgtggggaaacagcctatgcaccaggttctccatgctggtggggcccccacatcactcatgactggaatgactgttttccgagcaaagatttgaatacgtgatctgacaggtacttatg

SEQ ID NO: 396470 - DNA, 185 bp, Homo sapiens
aacattcgctgagtgctgtctgtgtgtgtcacgctctgtgtgctgtggatattaagtgtttcactgcctttaacttgcagaatacagagacgtgtaacagcctggtcctcattccgccgatgaggaagcagagtcatctagcctgtaagtagaaaacgtgtcagacgtagtgtctatcccacgtc

SEQ ID NO: 396471 - DNA, 311 bp, Homo sapiens
gggaaactcaagaatgacactcaagtttctgattagaggatggtgaagctaatgaccaagaaggagacggtttcgaaggaaaaaatggtttcagttttgcacatgtgcctgtggcacatccatagggaagtatgtaggaggtagatggatatgcagcttggaacgcaggagacattccttcacctggagatactagagctaggggtcattagtgaagaaagccattggagctgcgggaaagggtgagcttgcctagagggtacatatagttcaggaacagaaccattaggacaatggcatttaaggaatgg

SEQ ID NO: 396472 - DNA, 268 bp, Homo sapiens
cattttgcaaaactgaaactctgaacccagtaaacagtcactccccattccctctccccgccagcccctggtaactccattgtcctttctatctctatgaatttgactatactagggacctcatataattggaatcatatacttcccctcgtgtgatgggcttatttagcttagcatttgaacatttttaataggcaactaatttctgctcttcttttatgacaagttattgattcatagaaaaatatggactgatcagatgtggctg

SEQ ID NO: 396473 - DNA, 139 bp, Homo sapiens
caaaagcaaagttttgggagcttatgtgtttgaaaagtacttttagtggattgctttctttattcttggttaaaggcagaagcatcttgacatttacattgctatttttctgctttcaaggatgctaacaaaaaaaaaa

SEQ ID NO: 396474 - DNA, 625 bp, Homo sapiens
acagaacatgacccagtccacccaaaggaatgccaaacccagcagagaaaaggtcaagtccagcaaaggaacgcgagagaggaaacgtcaatccaaggaggaaacgtcaatccaaggaggaagcgtcaatccaagagaccaacgccaagccaagcaaagaatgcaaagccaagccaagcggctacatgccagccaagccgttaacgcgcgtgcagcatgcacgtgcaagccgttacagggcagccaagccgttacgcgcgtgcggcgtgcgcctgcaagccgttacaggccagtctgacggttatgcgggggcggcgtgcgcgtgcaagccgttacaagccagccaagccgctgccgcgcgtgcaacgtgcgcgtgcggcgtgcacatctcagggggcgtcagtgtacgtggcacagacactggccgatgcgtgcaacccacgtgcttaagtcttggcgccaggaatgtcactgacagccctgtgttcccggcaaactttgtgggagtcagctgagctttcaggccattgagaagccgctggtgaaaaaaaaaagcctcttgaaggaggactggtatgttattgggggagtcctctagagtgacctcataatcaggtgcactgct

SEQ ID NO: 396475 - DNA, 177 bp, Homo sapiens
tctgtgtaaatattttaataggatggaaaagtaggactttattgaagtggctaatacactgtgacatcccagcagcagttaaatgggacagttttctccctgacatctctccctgtgggtaaattatccccttggaatgcagtcaccacagcatcctgacacatagtggctattttt

SEQ ID NO: 396476 - DNA, 373 bp, Homo sapiens
caggctggtctcaaactcctgacctcaggtgatctgcccgcctctgcctcccaaagtgctgggattacaggtgtgagccactgcgcttggccttaatttatttgcatataaagatttcagtattgggagatttggtgaaatttgtcattctaatccttatggcaattgattacttgaaaagctgacagctatattaccttgttattgatcttaaatataaaaaggcagaagttgtctaaattgagagattttgaatgtcttagaaagtatctgttaaggtggtagtttacaagcagttacattgtaacctaattgttgaaaaatgttatctgtgaaatacttgcatttccactatgaaaagcatgaaaccagg

SEQ ID NO: 396477 - DNA, 541 bp, Homo sapiens
cctatctttgcaaaataacttcattgaaagaaagatttaggacagtttttcacatagaggacaaaacatctgtgttgccaagaatctcttcttggcttgttaatgcccttatctaattaggaaatttaaggctaggtttgcaaagttacttttcatgagatttgggtgatttcatattaggattacacaatccagtttttgtgagaaagaaacaactattcactctatattctgcaaaatgtaattattttaggaaattagtctctaggttaataatgtttacagttctaacatctgtgttttagattttgtgagaaattggtgagaagagaacatgtggagataacaagtgatcccattttaaaagtttcaagttattatatgattaaattttgcatacaagctttttaatgaatatttttatgtcagcctaacaatttttatcaatgtgttttttatacttctgaagataagtatatcttccataaagtttaaaatgtttttgcctgggcgaaagagcgagactccgtctcaaaaaaaa

SEQ ID NO: 396478 - DNA, 209 bp, Homo sapiens
ccccccatcatatggaaaaattgtctcccaagaaaccagtccctggtcccagaaagttaggggaccattgtgttagagaactaaggaaaccgtcctctacctgccacataagaataaaggaaacaatggaacagtttccctactttccctaattaacacgtattcccattttgaggcagtgagttgctggtacctgctttctccttctt

SEQ ID NO: 396479 - DNA, 569 bp, Homo sapiens
gcttaatgacctacatacactagcttgcttaaacgcttcaactacctgtgacatattatattaagacccaaagtactttgttaacctgggccctagatggcaacctgctcacttcaacacgtctggagtattcaaacaatttattcccggttgtccagtttaaaagtaccaaggagttaagtaaaattttggcaataaataaactcccaatcttttacacgtaaaacatgtactgaatactggtaaatgtccattttttactactcaactaaaaattcagtacatttggctgagtgcagtggctcatgcctgtaatcccagtactttgggaggcagaagcgggcagatcacaaggtcaggagatcgagaccatcctggctaacatggtgaaaccccatctctactaaaaatgcaaaaaaattaaccgggcgtgctggcatacgcctgtagtcccagctactagggaggctgaggcaggagaatcgcatgaacccgggaggcggagattgcaatgagctgagatcacgccactgcactccagcctgggcaacagagcaagactccatctc

SEQ ID NO: 396480 - DNA, 599 bp, Homo sapiens
caaagtgctgggattacaggcaagggccaccaccccggtcccactgagaatcttgaatcctcagattcctctgactcctagagctgtaaaagtgacctatccatccctccctgttaagagctaaccctcctcccttgcttggaaaccctatagaggcatccacaagacgtttgtccctgtgcccacctcctctcctgcccacaagggttgtaactaggcttaaattccagcataaacaagccagggatgtgacgggcctcataggggaggaaagggcctatatcccaaagtagctggagggccaagccagcatgaccagcagaagtcgggtgagtttgtgcaggagtcaaccttgagggtgctcgatcagggggctgcagtgtgaggtcagataggaaagggtttattgattcggaagtcctttgggagttcagggctgcacacccaggcaaggactccaggagaaggtgtaaacttgctgccaggagggctcctagaagacgggaaaaagtaggaggccatgctaagtgagatccaaatgccagaattgccaggggagacggtggcagatgcgatgaaaggtcagggaagtggcaatg

SEQ ID NO: 396481 - DNA, 251 bp, Homo sapiens
tccccaacaactgcttacttggttaggtagggtgcctggttctctgctggccctctgcttgtgagagcttaggtaatagagatgagtcctattctgttttttatttttggtaccccagagcctggtatacaataggaggaactcttacttaaaattaatttatgattatttaagtttcttagtttttataaaaaggtttttttttgtttttgtttttgtttaattgatctttctcatttgaaaaatcaaaa

SEQ ID NO: 396482 - DNA, 461 bp, Homo sapiens
  misc_feature (17)..(17): n is a, c, g, or t
  misc_feature (33)..(33): n is a, c, g, or t
tcggtcgatctagaggnccccacgcgcaccgcngttcaaaacgaggcagctgtaacactgtaggtaagagatgataaaggcctgaactggggttgtgatggtgggatggagtttcgggaggtaaattcagtaggacatagtaactggctggctgctggaggagagaaaaggttcaaatatattcctgaggatctccctggcgcactcagattcttaacactaatatgagaatacagaatgtaaaccagaaagtaccttgagacgggtctcaatcaatttaggagttaattttgccacggttaagaatcatgaccagtgacgcagcctcaggaggtcctgagaacaggcccaaggcagttggattacagcttggttttatgttttagggagacatgagacatcaatcaatataagtggggtaatcactggtttgaaccggcggtgcgggcgagatggggcag

SEQ ID NO: 396483 - DNA, 491 bp, Homo sapiens
tcccaatacttgggaatcagattgagtcatcaaaagtcagtttggtgaggattagaagtgagtaagagttctcatccaagatttaataataaaaatctgatgacctacttgtgttttaattagtaatgaccttttaatgaccagtgtattgttgtccagttggtgtcatttaccctttagcagtaataatttcttaaccagctttccttttttcctattcctgttccatcatctaactttaactaaattattaaagtctctctctcataatgttctacaactaatttgctcttttgattttctttttgggtctttgtaagtaacaaattagaaacatttcagtcgagattctctcatgtactgtatacacatgaagtagatagaatgcagcatatcttctttgagtgccattcacgctcttgattattcttaatttagtccaaccttttaaaactttcaatttgtagaatacatttatgggcagcaaatag

SEQ ID NO: 396484 - DNA, 230 bp, Homo sapiens
cagatatggtgaatgatttcactctttgttgaaatttaactgggtgtggggtgggatatggcagattcacagggtgatgcttgtgaaattgaattcaaaatcttttaaatttctttcaacttttaaaaagtaattctgtctggaaattaatgtataaagagtgctatagtgttattttggaaaaaaatttcaaagagaattctgtttccttgacggttaatagtttggct

SEQ ID NO: 396485 - DNA, 141 bp, Homo sapiens
ctccagcctggggaacagagtgagaccccacctcaaaaaaatcaaaaaagcgaagatttaaaaattaaaataagattgttagccagttttttgtttaatgaaggaaaagttttccaaattaacagaatgggacattcagat

SEQ ID NO: 396486 - DNA, 394 bp, Homo sapiens
gtaaaagcaagtgatgtaatcttaactgatgaaaattatttttgccaatataatcttaggcaacagacaagcccaaatgataaatgatactgtaagaatgttagagaaggtcaggcatgatggctcacgccggtaatcccagcactttgggaggctgaggcgggcggatcacgaggtcaggagtttgagaccagcctggccaacatagtgaaaccctgtctctactaaaaatacaaaaaattagccaggcgtggtggtgggcacctataatcccagttactcgggaggctgaggcaggagaatcgcttgaaccctggaggcggaggttgcagtgagccaagatcatgccattgcactccagcccgggtgacagtgtgagactccgtctcaaaaa

SEQ ID NO: 396487 - DNA, 168 bp, Homo sapiens
taatagaagaatttttaaagatcctgtaatagaagaatactcaagaagcagtgcatcctcactggaatggcaaccaaagctaggaggaggttttggaagatccgatacaagagtgaaagaaagaaaggaaggaaggaagaaacccacaaagaacaccagctctgccaa

SEQ ID NO: 396488 - DNA, 824 bp, Homo sapiens
agcggggggagagggaaggcgaaggcgggctgagcccggcgccgggaggagtggtctaaactccaccgcggctttcgcatcggagacgtgtctttaggaagcagagagggttcgattctggactccgcccatgactcacttctcttgtaaagaaagagttgtccttcctggtactccaggtttatgggatgcaggataatggagcatgctctatctgggacattgctagtcttatgacagagggagaagacagcgatggtaactttgctgggactatgatagaatcatgaaatcatccaggcctttaaaaatgttcatcacaacatttaatctggacatcatttgtagcaattaccaccatttcagttttatacaacaccatgaaagggctcagctggcagtagttttcgaagaactccaggaagtggctgcagagcaaagtaggatcctgatactgatcacacttttgtcaagaagccaaagaacaaagttgattaaagcattatgcctggaaataaaggggaacaggacatcagcaaaattctttttatccattcacacattgaagacatgtaagatcaatgacacacaaaatggaagagaaatcttaatcacgcgtgtgaagactagcaggtatttttttcctgtgcacatcaacgggctgtattgtggcatatacatgaaagggtgaagtgcttgatgtctttagtttatgttttcctaaaactccatgctactaggagagaggatcccatcagtttcatcacaacaatgatcaataaaaaacaccctgccataacccaataccaaacgcccctcttcgt

SEQ ID NO: 396489 - DNA, 1118 bp, Homo sapiens
agcggggggagagggaaggcgaaggcgggctgagcccggcgccgggaggagtggtctaaactccaccgcggctttcgcatcggagacgtgtctttaggaagcagagagggttcgattctggactccgcccatgactcacttctcttgtaaagaaagagttgtccttcctggtactccaggtttatgggatgcaggataatggagcatgctctatctgggacattgctagtcttatgacagagggagaagacagcgatggtaactttgctgggactatgatagaatcatgaaatcatccaggcctttaaaaatgttcatcacaacatttaatctggacatcatttgtagcaattaccaccatttcagttttatacaacaccatgaaagggctcagctggcagtagttttcgaagaactccaggaagtggctgcagagcaaagtaggatcctgatactgatcacacttttgtcaagaagccaaagaacaaagttgattaaagcattatgcctggaaataaaggggaacaggacatcagcaaaattctttttatccattcacacattgaagacatgtaagatcaatgacacacaaaatggaagagaaatcttaatcacgcgtgtgaagactagcaggtatttttttcctgtgcacatcaacgggctgtattgtggcatatacatgaaagggtgaagtgcttgatgtctttagtttatgttttcctaaaactccatgctactaggagagaggattttgtttaattaacaattatttcaagagtcatactgtgagatgcaatgttaggatggatactgggggagcactagcagtgggttcagcaaggaactaggagatccttctgcctggaatactctctccccagattttatcatgaccatctccttcttgccgctaaggtaccagttccctaatcaatcagagtcagaactctctgactcatttctctgttttgttttttctcagaccttattgccctgaaattattttgtttacttttttgctttcttgtcttaccatctgtctcctatctccatgaatataagttccatgtgaacatgagacttctttgtccctataatctgtagagagtgcctggctc

SEQ ID NO: 396490 - DNA, 484 bp, Homo sapiens
tctccaagtcttcagtgctactaaatgtaatattcaacagtaaaagcactttaacaatgttagctgctattattataaggcatagtaattttattactccctccttggatttttatagaatgttataacctctgagtcacataaaataaaagcttaccattcttaaggaaaaagtaacttcaaatgagtatctgccacatacccatggtttcaaagagttctgaaatgaatccagcagattatgcctgtttatatgtgatgcattgtataaacatccttgaccagtgtatatttctggaggtggatttccagaattgataagtgccagccttgctatctgtattgtcttcattcctttttctgcctttttttgcttgataaaaaatcacttaagcaaatgtatgtggctaattgactcaagtagcacgttggaaactttttgtcttgttcgttaaacaaaaaataaaataccacaaaacattag

SEQ ID NO: 396491 - DNA, 577 bp, Homo sapiens
ggtattcccttttgagtggccatgtgatctcattgttcaattcccacctatgagtgagaataatatggtgtttggttttttgttcttgcgatagtttactgagaatgatgatttccaatttcatccatgtccctacaaaggatatgaactcatcattttttatggctgcatagtattccaagcctgttaatctttaatcaaattccagatattgtgaattttatatttttgggtgctggattatttttattcctataaatcttgagggttgatttgccattcagttattgtatttgtcaactttgctttttttttttttttttataatttgttaggccagtacttaaactaagcagtacttagtttagggctaaaaattccctagtgctaaggtaggactttcctgtgcactctacccgataccccataaattgagtttttctaatctggctactaagaacaggcactattcctggccccatgtgagttctgggtagtgcttgctccattcctttcatatgtttttttttcccccagtcttggatagtttcctcagtcacatgccactcatcagcac

SEQ ID NO: 396492 - DNA, 610 bp, Homo sapiens
tgtacctactgccaatgagatttgtagtttatatgggagatagatatacacgtgaactaaatatacaaagccttacaaaagatttacagctgtgacagtataagtctaaggaggactcaaaggaggtggaagtaatttctccaagacctgctgtcctgggtaatagaaacataaggctaatctgtgtgtaatttgaaactgtctagtagccacacaggttaaattgattttaataatttattttgttgtatttaatatatccaaaacattataatttctacatgcagccaatataaaaaattttaaggtatgaaatgttttacattctttttttcatatcatgtattcgaaacccaatgagttattttatacttacagcatatctcaaactcaggccctgaatgtttgtcagaaatacatggtttgtatttagatttcattaaattcacagttaaaaaggtagattctcataaccaagttccaaagatacttaaacgttttccagtaactgaactgaacatgagttctaaaatttaaattgattgacactgaatgagatttgatattgacttcctcggttgtactagccaacttcaagtgctcaatagcc

SEQ ID NO: 396493 - DNA, 351 bp, Homo sapiens
  misc_feature (10)..(10): n is a, c, g, or t
  misc_feature (25)..(26): n is a, c, g, or t
gaaaccgttncaaaaccagctcggnnccctgtattggtggtgctctcacagcacgctgtctccacttcgctcttctctgtccttcacctctccttcatccatttatattttcttggtaacttcagttacacgttaaggtatgtactggccatagtgttttaacactgagaattcaaagacaaataatactccgattttgccttctcatagtgtataggcttcataggtgcacagagtgctgtgggagaacacaatagagaatgattaaacttgtggagggtgtgggggcagtttacggaaaataacactgaataggaatttgccaaactggggagagggagtcatgtcaaa

SEQ ID NO: 396494 - DNA, 589 bp, Homo sapiens
gacctgcaatgaatttatagttcatgggtgagtgttacagtgagcatgatttattcttcaaggtattaaaacctgaagaattgtatttagtatttaactctcccactattcatccacaaagccctttgatgaaatcgtggcattttatcttctagataatcttgtgttcactcttggctgctactacctaagggtcaaggagggaaatctcaagtcttgctacccgccttaccttccctggcagggctcccttctccagccccgactgtcgccgtccagcgtacagaggtgttcagatacacagtttaaccttataactgtgcagtgaatgcagaggcaccagctgtgtactgttgatgcacatgagaagcatacctttatcttgcctagttccctttgctcgattaaaggctctagaaaaatcttccagcacctcctgttcccaattcctgttactttctagatttctctattaggagcctcaaagctgtggatgtttgtttggtccacctcttcccacccttccccacagactcccccattcccttcagcatccctttcttaccctcatctcctaggaacccaggac

SEQ ID NO: 396495 - DNA, 248 bp, Homo sapiens
tatttccaaccaccaccacctattgtaaccaatctcattattttcttatttattcttcttatgttttactttgcagaaatgaacagatgcaggtatatttttctcttatttcttacctaaaaggtacatagtatagatactatttttcttttcccgcttaacaaaagatactggaaatcaccccatatcagttcagagaaagagtctttgttctttatcatagctgcatagtactccattatatggag

SEQ ID NO: 396496 - DNA, 195 bp, Homo sapiens
gggggtcactgggagagtttgtggggcatggcgaccactcccatgttaaggccctcagaatccaacagccttcttagcaaaagcgccttagctagggacaatagaggctaatttgcatctcatttacatgctcttcatttccaggcaaaatgatctgatagcaagcaccctcaaccctttccttcctccctgaga

SEQ ID NO: 396497 - DNA, 564 bp, Homo sapiens
gatatattacgtagaaatagacatgtcgtgtagaaacgcggctttatgccaatactggaagtttgaagacatagtgtttctagttctaataatcatcatgagtatttaatacatgcctatggtgtactagggagccagataatgttttaagtttgttttcatgtactaactaatttaacatctaactaattttagctgaattttgaacgagttctgataaaatagctagtcagcccgcgcgtggcagagatgaaactcgggcggtctggcccccgtgctttgggtctcagcagctccacgctccacatagatgttttgtaggatccttaaaacagaagtgcagtaatctcgtataaccactagatggcactgcaacttttgtaacaggggacttagccgggggcaggaggggttcttgagacaaacccattttttatatttgtcattggtcacttgcaagtagagtcatactttaaataataacattattccctttaagaattgtatattttttatctatttaaagaaaacagttgtccttatgaataaaatgacttcaaatta

SEQ ID NO: 396498 - DNA, 355 bp, Homo sapiens
ttgctattttaaaagagattaaccacaagtatgctgatgcttttgaacatcacttccttaataatttttttaacggaagtacaggagcttcacagtctcacaatgaattttaaaagacaattatatggagataaaagacagcataaagggtaagagaaagtattttggagccttatgaatctggatctgagtcctgactatgccacttactgctattgcactggaggcacatagaaagatttttttgtttgtttgttttgctcagccaatagtcacccccctttctttttggggaaggtacaatgtaccacttctcttcttttggggtttgagttgcattgagctgatcttcctg

SEQ ID NO: 396499 - DNA, 431 bp, Homo sapiens
agaggtgccaccttcagagagcagcctcctcagggggtcttgttctggtgagcagcaggcacctcttgcagcccactgaccctgtccttctaagggcacctgtgccaccatttcccaggcctggcaggaaatgcccccagaacacctgaagcttccttgcccatctctgagctaggccagggattcctctgatatttccccaggccaggctctgtaagcacagctgatcccaccctgaggggtcagggaggcagatggccactgatcaccagagcccaaggagtgggaggagcccttgtctcagggatctgagccacctttatgccacctaccatcatctggagtttctgacttcatggttgggacaacccttgggacctgtcccatccatgctcatgtggggctcattctatggtgggttgcaggcagga

SEQ ID NO: 396500 - DNA, 383 bp, Homo sapiens
gtgcacctcctcacgagagagaaacagagactgtccctggtggggaatgtaatcctggatgagcccccacattgttatatgtaaagtttcggtgccacaaaagaaatagcactcagatataaaattttctttttaattctcagcaaggcaagttacttctgtatagaagggtgcacccttacagatggaacaatggtgagcgcacacttggacaagggaggggaaggggttcttatccctgatgcacgtgaccctttgctgccgtgttgttcccctgtcggctagggttagacgcacaggctaaactaattccgattggatgcacaggctaaactaattccgattggctaattaaaagagaatgacagggtgagtgctttggc

SEQ ID NO: 396501 - DNA, 485 bp, Homo sapiens
acattatgtatagatatagatgtgggatcataaaatgtgtttaaaagttattgatgcaggacaactttgcatatcaatacacaagcatttatttgatttgttttaatagctgtgaaatatcccactgtatgaagagactaaaatctgtccttgtgttgtggatatttggattgatgaaccattggaacaaaacagagagggcaatcaaagcatttgacagcctggcagatcaaagtgagaggtttattacagaagacagtaatgctaaaaggggaggagagctaagtgaatccacctgctgcaatcagagccgagaatcccaccaccctaaaagccaggagacaacgcggccaaaagggcagaggcccccagggctcccagccatgccagatgcaaacttgtcatcccaccctgtgtgtgggcttcctatgccctggacagtctttcctgaggcagagctgttttaagagcttagagcacacatt

SEQ ID NO: 396502 - DNA, 536 bp, Homo sapiens
tgagacggagtcttgctctgtctcccaggctagagttcagtggcgcgatctcagctcactgctacctctgcctcccaggtcaagcgattctcctgcctcaacctcccaaagtgttgggattacaggcgtgagcgaccacacctggcctctgatttttgtatttttagtagagacaggtttcgccatgttgggcaggctggtctcaaacgcctgaccttaggtgatctgcccacctcagcctcccaaagtgctgggattacagatgtgagccactgcgcccggtcctaaccttgttagggaggttttgcctgtagttcttacatctcatacctactggattcctatgttccattctaaatgggaagtcttggcttagatttgagaggattgcctgaggttttagggccctggtgaatgggtcacatgattgaggatctcaagcccaaggaattcaactaacaactatttaaggagacatctttgtaaactgagaacaaatgaagtagggaatcaatgattcaaagtagggcattgtg

SEQ ID NO: 396503 - DNA, 283 bp, Homo sapiens
ctcacacagtttcctctagccggaatgctcttctttccttccctcctgatggaatcccattcatccttctaggcacagttcaaatacccctcttttgtgaatccttccctgacctctttaagccccaatttagttgcctatctaacccttatccaattctctcttataactttttcttatataatcataagtttgatattttctaagtgttttgcattttctctttgataggtattatatgctttacctgtctgccaggacatggactgtttctgagtgctga

SEQ ID NO: 396504 - DNA, 412 bp, Homo sapiens
aagccctattattattgtatgtattttaaagcattgtacttagaaagtttctttaggctttaccagagtgaaagatgagtccatggcacagaaacaaaaatatgaagaaccttgcctctggattggtagtcacagatgaaggagtgtgggttcttgaatgatcacaagatgagagctgccatttgaaaagtagacccttgcttgaactattaagggtaggagcaatacatgtctattgtttttggtctattatatgttatggagtacatttgttaacccagactgccctaccaaaactcatataatactacaatattttcttcatttgtcattccctatgcaaaaaaataccataagcaagaaagaatcaggaaataaaaaggatgatctaagtaattacatggaataaaga

SEQ ID NO: 396505 - DNA, 539 bp, Homo sapiens
agatttatggtgccattcacagctggggttgtttaattaaaaggacaaaatataaaccaaggtgcttttatcacagagaagggggctggctcagcaatcaagtgcttagtgaggacagctgcagcagtggtagcaggaaggaggcctcactagctaagaggtctagagttctgcagcaaaaacaaggccacctggagtgggtgagatccacaaagaaggctgtgagaaaggaatagagttcatccaggggcagccagacagacaggtgggaatgcagacctcattccccaggctggaagccagccagcagggctgcactgagagaaagtggcaactacccgggatgtgtacatcctgggcaaaggtgacactgtgccagcaatggaagtacttccttataaccacaatcttctcaaatactttaaaacagaaagatcttctgaaaggagtctccaggtgggaaggcacacagatcagcaatccccacattctcagctttctagtctccctcaatttcagcagcacaggcactattatgg

SEQ ID NO: 396506 - DNA, 496 bp, Homo sapiens
tcgtgaagaaaacaagaaactgaattttcttcaagtattttaaaagaaataaagttttattatttctatacattacacactgcaggctaaccaaaggtaattgagtagacttctttggcttgtttaagagaatgttaatttgtgttgatgtatgcactgtatcaaacaactactactaaagttttttaaaaatacttatccagtgaatttattccagttaaatgttacttcattcagtattcaataaatacttactgtggacattacagccagccaatgtgctaagcacacaatatatacatcagtgaataaaaagcataaacctaaggtaccaactaaacatcaacatcacaatcagtgtcattctatggggcactggacactttgtaagtctgaccttttaatctaaaaacaatctacttggcaaggtaggtactttatatcccaacttcacaggtaactaaagaaagttaagaggcttaagtgtatttcctaa

SEQ ID NO: 396507 - DNA, 553 bp, Homo sapiens
ccaagtttcttgtcccttatgtctgttcctagagcactttgtgtgcatttctgtcagagaacttatcacagtacattacagtcgttggtttgcttgtctgggttttgttagtttgttttttgagacaggttcttgctctgtagcccaggctggaatgcagtgatataatcatggttcatgcagccttgacctcttaggctcaagcgatcctcccaccttagccttctgagtagctgggactacaggtgcatgccaccatgcccagataatttttttatttttgtagagacagagcttcactgtgttgcccaaggtggtcttgaaatcctgacctcaagtaatcctcctgcctcgaccttccaaagtgctaagattacagacaagagccactgtgcccagccctgttttctccagtaagctgaaatttcttctatatcggattcctctgtatatatcaagaatctagcacagtgcctggtatatattagatactcagtacatgcttattaactagacaggtgaatgcccaggtttctaaagttttttttttttt

SEQ ID NO: 396508 - DNA, 300 bp, Homo sapiens
cccactagaatgcaatggtgcaatcatagctcactgcagcttctaactccagggctcaagcagtccccccctcctcagtgtagctgggattacaggcacacaccaccaagtccagcctgggtgacaaagcgagactctatctcaagaaaaggcagttctcctcagattttatctatagattcaacccaatccttatcaaaattccagcaagctttttttgcagaaatttacaaagtaatcataatatttatggaacataacgtggaaatgcaaaggacccagaatagccgaaatgtctgg

SEQ ID NO: 396509 - DNA, 407 bp, Homo sapiens
tccagtacaacaagaaaatcctttcctaattccacattctgcatatcgatgagttctaaacatcctggactgctgacccaaaagggttccctgagaaaactcctctagatgatgcccctgattctaaaaattcttgtctatgttctcagaagtgtcctcagtactatggagacctggggaaaaaatagttcagagtcccagtgatgaacaagtttaaaatctaattgggaacatgagacctatacacatgaatctgtgaaaacaacatgagaaaggatgtaatgagatgttaaattttgtgttgttaactctgctttaggactttatgcaagagaggtaccaaggaattagtgcacttgggtagatgggatttgtgctgaatcatcaaggttgaatgagactcaggt

SEQ ID NO: 396510 - DNA, 344 bp, Homo sapiens
cacaaatatttcaacaaaatggatacaatgaaattcattgagttctgtttcaattcgtagagtaacaaattctatggaaagggaacatagtatttcttttgacaaataatactattatcatattatctgttattctttttggcaattgtcacaaacattcataactcttgacttatggtaatggtaattacagaagtaatggtcttctgggagtacatccttaagagatacttaaaatttgcaaaaagatttttgcaagagttaggcttatgtttaggacataaaaagatgtgaaagatcttccttcactcccactgaaacaatgttacccaataaaccaaaca

SEQ ID NO: 396511 - DNA, 471 bp, Homo sapiens
gattgtttgccttttacctgatggatgtcaagagtactttgtatgttttaggtgtatgttttaggtgtgtgtttaggtgtatgttttaggtcttttgttgcgtatgtagttcggaaatacgttctcccagtctttagcttaccttttcaaccacttaaaagtctttctcaaaataaaagtttttaattttgctgaagtccagtttttcaatttttccttttatacattttgctttttgtataagatctccttgcctagtcctagaccgtgaagattttgtcttatgtttatatttttttaaagtttcatagttttatattttacattttcattcatgattcattaatttttttaatgaagtatgagttttaggtcaattttttttttttggcttatagttgtccagttgctctagcactgtttgttgaaaaggctattcttcctttgttgaattgcttttgtacctttgta

SEQ ID NO: 396512 - DNA, 386 bp, Homo sapiens
agatagtacttttttgttttctcctgtgaatgaggtgctatttatggatattctggattctgtcaaaaatagtaaacaacttattggtttctatttgatggtattaacatgctaaaaaaatggtgtattagggctaaaagggatttacaggatatctccttcaaatctcacattttatttttattttttaattttttagaccgagtctcactctgttgcccaggttagagtggagtgacgcaatcttggctcactgcaacctccgcctcccaggttcaagagattctcatgcctcagccacctgagtagctgggattacaggcgtacaccaccactcccagataattttttttatttttttttatttttagtagacatggtgtttc

SEQ ID NO: 396513 - DNA, 514 bp, Homo sapiens
  misc_feature (11)..(11): n is a, c, g, or t
  misc_feature (106)..(106): n is a, c, g, or t
  misc_feature (209)..(209): n is a, c, g, or t
tagctcgtcanactaaaaatacaaaaagtagctgggcatggtggcgcacacctgtagtcccagttactcaggaggcggaggcaggagaatcacttaaacccgggangcagaagttgcagtgagctgagattgaaccactgcactccagcctagcaacagagtgagactctgtctcaagaaaaaaaaaaaaaaaaaaaattagccgggcntggcagcgcatgcctgtagtcccagctacttggaaggctgaagcaggagaactgcttcaacccaggaggcagaggtcgttgcagtaagccaagatcgcaccactgcactccagtctgggagagagcaagtcacagtctcaaaaagaaacaaagtttccatcatctcaaaatgattccctgtggcagccctttggctgttacccccagatcctttctccaaaccctcaacctgaaggaaccgctaatctattttctgtctctgtggacattcatgtaagttgagtcttaaaaaatgtggtcttttg

SEQ ID NO: 396514 - DNA, 273 bp, Homo sapiens
ccacggtgtccataaattaaattagaatatatggaaatgtgattgtatttgttcacatttcaagtaaataatcttaaacagaattatgaaagatgccataaacgatcttatttttcctctaaagatattgaaaagttttctgaatcaaaataatctttaaatacacattaaacacgcacacatacacacacacacacacacacacacacaaatatataaatatccttttcctatctttttgaagggcaataagatcgtttatggacaccgtgg

SEQ ID NO: 396515 - DNA, 552 bp, Homo sapiens
ggaaattaagttgggatatgttagaaatgggctatagtgaggagaagcaaacacacagaatgtaggaattcacattcacatatatgaaagtaggcttttggacaagaacattggtgtgtacttttgagaagagtattcctccttttataccaatgagtgcacacagattcacacagatacagacacaaagagacacacactttttgttttttagtgataacttccaaagtaaatgtacaaatatttgactcaaaataacttgacattttcagcctgagtctcctctcctctgttcttgactcaattgaacacacacacacacacatacacacacaaacacacacacatacataccctagtcctaaagctggtatcttatttaatggggaaacactaaaggtactttcagtaagatcagtaatagataccctgctggtattcacctctgctagtattcaccgctagaggtattagcaaatgtgattaaatgagagaagtcaattagaagcattagaacggggtaagaagaagtaaactcttcctgcagatagt

SEQ ID NO: 396516 - DNA, 265 bp, Homo sapiens
taggtttggtagctattctcattctcattttacttcttattcattctaactctcattctactattttttacttagacgtagttttcttggtaagaaaggccatggtaagcagacgtagtgtgcacagaaatatgcagcccttctgggtgcctggaccccagtagcaccatagtcacccgtaatagccacataatagccacgcctagttctaagagtgagtagagttggaccaagttgtgaaacttcaagtttgcttttgttttta

SEQ ID NO: 396517 - DNA, 288 bp, Homo sapiens
taggtcaggatagaaccttcatggactctagtgttctattgcacattaagcctcaaattaacttttcattctggtttccaaccactctgtccttacaggtcatgaaaggaacaccaatgttttgcaaactatgggcagcagtgtttttgagggtcatgatcagtttagtgtagcaattctctatcttttcttaagatcttaggacccctttattcttgtaaagagtgagagccccaaagaccttttgtgtatgtagatatatttaaaaattaaaatagaaaattttta

SEQ ID NO: 396518 - DNA, 354 bp, Homo sapiens
tgatataaaatataacaaattattcctcaaatcattccaataattctcaaatcatttcttaattttttagatgctgttggaaagggcttttgacttcccttgtctgagccatgatttgatatgcaaagtatcatcaaactcttcctatgacctcctccattaaaatgacagttatcaggcaactgggttcctgccaatgtaggggattcacacaggcttgcccccattgtcagcttccaattcccccaaccattcctttagtctctgttcctctctcatcatactctctcctccaaccaataggggacgaaaggagtagaagaggaaaaggaaggaaggaagaagaaaagaaag

SEQ ID NO: 396519 - DNA, 222 bp, Homo sapiens
aagctcccaacaagataacattagcaggctagagtaatttattttgcatattgtatatcacaaagcctgataaatattaatatttagtaattaaatattgatctcaacaaatataaaataagttttaaagataactttgagaactgtcatttccatttattcaaatgtgcatttcattgtcctttttttttggagaccgagtttggctctggtggggagctg

SEQ ID NO: 396520 - DNA, 577 bp, Homo sapiens
aggtcacccctcagcagcgcctcccggatgcaaggagcaaacacgggttcacgtcctgatagctgagaaaatgactggcagtgactgaaacaacagcatcccacacacaacacacacatcaggatgtttaaagtatatttatggtgactgagctgtcacctgaacacgtgacgtacacgcgatgctctgaggaaggaaaccgtctaggaaccaagagtcacggagctgcctcccgcgaccgccttcctcaatcactacaatgaaaacacgcagtgagctgagctgcagtgaagacaaatgactctcagtgcttcgttttagcatattctaaaaatgcaatttacaattcagcaatatcctttctttttatgtagtcactacaacacaaacatgcctctttgttatctcgaactacatctgcatgcaaaacacgctctggctgggaaaatgtaagttctggggaatcgaaacccatttttcaaatctgaaagagatggagaaatgaaaagaaacgaaaaggagaggagaaaggtacattttattcacatgcaaaaaaatgtaaatgaaagctggtttc

SEQ ID NO: 396521 - DNA, 196 bp, Homo sapiens
ccaggtgatgtgtccgttttctggaagtagagcgcaaactcagagagaggccggggctggaattccagctctgcggccccatctgcatgagtgtccctctccttgcgggtaaattgagggcaaggatggaaccttccgcaccttgtagggtgagaacgaagtgagaagtgagcagatatgccccaggcctctcgca

SEQ ID NO: 396522 - DNA, 281 bp, Homo sapiens
tcacttcatgtgttggatcactgcttttcaatatagctgaaaagactctgttgactgggctcagctcattgcacaaagcctgaaaggcccaatgattactaatgggagcatatggtcagagctaaaatccataatcccaatccctagaaaggtatcttcactttttccacccagcatctttattctcttcacatgcttaacatcctaacatgtttttctctcttgctccctcttcaactaaccaatcccatgctactttcttctacctatttttgcactgt

SEQ ID NO: 396523 - DNA, 229 bp, Homo sapiens
ctcatcactgttttcagcgtaatctaaagagactgtcccagctgagaatttttggtagtttctcatatgttttgtgtgataactagatcatttggggaattttttatcctcaaactattcaaaatctggaaattgtcttaagtcaccctgagtgaaagtttgcaacattcttgacaaaataaagaatttagaaaggacagtcctttctattctgttcaggatggttgcg

SEQ ID NO: 396524 - DNA, 559 bp, Homo sapiens
tttcaggtatcattcgaagtctcgcagctcacacattaaaccctgatcaggatgttagtcagtggacaactgcagacaatgatgaaggccatggtcattagagcttttttctataccagttgccaaacttgtcaggactggctaacgcggattcgactctccatcatgagggtaggattgttggcaggccagcctgcagtgacagtgagacatggctttgacttgcttacagagatgaaaacaaccagcctatctcaggggaatgaattggaaataaccattatgatggtggtagaagcactatgtgaacttcattgtcctgaagctatacagggaattgctgtctggtcatcatctattgttggaaaaaatcttctgtggattaactcagtggctcaacaggctgaagggaggtttgaaaaggcctctgtggagtaccaggagcacctgtgtgccatgacaggtgttgattgctgcatctccagctttgacaaattggtgctcaccttagccaatgctgggtgtaacagtgccagcccgaaacattgtctgaatggtg

SEQ ID NO: 396525 - DNA, 686 bp, Homo sapiens
atggcagggccaggcgcagtggctcacgcctgtaatcccagcactttgggaggctgaggcgggcagatcacttgagataaggagtttgacaccagcttggccaacatggtgaaaccccatctctcctaaaaatacaaaaattagccatgcgtggtgctgcatgcctgtagtcccagctactcaggaggctgagggaggagaatcgcttgaacctgggaggtggaggttgcagtgagccaagatagcgctactgcattccagcatgggcgacagggcgagactctatctcaaaaaaaaaaagaaaaagcaaatagagtaaatggcaggagacaaaaggatgtaatcaaatttgcattttaggaagactgttttggaggttgaagaaaggtgcattagtagttgtggaagagacaaaacccagaaagatgagttataatgttactaaaatagtcaaggtgagagatactgaagacctgaactaaatcattagcagaggaagtagagaaaatttaattatgagatatttaagaatcaaaatctggccgggagcagtggctcacgcctgtaatcccagcactttgggaggccaaggcaggtggatcacgaggtcaggagattgagaccatcctggctaacccagtgaaaccccgtctctactaaaaatacaaaaaattagccgggcgtgg

SEQ ID NO: 396526 - DNA, 421 bp, Homo sapiens
caccttgccaggctaatttctttattttttttgtagagatggggtctcactatgttgcccaggctggcctcaaactcatggcttcagacaatcctctttctttggccttccagtgttaggattacaggtgcgagccaccctgcctggcctgtttatgttattttagaacccgtgctcactttgtgcagagcaggatgttgagaacacatccttgaccttatggactttagaatttaagaaagagataattcagatttttgcagtattcaggggttaacagtacaaagaagaacatatgtagtattaccgaaaagagtagtacttcatgacaaaagcctgatatggccgtatgtggctctatcttgagtcagaatgctttgtgtgcagtcaggaattgttgggtgattggtagagtagagat

SEQ ID NO: 396527 - DNA, 1529 bp, Homo sapiens
gcgtgcgcgagcgcttccccggcgcccagcacgagaatgtaccgttcatcgccgtcaccagcttcctgtgcctgcgcttcttctctcccgccatcatgtcgcccaagctcttccacctgcgggagcgccacgcggacgcccgcaccagccgcaccctgctcctgttggccaaggcagtccagaacgtgggcaacatggacacgccggcttccagggccaaggaggcttggatggagccgctgcagcccaccgtgcgccagggcgtggcgcagctgaaggacttcatcaccaagctcgtggacatcgaggagaaggacgagctggacctgcagcggacgctgagtttgcaggcgccacctgtgaaggaggggccactcttcatccacaggaccaagggcaagggccccctcatgtcctcctccttcaagaagctctacttctccctcactaccgaggccctcagcttcgcgaagacgcccagctccaagaaaagcgccctcatcaagttagccaacatccgggcagcagaaaaggttgaggaaaagaactttggcagctcgcacgtcatgcaggtcatctacacggacgacgccggcaggccccagactgcctacctgcagtgcaagtgtgtgaatgagcttaaccagtggctgtctgtgctgcggaaggtgagcatcaacaacaccggactgctgggctcctaccaccctggcatcttctgtggggacaagtggagctgctgccaccaaaaagagaagacaggtcagggctgcgataagacccggtcacgggtgaccctgcaggagtggaatgaccctcttgaccatgaccttgaggcccagctcatctaccggcacctgctgggcgtggaggccatgctgtgggagaggcaccgggagctgagcgggggtgcagaggcaggcacggtgcccacgagccctggcaaagtccccgaggactcattggcccggctgctccgggtgctgcaggacctccgcgaggcccatagctccagcccggccggctccccaccctcagagcccaactgcctcctggagctgcagacgtgaggcccgccctacgctcccttgctgagtcccctgccaagcgctcggagcccctccaggacactctgcaccccctcaccccggtcctcctcattagggtgcagggcctaggtctcttccaagtgggggaggggggagagtcaggaataaggggatccccagaagtgcagagctgagcaggcttgggcctgtcatggctggcctgaagtgtccccagctccctacagccgctgtagccatcactgcctctccagggaccctcctctcctgcctaggacagacccagccagaaccactgctaggatgggccacacccaggggtctggcctccagggacctagagaatgggagggagaacggggccccaggagacccggccgccaccccacccgctacccttgggtgccacagggctgtgctgttgccaacagtaaacctgctgttactgtcaaaggctctggg

SEQ ID NO: 396528 - DNA, 3235 bp, Homo sapiens
  misc_feature (963)..(963): n is a, c, g, or t
  misc_feature (1064)..(1064): n is a, c, g, or t
  misc_feature (1102)..(1102): n is a, c, g, or t
  misc_feature (1107)..(1107): n is a, c, g, or t
  misc_feature (1112)..(1112): n is a, c, g, or t
  misc_feature (1119)..(1119): n is a, c, g, or t
  misc_feature (1172)..(1172): n is a, c, g, or t
  misc_feature (1264)..(1264): n is a, c, g, or t
  misc_feature (1406)..(1406): n is a, c, g, or t
  misc_feature (1460)..(1460): n is a, c, g, or t
  misc_feature (1471)..(1471): n is a, c, g, or t
  misc_feature (1638)..(1638): n is a, c, g, or t
  misc_feature (1892)..(1892): n is a, c, g, or t
  misc_feature (1931)..(1932): n is a, c, g, or t
  misc_feature (1936)..(1936): n is a, c, g, or t
  misc_feature (1938)..(1938): n is a, c, g, or t
  misc_feature (1954)..(1955): n is a, c, g, or t
  misc_feature (1970)..(1970): n is a, c, g, or t
  misc_feature (1973)..(1973): n is a, c, g, or t
  misc_feature (1976)..(1977): n is a, c, g, or t
  misc_feature (1981)..(1982): n is a, c, g, or t
  misc_feature (1997)..(1997): n is a, c, g, or t
  misc_feature (2009)..(2009): n is a, c, g, or t
  misc_feature (2013)..(2013): n is a, c, g, or t
  misc_feature (2021)..(2022): n is a, c, g, or t
  misc_feature (2026)..(2027): n is a, c, g, or t
  misc_feature (2035)..(2035): n is a, c, g, or t
  misc_feature (2040)..(2041): n is a, c, g, or t
  misc_feature (2045)..(2045): n is a, c, g, or t
  misc_feature (2047)..(2047): n is a, c, g, or t
  misc_feature (2065)..(2065): n is a, c, g, or t
  misc_feature (2071)..(2071): n is a, c, g, or t
  misc_feature (2081)..(2081): n is a, c, g, or t
  misc_feature (2084)..(2084): n is a, c, g, or t
  misc_feature (2091)..(2092): n is a, c, g, or t
  misc_feature (2098)..(2098): n is a, c, g, or t
  misc_feature (2102)..(2103): n is a, c, g, or t
  misc_feature (2105)..(2105): n is a, c, g, or t
  misc_feature (2108)..(2108): n is a, c, g, or t
  misc_feature (2115)..(2117): n is a, c, g, or t
  misc_feature (2121)..(2121): n is a, c, g, or t
  misc_feature (2123)..(2123): n is a, c, g, or t
  misc_feature (2135)..(2135): n is a, c, g, or t
  misc_feature (2143)..(2144): n is a, c, g, or t
  misc_feature (2146)..(2147): n is a, c, g, or t
  misc_feature (2152)..(2152): n is a, c, g, or t
  misc_feature (2154)..(2154): n is a, c, g, or t
  misc_feature (2161)..(2161): n is a, c, g, or t
  misc_feature (2175)..(2175): n is a, c, g, or t
gcgtgcgcgagcgcttccccggcgcccagcacgagaatgtaccgttcatcgccgtcaccagcttcctgtgcctgcgcttcttctctcccgccatcatgtcgcccaagctcttccacctgcgggagcgccacgcggacgcccgcaccagccgcaccctgctcctgttggccaaggcagtccagaacgtgggcaacatggacacgccggcttccagggccaaggaggcttggatggagccgctgcagcccaccgtgcgccagggcgtggcgcagctgaaggacttcatcaccaagctcgtggacatcgaggagaaggacgagctggacctgcagcggacgctgagtttgcaggcgccacctgtgaaggaggggccactcttcatccacaggaccaagggcaagggccccctcatgtcctcctccttcaagaagctctacttctccctcactaccgaggccctcagcttcgcgaagacgcccagctccaagaaaagcgccctcatcaagttagccaacatccgggcagcagaaaaggttgaggaaaagaactttggcagctcgcacgtcatgcaggtcatctacacggacgacgccggcaggccccagactgcctacctgcagtgcaagtgtgtgaatgagcttaaccagtggctgtctgtgctgcggaaggtgagcatcaacaacaccggactgctgggctcctaccaccctggcatcttctgtggggacaagtggagctgctgccaccaaaaagagaagacaggtgggagaggaggcctgggtcccgggctctgcatccgtccactgcgagatcgggcctctggctgaacgatgggaccgtgagccctgctgtgcacctgcagggacataacccaaggaatgctggcccctccaggagctctgggcagaaagggtcccgtggaccaggtggtttgggaaatgccacgtgatgtgtgtgaagcanatgagtgaattcgctgaaggctctaaggaggcccgaaaacacgttagaatcccatttctttttatttcttcttctttttttttttcagacacagattttcnctctgtcccccagactggagtgcaatggcacgatctcngctcnctgcnatctccncctcccagggtcaagcaattctcctgcctcaacctccccagtagctgggattnccggcactcgccaccaagcctagctaattttttgtattttgactagagatggggtttcaccatgttagtcaagctgctcttgtttttttttnttgttgttgttgttgttgtttgataccaagtctcgctctatcatccaggctggagtgcagtggtgcaatctcggctcactgcaatctctgtttcccaggctcaaccatcctcctgcctcagcctcctgcagaactgggactncaggcacatgccaccacactcagctattttctgttttatttttttgtagagtcngggtctcactntgttgcccagactggtcttgaactcctggcctcaagctatcttcctgcctcagcctcccaaagtgctgggattacaggtgtgagccactgtgcctggcctcttggtgactctttgcaagggcattgctggctggctgatatggcctgcagcctctgcctgtaaccancagagcgatactctcattatcggcaaggtgggacccaccctgcccaagagacagggcctgttattccactgtatggaggagaagctgaggcttagggaaggcagatgacttggcaaggtcataaagacagcaagctgcaggaccagctcattctaaggcatgaaccccctgtggcccacctcaccatgatgttaacgtttcagcctgctcccttccaggcagacagttgtccagaaagttacccggctccctgnctgtgcgcggtggctcacgctgtaactcagcactttggnnggcngngacggcaaatcacganntcaggagatcgagancanccnngctnncacagtgaaaccccntctctactaaanatanaaaaattnnctgnngtggtggngggcnnctgnantcccagctactcaggagnctgagncaggagaatngcntgaaccnnggaggngganntngcngtgagcnnngatngngccactgcactncagcctgnncnncagancnagactcngtctcaaaaaaaancaaaagttacccagcaacccgagtcatatcctgatgatatccatgctcctcagtcacgcatcccgtggtgcaggggctgaccccaagaggagctgctgcccccagagggtggggagccgaggcagggcctgggtcagacttaccaggctatgctcccagcccagccctcaccagggacccccgagtgcatctctctcctctccaggcctctgtttctccatctgtgcaaccacagtgttggacatggtagtcccaagtgtctgcttgtaactttgccctctctgtgcccccaggtcagggctgcgataagacccggtcacgggtgaccctgcaggagtggaatgaccctcttgaccatgaccttgaggcccagctcatctaccggcacctgctgggcgtggaggccatgctgtgggagaggcaccgggagctgagcgggggtgcagaggcaggcacggtgcccacgagccctggcaaagtccccgaggactcattggcccggctgctccgggtgctgcaggacctccgcgaggcccatagctccagcccggccggctccccaccctcagagcccaactgcctcctggagctgcagacgtgaggcccgccctacgctcccttgctgagtcccctgccaagcgctcggagcccctccaggacactctgcaccccctcaccccggtcctcctcattagggtgcagggcctaggtctcttccaagtgggggaggggggagagtcaggaataaggggatccccagaagtgcagagctgagcaggcttgggcctgtcatggctggcctgaagtgtccccagctccctacagccgctgtagccatcactgcctctccagggaccctcctctcctgcctaggacagacccagccagaaccactgctaggatgggccacacccaggggtctggcctccagggacctagagaatgggagggagaacggggccccaggagacccggccgccaccccacccgctacccttgggtgccacagggctgtgctgttgccaacagtaaacctgctgttactgtcaaaggctctggg

SEQ ID NO: 396529 - DNA, 1603 bp, Homo sapiens
ctccacccgctgggctaggctgggccgggttggactgggctggggcgaggggcgggcgaagagcggtggggaaccaggagcgctggggaggaccaggaggctgtgtcccggcgagggtcagggacggagcctaaggggagggggctgccaggagccctggtctgggggactccagcccgcgctcttccgcacccctccagaatgtaccgttcatcgccgtcaccagcttcctgtgcctgcgcttcttctctcccgccatcatgtcgcccaagctcttccacctgcgggagcgccacgcggacgcccgcaccagccgcaccctgctcctgttggccaaggcagtccagaacgtgggcaacatggacacgccggcttccagggccaaggaggcttggatggagccgctgcagcccaccgtgcgccagggcgtggcgcagctgaaggacttcatcaccaagctcgtggacatcgaggagaaggacgagctggacctgcagcggacgctgagtttgcaggcgccacctgtgaaggaggggccactcttcatccacaggaccaagggcaagggccccctcatgtcctcctccttcaagaagctctacttctccctcactaccgaggccctcagcttcgcgaagacgcccagctccaagaaaagcgccctcatcaagttagccaacatccgggcagcagaaaaggttgaggaaaagaactttggcagctcgcacgtcatgcaggtcatctacacggacgacgccggcaggccccagactgcctacctgcagtgcaagtgtgtgaattgagcttaaccaagtggcttgctgtgctgccggaaggtcagggctgcgataagacccggtcacgggtgaccctgcaggagtggaatgaccctcttgaccatgaccttgaggcccagctcatctaccggcacctgctgggcgtggaggccatgctgtgggagaggcaccgggagctgagcgggggtgcagaggcaggcacggtgcccacgagccctggcaaagtccccgaggactcattggcccggctgctccgggtgctgcaggacctccgcgaggcccatagctccagcccggccggctccccaccctcagagcccaactgcctcctggagctgcagacgtgaggcccgccctacgctcccttgctgagtcccctgccaagcgctcggagcccctccaggacactctgcaccccctcaccccggtcctcctcattagggtgcagggcctaggtctcttccaagtgggggaggggggagagtcaggaataaggggatccccagaagtgcagagctgagcaggcttgggcctgtcatggctggcctgaagtgtccccagctccctacagccgctgtagccatcactgcctctccagggaccctcctctcctgcctaggacagacccagccagaaccactgctaggatgggccacacccaggggtctggcctccagggacctagagaatgggagggagaacggggccccaggagacccggccgccaccccacccgctacccttgggtgccacagggctgtgctgttgccaacagtaaacctgctgttactgtcaaaggctctggg

SEQ ID NO: 396530 - DNA, 860 bp, Homo sapiens
  misc_feature (16)..(16): n is a, c, g, or t
ttttttaccccccgtnagctcatctcggtcgacttagagatccctgctgaaggtccaaacaagaacagtttgtaactcattagataagtatagtagggaacaggagagaaaagaagactagtgggaagtcaggaggatagtgtggagtaagtttctacttcaacattgaggtggagtattcaagtgaaagattaggtatgtgaccttgttagccttcaaggttaaaagcaggaaagcaggttaattgtcatgggacatgcaggaggtagaaaaggaggcggtggtggaacatggtggctcatacttttaatcccagcacttttggaggctgaggtgggaggatcacttgagctcaggagttcgagactagcctgggcaacgtggtaaaaccctatctctatgaaaaaataaaaattatctgggtatggtggcacatgcctgtggtcccagctactctggaagctgaagtgggaggattgcttgagcccaggaggttgaggcagcagtgagctgtgattgtgccactgtactccagcctggttggcacagcaagaccctgtctcagaaaaaaagaaagaaagaaaataaggcagaatcgttagaggaatcctgggaaattcggtgaattcagtgattgtgggcaaggaaattgtgatactaggcttgtgaaataaaaaaatggtgaatattgatcacattgggtaagtttgggaagagagaagctaaatttggcaagatttagaaaagaagataggcagtgagttgactaataaagcagagaggtagaaactaaggaaaaagaaagtgtggggccgggcgcggtgtctcatgcctgtaataccggcactttgggaggctga

SEQ ID NO: 396531 - DNA, 313 bp, Homo sapiens
atggaggtaaattaatttgatggttacttcaggccattgctgtatactctcagacagccatttttatatttttaagcacatcagtcaatttaaattaaaccagttgtttgggattttatatttatacagttttagttagggacggtggcctgaaataatgagctaagatttaaaagacataaggttatgaatcagttgatagactatagtaagcagagcctgggcaggaaggtccaaacaagaacagtttgtaactcattagataagtatagtagggaacaggagagaaaagaagactagtgggaagtcagga

SEQ ID NO: 396532 - DNA, 287 bp, Homo sapiens
tcaaaacgttgggattacaggacgtgagccaccgcacctggtccagaaagtagcttttgagactggcttctttcagttagcatttgcgattcctctgtgttgccgagtgtatcagaagttcgttgctttggatggtccagtggtatttccctgtgtggatgcattcccctttatccaaccgtgaggggcatttggttgcttccagtttgaggtgatcatgaacagagctgctatatacatttgtgtacatatttttttcttttttttcttttcttttcttttttttt

SEQ ID NO: 396533 - DNA, 384 bp, Homo sapiens
ttctatgaggaaaaatataaaatcagaatgagaagccatttgtggatactaaaataaacacgtcacagattcacagtagagaaacctgttattttgcttctttgtgtagcaaatttatcttggtgagctcttcatatcaggacattagagatttcctgcatagaacttaaaagtatggatataacaatttataattagcccctatcaatgtgatgggcattaaagttgtttgcagctttttgtagttaaaatcattgctgcaatatgtgaccacttgcatatatcatttcatatacgtgtgtatttctgtatagaatgtgcatttattataatgttctaggattacaggtgtgcgacaccatgcctggctaatttttgtatttt

SEQ ID NO: 396534 - DNA, 266 bp, Homo sapiens
cggcattacccataatggtcaaaagtggaactactcaactgacccatcaactggatcaatgaatggataaaaatgaatgggtaggccaggtgcggtggctcacacctgtaatcccaacactttgggaggaggagccaggaggattacttcaggtcaggagttcgagaccagtctgtccaacatggcaaaaccccatctctactaaaaaaatttaaaaattagctgggcatggtggctcatgcctgtaatccctgcacttcaggagg

SEQ ID NO: 396535 - DNA, 1073 bp, Homo sapiens
tgcctagctgtgaaagcttaggtggaatcataacattaaaaacaacaaacatggctccgcccaggcagaggtaggagtgactggcattaccctggtgcttaagcctaggagtgagaagcagaagcctccagaatttgaatcctgaacagataccacaaattcaggagatgatcagtaaacgtttgagctttttgtttgtatgtgtttttttttttttttgtagttttgttttttgtttgtctgtttgttttgcgacagagtctcactctgtcgcccaggctggagtgcagtggtgcaattttggctcactgcaacctctccctcctgggttcaagcaattctcctgcctcagcctcccaagtagctgggattacaggcgcgcatcaccatgcccagctaattttttgtatttttggtagagacaaggttttgccgtgttggtcaggctggtctcgaactcctgacctcaggtgatccgcccacttcgtcctcccaaagtgctgggattacaggcatgaaccaccgtgcccggccaacatttggtttttatgggaaagaaaacagcatcctacaacaaaattggttatatgccatcactgttaagggatatttaccttttgcttaaagtgtactacatgaaagccaaggagaagatttatagagctaggtaaaggctcaggaaggcaggtgccctgtggataagaatgtaggcagttcaggtgggaatcaggtctgtctgctcagggagaccagtgagagccagctaatgcctgcctgaaacttttgatttgactgtatgccattctcagagaaattattctttcttctggcattttcaactgaaaattcctttggtcttactttgattttgttactggaaatacagtgtgttttattaagatttgaaacaaaacattttttattttattttatttttgagatgaagtcttgctctgtcgcccaggctggagtgcagtggtgggatcttggctcactgcaacctctgcctcccaggttcaagtgattctcatgcctcagcctcccaagtagctagaattaccggtgtgcgccac

SEQ ID NO: 396536 - DNA, 328 bp, Homo sapiens
tgcgtcctttgttggatggaaactgcattagacacagaaacacagagctgctcttttccccacaggcaggtgcagacctgaaagagcgcctgaagcggctcagaggcaaggggaggacctcatccttaagtcacaggactcaggattagaggacctacagctttcagcctcggctcaccatctcctagccctgatgacccacagcctccccaagccttggtttcacagcctgtaaaatgggttcatgagcctacttttcatagctacactgtgtgtttgtatataacccatggctatcactattactgcggacgcggtgctatgaagt

SEQ ID NO: 396537 - DNA, 589 bp, Homo sapiens
cttgccttcccactagaatagtctagggctgtgtctgcttcatgactttccaattggctgatgacactttctggatggtcatctagggatcatggggtgggggcacagagacctgtaccatccaccccctccagttcctattccctgatatacctgagaatctcagagacttaccaaccacatgccccaatgttggagacctgaggtccagggaaggggcacaggagcttgcatttcagatgctctgacttccagcacctgccactcaacacatgaatgagagtgcactgatctgagagtgaagcagccttcccatgtccccccagagaaagagtaacactgcctttcatctccccatgacccatgcattcattcattcgacaaaggtttctagaaggccaggactgtgctaaacactggggattctgtgaagaacaggacaaacagagctttgccttcattaggtttatgatccagtggatggactgacaagaaacaagcaaacaaagaaatgagtacagaatggcctatttagataatgacatctgccttcttctgaagtgtaatcctcaactggccaacctgatgg

SEQ ID NO: 396538 - DNA, 140 bp, Homo sapiens
catttgtttatgtgtgtctatgtttggttttttaaatttatgtatctacctacctacctacctacctacctatctatctatttatttatttattgacaggttctcattctgtcatccagactggagtgcagtggcacaat

SEQ ID NO: 396539 - DNA, 189 bp, Homo sapiens
aagagccgtttgtgtgaaaagtgttgaaacactgaactaaagctgtgatgtggagatgaagacgagacagatacacattgaaaagataaaattgaagaattgacacagttgaattgataggaatttataaacaaccagaaaaagatcatggcaaagaggttaaggtaagtgggaattttggtttgggta

SEQ ID NO: 396540 - DNA, 517 bp, Homo sapiens
tacttttaaaaattagttctatgctcatatcctcacattgagatttaatgtatttcagtttaataaatgagaacatataaaataatttacctgtaaggacctgtctatgggaacttctatattctgcttgaaattctgacacattaacctggccatttccaaaaactttctggcaagagctcttcatggacctaataattgctttactgtttaatcattccctgagcctttttatactctagtaaactgcatctgtcactagatttcatcaccatctgtattatttatcccttgtaatctgatatctatctctataatgcccaattgtatccccttcaagtgcccacttcattggcttatatacattaggttttcaataaatatttttatataatggtaaatgaagaagttgttctttatattttaaacaactcttacggaaggagattacaacacagctggaaggaattattgtgagagtgaaacatggaaccaaaaaagataaagcaagggaaat

SEQ ID NO: 396541 - DNA, 529 bp, Homo sapiens
taactgggactacaggtgccatgtcaccatgtctggctaatttaaaacaaatttttttttgtagagatagggtctcactaaacagcccatgctggtctttaactcctgggatcaaacagtcctcccacctcagccttacaatgaagctggaaggtgaaagtgagtgtagtctgtctcatagcaaaggtactggtcccttataggactcattgtatccaccaacctcattcttgacatttcatttttgcctgtattctaaattttttcagagattgtgtgctttttttgaagttcaaggcaggctactctaaaagctcatgtgtgtttgcatactgagtatttttcttattggatatgtggatctattaattccataattcatttttgtgtgtaaagtgcacagacattttctttccttaagcttcaactctctagttgtattatactagtcttcccatttccgggtttttgtttttctatttacattactgtatgaagaggaggaagctgatcttgggatatcgtaagt

SEQ ID NO: 396542 - DNA, 177 bp, Homo sapiens
aaaatagatggccatagatctttcacataaacaaaatgagtaatcaaatgattttatgttcaactgaaaactaagagttttcatctggattgtaattacttggatgattctcactcatattctttgattatttatcaataggaatcacacagtgaacacattttaactaatataatt

SEQ ID NO: 396543 - DNA, 194 bp, Homo sapiens
tgtaccctcccagggtaatcttactcacaccatggattaattactgcacatagatttgatgactctttcaaaattttccctattggtgacttcattattgggcttcagacataaaagttcaagctggacatcacgccgtgttccacaggcatctcaggttcaatcagaactcaacccttcgcacccccgccttt

SEQ ID NO: 396544 - DNA, 256 bp, Homo sapiens
gacaggagacccagtggagtctagagaacatttcttgacgcaaccgttagtgtttttcatttaaaaaaaagattaaaataaatgcctgatttcccaagagaattctctgcccctttgaacaatgcaataattcaactccttatgtgttagactttcaaaagtagttggatcttagcaacggtataatagtaaaatagatgagaatacatttgacagtttccacttttctttttttttttttaacctgagaaatcca

SEQ ID NO: 396545 - DNA, 257 bp, Homo sapiens
ctgaaatgagactgaggctgggccttatgtagggttaccatatattttattgaccaaatcagcacacttttgagaaaagaagcagggactaccaatgaatacaactggaccccaggcacaaaccatgcctctcctgggccagcttccctgtgtgattaatatcaaaagccataaattttcggcaaattagtcatcactgggagtttgtattggagccacaatctcagcttattaattacagatgttcaaggagtttg

SEQ ID NO: 396546 - DNA, 621 bp, Homo sapiens
taagactgatcattttcccaagtatttgcttggagtacagtattaaacttcttgaaaattgaggttgaccttttaaagagctgattcttaactgtataaaccaagaaagaataggtgtaattacagtatagccatattgaaattagccaggctgaatgaagtcctctttggacataggtttagttcggcacagctggaatgaaaatttgcagccggtacagagtgccaccaagtggcgggttggaaagcccatgctagactgctttgagccataaggcttggctttttacttgaaaataccagtccaaatccgaaccttgtgttccagtttttttgcataagaaataaggcagctgggcgcggtggctcctgcctgtaatcccgccgaggcgggcggatcacgaggtcaggagttcgagaccagcctggccagcatggtgaaaccccgtctctactaaaaatacaaaaaattaactgggcatggtggcgcgcgcctgtaatcccagctactgaggaagctgaggcaggagaatcgcttgaacccgggaggtggaggttgcagtgagccgagatcgtgccactgcactccagcctgggtgacagcgagattccatctcaaaa

SEQ ID NO: 396547 - DNA, 551 bp, Homo sapiens
agagaaaggagctctccaatgggtatctgttgttttttgtttaataagcattttagtggcagaaatagatagttgtgttggggctcagaaatcaacatccccaaagatggtgttttgacctgttaaactgggatctctctgactcccccacccccactgtctctcccatggaatctggagttcctttatccacctaagacccaaacccaccaaggagaagaattattcttgttccctccctgttgtcattgtttattgcaggaaagaagaccaagatgtaagcacacctgagcagatccttttccaagtatcctgatgtctccaagggctgttcagattccaaagagaactatctacaagttaatctctgttactggagtcattcattctccgtagtaatctgctccacagaattcctcttctcttccctcccataacctgttttaccaggatccaagcctccattctttctgtaacctcattgggaagttggttcttcatttggaaggctcccatgtgtacatgttaaataaatatctatgccttttctt

SEQ ID NO: 396548 - DNA, 364 bp, Homo sapiens
ctacgacttatagtgagcgtgtcagtgagcgtgtcagtgctctcatgtacttgggacaggtctcacactcggacacaggaccggacgcagcagtagctcatgaggtgaagttggcagagactacatgtcttttacagtcctgcacaccctgacaggcgtgtcagtgccttttggaataattccttgacagaagtgacattaactacaaatattacattaccagatcgtcacactaagcagaaaggaataacctgcattggaataaggatttggaattaattcagtgaacactgcagcttgatcatagcttcagatatctctgccttatcattagcagcattctttattccccccgggctctgac

SEQ ID NO: 396549 - DNA, 499 bp, Homo sapiens
atccttgtatcccccgggaccataagcagatagttagtgcgggcccttgacatattgaccccacccgcatgaaccaggcaggatccctgagccatgccccagtggctgcaccactatgtcacctcctagctttagcccagggttcttatcacttgtcctagacactggtgggctaatgctgtgagaaggcagcaggaaggtgaatgtcttacggagaccccagatgtggcctcaagtcagccaggtatataagctggtgactttggggattatgtaccgttttgtaaatctagacactgggtcaacaccagaatctggtaatacatagttaacttgaagaaatgcttgagccaagttaataaacagaagttagtcagaaggactgcccattaggcaccgtggatggccttgaagtgagacatgtgggtctgtgggtactactgagggcttacacctcagtagtactagatgctgcagtgccagagttgctgactgcagg

SEQ ID NO: 396550 - DNA, 633 bp, Homo sapiens
cttaacttaaatagatgcatgctcatctctttgttatggaggataacatttcaaagacactgttctcctttgtaaatcactttcaagacagaaaaagatgttctgactcataaattcataggggactgagcctgtctcactaaatctcctccattaaactctccataaactcctccataaactcttagtattctggggcagaaccccgccacttcccaaggccagcggccattttcctctgtgtagcagtacaatcaattgcatttgaagtcttggatctgggctgagacagttaaaaatgcgagacactcagtatgaatgatcatccatgagccttcagtaggggaagtgggaaggaaggttcaggacaccatgtaagcatcttgaagggtaaaggcagtatttcccaaatcatgagaaaaatcaactacaccagaatcacctggagagactgactttttacaaaagactcctgggcttcaattcaatccttccaaattggattctgagagtgggacccaaaaatctgggctttgttcaaacaagtttttctgggaattctgagacacaaaagtttgaggaccggtgatttagcttatcttctgttccattgctgccaacctcattcagagg

SEQ ID NO: 396551 - DNA, 336 bp, Homo sapiens
ctaacgattatgacaagtttactctgtgccagccaccattttaagcacatcatatacttctccttcaatcattacaactattattattcccattttacaagtgaggaaacaggctcaaattaaatacctttctcaagggcacagctagtatattgtggaaccaggatttgaactcaagaagtctggttccaactgcatgctcttaaccatccagaaagcttccagtccatggaggatggggagtgggagatgctgtggtgatcatctggggataaaagaactactccagttgctgcaggaatatgtgaggtggaggggatctctggcttggctgct

SEQ ID NO: 396552 - DNA, 152 bp, Homo sapiens
aggatgggaagaaatgaacaaagaaccggtggcggcacacaacactccacaggtgctttgctgtaggggagcagaggaaatggggcagtaagtgaaggggtggcccaagggagtgagtgttgctgatgggagatccccagtgctttgcctgt

SEQ ID NO: 396553 - DNA, 432 bp, Homo sapiens
gccccacataaggcccactgacccacattctggaggtagactgtaaaattatagcttgcaaactcctccaggtgataatgatatggactgaagaatgagaaccactagtaatacagtatgcttttcattattacaaatattaactataaaataattggcaggaaatcttggtgagtgcttactgacattcaggaaatagaaggcctatacaagcatttattgttttaagtatgaatttttaaaggaaaagatggacacatctatacataaaatttaaaaggttcgtgttaacaaagacaagataaaaagctagggggaggaatgtaacataagatgcctttttattgactgaacaccatgtttagccatgcattgcctccttccaatatgagtaaaatgtatcagaaataaattcaaaattctcttttagta

SEQ ID NO: 396554 - DNA, 200 bp, Homo sapiens
tacgatcccaaccccagccattcccgcgcctggcctcgctccgcgatgcccatctttcccctccttgcagaccccgctcccgggttcctgtcttcgctctcctcgctctcttcgcctgctcaacccttccctgcccccatcctcccgctacccccatccccttcttctgtcccggcgcccctctccctcgtcggctcctg

SEQ ID NO: 396555 - DNA, 189 bp, Homo sapiens
cacttatccctctactggccagtgaacagcttctgcttcactgttactctctccataattcttggtgatttcaatatccacatagatgaggcttccatcaccttggactctcatttccttgaatgcttctcctccagtgatattgatctctgaccccacctcagtaactcactctcacagtcatatcct

SEQ ID NO: 396556 - DNA, 193 bp, Homo sapiens
tccttatttattatactctttcatatcattctttttaaaatttaaatcaacttgtctttgaattctagttttatttaatctatgattttttatactatgaaggactttcatagagtttttctctggtataagcaaattaatatattgcctagtgagcatattaaaatttttgagaaataataatttaacctgc

SEQ ID NO: 396557 - DNA, 558 bp, Homo sapiens
ctaatttcatagagaacaggtattacaagatctatagctttaaaaaaagaaacctaattctaaaaattagaggaaatgactcaactctcatgaaaaatcttttgcaattctgatttctcagttattagatgaattttcatatcttacatacttctttattagtctcaaacatttgtatttttctattcctcacttctttcctaagagatgtagatacaatcaagagaagttccaaatgcatgagcttgaaccagtggcttacaatgcagctaaagctcttgtcaatgaaggccagggttcttgtcagtttatctcaaatttctacaaggctactaaaattaaccagggagctgtgtctccatttttatattcttattgccccagccaaattctgatatagctaattgcttgtcccccacccaaaattctcttctattttggttaactcatatctctctgcatgatctaagcttcataggtacccatacccactagagctctggccattgggcaaatgtactgcatcctagagatggcagtatatgttaataaagagcc

SEQ ID NO: 396558 - DNA, 417 bp, Homo sapiens
cattttcctcaggttttgaggcatctttttaaagcttgcttttagtttcggattcactctatgtcccatgccatacacccatcagccgtctgcctgggagagtttctggaagctccatgcctcttcataggcacgttgccatgtaccacatggcaggcaggtgtgactggagcttggcattgcagagcccctgacttccaggagctcagagcctggcagaatggatattcaagaaagagccctcgtttctgatgatagggtctgtttgaaaagcattgtggttgacagagccatgccacgctgtctgcagaccagaggccgggcccctcgcagtgttgaaagttcagccctgccgttgtgggtagtgctccctaaggcaagggcagatgccagactattgttaagaagattatacta

SEQ ID NO: 396559 - DNA, 458 bp, Homo sapiens
aactccataagtttaaaataattttgccttatttttaaataaggcaaatatttttttaaaataaccttgcaattatttttttaaattttcatatatttaaatgaggcttgaatggaaatgtccatctataaacactaaagacaagcttaaattttaagaaaatttaaatttaaataataaattaataaaatttaaatttaaattttaagaagtaacttttaattagctaggtgtggtggcgggcacctgtgatctcagttacttgggagtctgaggcagaagaattacttgaactgaggaggtggaggttgcagtgagccaaaatcatgccactgcactccagtctaggcaacagagtgagactctgtctcattattcatatcttgttactcaatatttataattaaaaatataaaatgttggattaagcccactcttttcatttttcttaatcttca

SEQ ID NO: 396560 - DNA, 310 bp, Homo sapiens
cagttttactggcttctgctttgggtataaaagaatccctagtgggcaagagccttctctgtgacaggcacctgtcgaaactgatacactgtgctgtgcaattaggccttgtggctgtttgactgcctttcagtttgcattctcctaaattatggagagtttagaaaaactgtactactgacagcactactttctggacatacaaaattactttttgcacaatttacaccaaattcataagtcttactcagcatctgggtgttcttgctcatttaacatgcaggtgtataaaaaaaaagatgtataagac

SEQ ID NO: 396561 - DNA, 1082 bp, Homo sapiens
gtcatgcttttggtaactttttttaattactgggataaaactgcacattaagacatattcctaaaaataccagcaaatgcagaaatatacaaattgtgcttaattagcgtacagagtaatgcaacaagtcaatgcaataaatagctcagaacacctaaaaacataaacatttaaaacaatttaatgtaatcaagacaaaatccaaaatttcaatgtattttttatagttaacaactgttttgccttttcagaggtctatgaaagtgacctttcttggaagtcatgaaattggatattttccctcatgcatagtcacccaaaaaaatctgcctggaatcaagagaaatcatgccagaaactcagttaacttaaaggtaatctgatatgtggccttgtctatttcttctaggctataatttctctggggaaagagtgtgacttttagtgtccttaccagggaaaacagtaagcattttcttccctctagtgatacagcaaagatgagtgaaagtggaagatgtcggaaggtgaataggcaagtaatgcttgcaatacattttgatgttcctacagaggtctaaaaacttttggtacctctgtacttctggctgtaacctctaagcttattccattataaacttcaggccccagcttcattctgaggtgattgcgccattgagatcactggtttgttttcttcaactcactcgaaactttactggtatttgttacttcactggtattcactccagtttaaacattctcttctacagtcaaggtattgtttttaaaggactgttttatacaaagatttccctgaggctaagtaacctttacatactaaattcttcaaagaaagaaaagaaaacttttccctaaatatgaactctgatgttctgaagttacggtgattttagatcattttttccgatcattatgacatcagagcaaccttatgcaggcttttctgtaaagactcaaagcatggactttagcaataaataatacttcacattgtacactgcaccatcatttaaaaagcattttcaggtgctagctactcaggaggctgaggtgggagg

SEQ ID NO: 396562 - DNA, 367 bp, Homo sapiens
taccgtagaggctaggctgctgtaaaaaagaatggacaggctctccgtgtactgatgtgggatcctgaatcctgtccaaggtttatcaaaggaaaagaagcaaagtgcagaacagcgtggagagtatgttaactaggaagagtaatatatccagaatccagccacccctcactactgctattgctataaacctggtccgagaccaccaacatgtctggcctatattgtgccattacctcctaataggtcactcgtattctacctttgctcccctgaaatctattctcaacacagcagccagcttgagccttttaaattaaaaaactcatttcacactcaatattcggcaatagttcctcatttcact

SEQ ID NO: 396563 - DNA, 334 bp, Homo sapiens
acagactcttgacacgtttcacttgcccttgagtcagtctttccatgtcactgaatattcttccacaacacgattttaatggatatagtcgtccattgtttaaatgtaccattattgacctatgtaaaaatgttcttttacctcaaatttttatatgtaaaacaaaaacatgtttgaggaataaacccacactgtagtataaattaaactggatgtaggccaggcatggtgagtcacacctatagtcccagcactttgggaaaccaagacaggaggatggcttgaagccaggagctcaagagcagcctgggcaatacagcaagacctcatctct

SEQ ID NO: 396564 - DNA, 405 bp, Homo sapiens
cactgcacttgacatgtttcatttctcttattagcttcattttataaatgggaaatggggagctcaaagaggtcatgtaacctgtcctaagctgtaccacaccactttagggactcaatccctagcctgactgcagagtcaatgggctgtgactataagcactgcctcccagaggctggccctggcagctgaacaggatcagtgtagtcagacagccagcatggtgaactgagtcaaacaggtatagacagcaacccctcagaagtgtctgcacatagtagatgctcaataaatatttgttgaataaaagaattgaggcactttaggaggctgaggcgggtggatcacgaggtcaggagatcgagaccattctggctaacacggtgaaactccgtctctactaaa

SEQ ID NO: 396565 - DNA, 398 bp, Homo sapiens
aaataaaacacatctatggttaggtgggcctgtgggccaccagtttgcaaacttagtttcatctggggaacatccagaaccatcttctgcccagtgtggcatactataggcatgaaggagaggtaagattagtattttaagtttttgtttgttagcatctctataacaaggtttagtgagggaagtggtggacagagatgttaaaattgtttttagactatctgtggatttccaatattccatccatggccccagactgaaagtcaagagcagttgtatgtgtataccttccttaagccaccattcaatctttgtgctgcacaaagaatcagcctggtgagcactgacacacgacttcagctttcttcaaactgattgttagtgtgcagcactctgtt

SEQ ID NO: 396566 - DNA, 716 bp, Homo sapiens
ataaaagatgccaattgtttcctgcctctgggtcacttccacagctgaataagtggccctgcctccccagctccaagcctctggtgagtgcactgtaattggacacttgacctaagggttccctcagtagactcaccagtggccaggctggcatgacagtgagagagaaccaaatgggtttccctcttgagtacttgggacgttgagtctgtccatggtgagcgctggagctgagagctgaagccagagagatggggctgcaggtggggcgggcaggtgcaagatgaaggagcagatatgcaagaagccctgtggtttctgagaggtggaagatgctcagggggttcctgaagtctctggagttcctcaagtttccagtgattttcagatgcacactttgtccttggattctgtgagagcccccaggattctttccatcacatgccctcctcttgatttttcttccttatttaaagtagttgaagtaggtttctgattatgcaaccaaaaagccttcatggaacattcatgcaccttcctatccaccccactgggtaaagtgcatggttatgtgctaccaaaatgccaggaggtcactggcttcctactgaaaaacaaaagagttaaactcagcattgtatgatcctgaagtttctccctcaaccctctagttctacgagtctttggaattaatggagtttttgttgggacatttt

SEQ ID NO: 396567 - DNA, 275 bp, Homo sapiens
ccgagattgcgccactgcactccagcttgggtgacagagcaagactctgtcttggaaaaagaaaaaagaaaaaagaaagtcagatgtgattctcattgatggtggtgatggtgtgtttccaatcaggttggtgagatgagtacttggaaataggaaactcttcgaacactgactatttcaatatgtggtaatgcccctgagtgccttgagagctgggatggatcagagcagttaagaaagcttcctggaggaggaggatttgagctggaccttaa

SEQ ID NO: 396568 - DNA, 335 bp, Homo sapiens
tcttctagattaaataagactttgaagccataaaaaccaaatgcagtggttaaaagtcatttgtgaggcaaatgtgataatcactaccctgcagaaccaagtcagtaagctcatttgtatcttcattcaaatcagctatgaaaagacactgttgaaacaattagggatatttaaatactaatggagagagaaagtagggaataattgtaaattttattggatgtgatactagcattgtagctatgttagcagatgcccatatattttaggaatgcatattaaacatgtagaagtaaaatgggtagcatgtcttaattgaaaatattctgacaaaa

SEQ ID NO: 396569 - DNA, 204 bp, Homo sapiens
aatttagagcactaaatgcttccagtagaaaagtgaaaaagtctcaaaccaatatgcttccaccttaacaaattaggaaaaaagaagagcaaagtaaatttaaagcaagcagaaggaagaaaataataaagagcagaaatcaatgaaattgaaaacagaaaaacaataacaaaaactaaatgaaacaaaaacccagttatttga

SEQ ID NO: 396570 - DNA, 508 bp, Homo sapiens
atttttttgtagagatggggtatcactatgatgcctaggcttgtctcaaactcctggcctcaagcgatcctcctgccttggtctcacaaagtgtcaggactacaggtatgagccactgcacgcagcctaatgtgattttgttttgatacatgtatacattgtgtaatgatcaaatgatcagagtaattagcatatccaacacctcaaacatgtattatttctttgtgataggaacatataaatcctctcttctagctattttgagatctacaacaccttgttgtttactatagtcaccctactgtgccatagaacaccagaactataaaaactcttgaacaatgagatttgatgagcttccagattgctgaacacacagaggtgcctggaaggttatacacctagagagagtatagaagctctgcaccctcctcctgatagcttgccctatgcatcttttccattttgctgttattctgtatcctttataataaactagtaaatgtaa

SEQ ID NO: 396571 - DNA, 706 bp, Homo sapiens
tctgagatagggtctcactctgacacccagctggggtgcagtggcaccatcatagctcactgcagctcagcctcctccggtgcttaagtgatcctccagcctcagcctctggagtagctggaaccacaggcatgtgccatctcacccggctaatttttttatttttatttttttgtagagacggggtttccctatgttgcccagactggtctcgaactcctgggctcaagtgatcctcccaccttggcctcccaaagtgctgggattacggcgtgaactaacgcatttagccaagaccatcattgctaagagcagtaatgttaacaaatataatgaagaataaaaccagaagtgttctagttgtagcttctgggtagaaacagccttaattatcatgtccctaaggattcagcataacagcaagaatttcctttcaaataaggcaccctctgccacaccccatgagcagtttatttttgctgtttgcattggttatcacaacttgactgtgttgttaatcctgaccttttatttagaatttctgatttattccttctgtttaaaaattgggactatatgctaagataattatttttttaaaaaaagaccaaattattgttttaagattttttaagctgctcccttgtaaaatagggccttagatacttcctattaaatgcccattgtttccaaaattcattcacgc

SEQ ID NO: 396572 - DNA, 395 bp, Homo sapiens
ggttctctgacaccatatgtcgacagactagtaagacgttctgaattgtttaaaggacttgcatttatctgtctgtaaaggcttgtataccaattgattgaaaatggaaaatagggccctgttcatttcttcagtattatctctaggatatgtttgaactttcagatggttcagctaatagttgtgagaattcaggattactgaattaaaaaaaaaatgactagagtgtgtagctagtaagttcctggtagtatcagtatgcattaatacacctgaagtcttccagtgatcctgtccagtaaacagtattatacctgttcaggacctcatgtctttcctcttcctgattctggtactttactttattattgctacctagctgaccctggtcaact

SEQ ID NO: 396573 - DNA, 502 bp, Homo sapiens
gggatggaatgtctctggtcagaagggaggctgtctccgggttggcatgtttctggtcagagaagggtttatcttagggttggaatgtttctggttatgctgacattagctattaggctgatattttcgggctggatttaggcggcttttaattaagggggaacttagaatggtggtgtttgttcaagatggcaatgctcctgctccgtcactggccaggtaaggcaaccctttgttatggtaacaacctgagattggcaggggctcacctccaggggcagctcatgtgcttgctggcgaggctgcaccttgtcattcaggttcacagggcacaggtcaaccaggccctggctcttcagtcttctgcctggagtgacttatgtaattctgctcagctttcatagggcacagggagtcggggctaactctgctgcctggggctggaaacagactcctcccttgaggagcagcagtccaccatagggaagtcacagtggtccag

SEQ ID NO: 396574 - DNA, 168 bp, Homo sapiens
tcatctccgacccggcattcattaaagtgtggcaggccatggcttgcaagcagagtaaaatctaagatccttcacaattcttgacatagatctttagggaaaacagaccccctcgaataactgataaaatggtatgaagatgctgtttcagtagattattggatttcc

SEQ ID NO: 396575 - DNA, 258 bp, Homo sapiens
tacaacatgatgttatagaataatgggacagatatagatagcacagtggttactatggtgaagccgatgagcatgtctgttatctcacatagtcaccgtttttagtgtgtgtgaggagcagctgaaacctgcttcacagaaatcccttatgttgtgcgtgagccctctagacttactcatcctgtatatctgctacttggtgtcctttggcctacatctccctatttccttcagctcctgcccatggtaattaccatt

SEQ ID NO: 396576 - DNA, 83 bp, Homo sapiens
tctttccaatgttgaagaaagtcataaatttacatatctaaaaagttcagtaaacttcaaggagggtaaagacaaaaagattc

SEQ ID NO: 396577 - DNA, 421 bp, Homo sapiens
atgtgtgtattcctcacagaggactggaagggtatgttttccataattcctaattgctactatgcataccttacttgctcaaaaatattaacaaaagacataaacagccctgaaactagtcttcctactccaatccaaatgacagctgctataaatacaagatatcttgacaacagactggctaattgtctgatctgacaaatgaaatagtacaattgtaggagacaagagaggattccctaaatccactcctctctgtaaaatggggagaaggacatcaatatggcaattatatatctcttaccctctcattcattcagcctacctgaggctagtaaacctctctaaaataacacaatctgtcttaacacattcctattcaaaccactttctttttttttttttttttttttgagatgga

SEQ ID NO: 396578 - DNA, 182 bp, Homo sapiens
cttagtcagacagagtataagctacttagaagaaatacaaatacatttcctcatctgaagtccctaggtgaccatgtgctataaaatttagagtttttggattttttaagcaatacatgtatacctgtaccgtataatttataacaccagagtctagttaacacccagtaatcaaccacatt

SEQ ID NO: 396579 - DNA, 582 bp, Homo sapiens
agcctcagaaccaaggtctctctctgcccctgctctgatcccttctttcctgaagcacagacaggggctttctctgaagtccctttatgccattaagggaagttcttccagaagaaatgcaattgtcttaaaactttctcctttagaattctcatcaaataatcagaaaagattaatgaccagagcaggtaaaaagactaaaagtcatcaccacacccagatagagttttcatctacttttctgagggcagctcccagagattgcctgggagacttcatctgcataataaggccacctttgttcacagtgaaattctatctctcacttcccacaaattgccaccacctcccccagagctcagaggaacttcgtcctagccaagttgtttgctctttgggcccatgcatttcccctgaaaagcatttactacccatcaggattacctacatcccccatgtttcttctccactataaagagggtatttaagtctcaaatctctggcccttctttgggtctcatatttgccgaactcctgtgtccatgtgcccgtaaataaatttgtatgtttcttatcctgata

SEQ ID NO: 396580 - DNA, 331 bp, Homo sapiens
aggggatgatgaagggcagtgttccagatagccctgttgttggactgctaatctgactctcttgttttggtttacgcattttacgaggtgcctactatgtgctaggggacgtcccagcacctcgtgggctgctgacaaccggtgtgagtcctcttaattggcttctaacataactgcactcttcctgagctgtttaatggccttgagtaacgagctctccccatctcagtatttgtttaatgccgtattcatggtcataaatagtggcaccattactttcaggagaactgtaatgatgtatgtgtttggtgaagtttccagctcctgaccc

SEQ ID NO: 396581 - DNA, 874 bp, Homo sapiens
  misc_feature (71)..(71): n is a, c, g, or t
  misc_feature (137)..(137): n is a, c, g, or t
  misc_feature (697)..(697): n is a, c, g, or t
gagccgtcaccccgggcggggacccagcgtaggcaactccgcgcggcggcccggccgagggagggagcgangcgggcgggcgggcaagccagacagctgggccggagcagccgcgggcgcccgaggggccgagcganattgtaaaccatggctgtgtggatacaagctcagcagctccaaggagaagcccttcatcagatgcaagcgttatatggccagcattttcccattgaggtgcggcattatttatcccagtggattgaaagccaagcatgggactcagtagatcttgataatccacaggagaacattaaggccacccagctcctggagggcctggtgcaggagctgcagaagaaggcagagcaccaggtgggggaagatgggtttttactgaagatcaagctggggcactatgccacacagctccagaacacgtatgaccgctgccccatggagctggtccgctgcatccgccatatattgtacaatgaacagaggttggtccgagaagccaacaatggtagctctccagctggaagccttgctgatgccatgtcccagaaacacctccagatcaaccagacgtttgaggagctgcgactggtcacgcaggacacagagaatgagttaaaaaagctgcagcagactcaggagtacttcatcatccagtaccaggagagcctgaggatccaanctcagtttggcccgctggcccagctgagcccccaggagcgtctgagccgggagacggccctccagcagaagcaggtgtctctggaggcctggttgcagcgtgaggcacagacactgcagcagtaccgcgtggagctggccgagaagcaccagaagaccctgcagctgctgcggaagc

SEQ ID NO: 396582 - DNA, 361 bp, Homo sapiens
ttgaatattaatactaatattagtatttgaatactaatgagattgagtcttttttgttatgtggttggccaattttatttctttgttgagttgcctagttatattctttccttatttttatttgcactatctcctattgacatagaagagctcttcatatattaagggtctttttgtcaaatgttttaagttttttttttttttttacttttaaaattttataggtttttgctgacaagttttttttaacctttttattttgaaataattactgacttacaggaagttataaaaattgtacagagaggtccttttagccatcatccagctttccccgtggtaacatcttgcataagtatag

SEQ ID NO: 396583 - DNA, 632 bp, Homo sapiens
cttatatgtctggtctttacaggcagtggtttcatgtcgtaaatgaacacagtgagaaaccatgtagtttgatgatagggaaaaaataaactcatcataaatctccattatcctcttccatacgtgatatggttttgatctgtgtcaccaccaaatcttatgtcaagttgcagtccccaaagttggagatgggacctggtgggaggtggttggattatgggggtggatttctcatgatggtttaacaccatcccgtagtgctgttctcatgaaagtgagttctgccaagagctggttggttaaaagtgtgtggtacctccccctctcttcctcctgctccagccatgtgaaatgccagcttcccctttgccttccgccatcatggtaagtttcctggggcctcccagaagctgagcagatgccatcatgctgtctgtacagcctgcaaaaccgtgagccaatgaaacctcttttctctataaattacccagcctcaggtatttctttatagaaatgcaagaatggactaatataatgtgatggctccatttctcactgtggattaataaattattattcttagcctcatgtattcttagcaatgagaagtcaatatatggaggctgatgatc

SEQ ID NO: 396584 - DNA, 555 bp, Homo sapiens
agaggacctcagtctgctgctctcaatcctctatcaagcacttagcttctacagctcactaaaagagaagtttgccatttttcccacttgcaactccagagctttggcttagagattttgcctgatgtgagaagcaagctgtaaaacaggaaactcttaatcctttcacaaaggagctgacttcatctccaacagatagtggagacattcaaccttaagggtgctctcaagaacattggagattgtgacagaagtcaactgggaggacagtccaactgggatttggaatgcaggacaaactgaaggctgcctagtttccaggaaaaccatggaataaaacagcttagaggagccctctggggattagaacaaatatcaaacactaacgtcagaaactattccttcaaaagagccagaatttgattgaattacagtgtagagctatttataaaccagataactgttgaaaacaatagagcaatcagcaagaattagtgaagtttaattcctgggagtggtcaaggaagaagaggaagagaaccttaccaaaaccag

SEQ ID NO: 396585 - DNA, 331 bp, Homo sapiens
aaaaaatttggagattgtaaaaagaaaaattggtaactaaagtaaaataattaagatgtaacacaactgaatctataaataaataatgataatgtcattacaaacttcttaaatttatcattatgcaaaacaaatgaagaaatgcatgtggtctttctcagcatatgtctttccaggtttatataacatttattaaacattttgatcttttaatggcagttaatccattgggaaacagaatacttagggaatgcaaacaaccattaaattatatgccaaccaggcttgttacattggcagagtatgatgaatatgcctatgatgcctatta

SEQ ID NO: 396586 - DNA, 665 bp, Homo sapiens
atgtaaacagtcatgttatctggaaactgggacagttttctttctttctgatctgtatgtcttttatttcttttttatgccttactgcactggctagaacttggtattatattgaataaaaatggcaagagtggacattcttgtcctgttcctgatcttaggaagaaaattattcagtttttcaccattaagaataatcttagctataggatttttgtagatgctctttctcaagttttacagatacaagtttatcaagttctcccactacaatttttctgagagtttttaaaatcatgaatggatgattatgtttgataatcatcaatggattattgtgtttgatggattgttatggattattatgtttgatgtttgaacttgaccttctcaaaatttgcaaaggaaattaatgaattattgctttgaaatagttttcaagtaggttcatttttgttaagtatggaacttgtgaatacagaaaaattgctcactacatcaaatctgaattaaaacacattcctccttattatgcaacatatgccttacatcaacagcttcaagccctatttttttcaggaagcaatccaaaacattaccatttaggcaacctgtcaaacaatctcatactttttgttaaatcaattaatcaaaactaagtactc

SEQ ID NO: 396587 - DNA, 595 bp, Homo sapiens
ccctgagaagcttattccctaaatgatgatactatttcaccactccctttcagcacccctactaaggggcctttgaggaaaccaaggccccaaatctggttagttctgaggtagaagaccgagggttctttaggtctagctctaggcattactctaagcccaggagggtctgaggtttgggagccccggctgaggccctaatggtgagggctttcacacttgctctcagccctcggcagggaaccccaacctagatgtgtggaggggggctccactctcctagatccttctcaagacctgggtcctctcctttggagcaggctgtagttgccctggggagctgacaccttttggatttaattagaaaaatatcagacacacacagctctcctaaccataacttcccgcctacaccacacaccctgtgtctctatgacacattccctagggaggctgtacattggcccagagcctgctttggaaaagacagatgcccaactgtggcccccatatcagcatctccccaactctgccccatcttactcttcctttgctccagcttaggaatcctgtgagataaagtctatgaaggatg

SEQ ID NO: 396588 - DNA, 142 bp, Homo sapiens
catacatggatacatataacctataatgtgttttttaatacattttcatatgtgtgcttatttttactccctctcaggcttatagcaatagctagttgacttgcaaatgtataatggaagcattaaaagacagggaaggagg

SEQ ID NO: 396589 - DNA, 1211 bp, Homo sapiens
gctccatcaggacaccatggcagctttgcatgaccctgcctcccagggtcttcctgcgtttttccttaagtgccttattctttggttgtttccctacttgtttttgttgcgcccggcctcagagaattaaagaaaactgttcaaggaattaaaagaaaatatgatttaaatgactcgacaaatagggaatctaaatagagaaatacaaactgtaaaaagaattaaatggaaattctggagttggaaggtacaatttcgaattcactagatgggctcaatagcagattttgagatagtggaagaaccagtgaacatgaaaatagaccaatagaaatgatccaattcgaaaaacagaaagaaaaatgaagacaaatgaacagaccttcagacacacatgggatgatgctcaatgtccccacatacgtgtaatggaagccgcagaaagggagagagaaaaaaataaagaagtaatagctgaaagcttcccaggtttgatgaaaaatattgaattgcagattttttttaaaactcaaccaacactgaatttaaaaaacacaaagagaaccacacaggaaggacaaagccagaagcatcacacttcctgtgttcaaattatattataaagctatagcaatcaaaacaatatagtactggcataaaaacacacatagagcaatggaacagaattgaaagcacagaaataaacccactcatataaggttaactaatcttctacaaggtgtcaagaacaagaatgaggaaagaatagtatcttcaataaatggtgctggaaaaactggatatccacatgcaaaaaaaaataaggaaattggatctttatcttccaccatatacaaaaatcaactaaaggtggatgaaagatttaaatgtaagacctaaaatggtaaaactcctagaagaaaatatgcagggaaagatacatgacattggtgctagcgttgatttcttttttgatatgacaacaaaagcacaggcaacaaaagcaaaagtaaaggagtaggattgcatcaaagtaaaaagcttttgcatagcaaagaaaaccatgaagagagtaaagatacccatagaatgggagaaaatatttgcaaaccatatatgcaataaggagctaaatccataatatacaagaaactcttactactcaatagtaaaaaacaaataaccctattaaaaagtaggcaacaggctga

SEQ ID NO: 396590 - DNA, 1336 bp, Homo sapiens
gctccatcaggacaccatggcagctttgcatgaccctgcctcccagggtcttcctgcgtttttccttaagtgccttattctttggttgtttccctacttgtttttgttgcgcccggcctcagagaattaaagaaaactgttcaaggaattaaaagaaaatatgatttaaatgactcgacaaatagggaatctaaatagagaaatacaaactgtaaaaagaattaaatggaaattctggagttggaaggtacaatttcgaattcactagatgggctcaatagcagattttgagatagtggaagaaccagtgaacatgaaaatagaccaatagaaatgatccaattcgaaaaacagaaagaaaaatgaagacaaatgaacagaccttcagacacacatgggatgatgctcaatgtccccacatacgtgtaatggaagccgcagaaagggagagagaaaaaaataaagaagtaatagctgaaagcttcccaggtttgatgaaaaatattgaattgcagattttttttaaaactcaaccaacactgaatttaaaaaacacaaagagaaccacacaggaaggacaaagccagaagcatcacacttcctgtgttcaaattatattataaagctatagcaatcaaaacaatatagtactggcataaaaacacacatagagcaatggaacagaattgaaagcacagaaataaacccactcatataaggttaactaatcttctacaaggtgtcaagaacaagaatgaggaaagaatagtatcttcaataaatggtgctggaaaaactggatatccacatgcaaaaaaaaataaggaaattggatctttatcttccaccatatacaaaaatcaactaaaggtggatgaaagatttaaatgtaagacctaaaatggtaaaactcctagaagaaaatatgcagggaaagatacatgacattggtgctagcgttgatttcttttttgatatgacaacaaaagcacaggcaacaaaagcaaaagtaaaggagcggtggccaccgctccaccccgatttggagagaagtttgggatggagtgggcgagagattgagagagcgagcaggaaaagaggtcttggagcctgggactgatggtggataaggcctggaaagaagatgacgaggaggaggagagagggaagtggggtggatgaggagcaggctgacacctgggctgccctcaatccccaaggccagggagggcggggctggcccctgggaagaactgggtctctgggctccctaggcactgcccaaactggctgagccaggagtggggcaggaagtgagagtcaaggcccagcaaaa

SEQ ID NO: 396591 - DNA, 121 bp, Homo sapiens
agaaggaaaaaatcattagtgacaggtaagagcagaattattatggaagcatgtgtgttttccttagttgtatcatatgcctttcatattgaacaagtctgaagagatgttttatattaaa

SEQ ID NO: 396592 - DNA, 595 bp, Homo sapiens
aaccctggcttcatctctcctaaggaggcatcttttccttggctgacttctcactccatggcccactccatatggccaccacttatactggctgaggggcatggagtggataggacatggtttccttgacaaggatagctcagaggcaggcaggcccatctccacaccccactccttcattttctcttcctgctttaggaattctgtacatacaagagggttttattgtgccacagggtatttggaaaaggtgatgctgaactgctgctgatagtcttcatgatgctcaagttgaccaccaccctgtttcgggctatgacatgccagccactgttctaggcactttaccttacaatgagggcattcttctagcctccttttatacatacagactacagaggcacagaaaggctcagtcagcacccaaagcctaatagctggggaaagaagctctggattccaatacagttctcaatcctgggcctttcaccacctgtctgtactgcttccctgcaggactctctgtctttaatgctaaaatcatccagacgcttacattactcgagtcttgaaagcactgaaaatccaggggcgt

SEQ ID NO: 396593 - DNA, 496 bp, Homo sapiens
cctaccttctcactcacatatacaatctgtcctcaagttctgtacattcttccccctaaatataagatttaccactttttctccacccccattttacttgatcagctcatagtatacgctcaacaataccaactttgcctctaaaatgtattactgcaatagcttcatgactagttttcccactagccatgtggctctatccaatctgttctttttactacagtcagagtgatcttactaaaaagttaaatctgaacatgcaaatcctttacccccaattatgtaatgacttttgtttcaggatatctgatctctttaaaataacttatgaaattatctttccttgcttaactctctatccatatctttcttatgtatatgtgccaggagagttattaaccaaacaccaactttgtttttcagccatgaccatagacctcatcttcaccccattttctctccaagatcttagtttattgcggttcctctgcctgaa

SEQ ID NO: 396594 - DNA, 406 bp, Homo sapiens
cctgctgtcgctagcctggatgggaagcgcctctacatcaccacgtcgctgtacagtgcctgggacaagcagttttaccctgatctcatcagggaaggctctgtgatgctgcaggttgatgtagacacagtaaaaggagggctgaagttgaaccccaacatggtgaaaccccatctctgtgttgtctgctgataatacagagttggcactggcaactctgcactaaaaatacacaaattagctgggtgtggtggtacaggcctataacccccacttctcaagaggctgaggtaggaggatcacccgagcccagggaggtcaaggctgcaatgagctgtgattgaaccacagcacttcagcttgggcgtcagagtgagaccctctctcaaaaaaatgtagtgagcag

SEQ ID NO: 396595 - DNA, 685 bp, Homo sapiens
tttgagacagagtttcattttgttgcccaggctggagtgcaatgatgcaatcttggctcactgcaacctccacctcctgggttcaagccattctcctgcctcagccgcctgattagctgggattacaggcatgtgccaccatgcctggctaacttttgtatttttagtagagatggggttttgccatgttggccaggctggtcttgaactcctgacctgaggtgatccacccgcctcagcctcccaaactgctaggattccaagcatgaaccaccactcccggcctataattcttgggtgtctaaactattaccaatgaatacaactttaggtttcttctccctttagttatctcgtctcttctctctagatttaaacttaagcaagcagaagcctctgggattctgtactgactagaataattcactgcttccttcttattgcgagtccccgtccatcataatcctccctggatcatgctgaataaacagctggtgacttgagatggggagaaattctacagagtttccttgcctgagcctttcaagggctaagactcaaaatgttcaactgcctaaagcaataaacaccaaaagaggttaaatttcgaatttgcttttcgcttatctagcagtggacaactaatgaacccaacaatcaggcaaaatctgagttagaaacattt

SEQ ID NO: 396596 - DNA, 467 bp, Homo sapiens
ctaccagataagcagaatgttcacaaagaatcagttatccttgtttcccaaatggcttaagtcaactgtacttgttattgtaatagtgcaatgtaattagatgctgcttaaatttgtgagatctgagtgaaaaaagtatgtcattttcaaagaaactaagtcaaatgctttgaaaaactcaatgaggacaaaatagatcattaaagaatagacagcaattagattaggtgtaggtgaaacactacaagggtttgagggattataaagatctaggtagattgctcattcagattgattgtcctaatgactttaagttcctgttctgcttaaaacaaacagttagaaatcctagctagttcatctggatgtttaaatgagagaacatagaactcgatcagcagaaatatcctcaaagaaatgactgtcaaaaggtgaatgaatattttaaaataaaatttgtgaagtat

SEQ ID NO: 396597 - DNA, 274 bp, Homo sapiens
ctgagttgatcagtgtcctgcattttaggggtcaggaaagtatttatgataagttggaaatggacagggcaggaaattctgggcctggaaggatggcttcctcaccagggaccgcaccaccatattttctaatttgtgtcttgagggaaagtttatattttttgctgaaaatattatctccttgtgacaaaaccacaagtctgggaagagaacacaaaaggaataaagaacaaatgagatctgtgatgcctcctggataaaactttaaaaaccc

SEQ ID NO: 396598 - DNA, 332 bp, Homo sapiens
ggcaagtcagcgccttcatgatcttattgcctgagaaatccactgtcaagtccatctctctccagccctccctgtgctctctcacctctaggtccaggatttccctccccactcatccacccttctggatctgagttcaaggatcacagcctctgtgaagcctgcttggactttctcaagaagcttcacataatgtttctttacattctcactgaattgtttttgcataatcgctgcagcatttaccccaaatgctggtttccaggtccgtcttcccaacagactggatgcatctgcaggcaagaactagctttttccttcctctgtcttta

SEQ ID NO: 396599 - DNA, 656 bp, Homo sapiens
acctgtgttagatacattagtacaaatctgtggaatctgatttttactcctctggagctaatgcttgatctaacagttgctattaagtactggtgaaaaaatgcttcaaaaagtacataaaatactctaggatacagagtagatctcggccacagggctctttcctggttttcatctttctgagtcttctttaacacgcctcgtgtgtgttcctagaacagtcctatcctggctatcgtgccctctaggatgtgttcttggtcatcttatccacattctacagataagggaggaaatcctgaggatgctggagtcagataaaggccattgtcccagctctacctctctacagcctgggtgaccttagccaggttagtgttgggtatcagtggctcatgtctgtaatcccagcacttttgggaggccgaggtgggaagactacttgagcccaggagtttgagaccagcctgagcaacatagggagaccaggtctgtacaaaaaatacaaaaaatattaggcatggtggcacatgcctttagttccagctacctgggaggctgaggcgagaggatcacttgagcctgggagttcaaactcacagctatgattgtaccactgcaatccagccggagcaacagagcaagaccctgtctca

SEQ ID NO: 396600 - DNA, 173 bp, Homo sapiens
caagttgccatcttcaatacatggccttcagaggtgcccaggaaaggggcaacagagagtgaaggaccatgcagggaattttatggtcaggttgagaagtggtaaaggctgggaaatgcagtctttctgagtgctcaggatgagaaataggacggcagtagttttcagtgtgt

SEQ ID NO: 396601 - DNA, 249 bp, Homo sapiens
ttctctaagcctcattttgctcatgcgggaaatggggatgatcacagatgccattcagagagctgcggagaggtgcagggacgcataaccacttgaagtggtgctggctctggcgcaggctgtttcactgcccagtggaggcaggctgggtggaagagcagtgagctgactgagactgtgctgtggctggggcctgaggaccagtgggttttgagaggggagcctggtgcatgtgtccgaggaactgaa

SEQ ID NO: 396602 - DNA, 171 bp, Homo sapiens
gactctatgatggatcaccagcaacattggactcgaggcaggtctggaactttcaaccccagcaggatgagggggaatgggggtggatgtcaggtaagtaatttctggtcccactacaaaactttatttttgattagagtaccattctcaatctcttctacaaaaagcaaa

SEQ ID NO: 396603 - DNA, 323 bp, Homo sapiens
ctgtgaggccccttgttaaaaaattattaggaatcaagacaatgaaggcacagcattaaaccaagtgtgaagccttgctaagcacaggccctgggaagctgcatgggttgcacatttatgaagctattgctgcctgtaattcctgaaacaatcccccaaattgatttcccaaagcacagctttttaaaaatgatgtttcagtatctaagaatcttatcaaaagaaacatttctggaatgaggttccagctaggtggagtctttgttactggtcagtaaattacatcctgcaagtcaaagcttaaccccaaagtactatagatt

SEQ ID NO: 396604 - DNA, 377 bp, Homo sapiens
cacaccacctgagtcccataccctgcacggactgcccagataagctgcagtgaccatctctcagtcacagcgtgaccaaggaaatgaagtctgtttgctgtaaacccactgtattagtccgttctcacattgctttaaagaaatacctgagcctgagtaatttataaagaaatggggtttaattggcccacggttctgcaggttgtacaggattgtacaggaaacaatgttggcatctgcttgccttctggggaagcctcaggaaactttcaatcatgacagaaggcagaggggaggcagacacctcttacatgtcagaagtaggagcaagaggggggcaggcgctacacacttttaaaccagatctcaggataact

SEQ ID NO: 396605 - DNA, 147 bp, Homo sapiens
agttttattagtaataaagccaatgttctgatctacatttatctatcacctatcctttttttttctttcccctccctgagacagggtctcgtccattgcccagtgaagtggcgccatcagggttcactgcaccatcaacctcctggt

SEQ ID NO: 396606 - DNA, 349 bp, Homo sapiens
cttcaacggaatcccattgcctattaaagtccaaactccttcatctgacattcaaaaaaacatgacatagctccatctcccatcacacccctccctatccaactattctctatgcacactggactgctcgcaatttctataatatattaaatactttcatctccataacttagaaatactcttgctgctttctctaaagaattctatttatccttcatggttcagcagaaacattaccttctccacaaagctgattctctccagtactcttaagtatgttgtatgcatctctattacgatactttcatattacttgtctgtaagctcactaaaacaaggtttattgatt

SEQ ID NO: 396607 - DNA, 230 bp, Homo sapiens
gaatctaaatcagttattaagtggatgaagtaatctaagaagtaacaaattacaacagtgtttactcttgcttgaaaaggaatcagctaggattgagtaaaactcaattccaaggctccaaagacctgctgaagtagattttctaaggaaaagcccagaaatgggtatttttcctaagaccccgaatgattgcttttaaaatcatccagtattaagtgaaagctgataga

SEQ ID NO: 396608 - DNA, 342 bp, Homo sapiens
tagatgatatactttcagaatatgtatttagcagtttatgctaatcttttacaagacatcatgtaaacaaaaaaattgttatacaggcatacctcagagatattacaggtttagttccaaaccactgcaataaagtgaatattggaataaagcaagtcatacaaatttttagtttcccagttcatataaaagttatgtttccactatgtggtagtctattaaatgcacaatggtattatgtttaaaaaagtacataccttaatttaaaaatatcttattgctaaaaagtacagccatctgagctttcagcaggtatttatcattctgctggtggaaaatctt

SEQ ID NO: 396609 - DNA, 197 bp, Homo sapiens
tgctgggattacaggcatgagccactgcccctggccagtgtcagatgtttagtttgtcattaaaatggagcaagaatacataactcgtgaggttgtaagattatagatatgtttactaatgactgactcatagatatccagctgttaaaactcttcaagaagtaatcagggcaggcggaaatggatgtaattaacca

SEQ ID NO: 396610 - DNA, 328 bp, Homo sapiens
aataataataataataataaagttgttgtacaatcaaacattctggaacctgagcagatgcatggaaagcaactgcctggatctaggcaatggacttgtactctgagtgatatttgggggttgttactgcagcacccatccttcctggatacatttgaatattaacatgtttgccctctatttacttaagagtctgtaggcaatctcagactacctggctgaaacacctttgagccacagagagggacttagcagcaccctgcctgagcagaatggtccttatgtaagtcctgtttgtagggttgaataaagtgtttttaagatgtct

SEQ ID NO: 396611 - DNA, 212 bp, Homo sapiens
tcaaaaaatgcttggcagcagagaatactcaaatgcatgtatattccttggtgaggggtcaggtctcaatgtacccaagatgatctctatccactgggaccatttgtgctaccctgcaaggacaggcttgttttcaagtattaagtacctaccacacatcaggcactgtgctaagcagtctcccttaaatatcacagtaactgatccatgag

SEQ ID NO: 396612 - DNA, 362 bp, Homo sapiens
gcttctatgttgtaccagaactgaatagttcaaattactgttgcgttttgataaacaccgccctgccccgccgccacacacacacatgcacacacacacagttttcttctcctacttctctctcgcttggttgaattaccccactgacagagagaaaaacaacattcactggcctccagggaaagtggtgtcgctgcgaatgaagggtggatagaggtggtgaaccagaagacatgctctgtgttggctgcaaaggctctggctctgtcatttccccagaatgtcccctgcagatgcctggcagtggaagatcagcagtgaagggcaggagagaggcagctatgcaccagctcttctttgga

SEQ ID NO: 396613 - DNA, 260 bp, Homo sapiens
cagaatattccacagactcaatgtataactatttactacttccctgccgatggatatttaacctgtctgtagttacccgttatcaccaagcttcaaggaatagccccataaatgcatctttggacacgggagcataatatgtgactacttttctaggttactgtaaaagtagaattgctgggatttcaggcatgagccactgcgcctggcctggttctgtattcttatccactgatctgtgagtctgtattaactgcttg

SEQ ID NO: 396614 - DNA, 425 bp, Homo sapiens
ccaataatatgtggcccaagaaacactgcaaattggggtacccagggttaggttgcactagtagaccccccaaatgaatgaagtttctcaggtgagcctggatgagcctgcagatgggccactcagccaaaccacagaatcctgtgaaagagtgcatagctttagttttaacccactgtattttggtgtagcttgctaggcagcaatagatatctgatataattctgattagaatgagtatttttgagctcctttgaaatgatgaagttattataatgtttattataatacttaggacggtgacctactgtttctggcgtgatggctggatactgaatgactcttccaatgcataatgtataaataagcctagataaaatattttaaaataccattttataaaagaaacatgtctgtattggcac

SEQ ID NO: 396615 - DNA, 211 bp, Homo sapiens
ccaccccacaatagccctgtctcctttttctttgtttcaaattactgaggactttatttctccatgtgaatggtttaaacagtccactcacttgccctgcaggcccagaccaaaatcacagctgacaccatttccaacaccggctagtgcttccaggctgcggcactcccactttcagggaaggaggctttgccatcttcagggaaggagg

SEQ ID NO: 396616 - DNA, 311 bp, Homo sapiens
atacatgaacttagttttctaaatgaaacttgaatatatgaagtttgaacaatgtaaaagaaatgtttataatatttgagtttatcaatttaatgataaatttatgtttaagattttatgtagacatatatcatgtactaacttagtttttcccttttcacattttattaaccaaattttatttaaactcttcacatgtatatttaacatttgtatacatatgtaactaacctgcacattgtgcacatgtaccctaaaacttaaagtataataataataaataaataaataaataaaaagaaaaaaaaaac

SEQ ID NO: 396617 - DNA, 347 bp, Homo sapiens
ggtttcagttctccttcctcctcctttccttggtgacatttggttaccacataaccaccccccatatccccactaaaatggaagctggacaaacatggctgtctgttcacaaagtgctttcttggcccttgtgtcctcaactgctcatagagatgctgacatggacaaggtagtgattgtcattatccctactccacctcctgggttcaagcgattcttctgcctcagcctcccaagtagctgggattacaggcatgcgccatcacgcccagctaattttgcatttttagtagagttggggtttctccatgttggtcaggctggcctcaaactcccgacctcaggtg

SEQ ID NO: 396618 - DNA, 148 bp, Homo sapiens
aataggtcctactgaggcctcgggaaaaatgcaagactgcatggagtttaaaaggtcagcgtgaataacaaaaacagactttctggggagtcagaatggatttaaaatacactcagaggagcctggggctcctttgctgctgcgggcg

SEQ ID NO: 396619 - DNA, 166 bp, Homo sapiens
gaacaggtaggcaagttatttcacagcttataccttcatatgacagccaggaatactttagctactttaaatttaaagagaatgcaaagttgtaacaagtagataataatcaactcctcagctttggacagtaaaaaaatttcctccacaatcttactcattccag

SEQ ID NO: 396620 - DNA, 548 bp, Homo sapiens
tcatttttgctgaagaactgctcacttaatatcctgggagtgatcttgttgaaatttgccaccatcatgttgaagcaatgaaccttcacccgtagtataatgaatgtgacactgcttatatctatcctgtaggacagctaaaaggacaagacctcagcatcacatgccaaccagtctgttagagcaatcacacacataactacttttgccaaaatcctccaacttaatttttaaatagctgaaatatagtcaaggccatatgggtactgtacctggaactagaaacatacccttttcacacacattcagtgttacagcaacagcatcctgggacaggttaggacacaatcacattttttaaaatcaagagtaagaagtaaacataaaagaatatttgcacaaggcacagaatcctgtttcttggcaatagacagaaaacaactggctaaagaaataggtttacagatagatacaatctagaatttgattctttgagtattaaacttggagacatagctatatacattccaacatacaatctaatattt

SEQ ID NO: 396621 - DNA, 351 bp, Homo sapiens
tttctttgatatgcagtgcctgtacttcaacagctcctagcacattgttggcactaaataatcaatgactgttagtgatcatgtcacaaaacactagagaacattgaccatgagactgagttaaagttcttagccaattcaatatctgtttcaaagcatccttgacatttcaaatcccctgaatttttcatttactcagtaattgaaaacctaaatctagaactgtggtattatcacaagtgcccactgcaccctctggattcaaaaggttaattttaatgaacttttaaacacttgcattaggcaatttcatttaaatataattgaaatgtgaagctgggtagttgtagt

SEQ ID NO: 396622 - DNA, 152 bp, Homo sapiens
atttcagcagaatcaagtcccatgtaaaatgtaatctggacatgaagggtaatgtcccctaagactaccttagaagtcttcactctggagaatgaagattctcaagggatacctggccctttggtaaaacgcagcattgatgtctttagctt

SEQ ID NO: 396623 - DNA, 481 bp, Homo sapiens
atgagaaaggaaaagagatacataacagaaattgggctggaaaaataccagcatatgtatgctgttagaaaatagataattcatacaggatgcaatattgaaagtattctgttaaaacaacaatgaggtcactttccccttctcagattggcagatgttaaatcaagtaattgggaaaataggaactctagcattgctagtagaagtataaattattagttcagttactttaggcagtttggtagtttctgttaaaaactgcatagctgtgatgtggtagttggatgtttgcatatctacatgaagtcgtggcattcagaaatatttgtaattacacaaataagcatgctttaaaatatatttatatttaaaagtaaaaatgcaagcaaaaatgatttcagctagctttagttagtatggatttatgttttgatagttcagctttatgttttgatagttatggacaatgaagggcaaagaa

SEQ ID NO: 396624 - DNA, 91 bp, Homo sapiens
ccaagatcaagttcccgctgccccaccgggtcctgcgccgtcagcacaagccacgcttcaccaccaagaggcccaacaccttcttctaggt

SEQ ID NO: 396625 - DNA, 519 bp, Homo sapiens
acaatgccactgcatgaacatgtacataactgtactattctttttttaaattctcagcctggaaattacatttcaagtactagaatattcaacaaatcctaagacttttatgaagaccatgagaagaaaataaggtactagaacaaaagtgatgcagccagccaattctcgtttcatgtctcaagacccagttcttattattatagatccctttgtggggttagcttggattttactgcgggatccatcaccaaaggttattaactattccttaacacctggtacacaaacccctctttctgagactgctttgacaaaaataaacaaaaaagtgtgaaataaatcaagatttgactgaccatcctaggtctacccaactgctagctgaatgactttcaaaacgtctttaaattcttaaggactcaatttcttcctccgtaaaatgcagatagtaactgttttgggcattttaacttaacagcaataacaaaaactacaggaaggtaagtaattattgac

SEQ ID NO: 396626 - DNA, 700 bp, Homo sapiens
ggggatccttgttctgattccttctccaaagagttttccctttttcttcccctttcaaaacaacataagtgcaaaagctttgtcaggatgttgggaattaaaaaagcttcagaaacattttgattcatttaacaacattactctgaaactttttagagtaagagtaccaagtcactgaataagacgatcttgaaattaaacgatattttacagttttaaaaacaccttcacagatcttttcttattagattctcagcacaaccttatgagttggcactgtcaaaattcagttcaacaaacaaaatccaactaacaggaaaactcacagctaacatcatacttaatggttgaagactgaaagctttcccccttaagatcagaacaagacaaggatgctcttgccactcctattcaacactctattggtggttctaggtggggcagttaagcaggaaaaagaaaagacatttatatcagaaagaaataaaactatatttaccgatgacatgatcttacatgtagaaaaatcctacagaatttaccaaaaaaaattggaactaataaatgagttcagcaaagttgcaggatacaagattattatctaaaaatcagttgcattcctatatgctagctatggataatctgaaaatgaaatagaaattccatttataataacatcaggaagaaattacttatgaat

SEQ ID NO: 396627 - DNA, 625 bp, Homo sapiens
cagggagcaggccctgtcaccgacgggtcacctcgcccacacggccagcaccgactcaccacagcccttcccagacctggctggagtggccggagcggcggggctcatggctcccatcttggcccctggaggtgagctcattcacagaagtggtcccttcactctgagagagaaaatcgtggcgtgcatcccaaaccctaggccacgcctgtgggtttcgtgaatgagatcgaggctgctgtggcaccctgcccgtcctggcctggagcaccctgggatcctggagggagaggccccacgcccccactctccctccacacttccagggttggtgcccacgagttagaggcacggcctcccccagcggccctcaggcttttctcagacatgcgggagccaggagagcacccttctccactcagctccaaagcgaatctttgaaaacacccactcggctcccatctctgtcacctagccaggaggggtagcaaaaataaagtcacgaggacatagtggtcaccactgtcggttacaacttgtctgtggaatccgtaattgcatctgtgtgccgcctccgaacacagaacattgtttggacggcagccccactgcacataacagaccc

SEQ ID NO: 396628 - DNA, 151 bp, Homo sapiens
caaaactgtgaatgagggtggactaccgtatctgacagggtgggaggatgaaagacatgactgggacacctggaagtgtttgcttaattacaggcactaagaaaaactgagtgaggggagaaaaggaaatttcacaactgcaacaaccaag

SEQ ID NO: 396629 - DNA, 595 bp, Homo sapiens
caacgatggtctcagctgggcatttctttaccaccttccacagcaccaggtattcctgggtctataggcagtctggctttctccacaagataaatctttgacttttttgtgaggttgggtaagaacactcatctgcttgcctaggatgaggcatgtatagaactttccactgactttaaaccatttcctgctttcagcttcacatcttgcttgcaccctcagagatacctggcaccttcaattcctgagtcttcctagagataggtgatatgaactggctagaatcatgcaaggaattggtatccgcctctgtagatattttatattccactttctcagctaattaatctactccaaccaccttccatttccctgaagtttttttataccacttatttactgtctcctgttctttctgctcttgcagatttatgctgttttcattctcttactcactgtgaatggggcttggggacagagcagaaataaacatatttgttcaattcaagcttaaaaagaagacacagtccttgaatgatttttatctgatgctaatacatatcctgggtgcattcagatttcatgaagcctggag

SEQ ID NO: 396630 - DNA, 243 bp, Homo sapiens
ctcccaacaagttttggaaagcaaggctgcagaaagacacgggattctagaggcctgcccaggcactgtcagcggcccaggggcaagactgtctgagctccaggccctctgagcctcagtttccctactgagggaggcgaggcgcggaggccccgcccagcgtgggctgcccgcctgtgactgacggcgcttgcctccaatcagggcctgcgcagctcgggccgcccggccaggagccccgag

SEQ ID NO: 396631 - DNA, 556 bp, Homo sapiens
tttttttaaattgtggtaaaatacatatgaaatttgccatcctaaccgtttttaagtggatagttcagtgacattaagtacattctgattgttgtacaatcattactactgtctatctgcaggatgtttttcttcttgcgaaacagaaactctgtactcattaaacagtaactcctcatttcccctcccctcagtccctgacaaccatgattctactttatttttataaatttgcctactttaggtacctcatataagtggaatcatgcagtatttgtccttttatcactggcttattccacttggtatatcctcaagattcttctattttgtagcgtgtgtcagaatttccttcctttttaaggctgaatagtgttccattgtatttatataccacattgcttatccttgcatccatggaaggacacttgggttgcttctgtttacagacttttaaaaatgggatcaaatgtcattacactttaaaaaattaagagtaattccttaaattcatcaaatatctagttagtcctcaaatttctagttgtctcatgaa

SEQ ID NO: 396632 - DNA, 505 bp, Homo sapiens
acaaaagtgcattatttgtctaaacactttgtaatagagtggtttcctttcaaataactataaattacatcattcgtaatggctagatatggatgtaccctaattaagtatagctttgtaatttacaccactctttccttgttaagtcactggttatattctttttagatattgacatatattttgaaactgcacttagaaatacatgaattcccaccagctgtgtaaaagtgccaacatgttcaaatccttattaaataataactgttttcttgcaactttaattaccatactgttttatttaactattccctgttattgggcatctagctcctttctagtttctcctcattataaatactgcttagatgaatacctttggacatttccaatatttgtaattcatattgacaaatcagtgcatgaaatgctgtgcattgactaggaaataaaaatttgctttaaaaattgcatttgggatttagctcattatctgcaaaatctg

SEQ ID NO: 396633 - DNA, 677 bp, Homo sapiens
aacacttccctcaaatataaagaaacaggctcagtgcctgttacacaataggtgtcaacaaatactgattcccttcctgtacatattacttcctcgtgactgtttacaatagagtatttacatgttcacacatactacttgcatgtatataaaacatctctggaagaatatacaaggaaatattaagtttttatcccttcaaagagatctcagctgagaaaagggtaaagggggaaagacaatttaacctttatgtgccatgggtattatctttttcaaaataaactaaattttacatgtttttaactaaaaagacaatcatattatttatatctcatccagccgcctatccatctgtaaagaaactaggaaatatagcgatggagtcaaaacgtccaatttcatcaaaaacttacacatatgcaaagaaacaagaaggaatgatccattaaaaaaaaaaaaagcaatcacagaaactgttccaggccaggcacggtggctcacgcctgtaatcccagtactttggaaggccaagatgggaaagaaaattgcttgaacccgggaggcggaggttgcagtgagccaagattgcgccactggattccagcctgggctacagagtgagactctgcctcacaaaaatagaaaaaagaaactgtccctaaggatgcccagac

SEQ ID NO: 396634 - DNA, 292 bp, Homo sapiens
tgagggaaaaaaaaagagtaaaaatactaatccgatctcttgatgaatatcaataaacaaaagtttagatgaattcttggtaatatcccgagaatgttaaaaatttcacttgacactcatgttagacacatggaatcatttgacattaaaattttacttcattccactttggaagaaccttttcacaggctatttcttctaatctcccaaccaaaataagaaatttaaaatcctaattaacaaaaataatcttattgctgtcaatcattcttagagtattcttgtaaacgat

SEQ ID NO: 396635 - DNA, 181 bp, Homo sapiens
caagatcccaccattgcactccagtctggatgataagagcaaaactccgtctcaaaaaaaaagagtaatttctgtcctcaatccgtttacaactttttcccagtgataagataaacatgaccaatgtttaaccattttatgtttcaaggccataaagagctgtcctggtgaatacattctt

SEQ ID NO: 396636 - DNA, 639 bp, Homo sapiens
aatacttaactgctaaggccccatctactgatctctccactttaagcaaaattatcagaaccctgctctcggatatcacagaatcttgcttttctctctataaacacagcccatttatgaggtctgctctatgttctagacacgtgggtacacgactgtcctttcctaacaccactcaaaggtaaggttctagagcactactacctaatagatagacctttcttcaatggggccaatgttatataaatatgtgcagcctgttacgaccgcaaccacacgttactactgagcacctgaaatatggttgtgtgaccaaagaactgaatgttaaattgtatttaactaaaatagtcacgtgcagctagtggctactgtgttggacagcacacttctagaaacagtgtggcatgagagaaaagtctctggagtctgacagacctgtgtcagaacctagctctggtcatttaccagctatgcaacctactagctatgttacttaacttctctatgtctcactttataacatctacaaaatgagatgacaccatttaccttacagtatttcaggtctgagtgtttatatccatatatgtatacaggtatgtctacatggagactggtactcaaacttgcgaaagg

SEQ ID NO: 396637 - DNA, 617 bp, Homo sapiens
ccccacccctagtgctcagtaagggtttgtagacacctggctgacttcctggcagtcccttgggctccgctgaggacttcagccacgtagattccggtcgaggccccacatgtcacccgacatttgcaggcacgtcatgcttcacagagctcttctcacacagcagacctgtgaggtagatgatgtttccccaattcacagttcatgaaacagaccgttgtcatgggaggtgtgtcacagtcacacagctaactggcagcagagccagccccactctgcttctctccagtttttctgtgtgcctgcctaatccttgaagaaaggtttggaggccaggcgcagtggctcacgcctgtagtcccaacactttgggaggccacggtgggcagatcacttgaggtcaggagttcgagaccagcctgagtaacacggtgaaaccccgcctttactaaaaatacaaaattagccgagcatggtgccatgcgcctgtaatcccagctgcttgggaggctgaggcaggagaatcacttgaaaccaggaggcagaggttgcagtgagctgagattgcaccactgcactccagcctgggtgacagagagactccatctcaaaaaaaa

SEQ ID NO: 396638 - DNA, 343 bp, Homo sapiens
ttaaaaaaatgcagaggacccactatgtattatatagatgcacatgcagtactcacacatatatacacacacagaatatatatgcatacacaggcaagtgtgtgtattcacatacacacccctacatattctcaagaaggaaatacactaaatgctaaagaaattacctacgggcagtaaaattgtgggtaattgtttctctgcttctttgtatttttaaatgtttcaacagtaaacatctattactttgacaatataaatagtatttaagtaatatttttaaatcccagaactatcaaaacatatttgagtagaaagcacttgggtactacgctttggctaa

SEQ ID NO: 396639 - DNA, 265 bp, Homo sapiens
ccaggctgagcgcattgtgctgcctgggagtctgtgtgccggctacccccagggccacaaggacgcctgccaggtgtgcacccagcctccccagcctccggagtcccctccctgtgcccagcaccctccctccctgaactccaggacccaggacatcccaactcaggctcaggatcctggcctccaacctagaggcaccacgccaggggtctggaaccctgagaactgaagtcctgggagggctgggacttaggctcctctttct

SEQ ID NO: 396640 - DNA, 1627 bp, Homo sapiens
ccaggacttccgtctgagatgggatttctggacagaacaatggagcgcagaagctccagcaacgtgtgctctgcagggagcccagaccagagtccaagccctaggcagtgccacccttacccagcccagccttgaagacagaatgagaggggtttcctgtctccaggtcctgctccttctggtgctgggagctgctgggactcagggaaggaagtctgcagcctgcgggcagccccgcatgtccagtcggatcgttgggggccgggatggccgggacggagagtggccgtggcaggcgagcatccagcatcgtggggcacacgtgtgcggggggtcgctcatcgccccccagtgggtgctgacagcggcgcactgcttccccaggagggcactgccagctgagtaccgcgtgcgcctgggggcgctgcgtctgggctccacctcgccccgcacgctctcggtgcccgtgcgacgggtgctgctgcccccggactactccgaggacggggcccgcggcgacctggcactgctgcagctgcgtcgcccggtgcccctgagcgctcgcgtccaacccgtctgcctgcccgtgcccggcgcccgcccgccgcccggcacaccatgccgggtcaccggctggggcagcctccgcccaggagtgcccctcccagagtggcgaccgctacaaggagtaagggtgccgctgctggactcgcgcacctgcgacggcctctaccacgtgggcgcggacgtgccccaggctgagcgcattgtgctgcctgggagtctgtgtgccggctacccccagggccacaaggacgcctgccagggtgattctgggggacctctgacctgcctgcagtctgggagctgggtcctggtgggcgtggtgagctggggcaagggttgtgccctgcccaaccgtccaggggtctacaccagtgtggccacatatagcccctggattcaggctcgcgtcagcttctaatgctagccggtgaggctgacctggagccagctgctggggtcctcagcctcctggttcatccaggcacctgcctataccccacatcccttctgcctcgaggccaagatgcctaaaaaagctaaaggccaccccaccccccacccaccacctcctgcctcctctcctctttggggatcaccagctctgactccaccaaccctcatccaggaatctgccatgagtcccagggagtcacactccccactcccttcctggcttgtatttacttttcttggccctggccagggctgggcgcaaggcacgcagtgatgggcaaaccaattgctgcccatctggcctgtgtgcccatctttttctggagaaagtcagattcacagcatgacagagatttgacaccagggagatcctccatagctggctttgaggacacggggaccacagccatgagcggcctctaagagctgagagacagccggcagggaatcggaaccctcagacccacagccgcaaggcactggattctggcagcaccctgaaggagctgggaagtaagttcttccccagcctccagataagagccccgccggccaatcccttcatttcaacctaaagagaccctaagcagagaacctagctgagcca

SEQ ID NO: 396641 - DNA, 224 bp, Homo sapiens
tgaccattcattgcggtgagcatcacactaggccaaaactatatacttagcacttacttcatgattctcatttctcagcactccttaaactttgaaaaattgtttctatctgcatatcatatggattgcattaaatctattctgctgcatagatcctatttgtgttacttacaaaggactgtattatgtttgatggctcaccctctgcctccctaccacctaca

SEQ ID NO: 396642 - DNA, 260 bp, Homo sapiens
cattccacgagtcagagccggcatatggcatacagattcataaagtgggtggacatttccattatgtcacacacaagaagttggcatttaggggatttgggtgaagggtatgtggaattatttttgctactatttttgcaacttttttgtaaatctgaaattatttcagaattaaaagttttaaaacaaacggaaatataaataatagagttgctgctccgctgtttaccactgtatccttgggcgagtcacttcatctc

SEQ ID NO: 396643 - DNA, 461 bp, Homo sapiens
caaatactgaaaaaaaacatatttgttactgaggctgaaagccagggaatcatgaaatggtaaaatataaacgtgaaacccttaatccatgtgcatatcaacctattgtacaaaataagaagttcaacacagtttataagtatgaaaaatcacaaacacttacttttcttaaagattaaaatttaaacctgcctaaattctctcctacatcatatgttcaacattttgaattttataacttatcttgtgttttatgcttttcataaaacaacagtatttggctgaaaattgtaccctattttattacaataatatagatttaaccaaaacaaaacaaaacaaaaaaacatgcccctcaacagatagatagcagccaattaccttaaatatttagggtcaaaaacgataagaaaaacactgagattttttcaagctcattaaatacgtaatatgggatgcag

SEQ ID NO: 396644 - DNA, 450 bp, Homo sapiens
cagaatctgacactattttctctctcttcgttccacttcttcaggcttatcataatcaccatgttattgaacaactatgattaggacattagacactcgtgttttatatacaacaaatatttaccaagtgtagattgaaatctagggtaggtgtcagagactgatgggtgaaaagcctaaaagatagatgcaggcaggcaggatcaggaagcctcaaatgcaacagtaagcagctggaaatacacacacacacacacacacacacacacacacacacacacacacacgtatagtcatgaacaaggcaagaccatagtgctcaaagaaattataacctagttgggaaaatgatgcattcatgttcagaaaaacagtaaaaggcagcctcccccacataccaaatgaatggcagagacagtaaaaaacaagatgagaaagaccgcactggac

SEQ ID NO: 396645 - DNA, 106 bp, Homo sapiens
tgtgtgggtatctttctctatgtcttctgagctttgaaggttttgtgctgtggttcactagactcacagaattagtcctggatttcatcagaattcaaagcctgag

SEQ ID NO: 396646 - DNA, 356 bp, Homo sapiens
ggactttgcaaagagaggcccctgggtggcctgatggggctgggttggactgtgttgaaggggcttacctgcccgggctgtgctgtgctgtgctgtgttggcccgactgtattggttatgggaggctgtgctgggcagttgggctgggttggctgcactggctcaggcctggcagtcttgtccctggtgtgatcctgggctcagcctggtgtgatcagcgtagtcaccaatccaagacattcattctagaagctggcatggcctccgtggccatgctgacagacttgtccattcacgtagtggagagtgattcatcagagctggtggtggcagcagtaactctgacagagtggaac

SEQ ID NO: 396647 - DNA, 468 bp, Homo sapiens
cttctgggttcccttccaccatatggaagctttactttcgctttcactttactttcacttttgctttaataaatcttgccaccgcacactctttgggtctgcatgtttctctaatggagctgtaacactcaccactgaggtccatggcttctttccttgaagcctgtgaaaccacgaacccttcaatcaagaaaagacctttgatcaggagaagacttctcgtctcatttctggggacacattcaggatttctccaaagcaggtgaaggtacgctcgagcgtggtcattgaggacaagtcgacgagagatcccgagtacatctacagtcagccttacggtaagcttgtgcgctcggaagaagctagggtgataatggggcaaactaaaagtaaaattaaaagtaaatatgcctcttatctcagctttattaaaattcttttaaaaagagggggagttaaagtatctac

SEQ ID NO: 396648 - DNA, 1307 bp, Homo sapiens
  misc_feature (1296)..(1296): n is a, c, g, or t
  misc_feature (1300)..(1300): n is a, c, g, or t
  misc_feature (1304)..(1304): n is a, c, g, or t
  misc_feature (1306)..(1306): n is a, c, g, or t
cttctgggttcccttccaccatatggaagctttactttcgctttcactttactttcacttttgctttaataaatcttgccaccgcacactctttgggtctgcatgtttctctaatggagctgtaacactcaccactgaggtccatggcttctttccttgaagcctgtgaaaccacgaacccttcaatcaagaaaagacctttgatcaggagaagacttctcgtctcatttctggggacacattcaggatttctccaaagcaggtgaaggtacgctcgagcgtggtcattgaggacaagtcgacgagagatcccgagtacatctacagtcagccttacgtctgcaggtgtacccaacagctccgaagagacagcgaccatcgagaacgggccatgatgacgatggcggttttgtcgaaaagaaaagggggaaatgtggggaaaagcaagagagatcagattgttactgtgtctgtgtagaaagaagtagacatgggagactccattttgttatgtgttaagaaaaattcttctgccttgagattctgttaatctatgaccttacccccaaccccgtgctctctgaaacgtgtgctgtgtcaactcagggttgaatggattaagggcggtgcaggatgtgctttgttaaacagatgcttgaaggcagcatgctccttaagagtcatcaccactccctaatctcaagtacccaggacacaaaaactgcggaaggccgcagggacctctgcctaggaaagccaggtattgtccaaggtttctccccatgtgatagtctgaaatatggcctcgtgggaagggaaagacctgaccgtcccccagcccgacacccgtaaagggtctgtgctgaggaggattagtataagaggaaggaatgcctcttgcagttgagacaagaggaaggcatctgtctcctgcctgtccctgggcaatggaatgtctcggtataaaacccgattgtatgctccatctactgagatagggaaaaaccgccttagggctggaggtgggacctgcgggcagcaatactgctttgtaaagcactgagatgtttatgtgtatgcatatccaaaagcacagcacttaatcctttacattgtctatgatgccaagacctttgttcacgtgtttgtctgctgaccctctccccacaattgtcttgtgaccctgacacatccccctctttgagaaacacccacagatgatcaataaatactaagggaactcagaggctggcgggatcctccatatgctgaacgctggttccccgggtccccttntttntttntnt

SEQ ID NO: 396649 - DNA, 282 bp, Homo sapiens
caggaagcccctgtcctgtcctattagtaatctcttttcttctccccaccccagaaaggtgggcacacccaaaggacaatcgttaaccttctactgcatattttctctcatatggtgacttcattcattttctaatatgtgaatttttcccaaatggataaccccagctataatctcattttagaattttggctctacgattagatgatttttaagatgccttccagctctataaatctatgatcctattatgtctgactgctcactagatatttcttcttg

SEQ ID NO: 396650 - DNA, 555 bp, Homo sapiens
agtttaaataaatacaaatagatttcaggttctagcttgggctagagggatatggaagaccctctccaggcatggtgggtggtcagcaggagttcagggagggtgactggaggcagaaaaagtacagacactcattctcccactaggctgccaggtctgtgggttagaactggatgctctggtattcaagttttctgccaggagaaaaatgagataagttattaccatcacgttttgttatcgcaacttttcccctcactctcagaaaggagctgggagctcctctgcagtctcacatcagatagtaagtgtgagcccagatcagcccaggctgtcctcggctgagctggtgaatctgcgttcaaatgaacaacagcagctggcctgctaggcccggcatctcagtggggctggctgttttcttctcatcaatatttgattcttgtggaataacagatgatgtttatttcattctttgtgcctctgcttagttttcacattgtctaaagggacgaggtatctaattaaagtgctgttaggaaaaccgtaataagc

SEQ ID NO: 396651 - DNA, 840 bp, Homo sapiens
ctggtgagagaattaggaagtgttaggcatgtatttttgttacaataatgggagcacctctagcattttgaggggcagggatgctaaaggccatatgatgtttggaattctcctacacagagaatcatgtcccttgcagaatgccagtggtgtcccattgagaaatatggatagagcaagctctcattttataatcgacaaggcagttctaagaagtaaagaataatagtcctgattgctgagcagtcagatccagattgccctgattactaggccattcaactccatttctttgtttccctaatgcctcagttgtcagtgtagatttgctttcacctacttgggaaaactctaccaccaaactgtttgcaaggttacacaaaagttacccaaaatgtaaagtcatttgtcagttttttgttctagttacattattttccaaagcataaattttcctatagtcatggactagctaaatatgatattcttaaaaaacaagatatgattttgcgtgggactttgcttgtttatttatctgaaggtactttcagactatgctggaaacataatcacagattatttcctatgtaaggcatcacttctactgcagaccgttctctaacttgtccaagtctacatataaactttacccatattttactaggttgtctctgtcatagtacttacagcttcattttgattacccagttaatgatcattctctcccattaaactatgaactccctgtgattaaggactgtgtttttttcaccactgaattctcagtgcttcatgcagcttttagctttcatagtatattgaatgcttgagacacttaaa

SEQ ID NO: 396652 - DNA, 365 bp, Homo sapiens
tggggatgtataaaaaagataaattgggagggagtgtttgatgtgctgaccacgtcctgtcacagagaggcttctagggccccagccctgggtcctctgctgatgtccagcccacgaaggtgcctcccagggtaccttgggaagcctatgagatgctgcgtggggcactggcctctgctctaggggctcacggagccttcactttgcaaacgtgcggaactgccacacacctagcacacctgcctcacagcagcacatgctccagggcctctgggacccacaggatcaggccatgaggcggagaggcttgcagccaaacattgccccttccaacatccctcaaggagcccatcccgcctgcacgc

SEQ ID NO: 396653 - DNA, 270 bp, Homo sapiens
ttcttctaatggttataggaagctatgattaatgccccaaaggtattaacactacacttgttcctttctgcaaaccagtccaatccagatatgtgagacagaagaggactgcctggacaggttaatcaccaaaaagattaccttcacctacataagtcatagagcaaagtgtaatactggcttcatctctcaggcatggccatgttccaataccttactcttggaaatctggcctcaccatttgatatcaaacttggtgtacaggtggtg

SEQ ID NO: 396654 - DNA, 401 bp, Homo sapiens
ctcaggaataggcaccttgctttattatatagccactgcacttgagcttatagtgtctgaaataacacattctatcttttgttaaagttttctaataatttttcctccaaaaacagtagttttatgtgtttcccccatattcaatgcatgagaagctagttatccttgttacaaatctttctatcctcacgttgaaaagaatgtctttctgaaaaatttcccattagttccccaagttttaaaaaagtttgttagaaatccgcttgttctagctctcattggtataagggtctgtaacttattacatatttggtaaatctgctttccccattcttattgcatctggtactgtgtactataatacaaaggcagtcttgagatttcatagtggaagaaagatg

SEQ ID NO: 396655 - DNA, 377 bp, Homo sapiens
gaagtatcttacacccaccgacaaaagcctctggtcatcaggagaaagattaactctcttccgcctctcctgggctctggggccggccccctgtctgagaatcactgggcagaagtgcgtggaaggtgggtagaattggattctatttcaggagcgatccacgcgaaccacagggtgaggcactcccgccaggttagcagctcccacaaatgggagttctaactccagccctgcccctcactagctgtgccacctacagtaattcacctcatctcatctctctcctggcccatttcctcctttgtaaatcgggaatcccagtatctcccccaacctcaggaagcgttaaggattttcaattaagatgtctttaaaat

SEQ ID NO: 396656 - DNA, 142 bp, Homo sapiens
tgggggtagaagtcagaatgaacaagatggggcggtgagagtcaagtatagacaaggttcagataacagtgtggaagttgagaagacaggtctgtgaaagcagaaggtcatagtgtttggaatcactttgtgaaaataacag

SEQ ID NO: 396657 - DNA, 618 bp, Homo sapiens
ggaatttttgaggacatggaccatgtcttattcatctttgcatatcgttgttgtgtgcagtacttggcatgcaacgcattcaacaaatatttgccaaatgggtaagtgaatgaatgaatgaatgagctctgaccagtagttcccatgtcatcgatcaagatctcccactaggacagatgggctcaaccgattggtttgtacattctgctggtatttgttaataaattagtacattgttttatacttccatcaatttgactggcgtttatgtcatttcatgagcatctgtctcaaccatggcaatcacagctctctgtaggcagaggttatgtcttggtagtaatcctggcatcctctcaacactcagcatcaccactcacagagacttacaagtgcatgaagtgctttgtgatttgaagtctctgcctctgaggtttttgcaggtggggttgtgatattcagccccatcatcctgaagcagctttagaaggaactggtggcttctgtgtctctgtcccccagagcactcccaccacgggaggtgcatccctcagagtgaggagattatgatacaaacagaacactttgccccagtagggcgcttatgtctggatggtg

SEQ ID NO: 396658 - DNA, 471 bp, Homo sapiens
attaggagtgcaatggctgcacagcactgaatacactaagaagtactacgttgtttttctggtttttgtgtttgttttcagacaggtcttgctctgtcacgcaggctggagctgcaatcatggctcactgcagcctcaacttcccaggctcaggcaatcccaccacttcagtctcctgagtagatggaggtacagtcacgcaccaccacgtccagctaattttttaatttttgtagagacaggggtttccctatgttgcccaggctggtctcaaactcctgggctcgagcaattctcccgcctcggcctcccaaagtgttaggattccagatgtgagccaccacgcctggccaagagtactaagttatacactttaaaaggatgaattgtatggcctatgaattacatctcaataaagctgttagagaaaataaaaggaaagagtccagttggggcgctagtatagcacat

SEQ ID NO: 396659 - DNA, 632 bp, Homo sapiens
acacagcatagcacatatggccccaagaatgtgctatcctggccctctgacctagagatctgctgaggcttcaaatctaggctttaccaagggggagtttaggggagtggggaaaacagacctcaaggaaggaggaggcagagtacagggaggagcagcttagggctgtgtggacggcaccgtgagtcaggaatgcaggagcaggtggtcctggtatttcagcgggccatctccagctgccaggcactgtgtagtttagtcggctcccggcgggagcagggcaggggctggtggagccactggttgggaggaaccggctgttcaggctggcccagagcctatgggcaggagtcgcactgtgtgtggacgccccactggctgcggtgcccctcgtctatcccccgcctcatgtttccccctttctcccgtcctttcccccctccccccaatgccctacagcgtagacctggtccatgctcagatccacgtggctgagggcaggagcctacccgacctgggcctgcggcaggagaacatccgcatcaacgggtgtgccatccagtgccgggtcaccaccgaggaccccgcgcgcagcttccagccggacaccggccgcattgaggtgggcggag

SEQ ID NO: 396660 - DNA, 297 bp, Homo sapiens
agatatgtgccaggtgtgccttactgggagtgctgccagagacagtgtctggtcacgacatcagatgccccgagaggaggagcttatgctcaggctagggatggtggctgatatgtgagggcccttggacctaatgtctgcatggcctcgaggtcagagttaacatcctgctgattgaaggccttggactatgaatagtagagaagataggggctcaggtctgaaggccgcaaactataactgcatattgcccatgatacgcaaaactcgtgtagagaaacacaatgtgcatgaggc

SEQ ID NO: 396661 - DNA, 227 bp, Homo sapiens
tgctcacttctaagccccctgaacttagaaaatgggtcattccttttactcgaagtgagaaggtcactggtattgtgatggggcaagcaaggaaaccatgtgagaaaaatgccttcccgggcactccatgatggcagggttcagaataagcctgtctttgttgaggaattgaggcaggaggggagcgtggacaaattcagttccagacattgcaaccacagtgtaca

SEQ ID NO: 396662 - DNA, 573 bp, Homo sapiens
  misc_feature (371)..(371): n is a, c, g, or t
gaggtgacaaaaaagttccatgtacaactaattgaaaccataggcctttgtgtactaagacagtctgccctatttaaggtatcaaaagattaaaaaatagtttaaaacaataccaacacactctaaaaaagacagtcatgaggcatcacagtaacttgtttactggaaatgaaaagagaaaactttggcttagagtatggctctgtggtgttggttccacagttcttcaactacctgtttaaatatcactaataccatgaaaaaaaaatctctgacagtagtctatgtacattatcaagaaggcaaaggaaagcatcatttgacagttttgtggtggactcctacatgtctgagagttttatttttttttntttgtttggtcacctcggggtgacatgcggggcgagaatgccctaggcagagtgagctgcagactccgcgggtcaggggtgtcagtcacccagaaccatccgtttgtgagaccccgggtgcgaggccaagcttcacctatgcttctgaccaatgggctgtaaatgggtggtccccacaactccctcctcgggtttgaacatt

SEQ ID NO: 396663 - DNA, 492 bp, Homo sapiens
agcctgggccgtcctcggcgcacttctccacaggcataggtggcgactgagccacctggcactatctccacgtgctccacacggaggggtgccttctcactggcagcagcacccgcggcgtcctcctgcatccaccctcagaggttatcgaatgccgaggagcccaggatgcacttccgaggctcactggtgactttccggagatacttaggcaaatggacataaatagctcttggatcctagcaggaattctcaacctcatttctcggaattcagaagtcacggttaactcaaagaatgctaagcgggccagggatcacgatctcacagatgggtcccgtgtcccagggcagtgaaggtgccggggccgtctcctgagctgtctgctgcccggtcctgctccgcccgcccctgcgcccctgcaccaccaatccaggcagctccctgaggctgcggtttccttggctccttctgctccctgggcagtgccag

SEQ ID NO: 396664 - DNA, 373 bp, Homo sapiens
ctccctcacggatgcctcaagtgtaactttattttatttatttatttattagaaacagggtctctgttgtcccagctggggcaatcatagctcaccacaacctcgaacttctgggctcaaggaatccttctgccttagcctcctgagtagctaggggtacaaatgtgagctactgtgcttggcttcatatactgttgtttcatgtgttcttaaagcttataaaaaacgtatcatattctgcaacatttttttccctctcaaccttaggtttctgagatgtgtccacattggtatctgcagctctatttccttctttaagctgcagtagagcgctccattatgtaattattaccacagtgtttctcttctgctg

SEQ ID NO: 396665 - DNA, 262 bp, Homo sapiens
aagtctttactaaaaatacaaaaaattagccacccgtggtggtgggcgcctgtagtaccagctactcaggaggctgaggcaggagagtcgcttgagtctaggaggcggaggctgtagtgagccgagatcgcgtcattgcaccctagcctgggcaacaggggcaaaactcttgtctcaaaaaaaaaaaagcttttgttcatttaaaaactgtcagttggtttgaggtataagtaagttgggtagactgatagaagtctaattc

SEQ ID NO: 396666 - DNA, 565 bp, Homo sapiens
caaaaaaaaaaaaaaaaaagagagagaaacagatgcgattaaatactttgttcagaattttttttaaatttatttttaaatcgaggtggagtctcactatgttgcccaggctggtcttgaactcctggactcaagtgatcctcctgccttggctccctaaaatgctgggattataggcatgagccaccacacctggcctagtcttaattagtgattggagcaaaaattagctaacagagttactagtttttttttcatctttttttttggttataccattatgcaaggagttagttaaaaaatgtatttgatagactatacatatttgatatatatatgagatagacttttatgtatatagcagtgtgttgggttctttagagggaaatagcagtataaattagggtttctttccttcaggaggtgacaaatcattgaaaattagagttgaactattatctacacattatataatgatacaaagcaatatttcccccgtaaataatacagccaactaatgctttggaaattaagaagggagacggtgtggtctagagtgatttgt

SEQ ID NO: 396667 - DNA, 347 bp, Homo sapiens
tgaagcctaagttgcccacacttatgcaatcaggtcaaaacttttctccagaaagtttgtaagaagggatatttgcacatgataatactcttctcccctccttgtagaattgcttcatagccatggggcctaagtctgttggactgcgagctaattagcgtcaattaactaaataatattatcagctgaacagcacactttcgtgtctctcagaaagattaacttatgaactaacctcattttactttattttctctagagaaaactaatcagtgcccagtttctttcttctagggatgaaggaaggaaggggaaggtaagaggtccctgttctctctgagggtttt

SEQ ID NO: 396668 - DNA, 397 bp, Homo sapiens
gctagggatgtagttagttggtacaaagccataagttatgctgcccttgttaggattcaagcaaatagccttgatcttgttgcactctgacttagctagcagagcaagtgaatcacagttgggagactacatttgtttggagttgtagcgttcattcattcttttatgaattcctacattcaacaaaaacgttttctgcatctcttacgattaaggcatcatactaagtgctaaatacttcttttaataaacactttatagtacttactatgtgccaggcattgactcatttaattctcataattactctatgaggtgtgtttccctcattttacagatgaggaaactaagtcacagaggttgagtaacttgcctaaggttacacggctagtaagtg

SEQ ID NO: 396669 - DNA, 748 bp, Homo sapiens
tgacagccctgctctcctcaggaactcacccctggtaaccccttctctgtcctcgccatctacggacgctctcctgtgagcactgaaatgccgtctgcactcccggggcctccagctccttctcttttgacttcatcgcagacacatttcttcagagttatcctaatgtactgtttccattttgtctcccactgattcttcagctgtgacgctgtggtctgaatgtgtccctcaaaattcacgtcttacaaactattttttttttttttgagaccgggtctcactctatggcccaggctggcatgcagtggtgcaatcttgactcactgcagcctcgacctcctggtctcaggtgatcctcccacctcagcctcccaaatagctgggactacaggtgtgtgctaccacactcagctaatttttgtatttttggtagagacagggtttccccatgttgcccaggctggtctcaaactcctgagctcaagggatccactctctcagcctcccaaagtacgggattacagtgtgccctgcctgacatggtacaaacttaatccctcatgcaacagtgttgggagacggggacttttggtaatttaggctgattaatgctgtttttaagtgagcttgtgggagtgggttcaggctctttcactgtcccgctgtgtgaagacacaatgtttatcctcttaccctctgccttctgccatgtgaggacactgtaataactggcaccttgattggg

SEQ ID NO: 396670 - DNA, 420 bp, Homo sapiens
ccctaaagactcctccagaaagctcctagaactgatgaaagaattcagcaaagtttctggatacaagattaatgtacacaaattggtagctcttctatacaccaggaaagacaaagcggagaatcaaatcaataactcaaccttttttataacagctgtaaaaataaaatcaaatacttaggaatatacctaatcaaggagacgaaagacctctacaaggaaaactatagaacactggtgaaagaaatcatagatgacacaaacaattggaaacacatcccatgttcatggatgggtagaatcaatattgagaaaatgaccatactgccaaaagcagtctacaaattcagtgcaatccccatcaaaataccaccatcattcttcacagaattagaaacagcaattctaaaattcatatgg

SEQ ID NO: 396671 - DNA, 543 bp, Homo sapiens
gccgggcgtggtggcaggtgcctgtaatcccagctacttgggaggttgagacaggagaattgcttgaacccagcaggcagaggttgcagtgagctgagaccaggcaattgcactccagcctggacaataagagtgaaactctgtctcaaaaaaaaaaggaaaaaaagaaagaaagaaaaaaaaaagggaagtgtggacagagccatgaacacagggaaaatgccatgtgaagattttgagttatgctgtcacaagccaaggaactataggagctaggacaccaggggatcacatccttccctagcaccttcacggggagtatggtcctgccaacaccgtgatctagaacttctggcctccagaacggtggaacaatacatttctattgtttatgccactctgtttgtggtactttgctacagcaaccctacaaattaatacctccttcttagggcaaacccaatcagaagccaggcattgaaggagcctgggagagcagtctgcagggaaggcctcccaaggcataaaaagcaggattgagga

SEQ ID NO: 396672 - DNA, 345 bp, Homo sapiens
gtcaaacagaccaaggttggaacccggcaggtaccacggacggtcacactgtggggggggctggagtcagacagaccaaggttggaacccggcaggtaccacggacggtcacactgtgggggggctggagtcagacagaccaaggttggaacccggcaggtaccacggacggtcacactgtgggggggctggagtcagacagaccaaggttggaacccggcaggtaccacggacggtcacactgtgggggggctggagtcagacagaccaaggttggaacccggcaggtaccacggacgacaggttcctgctgcccatccctctgggaggaatgacggccagcag

SEQ ID NO: 396673 - DNA, 373 bp, Homo sapiens
aacacagtctcggaccatagtgcaaaaaaaagagaagactgaaaaacacattgcttaaaatcatgcaattacatgaaaatcaaacaacatgttcctgaatgagttttgggtaaataaagttaaggcagaaatcaagaagttctttgatgctaatgagaacaaagatacaatgcaccagaatctctgggatccagctaagacagtgttaaggggaaattcatagcattaaatgcccacatcaaaaagttagaaagatctcaaattaacaacctaacatcaaaactggaagaattacagaagcaaaacaaaccaaactcaaaggtagcagaagacaagaaatgaccaaaatgagagctgaaccgaaggaaattaa

SEQ ID NO: 396674 - DNA, 822 bp, Homo sapiens
ctcgaactcctggccagcctcaagtgatctgcccgcctcaacctcccaaagtgctgggattacagggtttagccactgcacccacctgctacccagctatctaatgtgacccatgcccgtcccccaggcagcacacagagagaggccatctgcctctggcctcatgtgtgcaaaagctggatgcgctcctcgggaggggcagccacacagtgtgtacacctttcctgagctggtgcacagtccttccctccattcaaactgcagccatggactctgagaccttgcaccctgccctatcacccatgagctcctgagagctgcagctacgatggaggcccagcagctctgagcccaagcctgtggcctcactgcagccagagcctgctgtgcgtgtcgtcttcccgtgcacccactcatgtgtccaggcctgggcagcagctgggtcactttccactcccgaatgttctttctgtgtcctgcactgaggatgcccagtgatgaggagacccaacagagccacaggaggcttgacaccaccgtggcctcataaaagatccccagggaagggggacgcaggggtcagtgagcattcacccaccccgccccccttcgtaggtgtgtgcacagagcacaactgtccagctccccaaaaggggctatgggaggagcatcagaaggtggccctatggggtaactggccatcctccaacaccaccagccccaccacagcagagagtaggaacaacaggccaggaggggacagagtctcctgcacagctggtcaggaacagggtcaggcctccgttcaactccaaagggaag

SEQ ID NO: 396675 - DNA, 352 bp, Homo sapiens
cagaactttattacctaccaaaagaaactgttgagatacttcagcctagccatggtctttttgtgaagaaccataagcatttatccaactccccacctcctttgggggtcaactcaggtttcttggctcagtgaagtctttatagcacctctagcttctgttctctgtaagctgtaatttacagccatcatcaaaagagcatagtttagcggttaatactactttacgtattttatttcttttgaatattccttgaccacaagttcgttgaagccaacagcccacctttcatatctccattcaggagatatgaaaggctgtgctgttgcttacatttctggaaccatgtggt

SEQ ID NO: 396676 - DNA, 371 bp, Homo sapiens
gtcagcaggcttgctgctctcaggctcagcatggacagctgcttctgagagccttctctgcctacccaggctgggtggctgcctctctttggtgtgcccatggcagcccagaatgcctggtggacagggagccctcagcaggccgtactgcagcgccctgcccccgtcagcctccaggagcctggagtccagggacatcaagggcggtcctgtctttctcacccttgtctctccagcccctaacacaggggatgcctgaccccaaactagacgagttacttgacctctctgacccaagacaaaatgggaggaaagtgccaaatttccaagattggccaggggattaaataagataaatatgcaagtctctt

SEQ ID NO: 396677 - DNA, 258 bp, Homo sapiens
tttctgatgaggtacaaggcttcctgtcttgctacccttaaggcacaaatgcagctattaaaaaaaactgcttagcagtatcatggaaatgggctcctcagcaacagggaatcctatcattcttgttgtggtcatgtggcttcttttgtttcactgtctccctatacaaaggtaacgaagagctggatcctttagctactcttctttttactctctatgtaagcaataaactgagtctaaaaaggtcttgtttttttg

SEQ ID NO: 396678 - DNA, 310 bp, Homo sapiens
aacatcttacattagtatgataggtttgttacaatccatggactaatattgatacattatcattagccaaagtacatagtttgttcagattcattaggttttacctaatgtcctttttctgttccaagactgcatctagggtcccagatgacatctagctgtcatgtctctctaagctcctctttgctatgacagcttctcagacttttcttagttttgataactctgacagtcttaagaaatagtaggtgtattgtgggatctccatccattggaatttgtctgtttgaacaattggaattcctctgtt

SEQ ID NO: 396679 - DNA, 301 bp, Homo sapiens
tgtgtgatgtcaatggctttagttttgtcaagaactcgatgaaatactacgatgactgtgccaagattctggggaacaccataatgcgggagcttgccccacagttccagattccatggtccatccccacggaggctgaggacattcccattgttcccaccacatctggcactatgatggaacttcgttgtgtcattgcaattattcgtcatggggatcgtactcccaagcagaagatgaagatggaagtgaaacacccaaggttttttgctctgtttgaaaaacatggtggctacaagac

SEQ ID NO: 396680 - DNA, 483 bp, Homo sapiens
tcaacaatgatccaacttatcagtaagattacagaatgtatataacaaaagaaaagtatgtttaatagggtaattatatattaaatctatctcaaattaaatgcttctaaactatagtacataaaatgaatgcaacatatgttaatttcaatgcaaatatataacaaccttattttcaactgacaaggaatgtacaaataccttatatatttaatttatcattactatacttacccttaccttaagatacctaaatgaacaggaaaaaggccttctttatcatttaagttataaaccatactaataatattagtttccttaatgtttaaatctaaaaattgttttgggtcagacaaatattttaatgattccataatatgtaaaaaaaataatacttcctcctcactcattaaacaaatatttattatatgcctcctagtactgggctaggtgttagatgataacggcgattacagagggcat

SEQ ID NO: 396681 - DNA, 477 bp, Homo sapiens
gtctctttctcatggaatcatttcctacccccatatgtcttctcacttagatttggatggagtgtatcctctagctgatttcactttatttttttagtatgcctctctcagctaaatggtctctcctgaactgccaccttcaggggtttccaggcaaactaaaataccagctttcctctgtgcaccggcatgcaggcatcaaagaccctgtttccagttatgttttctggtgaactggcatgtatccctccacctttatcctcttttgcaggcaatactcagtgaagaggctcagatctagagtcacaccactcaggttcaaatcctggctgacacttaatccctgcagtctgatgctagataagttctacaacctggctaagtctcagtgttctaagtcacaagacaggaacaagggcatcccacgacgcaaggcctggcacaaggtgatgcgcaataaaaactgcccactcagcc

SEQ ID NO: 396682 - DNA, 538 bp, Homo sapiens
catggttcagaatagtcttaaatgaatataggattgttcagtatatttgtgcttaaaaactgcaatttctttttttaaaaaagctgttcctaattcaaggaatgataaactagataaatttgagttgatatcgtgtatttttctgttgctaaaatggtcgaggtaaaaaatgtgtgtgtttgaaaatttatgtttgttcatgagcccaaggaattgttgaatattagagaaataatttcaattagtagtttaaattactaaaaatcacaatttaaaaatatggtgattatatcataaatgagtaaagccttaaaatttgctgtttaaaaacatttagtcctttttaagtattaaccaaatgccacaaaataaaaatacacagattaaaaggatacttaaaaaaatacatcagggccaggtgcggtggctcgcacctgtaatcctagcactttgggaggccaaggcgggtggattgcctgaggtcaggagtttaagaccagcctggcaacacggtgaaaccccatctctactaaaatac

SEQ ID NO: 396683 - DNA, 239 bp, Homo sapiens
tcttactgaccccttacctctaccatttttgttctccaaagttaactactgctaactgttctaatattaaacattagtattgcatacttttataaatagaatcagtcagaatgtactcttgttgacatgaaaaagctatattattaaaaactgctacatcaaaaattccaagtgagtagtcggtaaatttattaacaagatatccctggattaatgattctatctcaagtcaaaaacat

SEQ ID NO: 396684 - DNA, 577 bp, Homo sapiens
gccaaaactgcttcacatagtgactgaaccagcagagcaatacagtttgggtattataaagaattttttttattcgtctcatacttgactctgaaagccattataaaatataagttccaaatgcatttagagcactatattggactagtggcagcatctcttgaaggaaccactttatctggtactcatatggatgcatagttctaacttgtttttttttttttttcccataaaagaagagaaacagccagattggaatgtgcctccttcttctgttttatagtcatgccctggaatattttagtcacgatagtcaggactcccaggtcatccatactaccaagcctcatcccatgccgttgttgatatgctctaaatctgacttagaccctcatctctctccattttcaaggctttccattcaggctctgtaaatgtcaggccctttctttacggcagtcttctctcaagttccttttgatttccttgtctggagggaaaccaggtgactccttgttagtttccccctgtagccttctccatccccggtggttattggcatggggatcctcagagg

SEQ ID NO: 396685 - DNA, 626 bp, Homo sapiens
gccaaaactgcttcacatagtgactgaaccagcagagcaatacagtttgggtattataaagaattttttttattcgtctcatacttgactctgaaagccattataaaatataagttccaaatgcatttagagcactatattggactagtggcagcatctcttgaaggaaccactttatctggtactcatatggatgcatagttctaacttgtttttttttttttttcccataaaagaagagaaacagccagattggaatgtgcctccttcttctgttttatagtcatgccctggaatattttagtcacgatagtcaggactcccaggtcatccatactaccaagcctcatcccatgccgttgttgatatgctctaaatctgacttagaccctcatctctctccattttcaaggctttccattcaggctctgtaaatgtcaggccctttctttacggcagtcttctctcaagttccttttgatttccttgtctggagggaaaccaggtgactccttgttagtttccccctgtagccttctccatccccggtggttttccctctcactcttgtcttcctctggccaggctgtgctaggtgtcctccttgtttccccacaccaccttca

SEQ ID NO: 396686 - DNA, 260 bp, Homo sapiens
tgtcaatgtccagtcactcagcaccatatcttgaaaagaccatctgtcccacattgagttgcagagtgggctttctggtgcctcacgggccctggcggcgtgtctaccctgcatcaccaccacagcgtctccacgacggcagcactagaagccttgatgtctgcatctgtcagtcctccagctttctccttcctttccaagatcaccttagccatgtgtaggaaccctggcttttatttccaggtttctgatgccctgac

SEQ ID NO: 396687 - DNA, 671 bp, Homo sapiens
cactggcactgggctggcccggggcgccttaactccctccagccctggcaggcacaaccaccccatggtggagaggcccccgccagggcacctcgcctgtactctctctcaggccagagccaccagcttctgggcctgggctgcccactgtgggctgagccagggcaacgttcccaggccctcctcctggtcctgtgattcaggtagttaatcccccttaatccccttgggcagtctgaggctggagcagggctggactgcgcagcgggcaccagtctgctgactcactgtgcaggcagcacctatgctgcagcccagcctccccacccacagcagggctctggggctggggaggacctgggcaggggcctgcccacagcagggaccggggtccgagtttcaccctttctgggaatttgcctctatgggctcctcccaggactcaaaagggctactttgacatcaactctgcagggcccatgagctctgggctgtccccagcactctccaaagtcatacagtcaggccaggtgtggtggcaagcacatgtaatcccagcactgtgggaggcagaggtgggaggatcccttgagcccaggagttcgaggccagcctgggcaacatgtgagacccccatctctacaaaaacaattaaaacaaattaactcgac

SEQ ID NO: 396688 - DNA, 476 bp, Homo sapiens
tttcactgtgtgatatatactgtattttaaatcattttattgttcagcatttaaattttcagtcttttgttgtaaataatgcttcactgaaatcttgatatgtaaatttttataggcctcacattattttcttatgtctcagttcctacaagtagaaatgctagcttaaagtttgaaatacttatcaatggtattgatagctgttggcaagttttttttttttctcccagagaagttgtcccagtttactgtttcaccatcctacatggcctctggtttaaactaattgtgatagcctactgactgttttctctgcctttagtatcaccttatttttaggtcatcctgacactgtatgcacagtaagttctttaagatacaagtcttattttataactttttgccttaaaattctataggttaaagtgtatttactcggtgtcattcaacacccttcatgatctcgctgctgtcta

SEQ ID NO: 396689 - DNA, 583 bp, Homo sapiens
ggtgatattttgacactctcatttactgtgtgaccatgaccaggtcatttaatgtttcctgttctgtcaaatggagaaaataatactgtttgttcatttatttaattgcattgcctatatttctgtttcagagtaaaaacatgattttagcaaagttgcatacaaacatttatgtcctattttaagggcagtttttgtcaatgatattatccagaaataaataattataatttaatttgtatttttaatgctctactttgctgtactattagtcttagagataatttacttaagtcttgccatagaaccaatatttcagacaaaataagaaggcttagcttcctctcctctgaggagcagtgacatcagcaggagcaattagaggggcagatgtgcccccactccaaacttcagttgttttcttttcttctcctagcatgtcatattgtgcaggtaaactgttttgcacatttagaaagatagttcaattaaaaaaaaaattcaactgtagtcaaaatagtagagaacagagaaggccactgtttggccactttctaattttgcagccttgggcaaatcattt

SEQ ID NO: 396690 - DNA, 271 bp, Homo sapiens
acagttggttcagcatataaaaatcagtatgacacaccatgttgatagaataaaggaaagaaacggacatgattacctcaatagatgcagaaaaaaaatctgacaaaatgaaatatcctttcatgataaaactgctcaacaaactagaaatagaagggcatctgtgaaaaatccacatctaacatcatacctaacagtatgcaagactgagagctttccccctaaacttaggaataagatgaagatacctgctcttaccacttctttcaac

SEQ ID NO: 396691 - DNA, 333 bp, Homo sapiens
aagtgattctccttcgcagcctcccaaatagctaggattacaggacgctgccaccacacccggctaatttttgtattttagtagagacgaggatttcaccatgttggtcagactggtctcgatctcctgacctcaggtgatccgcccacctcgaccttccaaagagctgggattacagacgtgagccactgtgcccagcccgagaccctgtctcttaaaaaaaatccatctccacttctggttgactgtgttactcagtctctgtctgcttcagtttaattttcgtacttaataatggtattttcttgcagagtgtttgtaaagaataaatat

SEQ ID NO: 396692 - DNA, 411 bp, Homo sapiens
catatatttgttaagtagggaaaatcctgctttctgctgtttaaaaggctcctataggtatatattcattcaatttagaggttatactatcaatcagggctgtttttctactccatagaagtcttcttaccactatccacccctgatccttttccctggatataatttgaatacctgtggaaacttgcatatgaccatagggttggatggcaaggcatttagtccctggattctcactggactccagtgagattttttctcattttgctgagtcactgggtaatctggattgatgcctttaattttggagtactatgggatggaacactagattattaggaagggagatggttaaacagagaagggcacccttagtttgaacaaaacactactactactcaacttattatt

SEQ ID NO: 396693 - DNA, 372 bp, Homo sapiens
ctcccctccccgggtgagtggcaaccaccagaagtggttgttttagtccttggagatgccaggccaaagagcccagggaggtcaggcttgggagggggcaggaggtcagggcctagtctggagcagggagccccaggagtcacctgccccagtagtcaccctggggtgactgttgagggcaggggctgggctgctgagggaacagcgctggctaacaatattttggtagggggagtgcagaggcaccaggggggcctaacccggtgtgcctcaggagtggcacagactctggcagtagtcctgccgtcagaggaagtctgcaggtgggtcaggggctatgacctggtggtttttacctttttcttggctgca

SEQ ID NO: 396694 - DNA, 538 bp, Homo sapiens
tgaactggttattaaaaacctcccaataaaggaaaacccaagaccagatgacttcactggtgagttacaccaaatatttaaagaatgaacacaatctttctcaactagttcaaaacatagaagagaaagtaacacttcctaattctgtggcaactattaaccttgacaccacaccaaatacactaagaaaattatctcctatgtaattaattatctcttatgacagtgcatgtaaaaatccaacaaaatactagcaaacaatccagcaggatactaaaagttttatacagcatgaccaagtgggaattattccagaaatgcgaaggtggttcaacatatgagaaagaaaatcagtgtaacacaccacatgaacagaatgaagagggaaagcttacataatgatgtagttgatgcagaaaaagcatttaaccagatctaatacccatccatcatttaaaagtgaacacaaacactcaacaaaataggaataaaaagaggattttctcaacattatcaggatgagtatttgtgaaaaacc

SEQ ID NO: 396695 - DNA, 630 bp, Homo sapiens
tcatcactccagcgacatttgccaagaatttcagtcacttcagttaccaatatccagcagcattcagggtcaagaagacccttttgatatatggcatccttataatttcaaagagccttttcccaagccagcatcattgctgtctatcttgcactcactccaagttctttgtagtccacaattgttggtttatattatctgagcagcaacagagagatactattgccaagctgatgcaatatatttacctcctcatcaggctatgtcaagggaagtggttattaaagggtatattagtttcctagggtggctgtaacaaagtaccacaaactgagtggcttaaaacagcagaaatttattgtcttatagttctggaaactaaaagtccaaaatcaaagtgttatcagtgccatggctctctctccctagaggagagaatcctttcttcctcttgttagcatctggtggttttcaataatccttggggctcttaggcttgcccctgctccattttaatctctccctctgtcctcacatggcattttccattacttacagagacactagacatattggattagaccccactctagtgatgccatcttattacagctcaaatgtgcgctggtt

SEQ ID NO: 396696 - DNA, 433 bp, Homo sapiens
agagggtcccatagggagtatgcctgactaggttgtgttaggagcagaggcagcaggaagctccagcaaagacatgagaaggaaccctgctggggcttcggagcgggagattgggcagtgaagggtcctgaatgggtgattgacttcaagagaccagaagataactggagacctttcagaatccccaaacatgtgaatactcaagaacatgcagactcaaggtcagtggaaaacaataaagcccccttgttgatatagcagctgcagttggccaggttcacttaccagctaagtgacattctggagcaccaagcttccagagggaaatatttacaagtcagcctccttcaaaaggacatccatgtcacgagcattctgagtcatgaaggactagttcatgaaggttaaattagcaaataccatgagcctacct

SEQ ID NO: 396697 - DNA, 1087 bp, Homo sapiens
ccttttcagacagtactcatcccacatggcttctctgactttgaaaactaagggcaacattatttcttgaaactttcccctcccttatcttctggaccagattttaactagactgatagaagatggagtttatgggtgagagagaaaagaaaacatgcactgaacacccagtatgtggccagatggtatgctagagaatttgaattattgcatttaacttaaccaaaagcatagaccctaattatcaactatcattttacagatgaggaaggtgagatacagagaagttgtgcagacatctaacacctcacagctagtaagtggctagacgggaatctgaacatagttaagaccaactacaaaaaccaagcttctactaaatcatgccaaattttagacattcccagaagaaaatgcggagaaaatattttataatcttggggtgcagaaaacttattctaagcaaggcaaagaccttttataaggaatgataaacagtattttaaaaatttaatgtctataaggcaaagagcaaagtcataaacaaagtcaaaatacaaacaagaaactggaacgaagtctctgcaatattgataatgagcaataaggtaatgtttctaaaatgtaaacagctattaacaaagtaataagaaaaacagagacacccaatagaaaaatttagggtaaaggtcatgataaggcaaatcacaaaagaatgcagtggccaaaaaaaatgtgaaaaaaaaaattatctccactataattaacaaattccaaaatttaaaatatgtatgactttttgttattaagatgacaaaaattaattatgtgaatatgagtttgagaaaataagcatacatcacacaattgttgggagtaaaattttataaaacatttctaaagggcaatctgacaagatgtatcaaatattaaatgtgtaattactttgatccagcaattcctttcctaaaaatttatactttaaaaaagtgtgcaaaaggtgtttatacaagttttttcactgcattagtgttgataatcatcaaaaatacagaaataaattgtcaatcaacaggggactgaatga

SEQ ID NO: 396698 - DNA, 222 bp, Homo sapiens
ggctaggaggccctggaaaagtcacaacttctcagggacacaagttttttttgtttgtaaactgatggtgctggactaagaatccttctagttcttaaagtttaagataattaacttaagatttcatgtcaaaaagaaaagagccagaggctgggtgcggtggctcacgcctgtaatccctgcactttgggaggctgaagcgggtggatcacgaggtcagga

SEQ ID NO: 396699 - DNA, 718 bp, Homo sapiens
caactattttttgtagggacaggttccccctatgttgctcaggctggtctcaaactcctgggctcacgcgatcttccccccttgacctcccaaagtgctgggattatgggcatgagccactgtgcttggcctgttcctatgtaaaatgaaaaagaagaaacaagaaagcttttactgcttctagagaattccctcagttgtaaatgactaacagtgttaatgacgtttcatgaactaggatgaaaatctttgtggagtattgaattgagtcatcaaagggaagcctgcagtgttacaaccctagccactataaataaagtgtattaatgagctagtagtatgctgcagacgacccacctgtggaagtgagattcttgtggaaaagtcaagatcattgaagagatgtgagaccacctaactgtgaggttacaccaggcatagtcaggaggcaaggaaataggtagctactgtggtctgaatgcttatggctctccacagtcatgttgtgaatcttagtgcaattgtgtttcgaggtggggcctttaggaggtgattaggtgattagctgatgagggttctgccttcatgaatggaattagtgcctgtctcaggctgttcttctgttgctataaagcaatttataaaggaaagaggtttagttggcttatggttctgcaggctgtacaggaagcatggtacaggcttctctttggctgct

SEQ ID NO: 396700 - DNA, 443 bp, Homo sapiens
aaaatatattaaattaagaggagttatattttatatcaactcctttctgtttttacccaggtcactccatctctaaaagaaatttactgtcagatctcctttcttatccactgtggttgggtttttctgttttctcctttttccttctggttgcaaaatgctgggccagtttccgtctcgacgctgggaaccattaacagcagagtgtgggctcctatcctgtatctgtgaggacgaggactccttgcctgtgtgtcttcttgtgtggctatttctaggttgccagtttgccataaaatgcataccaggagaccagacgtggtggctcatgcctgtagtcccagttctttgaagagaccaaggtgggaagattgcttgaggccaggaatttgagaccagcctgggcaacatagtgaaactccatccctaccaaaaaaaaaaaa

SEQ ID NO: 396701 - DNA, 554 bp, Homo sapiens
aggaggcttatggggagcaaaggaaattcaagaatctaaatgatgactcttttcaactcctcccacctatgaatacagatcttaggctaataaatacagacaccccacctacgtcttaggcaatcatcaaggcaaggttaaagaaagtttccctgtctctcgccacttctacacttagccttaggctccatacttttagtggtttatttatctacctcaaggtctccatctgtcatcttttaaatcacttttattctagctaaaaatgttggaggataggaaggacactgggtatttattctaactattttgggggacagaaaggtaaagtaacagaatcagataaactggtgaacatcttagttgtaaagaaaagggggcgctattataagaaaacactgttctatctctgaactttaggttttctaagggagactgctctgtagtttggctagtacattgatgggttttagatgggcaaacctgggctcagagaaggatctaggaagagttgaattgagttattcagcataaaagtatgaaaagagttgaaa

SEQ ID NO: 396702 - DNA, 115 bp, Homo sapiens
ttgtcttgcttgcttattctatgcaattatatgtgtttaagtattgaaatgctaacaacaaccaaagatagtttggtttgctcttagcagaatgataaagtacaggaagcaactt

SEQ ID NO: 396703 - DNA, 604 bp, Homo sapiens
atttccttactgcctcttgcattgccaaaatagttatataaaaatgcacacaacttggccaggcgcggtggctcatgcctgtaatcctagcactttgtttgggaggccaaggtgggtggatcacctgaggtcagaagtatgagaccagcctggccaaccagcatggcaaaaacccatctactaaaaatacaaaaattagcctgacatggtggcaggcacctgtaatcccagctactcaggaggctgaggcaggagaattgcttgaacccgggggttcaatcaaagaaaattccctggttctctaaacatggaattactgaaatctggatttaggttcaaacctgcctcttgggctttgcctactgcagtagctcaacagttctctggctaaaaaataaaaatcagtgtgtaattcaagttcaattcatttaataaatactcaagtatctactatgtagaaggcactatacatggggttttaaacaactcggactaccagcttatttattagttgtgtgaccttgggcaaattacttttctacgactcagttttgtgaaacaaggataccacttcttagtttgtaggactgttgtaagaattaaa

SEQ ID NO: 396704 - DNA, 941 bp, Homo sapiens
  misc_feature (65)..(65): n is a, c, g, or t
tttctctagactaataccttgaatagtaatcaactgctagataacagagtatgcacatttcaacntgtatgagtaacatcccatcctaagctttgcaatctaatgggtgaaaattgatagctcgtacgttttcaactgcacttccctacaaatgagactaagcatcttttcagttcattagccattccaatttccctcctcagcatctcaagtatgaaggaatagttttaatggtgatatttgtaattataattttagatatgcttttgcggaacagctaatcccaatcttatgcaaattgactcagagaacagaaaaagagggaaagttaccctacctgtttatcaggcaagtttagcatttaaatctagaatggaaagactatacaagggaaaatatattacattcagtcttacttatgaacacagacataaaaattttaattgggataggagtttaggacagttcaatatttgaaaattgtatcaatttataagaaaatttaggaaaaaatctagataaatttagtaaaactatatgttaaaactcaatacccattaaagttttaaaaaaccactcttacactatgaacagaaatgagctttttttttcttacagtaaaggctacctttcaaatagaaagcatcatgcttaatagtgaaactttggaaacattctcattaaagccaagggtaagacagatatatctctatcaatacgcaaaaaagaaagaaaatccaaaaggattggaaaggaacagaaatgagatgagatgctccctagaaatattaaaagaaatgaaagtactgtttgtattaataaaataattcagcgttgctggatacaaggtcagcattcaaactagcaatagccaattagaaaataaaaagtatctcctttatatgaaattcaatatagtacccaacattttattgaaggac

SEQ ID NO: 396705 - DNA, 426 bp, Homo sapiens
ggagctcggccatgttacagtacttactcttgtgataatagtttaattgacaaataaaaattgtgtatattggcgtgagccactgcgcccggcctagtgcaacttaatttatcactttatgagcagtgagctttttgtactatttaggaaattgttacctactgtaaggttacagttttttacatttagagttttttacatttagagttactgtacatttggtattgatttttgcatgttggttttaggggtcaagatttattttacattttgtcttaattactatagccttgtaataattctaattcataataaatataataggtaatataaatcttccaatttgttatttaaaatcaccctagtcatttatttcttatttttttttttagaatttgcttataaatttctaccccaccccacccc

SEQ ID NO: 396706 - DNA, 359 bp, Homo sapiens
gccagctgctgggatatgccacagcccaagaaggagaggggcagtacactagataagcaggaaaaaccatgccagcatcgtgacacaaatgcaaagatttgaagaagttcagttccacgtgatcaattcacagattctccatgttggaaacagaaagagtagagatagcaagaagagactatcaataactataaaaggtggaaggtctgcatttatcttggtaccatggggtaatctgttcacatctggaattgaattcttgtatttggtcctcacccaccttggtgcttaaattacctaccactcatttacacaacagtctttcactgagtttatataatgcggtcaacaccctgctg

SEQ ID NO: 396707 - DNA, 241 bp, Homo sapiens
gcctgggtctgccctgctttcttcgaaaggccatttgaaccctgttctgggcataaacagccattaagatgattagtttgggcttgataagtagactaaacaaacccttgaactagttgggagccctttctctcctgtaatctgcctttctactgcattcaaactaatttctcagggtctgaataccttacaagtactatctaatgggtgtattgtttttgtttatgtggtttccttcagc

SEQ ID NO: 396708 - DNA, 301 bp, Homo sapiens
aactagttgggttgtagctgtggctgtgaatctggttcccaagaactggctgtattagtctgttctcacactgctataaagaactacttgagactgggtaatctatgaagaaagaggtttaatggactcacagttccacaggctgtacagaagcatgactgggaggcctcaggaaacttataatcatggtggaaggcaaaggggaagcaagcagcatgacggagcagggtagaaagagaaagggagagtaaaggggaaagtgccacacactttcaaccaaccagatgtcatgagaactcac

SEQ ID NO: 396709 - DNA, 351 bp, Homo sapiens
  misc_feature (282)..(282): n is a, c, g, or t
atctacaaggaataatgtgaaaacacttgagcatttttagaaactgtaataaaggtacaatattaatgctaactgataaaatttttacaggaacttaggcagttataaaaccactttaaatgtatagtaaagtagaacaaacaagtaaatatagataacaggactcagttttcttactattagagaaagaagttttgttgttgttgttgttgttttgagactaagtcttgctctgtcacccaggctggcctcaaactctggacttcaggtgatcacctgccncagccttctaaggtgctaggattataggcttgagccactgcagccaccactctgatatctcttttgaaa

SEQ ID NO: 396710 - DNA, 980 bp, Homo sapiens
catgccaggcacctctgctgagacccaaaggctccataggagtttggcaagtggaaagagaatgaaggtctgggcaaggggtggggaggttttcaggcagaagcactgcacactgaaaggctggaagagaaggtagagtttcagaaagactggagaatggagtaggggatgggtgagatatcacggccagaccctataggccattggaagggagaggcaacagatcaagtcctgggaggcggagttctagttcaaggccatttgtagcttattgtatagcattagacaggtttttagacctcctcagacctcagtttcctcatctctaatagggggctagaaatacccacacgccttcttctcagtgttgtcacgattaaatggtttgaaaaagttaaaaatcctctgcaaaagcaaggagtttgcactgttattcctagaaacactgcttcctcctcctgggtccatccccattcctcccttaggaggtccaccatgcccctctgtgcagcttgaggtaggaagtgtcaacctcagaggagagttggaagaggagatggccaggactggggtttcactgtgacttgggagactcggggtcttattgcctgcctcagggaagatcccacctcccagcccaggcccagaagccctcctaagatacctgccaccctttgctcaagtgacagctgccttttcatgacatgactccctacatgccaagccctatgctgagcactgtcattcagggtcacttcacagttacagcccagactcgaatcagtcagactcaggttcaaatcctaaatatgtccctgccccagttcccatcagtgtggccttgaggaattacttaagcattctgagaaaattactcagtttcctcaacagtaaaaaaagtgcatattaatgagacccaggtcatatggtgggttacgaggtttaaatgagcttattaataaatcccatgataaacagtg

SEQ ID NO: 396711 - DNA, 611 bp, Homo sapiens
gtgtctgtggatgagtgcatttgaaagtctgtgtgtgtgtgtgtgtggtcatgagggtaagttagtgactgcgcaggatgtgtgagtgtgcatggaacactcagtgtgtgtggcaagtgtgtaggcgtgtgaggacaggcagaagtgtgtcagtgtgatgggagtgtgaatgagtgtgcaaaaaggtgagtgaatgtgcatggaagtgtgtgtcaactatgaaggcatgtagtgtgtcagtgtgtgcagtgcaagcatgtgtgggaatgagtgcttgtgggtgtgtccatatccaacgggtatgtgtgaaagcatgtaaaagtgtgtgtagtgtgatggtgtgtggatgtatcagtgtgtataaatgagagcatgtaaatgtgtatgtatgagtgttgagtgagtgtgcatatgtgaggctgtgtgtgtgagtgtaaccatgagggtgtgaacgtgcttaagtgtgcatgtgacagtgcaagtgtaggggtgtgatgcatgtgtgggtttgccagtgtatgagtgtacatggtgtggatctgaatgtgcacagtgtaaagggcatgagtgcaagtgtgtgtgagtgtatgtgaatgagtggtagtgtgcat

SEQ ID NO: 396712 - DNA, 315 bp, Homo sapiens
actattcccacctcagacttgaggaaactaaggtgcagagaagctaagtaacctccccgggtcatgctcctagtgagaagaggggctgggatcccaaactaggctgcctagctcccaatcggtagactacttgcctctcaagaatcagaaactccaaaagcgtgacagggtagttagtgccaaaaggaccaaaaatacactagcatttccatcactacagtggagttgcaagtaggaggtgggacatctgggtgcggtttgaacttggtaattctgacccttctcttcccaatagcaacagagtagcattcccta

SEQ ID NO: 396713 - DNA, 714 bp, Homo sapiens
agcgatgtccttcaacggacgcattcattagaaactgattttcagatgctaccactgcaagactactggagaaatgcaagctgcgctggagatggaattgttcgcagcggcacacaagtttttgcggcaaaggagagagctctaaaagaggaaatacaactagttcatgttaccatgaaccagcgcagtgggacccagaattactgaattaatagaaaactaaatacttctcttaagcagctatgataacttaagaaagtttccagggaagccgtttaatgaaaggaaacaaacaaaaagaagatttattcagtatcctgctccatttttttgaaaaattggaattcctacattccttaacataattctttgtacatctacactgtgaaagcaacacaaactcaaatggagattgcagcccaaatgaacttaaatctgctgtttaactttcttttgaagttatacatggaaatgaaacacaccacagcaactttcatgacatcttgctaacgaagtttggggtttgaaaaatggaatgactagttgactaaaaacacacacgcgcgcacacacacacacacacaaaacaaggagttttgaaaataagcactaagcatctttccaaggaactcactcattccaagaaacttcggttctaactcgcaagctggcggctgctgtgagtgtcctctgaatgcatccgtcgatgtgtcg

SEQ ID NO: 396714 - DNA, 812 bp, Homo sapiens
tggcctcggcctcccaaagttctgggattacaggtgtgagtccatgtgcccagccctttaattctttacttggggttcaggtgactacacatttcttacttacaaattttacttaatctcgctgatgctgtcacttgaaagctgacccaccttgaatgaagcctcctccaacaagtctggaatccatccgaatttaaattaacaggcgctcctatgaattccatcagagaacacactgtagatgctttagcaacctcttcccatgcctccgaagtatctggtttgcatgtggtggccattagtcatccatgggcttctgatgtaaaaaacaaacctgcctcttttgaccctgtgctgtacagcatcagggcagtgattgctggccacatactggacccttgaaacagagggctctgcatccatgtccatgagccttcatgcccatctggccatcaggccttgggaagcagcaccccacagctttggcacagctgcagtgacctccttgcctccgaatggagtcaaatctttacacgatgcaattctcatctgcaggaagcactggcctccttcatccttaggctacagtgctgacactggcctccttcatcctcagactgtggtgccagatgtcacccctctgcgaggcccttgggatcgactgagtgaccagcagtgaagtttgtcagccttctgaatggatgccatgatcagatgtgatggagctcagtgggattctgctgctttccctcccttagctaggatgtccctgataaaggatgacacacaagcctcagcacaactggccaaac

SEQ ID NO: 396715 - DNA, 290 bp, Homo sapiens
tggcctcggcctcccaaagttctgggattacaggaagcactggcctccttcatccttaggctacagtgctgacactggcctccttcatcctcagactgtggtgccagatgtcacccctctgcgaggcccttgggatcgactgagtgaccagcagtgaagtttgtcagccttctgaatggatgccatgatcagatgtgatggagctcagtgggattctgctgctttccctcccttagctaggatgtccctgataaaggatgacacacaagcctcagcacaactggccaaac

SEQ ID NO: 396716 - DNA, 313 bp, Homo sapiens
tcccatcaacctaagatgtttagagaaaaatgttcacttggtccattcagtatcgagatagaaagcctgctgactgttcagccctgtagaacctacctggttgctttataaaggttttggcttggctgtgtagcatttgcaatttccaagtgtggaaaatcaatcctacctccagctagttcagcctgagaaagagacaatttaaggagcattttctttttcttttaattttcttttctttctttctttcttttttttttaaacggagtggaatggagatggatgggaagcgtcgcgcatgggtaccgagctc

SEQ ID NO: 396717 - DNA, 1030 bp, Homo sapiens
agacatagaaagaggtgccagcctctttttaacaaccaggtttcatgtgcactaatagagtgagaactcactcattacccggagaggggacaaagccattcatgagggtctcctccatgattcaaatacctcccaccaggccccacctgcaacactggggatcaattttcaacatgagacttggaagtgacaaatatccaaatcatattaatccacatatctacattgctcctgggatacctggatcattcctggttctctactattgcaagcaatgcttgtatctcacatggaactgcatatacatgtgggcctgacctgcatccctggaatgtatgtatcctagaaaggggttgcagggttgctggagatgcagctccttaatttgactaaacactgctcatcttctcatcagaatggctgtactcatctgaacttcctttgtcagtactctaattgtcctgcaactcctaaatggacttcaacactggacattatccagttttctaacttttgccaatttcatgtgcataaagaaatatgctgttttattttgcatttctttaattactaataattggggctataattaggactgattagccacttgggggttccttttctataaattgcctgttcacattcattgtccatttttgtactatgtgcttccatcattttcttattgatttgcaggtgatccttatatagtcctgctagtagtcccttgtcagttttaggcattgcaaatgttttcctctaatctgacttctggcaactgtctccttggtttcctttattgaagagaaatccttaatattttgtaatgaagtccatcaactgtatttttgtttgtgtgtcttttttaaaagaagtcttccctatactgagatatcaaagatactcttaaaacatctcctacagttttaaatttcacatttactactttaattcatctgggattcatctttgtgtttgatggggatcatgttttatttttctttatataatgggccagtgtgttcccaca

SEQ ID NO: 396718 - DNA, 419 bp, Homo sapiens
tatcttaagcttcaagttcctcagctgtaatgcaaacttaccgcatgagcagtatttacctacatactccaagtcatctctacagaatgacagggagaaatcacagagagaatgacagcaagaatgcagggagaactcacacacatgggaagctcatgttgcctgctgtgcatgagtaataatatcttttgtctctgattccagaacctcatgtctaccatcagcatttatggaaacatgctagagtaaattgtctgtttgcaatgagggtgatatctcagatctttcactatttttgacagtcttgcattcctctattaaagaatttatttaatacaattgatgactatagttagcttgatatatttatgattatttgtccacttctgtttatcacctgattttgttcagtaaaattt

SEQ ID NO: 396719 - DNA, 479 bp, Homo sapiens
ctgatcataactaatgctgagaaaaaaagaatactcttttctgagttaattacccaagttcaaaataagcactctctgacaaagtaataaatactctgctatgttaaaattgattattttaaccattatgcaataaatatctataggtgatatttagtcaactcaaagatatttttgtatgcaacgtaaaaaagcattattagataatatgtacctagagggctatatttaaataaagaaatgttttcattatgtaatatataaaattgacactacaatatgttacttacaggtttataaaaggttattttggtaatgtaacacgtgttccttttgtctgtgatactattcttatgctaagtactagtttataagtcttctaaagccacagtaacatgttaatgggaccaaggatcagcatcaatccaatcctagaaccctgtttaaataaagatcaagtttcagggaaaaaattgtca

SEQ ID NO: 396720 - DNA, 139 bp, Homo sapiens
ccataaatcaagtttgtatacataaacaaaagctacaaagattaaaaaaagaaaaaaatcaatgtacctaatatagatcaatgtacccggagagtcccaggctcagaaaattgacaggttttcattttgagtaatcttt

SEQ ID NO: 396721 - DNA, 154 bp, Homo sapiens
accaccttcaccaagtgatctatactcaccaacaagaatgggacaaatccccaacatcacctccctgaaacaattcctgagaagagcacagcatgtcttttcctgggttcctgccaaggatgcatacatcatttggaaacgtcagacaaatgta

SEQ ID NO: 396722 - DNA, 284 bp, Homo sapiens
aaatagctgttattacaggtgtgcatcaccatgactggctaatttttgtatttttagtagagacagcatctcactctgttgcccaggctggagtgcctcttcatttttatttctttattcagcaagtattgatcaaatgtgctttgtactaggtactgagctctacgttgtgatataatggtgatcaaggagattgtagattctggcagggaaaactgacatcaaacacggtgacccaacatagcaagaccctgtctctgctagaagaatttaaaaaatcaccc

SEQ ID NO: 396723 - DNA, 823 bp, Homo sapiens
caacaattgataggactagataaatatcaattgcatagaataactcaacaacagcatcaaccaacaggatctaattaatatttacagaaccctccactcaaaaaaagcagaatacatactcttttcaaaagcccacaaaatacataccagtgtgggccacatcctgggccataaaacaaacctcatcaaatttaacataactgttctttgaccacagtggaaccaaactagaaaacagtgacagaagataacaggaaaatctccaaatactggtaaatgaaattacagatttctaaataactcacgacttaacgaataagtcttaagagaaatttaaaaaatacattggactgaatggaaacaaagtgacaacatatcaaaatttgcgaggcacagctaaagcagtgctgatatggaaatttatagtgctaaatacatatattagaaaaaaagtctaaaattggtaatctaagttcccacctcaatagcttagaaaaagaagattaaaataaattcaaaacaataataagaaataaaataataaatataagaacagaaatcaatgaaatggaaaacaaaaaatgatagagacaatcaatgaaacaaagggttggttttttgaaaacaataataaaattgacaaacctatagcatgaatgacaaagaaaaaagagagagagaacgcaaattactattatcagaaattaaagagggaatatcactacagacactgcaggcatcaaaaggagataataagcgatattatgagcaactctatatacacaaatttaacaatttagataaaattcttcaaaaaatgcac

SEQ ID NO: 396724 - DNA, 359 bp, Homo sapiens
tattaaccctgacttaagcctcacaccttaaaaaaaatttaattcaaaataaatgtgaaactataaacttttaggaaaaaccacaggagataattctttgggatctggggctaggcaaagagttcttaaaacttgaccgtaaaaagcatgatccataacagaaatagttggtaaactagacctcatcaaaataaaaaactattttgctctttgaacacccatgtaaagaagataaaaagagaagctagagactaaaaaaaaaaatttgcaaccacatatccaagaaaggactagtatctagaattaaaaaacaaaaacaaaaaacctctcaaagctcaacaggtaaccaaccaaccaat

SEQ ID NO: 396725 - DNA, 610 bp, Homo sapiens
tctggatcctggcagtgttctgtatcttgacgtgggcggttgctttacagtaagtcattaagctgtacatttgtattttatctatttatctttaagtattaatatttcataattaaaaagctgaaaataaaacacagcagagcactccaagaaagggaaatgatatcagcaacggcaaaaggaaggaaaacaaacgcaaggtgtgtttgagagaattgcatagaatattgatgttgcatagagacatcttacggaggaatggtgggagatacatcttgaaaactgatttggaatagactgcaatcgatattatcctgctgagagaaagctactgaaatgtttgaacaggagcctagaaagggcttgctgaccgactggaccacagaggagagatgaagagaggaggggataggaaagtggcagagaggaactcaaggttctaaaccacgtggctgtgagaaatgaggcaacactaacagaaaattggaaaacaaaagctgagtgcggggcaaaagtaatggctttagtttaaagagaggacaggccgggcgcggtggctcacgcctgtaatcccagcactttgggaggccaaggcgggcggatcacgagg

SEQ ID NO: 396726 - DNA, 247 bp, Homo sapiens
ctccacagagcataggaaggctctgcagggaacctgcctccacaggagccctgtccaaggtcacacttctcatgagaagcttagacctcatcatgctccaacacattggcccttgcagtgtatgagacttggagagcagattgcagcagtttgtatttatagctgagagcgcagttggggttgcagtgaggctggagaaagtttcaaagcccctcacttgcctgggctttccatggtcctctaccta

SEQ ID NO: 396727 - DNA, 478 bp, Homo sapiens
caggaaaaggagatgtaatctgtaaagggctgtcacccccttgtgatggtgacactgatgtggttaaccccgggacggtgggtcgcatccttgcctagagcagtggtgtgtacagggtcatccttcacagtgaggagaggtaccgacgtcgtctgatgcttgacacaacccgacccacacacattatgcacagatagcaacactgagggtctcggtgacaaatgagtggaaggaacatatgggggtggggggctttcacaaccttgagagcaaaggcaaggcaagttatttctgttgagaaacacaaagccaacaacaccagcagcgaaaggaatgcaaaccacatcttgcttgtttaaagcagtaaaggaacaaaactacataggcaaggaggtgcttttgtgtccccagccatgacttctggttaaaaagtgcacacaaacctcagacagtcaatacactcacttcaacgcctgat

SEQ ID NO: 396728 - DNA, 123 bp, Homo sapiens
agaatctgagacttgtacaatcacaacagcctctgaattacctctggtggtgtctcctcctcctctccatcctccatagggccacagcatctgttccttccagactcccaaggtttgccattg

SEQ ID NO: 396729 - DNA, 641 bp, Homo sapiens
catgtgagaggggaggtaagggatgaacacattctgaggcagatgggaaggaaccaggaaagcaagcctgaaggacagcgacgggcaaagaagaactggcagccagtagggataaatctaacacctacaaaggaatgagccttaaacaaaggcacttttttcgatgtttctctgatcccaccaggcctctgtatcccagtattgtactccctcttttatttcagctagtcagtatttttggcacccttttcaaaagagaaagaaaaaaactcctgctcagaaaccctgttattgtttgtactcatccttacatagcagtaaaatttataatacacaaatttataatatataaactttatatacatatgtatttttccagagaactgttaaacatatacattatttaacagcttaatacactatccaatctattcttcctcaacaatgcaccataacctagctaacctcgaattccaaaataatactaaaatcacactaaagtacaaagaaaagctttagaatcacctgcttggtatctgccttagagtccaacgccaaaagttttttatatttatcaataagggaaacttaagcatatatgaatttcctccagaagaaactatggggaaagttcgaactgc

SEQ ID NO: 396730 - DNA, 388 bp, Homo sapiens
  misc_feature (14)..(15): n is a, c, g, or t
cgttcacaggatcnncatcaaccctaaatttattatggccaatatggcagtaggtttcgggggtggatcagagaaaaggaaagacggatagccacatagttgaacaacatatagcacagcaaaaaaaaacagactagagaaagggataactgggatgggaaaggagcccaaatgggttctaatactgataataaagtactctagttgctttccttccttactagaggctatgggcttcaaaatagcattgctgcctaaaacttcaaatatttaaaggcaaaatagctaattcctcttcatagccttaaacctgtaaactctctttctgaaaatgtggcatataagcacctatgtcataataaatttagggttgatggtaaaaaatgct

SEQ ID NO: 396731 - DNA, 432 bp, Homo sapiens
tatttatattttaaaaagtaatggagaacagtgggttaaaataaccatatcatagtgtttcttgtctgtttccccgtgcccttctttgccacggattttaagtattatgaacattagtgggctttgttggggttagaactaagtatacaatgccctaaaatcttagatggataccaggttacaagtttgataactgtataatggagaattatatctagaagttgaaattatctctgttagtgtcagagtcttgggaggaggggttagatttcgaagaagacttcgaagaggagctgacagggttttggggactgaattttaatttgcttggtgaacaaaagtggaaagtcatttaaggcatatatagacataaagatgtgcaaaaattctgttatattcaggggtctaaaagtagtttggtattgattggat

SEQ ID NO: 396732 - DNA, 150 bp, Homo sapiens
ccagctggtagtgggtctctgcaaggagatggtcgtaggcttccaggtactgttcctacaggtttaggcaggactggaactcctccacagcttgcacatagttttcagattcaacaccaacttctccgagtttaagatgtgcctgggcaa

SEQ ID NO: 396733 - DNA, 389 bp, Homo sapiens
cagacgggcagatcacttgagcccagcggttgtgccagccccactgcactccagtctgggtaacagagtgagaccctgtttccctaaaaaacaattttagtctgggtgcggtggttcatgcctataatcccagcactttaggaggccgaggcaggttgatcacttgaggtcaggtgttcaagaccagcctgagcaacatggtgaaaccccgtctctactaaaaatacaaaaataattagccaggagtggtgttgcacacctgtggtcccagctactcgggaggctgaggcagtagaatcgattgaacccaggagttgtaggttaccatgacccaagattgcgccactacactgcagcttgggcggcagagcgagactctgtctcttaaa

SEQ ID NO: 396734 - DNA, 300 bp, Homo sapiens
attccaaagagattgtgaatgttctccctctggtatgcagtctcctgtcctgtcagaaacatggtacccagaggccaaagctgctgcataagcaagttatcatgaaactattccaggacaggtttcagaagcagggtcttaaaaatgagtattaaatctaatgttcacccagatacatttccaacccacatatagacaccgaatttaacgatgaaagtggaagttactctgttgaggatttatttgaaatgttggttttctcttgtccatctgatacaggtcatagctctgtttctgtca

SEQ ID NO: 396735 - DNA, 526 bp, Homo sapiens
tccctcccttttcttactgtctgtatatactcccttccatttctctgcgtgcgaggatcgaattatatgtcttcctaaaagttgcaggggctaaaaccttgagagagacaaaccacatctgaaaatccagctgcaaaatcccagaaattacttcaagacagctcttgttaaaataatgtcagccagaggtccggacggactgggacccagaagagccaccagaacaagacatgcggacacaggactcagcccgattcttgcgtgccttccttatcaaggctttcccctctgaaaattaaagcagctactttaagtagaaatctggctgcttcccctttactagttttggttaataaattcacgttcttcctaccagaccttatgaattaaactatccgtttaatataatataaactctctgcaagcagcgagagcctccgcatctgcgctgggtcgagtgactgagggtcagctgacttgtgatgaacacaccagggaggtggggcttctttttacttctctcgta

SEQ ID NO: 396736 - DNA, 1033 bp, Homo sapiens
gcttgtttcatagtaggtttgatgaagagtggagagtcttagagaaatgtgataggacaaagcgggggatgagctgaatgttataaactggaggatgcttagtaagacctatttgttcaggtctctatgtcactgcatgtttggagataaggatgcccctttcttctgggtatagggagggcacctcacacattagggtcctttgacctgcttcggggaaggtcataaaacgtaggaaagattttataacctttttcaggggagaaggggagggggaaggtctgttttctcaaatccttcagcttaaaatatctaatatgccaaagtaccatattttggggtaggatgtcttggaccccatcagtagctacctctggcattgtggcagatggtcaccatgtgtcagatgataaacatccacctctggattaattcctcattagggtacttcagatgttaactaataccattagggtgtgagtggaaactaacccagatacacataaatcacactggaaatacttctatattgaagtgtttaaaatttactatagatagtgtaacactttctttgctggagataaaatttatgttgttaaaagagaaaatgcaatattctttaggatgtacagctttaaagctgcattaggagtaaaacacaggaggtacatgcagcatttagtgatcatttctgctcttttctgtagtcttctaggtactctaatcacaaaatgttaatgcgcatctttaggggtaaaataatgtgctctaaagaatatggtagtcactgataatttgtaattatttactagattttttgttactaaataattcaatggtatgactatagtatcagtaatcagcctgctgaagaatgaataatgcaatcaatttacattcttttgttgccattgatagaccagtaacagcttacctttcctatattctgtaggcatctaagaagaaaatataccaaaactttaagatatcaaaatatatttttcagaggtaaaacaatgaccctcgtaaatac

SEQ ID NO: 396737 - DNA, 459 bp, Homo sapiens
attaagaaaacctgttttgatttttaaagatgacaaaatcagttatattgatgtagaaatgatagtttcatatccatgtattcttgaaaaatgccaagacagatcatgtaaaatgttctcattataaaaatgataactatatgaggtaatgcatatgtcaattagctaaatttagtcattcctcaatgtatactatatatacttcaaacatcatgttgtgcataatatatacagttttatatatcaatttaaaataaaacaacaaatcatacattactattaggataagatcctattgtaatgtgtgcagtctgtcatcaaggaaattttaaagcttgactgacatattagtttattggtcataactaatgtcttatagcttgatgtatataggttattaaaagtgaaatatagggaataatatgaaattttggaacaggtgcataatcgcttcatgat

SEQ ID NO: 396738 - DNA, 128 bp, Homo sapiens
acacacaaaaaatactttggttacatacttgtttccctgaaagaatcatgattttattatttttgtaaaaatgacataggttttctttaaaaagaataagaggaaataaaaatcattcagaatactgt

SEQ ID NO: 396739 - DNA, 421 bp, Homo sapiens
gtatgtgaaattggtggtcttatctccattctaagattggggatattttaacacagaaattcatacaaccaagctgtaaatatttgaggccgaatgaccagctaagagagcttataaactggcagcacttagatgtgtttggatggcctgtacagaactttttaaaaaaatcctatttcacgactctggaccagtgaacccagggccactgttggctagagctgagtgtcccttggaagggcatatgcccctcagttcagcgcagtccccccatatcccttcccttctgtgtcacaccagccttgcatcactcagtcacaggcctagcctctgcaggcatttgcgtttgtcacccctgtgttaaggtaggtaggatgagtgaactgtcgtctgtcctgcagggatgctgagctgaagtgtc

SEQ ID NO: 396740 - DNA, 459 bp, Homo sapiens
gagatgtgttattaaattaccagtagcctcaaagtttacaaggataaggattagatcaactatttgctagttttctaatatatgagtacaaaatagagcaatctgataaaacctgaaaataacatgacaaaccctgaaaattaagaaatgaataacgatattttaaaaaattattcaactctagctcttgttaataaaaatacaaatcaagattgtaagctcaataatcaattaattttttatttcaaaacttaaagagctaagtctgaaaaatatatgcatcaacacttagcataatcactaaggtttgaaaaatatgagtctgaaacaatgcacaaaaaacagcgatcacaagtaaataaggaaatgtccacatcagcatattctctcttatagcacttgccactttttaacttagtattaattatttatacgtgccttatgttttcatccccatca

SEQ ID NO: 396741 - DNA, 390 bp, Homo sapiens
gaaaagaagtgtcaaggataactccaaggcttatggtctgagcaactgtaaggacaaggctgccaatttctaacacggtgaagaatgagggagggacaggtttgggaagaggaacgagagtttacttttgaacatgttctgtttcagagtctataacgtatctaagtggagaggctgagcagcagttggatatgagtctgcagttcaggagaaagatgtgggctagagatacagttaggagttgttcatacaggacggaatctaatgtcatgagcctgactgagatcaccaagagtgtaaggaaaaccagagaaaaaaatgtgtccaaagactgagctctggggcattctaatatttagaggttgggggaaaggcaagggaatctgaaaa

SEQ ID NO: 396742 - DNA, 501 bp, Homo sapiens
cacaaatgctagtcagggatcttagagccacaggagttccttagggatcgccactccccacaggtcttgtgtgagaatagatagagtgtgccattgaggaagaagaaattcttgccagtttctcccctttacattccagctttagtgcaatctctgttgaacttgggaatgccaggatgtgtcctggcactgcaagggataggaaagtcgtgttgaccgatgcccttactacatatttttttctgcctagagtaaatgtggggtttattgtaatccaagagtatccctttgaagggttagcagatgaactgtatgtcttaaattgttttctaaacttccatatttgataggatttgtaacatttatttataattaatattgtactgttaaaatcatatcttttatgttataatgtaaagttattttgagctgtttgaaacattgtgaagcagtgggacagctacagtagtttctataaaaactaaacagtaacatttaaaa

SEQ ID NO: 396743 - DNA, 464 bp, Homo sapiens
acactcacagattctggggattaggaaatgtataacttttaggagccattatttaacctaccacagcatctaacaaggaatcaagaatactgatgaaatggaaaaatgaagacattcattatctcttgaaaaatgtccttcacaatctgtatttttaaaaatcttatcttttgccatttgaaatattaatatttgcatatcaaatattcatataaattaattcagactgatatcctttatagaagattccaaaaatgaattctaaggaaaaagtccaatttatcacatatatcaatccttttcacacatagcctcatgaataaccacttgacactgaaacatgaattcagaaactattattattttggcacaggaacaaacttcagaatcacagcatgcagatatctattaacttttattcaagtaaaagttttaaacacctgaataacttatggatacaaacg

SEQ ID NO: 396744 - DNA, 384 bp, Homo sapiens
agttcttccttcttgctacaggtgtgtacatgcagccactcacagaaatcagaagaggccctgagaaagaatttgttctaaccgatcactcagcatttgttgctagttgtgcctgactttgcctccaaaggccccgaccaccattcctgataggtcagattcctttctcaagccacacctctcgagcagattgctacacccgaatccccaaactggagttctacagcatcttacaagagccctttggatttctgggacaattgctgataccataactgggcctccttcctgaaggtttgtcagtcaagggagggacaagtgctaacatagctgtggtcacctcttaaggattaacagcctggagtgcctggctggcagctgtcc

SEQ ID NO: 396745 - DNA, 132 bp, Homo sapiens
ctcagggtccctgggctataaggcagggccatgcttgtacaacaacatctgtgcagtgtgtgtatacctaacacacatcactcatgatgggccaggccccttctatgcaccatgcaaatgtttttaatgttt

SEQ ID NO: 396746 - DNA, 631 bp, Homo sapiens
tgagctgcagaaagtatctaagctatatacatatagcttatccttcggacattgatgaagtatgtataacatttccctctctcttcactatgccaaaagggcacataatgttaacaatgatactggttataactaggccaagcgtggtggctcacacctgtcatcccagcactttaggaggctgaggtgggtggatcacctgaggtcaggagttcgagaccagcctggccaacagggtgaaaccccgtctctactaaaaatacaaaacttagccgggcgtggtggcaggtgcctgtaatcccagctacttgggaggctgaggcaggagaatcacttgaacccaggaggcagaggttgcaatggtctgagatcaagccattgcactccggcctaggcaacaagagcaaaactccatctcaaaataaataaacaaattttcaattatcaattaaacagtaaccaaagaataaaagtaactatttgtttctggatttataaataagatttgtacttgaaggtttaagaaaaatgactacttgcaattctaataaaccaaattctgattcagtataaataacttttaagtctgttcctcacacaaaaggactactccaatatatttctttaaatc

SEQ ID NO: 396747 - DNA, 226 bp, Homo sapiens
ttgatgttggtgatggtgatggcattggtgatgtcggtgatggtggtggtgatggtgtcagtggtaacaaagatggtagacataggggagtagataagagcatagccctggacccacagggctagattcagattctgtctctatccttgcttattgtatgatgtgggccaccaccacaaccaccatgaccatcatcaccatcatcagagtcaccactgcacctcga

SEQ ID NO: 396748 - DNA, 577 bp, Homo sapiens
tggcaaaaggatatcatcaaccctaaatttattatgatgattataattttggcatcacatatataccacctagaatgaatgtggaagaaatgagtcttttatggttagtttgaaagaatccattgaagatagaaaatgagagaatagaagaaacctgagaatagtaaaataaagagcagagaaaatatgggggcagggaaaacatgtgagtgctaaggattgattatgaatgaacgattagggggattgatggatcacagggtaagtatatgcttaactttataagaaacttccacatagttttccacagcgtttctaccattttcatttccacccgtactacctacaacttccactgactccacagccctgccaacagttggtgttgtcttttgtattttagcctttctagtgggtctgaaatggtaactcattgtgattttcatttctgcttctgtgacaactaatgttgaaaacttttcaagtgtttaatggtcactcatatatcttcttttgtgaagtgtgtattcaaatcttttgcccataataaatttagggttgatggggttttattggg

SEQ ID NO: 396749 - DNA, 225 bp, Homo sapiens
ttttggtaaagacagggttttgccatgttgcctaggctggtctcaaactgctgacctcaagtgatccatccactttggcctcccaaagtgccaccgcacccagcccatccttaatcttttttttttttttttttaagagagagtctcactctgtcaaacaggatggagtgcagtggtgcaatcttggctcactgcaacctccacctcccaggttcaagtgattct

SEQ ID NO: 396750 - DNA, 122 bp, Homo sapiens
aaggtttaaggggtctgaggctgggtgttttctcttttcacacatggaaagtctagagggactaattttagatatttctcttcccttgggtctcctatactgtattggagccatagtctgtt

SEQ ID NO: 396751 - DNA, 265 bp, Homo sapiens
gcttacctacccaggcatcacaacaacttctgccttttcagtctctatacaaattttctgcgcctaatgcactgggtggctacaggtcactgttatgaactgccattgttgaattctacgctctcaaaagtctttgtctgctttttgcctttcagtctgtattttgtattgagctgttggcagttgcttttttctgctcttcttgtgcctgctcccagctgctctcccaattcacttgtagtttgttactccaaaacatctttgg

SEQ ID NO: 396752 - DNA, 223 bp, Homo sapiens
gagttttccacagggaggtagtaaatatttgatgggaacttccagctcctcctgactcaggtgaccctggtgacatttcagaacattgggccggagaattcacttaatgactgagaaattagaaggagaaacaaaagcacgtcgctacaatgctcggagctcagaaagggctcatgtaggcaaattctgcaagataggaaagaaaggactctttttttttttt

SEQ ID NO: 396753 - DNA, 404 bp, Homo sapiens
aagcagattatcctccatgatgtggacagacctcacccaatcagttgaaggactgagcagaatgaagactgaaccctatgaggaagaaattctccaagcaaatggcctttggttctgtttctctggagaactgtgactaatacaggatcatactaactgaactacttttcaataggacatttttttgcttaacatatcattgacattcttgtaggtggcagacagggcagactgcctcattactgattctgaaccacttccccaggagaaatagtttcagaattctcctagtgtcttctgaaaatgcttctgctcttctgatgcaggcaacacttcttcctgaggacccaggccctgaaggtgcagccactatcagatttgaccacatggaacaaacatgagga

SEQ ID NO: 396754 - DNA, 108 bp, Homo sapiens
tttttctttctttctttctttcttttttttttttagccctgagatgtatttgacttctgaacacctagaaccctttgttttcttctttcctgtattccctgacccttt

SEQ ID NO: 396755 - DNA, 468 bp, Homo sapiens
cgggcttactgtacgtcagtctagatggtaaaaggtattagcaatctgtcaaataacttgaacagtactctactggtggtcaccatctgaaacaccagggacctgcaacaggaagagtgtagttctggcaggctattgttcagtaattcaaaggcttaagagaaacctgtcctttacctgcaacaaaaagctaaaaagatcaggtctctgcccattagcttctgctcatcatgtcctctaactatatttgaccaattttgaaaacaaaagattatcaatcaacccttttcaaaatttatttaattcaatagataagaaaagagatttaaaggggatgggagaacttgaaagaaagtctggggaatcactacagcgtgcacattattttaaaataataagtcatatttacaatgtcctaagactccaggatagcaattttttctttaactatgttacagtaaaagtcat

SEQ ID NO: 396756 - DNA, 501 bp, Homo sapiens
gctgcagtactaaatagcagaggggagggcaggtaccaactgcagtactaaatactggtgtggggagggcaggtgccagctgcagtactaaatactgctgtgcggagggcaggtgccagctgcagtactaaatagcagaggggagggcaggtgccagctgcagtaccaaatactggtgtggggagggcaggtgccagctgcagtgcgtggggagggcaggtgccagctgcagtgtgtggggagggcaggtgccagctgcagtactaaatagcgggggaagatttttttctgagcaactttgagtcactgctcacatctcatgccaatgtattaatcccaagtcaagggtcagatgaggcactcggatctctccagttgccaacacagctcttccaagtgtactttacttcctttcattcctgctctaaaactttatttatgtatttatttttgagacagaatcttgctctgtcgcctgggctggagtgcagtggcacaatc

SEQ ID NO: 396757 - DNA, 267 bp, Homo sapiens
gtaaactaattaataattttcattccagatttagcaaaaacctccaaccagctttatttttcatattggggctaacttaattgatgctgagcatcagagttatttaaaaatgttagaatataagcaaaattttaccatattcttcgtggtattgatcatcattaggaacatcaaattttatgcttcgctgtaactcattggctctcttgtggggttttgaaggacatggaattgtccttacactgatttcttgcttggcttctaaat

SEQ ID NO: 396758 - DNA, 414 bp, Homo sapiens
acttccaaaattcatgtccatctagaacctcagaatctaaccttatttggaaatagggtctttgcacatgtaattagctaggatcttgagatgaaatcatcctggattcaggtcctaaatccaatgacacatccttagaagagaagaagacagagagaaaggcactatgaagatggagcagagattggagtggtgcatccgcaagccaaggaatgctgaggattgcctgcagaaaccaggagagaggcagggggcagattctcccctaaaaccaccagaaggaatcaaccctctccataccttgattttggccttctggcctccggaactgtgagagaagaaattcctgttgttttaagccatcagtttgtactaacttgaaatggcagccctagtaaactaatacaccaccca

SEQ ID NO: 396759 - DNA, 593 bp, Homo sapiens
ccctcacggattacctcaatataaaaaaaaaagaccacttaagtatctagatctctgtgctaatgaactattaacaatgagtagggaatgacagtcatgcaacttctacattaaggtctaaccttgtctaagaattgaagagctttcaacttggcaagtaacagtcccaacctacaacaactaggataaatccggaagattgaaacaaagaggatgcattcacacttatcgggaaaatatttttatgggaacaccaagaacaataccagacttgtcaattgtcagtcagctgcaaggaaatctttcagtcagctgaaagaattcagtgcagtgtaacacactcatacttagggaaccagaatatccattaatattaaattttttttttctttttttgagacggagtcttgctctgttgcccaggctggagtgcggtggcacgatctcagctcgctgcaacctccgcctccttggttcaagcgattctcctgcctcaccttcctgagtagctgggattacaggcatgcgccaccatgcccagctaattttgtatttttagtagagatggggtttcaccatgttggtcaggctgg

SEQ ID NO: 396760 - DNA, 375 bp, Homo sapiens
tgagatggagtctcactctgtcgcccaggctggagtgcagtgacgtgatcttggctcgctgcaacctctgcctcccaggttcaagtgattctcctgcctcagcctccagagtagctgggattacagagcaagactgtctcaaaaataaaaaattgtacaaggtgagatgtcatattaaaataattacacaaacactgctgtgaagactaagatgtcatgctgtggaggtggaactggagagtttacgaaaagtagaacatggaaaaaaatgcgggactaccagcacagggcaggaaggaagcccagcatgtgtcctggtccccggccagttcccattttcactcttaaccattttaagcaattggatcaccagtt

SEQ ID NO: 396761 - DNA, 496 bp, Homo sapiens
caatcttaactctcatttgcattatacttaagttcaaagcatttccccacttaaaatgattttaaaacaaaaaggtgaacacttgataggttcataattgggaaataagttatcaatagagtaacaaatttgtgaatttatacccagaatacacaaagaaaggaaacacataaaaatattttacccaggtaatctattgaatttctaatgtaaaatagggtattaaatcttgtgtacaacaagatacattatggatatagatatgtgacctcagaatttaaaaaaattcaaaacaagcaaagatacggaatcaaccttaatgcccatcaccaaatgaatggataaaggaaatgtggtatatatacacaatggaataccattcagccataaaaaggatggaatcctgtcatttgtgacaacatggatgagcctggaggacattgttaagttagataagccaggcacagatagacaaatattgtatcatctcacttgt

SEQ ID NO: 396762 - DNA, 739 bp, Homo sapiens
gtcttctcttccactgtgatgctcaaaatctcttcaagactggtcatctaatcagcaggatgtaagacggtcattcttcactgtggccattcagaagtttcctggtaacctggctttctcttgaccattgccccacgagcatggtggtgacaagcttgggctctgaaatccgacagccccaagtttgaaacctatagcttcttacttgctagctgtgagacttgggcaaattacttaaccttaatttcctcgctctgtaaaatggggatataatattgggtaatacactaagcctaatgtcagggatataattagtgctcaataaatgtatctctattacccccacatcccattctgccattcccttctttctcttcctcccgcaaacctccaacttcatcattgcctatgaacagccaaaaggtaaaacaatcacaaaactaggcagttttggacagcccagaagttgtttacaagtctacaagtaaccactgcagtctgcccagctgcctggtcttctgaaaagcaaacttagaagccggtgatgtccatgatctcacagaatttcctaggaatgacagggacgtgtattcacaaagttactcttgactctttaaaagaagacaaccatgttttgctcccatgatatcccaaggggcacctagattgctgggggcctgtggtccgagaagtaatgccacctggaaaagtgggtgtgactggtttagggtccaggtct

SEQ ID NO: 396763 - DNA, 463 bp, Homo sapiens
tgaataaacatgagaaaattcatactggagagaaaccctacaaatgtaaggaatgtggcaaagtcatttcctcatcctcaagctttgctaaacataagaggattcatactggcgagaaaccctttaaatgtttagaatgtggtaaagcctttaatatttccacaacccttactaaacataggagaattcatactggagagaaaccctacacatgtgaagtatgtggcaaagcctttagacagtccgcaaacctttatgtacataggagaattcatactggagagaaaccctacacatgtggagaatgtggcaaaacctttagacagtccgcaaacctttacgtacataggagaattcatactggagagaaaccttacaaatgcgaagactgtggcaaagcctttggacggtacacagccctgaatcaacacaagaaaattcatactggagagaaaccttacaa

SEQ ID NO: 396764 - DNA, 872 bp, Homo sapiens
tgatgatgatgatggagggacttctgtggttttgcagcttttcatattttgcagagcatttgaccatccactcttagcagtagcccacccactggccacctgggggctccccagtccacttctgcatcctgcataaggcctgcagtgcccactctcagccccttcctccctgaacactgacaccacctgtatgtgtactgccagcctggattccctttcacttgacagcaaccacctaaccctacatgtgctctgcaaaacacaatgacacacacagttaccctccaaagacagtaccgggaaggaatgatgtcaggcagtgatgtcctaaagcccagacaccaggtatgcccaatcctcaccaaaacacctaagtagccctggaacgtgcacatggtcttctgttctgcgatcaaaatgttccatttgtattgagatggcctcttcgctgctgagagaatgcaggaattgcactgagtttagcaaaggaactcgatctgactcaatacaacttagaacaaagaggaacttctcaagcatgtgataatctattcttttcaccaactttctcaggtgcacgaaagtggtcatgcatttctacgctgtatttaaaagaaaaacattttattgactctttaaataaaactctatccacaactataaaggaaaatggggaaatatgacctgtcacacaatcgcataaaaatttacatcgcagataaaatactacaatcgcttcatgaaataacttgcatccatcaaccgtggagatgggcaaggaaatataaccatcctcattttatagaggtaagaacaaagataaagataagaatatataaaagcagaggttagaattataaaaccagtcagcc

SEQ ID NO: 396765 - DNA, 447 bp, Homo sapiens
tgatgatgatgatggagggacttctgtggttttgcagcttttcatattttgcagagcatttgaccatccactcttagcagtagcccacccactggccacctgggggctccccagtccacttctgcatcctgcataaggcctgcagtgcccactctcagccccttcctccctgaacactgacaccacctgtatgtgtactgccagcctggattccctttcacttgacagcaaccacctaaccctacatgtgctctgcaaaacacaatgacacacacagttaccctccaaagacagtaccgggaaggaatgatgtcaggcagtgatgtcctaaagcccagacaccaggtatgcccaatcctcaccaaaacacctaagtagccctggaacgtgcacatggtcttctgttctgcgatagggtatgctctgatggatcctctagatgacgca

SEQ ID NO: 396766 - DNA, 392 bp, Homo sapiens
taaataagaagaaataaactctctagtaaaaattgcagacacacaaaaggcttgaacaggcacttcacaaaatagattatccaaatgaccaataaatacataagtactcaacatcattagccattagaaaaatgcaagttaaaaccacaatgagataccatttcacactagaatgaataaaattttaaaagactgacaatgctaaatgttcccaggatgcagaacaaccaaaaccctcatatattatgggggacatggaaaattgtacaactcctttggaaaacaagtagtttctacagaatttcaatatatacataccatacaactcagccattgcattcctatttacccaacagaaataaaatcatttgtctactgaaaaatttgcaaaa

SEQ ID NO: 396767 - DNA, 358 bp, Homo sapiens
ctgaatagctgggactacaggcacacgccaccatgctcagctaatttttgtgtttttagtagagacggggttttgccatgttggccaggctggtctcgaactcctgacctcaggtgatccccctgcctcagcctcccaaagtgttgggattacaggcatgagtcactgcacctagcctacaggcaattttgtacagagaataattcctttccagaagtagcccgatatagcagaaagcatgagttttgttgtgagacagacttagctctacatcttttatgtgagacttaacctgttttttctatgggcaaatgacctgaactcctgatcagtttccccatctgtaaagtgaggatga

SEQ ID NO: 396768 - DNA, 620 bp, Homo sapiens
agagacctggactgggccacttctggtcttatgtgatatgcataattatggtctttgaacccgttcatttctttattcttttctttttatcttttatgagatggagtcttgccgtgtcacccaggccggagtgcagcagcaccaccaggaccctggtggtgctgcttatttaggaattaattattcaggggaaatatcaaaactaagtttatcacaatatgaaataccaagtttatcatgatatgaaatactattgtttccagctgagttttaaacaggaggtgggacacaattatgcttaggagagttagtactttctcttaccaaggaaattactgagaactcgttttgagagtgagcaccttctctggggagtgaaaaaggaagaggaatgcagggaactgtctttgggatacttatggcctaaaggaaatgtaaagtcggttccacctaaagagcaaaagtctgtagacaatctaaactccagcattagatgactggtcagataaactgtggtgcagtcaacaaaatggaacactatgcaacccttagcatgaagtggatgtgtgccaattcagtattaacagtaactgtggtggcagcagcaccaccatagcaac

SEQ ID NO: 396769 - DNA, 501 bp, Homo sapiens
gtgtcagacacttatttggacagttctctcctttattccgtttttctcccttcttactgattaccataaagtcattttttaaactatcataacagtgatcattttttccaattaccatttactcatgtcatctcattttacctctatttttaacctgattaatacaaattatttttggttgttttaagacaaagtcttgctttgtcactcaggctggtctcaaactcctggcctcaagccatcctcctgccttggcctcccgagtagctgggactacaggtgcccactgccatgcccagctaatttttgtattttagtagagacggggtttcactgtgttgtccaggctggtctccaactcctgagctcaggcaatccgaccgcctcggcctcccaaagtgctaggattacagacatgagccaccttgcccagccaaaaccatgttctaattaaccacttaagttcaaatagcatgcaacaagcaaggaattgtccaggtt

SEQ ID NO: 396770 - DNA, 415 bp, Homo sapiens
attgtcgcttctctcagtgtcagacttgacaactgtcccttcatcatgctagagtcagcatctctgtctccaataagatgcctgctctcagataaggtacaatctgctgtgggatttcaaactatataactgggtcagaaataagagtaaatgattcctctggggcctaaagaatcccatcataagtagtgcaaggacaaagaaaaatttaaaatatgaagcataattctctctattgaaaaaaacagatttccctcctctccattttcttagaaagcttgtaatactaagtactttctcctcctttaaaacatatataaatcctttacaaagctaaataggccttttgtcagtcttatgacctaggaatgtcttaagggcttgcacatcatctccttgaaatgtcaacatcaag

SEQ ID NO: 396771 - DNA, 656 bp, Homo sapiens
gttgcttgggtctcggggtgtgtgggacacatccaaaacaaactccctctctggaacaatgctgttgcatggacttcaggcatttccctatactagtctcagggcctgtgagggctgaggggctctaccttggctaagattgcaggagttcacaatggaaaagtgtactgggggatctctcacttaccttttcccggcactggaaagtttctcctggctttgagcctatcccaaccatgctggctgcttcacttctctctccttccatgcctcagaagttctctgacactgccctgctgaattccaatgttctctctaagatgctgtattcaatgtgtgatcttctactcactgtttaggccctttctggaggagacaagtgccacgtacctctagccaccagccagtaatttattctattaggaattctgggactacaggcacccaccaccatgcctggctaattttttggatttttaggagagacggggtttcactgtgttaggatggtcttgatctcctgacctcgtgatccggccgccttggcctcccaaagtgcttggaatacacgtgtgagccactgtggctcggcactggcaactcttttaatggaagagtgcagcccccagaacctgtcgtgacacgggacaggccgg

SEQ ID NO: 396772 - DNA, 419 bp, Homo sapiens
ttctgtccctttgctgatattctcattttgttcatgcattgttttcctgtctttactcttactatctttgagataaagttttttaaaatctttgtctagtggctgagtggtgagtcacacctgtaatcctagcactttgggaggccgaggcaggtggatcacttgaggtcagaagtttaagaccagcctggccaacatggcgaaaccctgtcttcactaaaaatacaaaaaaaacccaactaaacaaaaaaaacaaaaacaaaaacaaaactagctgggtgtggtggcacacacctgtggtcccagctacttgggaggctgaggcatgagaatcacttgaacctgggaggcacacgtggcagtgagctgagatcgcaccactgcactccagcctgggtgacagagcaagactgtctcaa

SEQ ID NO: 396773 - DNA, 3040 bp, Homo sapiens
ggcacgagggcggagcccacggagcccacggagcccacggaggagcccacggaggagccccagcgtccgaacgggcagaccccctcgagccgcgaaggagcccgagaagcagccacgatgtgcggaatctttgcctacatgaactacagagtcccccggacgaggaaggagatcttcgaaaccctcatcaagggcctgcagcggctggagtacagaggctacgactcggcaggtgtggcgatcgatgggaataatcacgaagtcaaagaaagacacattcagctggtcaagaaaagggggaaagtcaaggctctcgatgaagaactttacaaacaagacagcatggacttaaaagtggagtttgagacacacttcggcattgcccacacgcgctgggccacccacggggtccccagtgctgtcaacagccaccctcagcgctcagacaaaggcaacgaatttgttgtcatccacaatgggatcatcacaaattacaaagatctgaggaaatttctggaaagcaaaggctacgagtttgagtcagaaacagatacagagaccatcgccaagctgattaaatatgtgttcgacaacagagaaactgaggacattacgttttcaacgttggtcgagagagtcattcagcagttggaaggtgcattcgcgctggttttcaagagtgtccactacccaggagaagccgttgccacacggagaggcagccccctgctcatcggagtccggagcaaatacaagctctccacagaacagatccctatcttatacaggacgtgcactctggagaatgtgaagaatatctgtaagacacggatgaagaggctggacagctccgcctgcctgcatgctgtgggcgacaaggccgtggaattcttctttgcttctgatgcaagcgctatcatagagcacaccaaccgggtcatcttcctggaggacgatgacatcgccgcagtggctgatgggaaactctccattcaccgggtcaagcgctcggccagtgatgacccatctcgagccatccagaccttgcagatggaactgcagcaaatcatgaaaggtaacttcagtgcgtttatgcagaaggagatcttcgaacagccagaatcagttttcaatactatgagaggtcgggtgaattttgaaaccaacacagtgctcctgggtggcttgaaggaccacttgaaggagattcgacgatgccgacggctcatcgtgattggctgtggaaccagctaccacgctgccgtggctacgcggcaagttttggaggaactgactgagcttcctgtgatggttgaacttgctagtgattttctggacaggaacacacctgtgttcagggatgacgtttgctttttcatcagccagtcaggcgagaccgcggacaccctcctggcgctgcgctactgtaaggaccgcggcgctctcaccgtgggcgtcaccaacaccgtgggcagctccatctctcgcgagaccgactgcggcgtccacatcaacgcagggccggaggtcggcgtggccagcaccaaggcttataccagtcagttcatctctctggtgatgtttggtttgatgatgtctgaagaccgaatttcactacaaaacaggaggcaagagatcatccgtggcttgagatctttacctgagctgatcaaggaagtgctgtctctggaggagaagatccacgacttggccctggagctctacacgcagagatcgctgctggtgatggggcggggctacaactatgccacctgcctggaaggagccctgaaaattaaagagataacctacatgcactcagaaggcatcctggctggggagctgaagcacgggcccctggcactgattgacaagcagatgcccgtcatcatggtcattatgaaggatccttgcttcgccaaatgccagaacgccctgcagcaagtcacggcccgccagggtcgccccattatactgtgctccaaggacgatactgaaagttccaagtttgcgtataagacaatcgagctgccccacactgtggactgcctccagggcatcctgagcgtgattccgctgcagctgctgtccttccacctggctgttctccgaggatatgacgttgacttccccagaaatctggccaagtctgtaactgtggaatgaggctgagaccgtgacaagaccatcaccacctttcatctgattccagacctgtcccaacagcagggatgctacatgggaagagaagtggacatcccacatgttctgcgtgctcctgtagagcttgacagcttccacgtgccttctacccaagtgcttttgcttacagcagatactgtttctctgtgtcctgaagtcgccagaggagaagggaatcattgtttacacatggggatcagagcagacttctccactactgtgcaatagagatacagctctcttcagagtaactgtgaaccttttataaccaacactagagttagttttaaaagacaagatatttataatgacgactgtatagcttttaagttatttttctagtatgtggctttctgtagccgtggtaacggccaaactgttcatcctagctacccatgctctgtgtccaggcttgctcctggcaggtggcattcatctcagatgtgagcacaaggcattggccctctggactcctttctccttttctttcctctctaggctgctcctgaatcctgttctctgacatccgtggagcccctcctgcatccacctatgcctcctataagtccaattgaaatctcagcctccttcaacattttcttctcgtgtgtggcccacatccctccacttctccaacttctgtttaatctgatcacggctctttttaagccctggcagcattttggtccctgctccttgcccatagtaaaacagcttgaaatatcccatgcaagagagtagtttcaagtgggcaactctgctctctatttaaaagcgtgcacaatcaaaagtactatgcaattttaggacaataaagaacatacagtttttttgtgtg

SEQ ID NO: 396774 - DNA, 403 bp, Homo sapiens
gagaaaaaaaagtgacatgagaaaccaagccacagacaattcacatattggagttcactggcaagaactctaagataactatgactaatgtgtttgagacaattatggataagataataggcaaagactttgatcagaaaagtaatctataaaaatcaaatggatattctagaactgaatacagtgtctggagttgagaacacagtaggtggatgtaatagtggatttgtgtaacaaaagacaagattagtgaactacaagacaggtcagtagaaaaaaatacatactgaagcatgtattggaggcatgtaaacacaatgaaaagcctttagaaagataattggagtcttggaatagaatggggccaaagtaacatttgaccaagctcagaaaactaaagcag

SEQ ID NO: 396775 - DNA, 464 bp, Homo sapiens
cccagaattttgagctctttcctcttatctcccacatctaatcaatcactcatccatttatttgctaaatattatgttctcattttgtgcccattattgtgacaaaaattctttagatttaatattgctgatatcttttgtacctttttgctacaatctttgttgtctttctcatgttgtaactaacctcttaacccatctccccttcttaacccatctcctgcgtacttaaatcaaagtgacttttcaaaattcaggtcagatctttttttttaatggtttaaaaccctttagtttcctaattgcccatagtaaagtccagacttcttagtatggcacataagccactctgtaggctgtatttttccactattcttcctttcttcttatgcatttctgaaaccctgttcactaccattgttcagccaacaacagttttctgaatgtgtcatgctgattctatg

SEQ ID NO: 396776 - DNA, 118 bp, Homo sapiens
ttggcaaatgatgatgttgaaatacaacagacaacttctcttgggaaccatttaatcagtgctcacttttgcactctttccagaaatgtcaatggctttaaaatgtagaagtatatta

SEQ ID NO: 396777 - DNA, 352 bp, Homo sapiens
gagaattatgcatacagggctcacaggcggagttggacaatatgctgatggatcaagacatactgcaaccacaaagttccatctcacttagatgtggatgaaaaaagatctcttgctaaattattttctgtgaccttaaaagaaatttgtttcacttttcatctttcaagggtcatcttgatagttaccttaacaaacctttctcagctatttattattgagaaagcccattcttaaattttaagtcacaaaattatagttgtccactctactatgactgaaagaagcagcattcaagaaaaaatttaaacatagttaccaagaaatgtgaagaagtatttataaaaggaag

SEQ ID NO: 396778 - DNA, 631 bp, Homo sapiens
caaaagaggagaaagagccccaactatctatatattgggtattcttgaatggagaagcaacgttgacatttttgctctcggggtgaacaaggatccttttagagtcttgtttactagtcatagtatagaggggcataatttgagaaggggagtctgctcttaacaggtcatcagaacagggtaagtgtcaggtcaaccacagaaaccttgatctgtggctaggactcgcacattttacaaagctcttctattttctgtggccaccactgtcccctcccacccattaaagcagagctacttcttcactattctaactcctccaaagctgccacatcagaagcagaggcttatccctcattgcgttctaggaagacataagtctacatgtggggctgatactttaacacagtttgctaacttagataacaagttattctcatcaagtaaatttttaagttttaacccaaaccacatttaatgtttaatactaaacttagagtaacttttactcctttttttttctaacaggaggtaataataatattctatgtatgaatccactacacaggcagacacctcattttttttctcctcttcttggtggggagataaactcaaacagaacattaac

SEQ ID NO: 396779 - DNA, 889 bp, Homo sapiens
tgaggacttcggcgcgcgccggaagcacgtgcgcgggctgggcgctctggcggtgtgcgctgaggctcctgagtataacagattggttctgattaaaaccatttcagaggaaagacagtgatcccaggaagcgggaagaaaacagcatcacctgaagttattcctattcgttagatttgttttcttcctgcgaaaaactgctatgtacaagaaagaagtcagtgagctgcagtgatagttagcattattgactgaaactggaccagagatccctgaaacctggacaaggtggtagaaatacaaattatgctgccatttcaaagctgtgggcagttttctactttgtggaaaatgaagacttaggtaggcctttgggaaagacgatttgttttggaaaaaccacccaaagggatcatttggtttgcaaatgtaactgcagtatcacaactggaagaagaaatatacaagggcgaggtttgaaggagcccttcagtatccttggatgatactgtggaagattctttgcatctcagtaactttggatctttgaagatccaagaaaataaatttcttcaaaatatttttagagactgctttgattctgaggcactgctgattatatggaagaaaaaaatattggaagattaatttgtggttttctccagttatcgtctcccttctctttgggggaggtttgtgacgcagtaaaaacagatatacaaaagcctaggcatgttagagatttgcctaagggaaatgtaattatgaagaaggattttttcaagctgaaactagatcccacttttttccaggtcagtgggtccttcaagtatctggtactttccttcctgcttcctgacaatgttaaagaatgtggcatgaccttaca

SEQ ID NO: 396780 - DNA, 615 bp, Homo sapiens
ggcaggagaatcacttgaacccaggaggcagaggttgcagtgagccgagattgtgccattgcactccagcatgggagacaagaacaagactctgtctcaaaaagaaaaaagaacaagggctctggattaagacgaccacttatgagctgggtgaatttaggcaagctataacttgtgtacctcatttttctacatccgaaaaatggggatcataattatatatagatgcttctcaacttagggtggggttatatcctgataaacccatcataaattgaaagtaccataaattgagagccaggcacagtggctcatgcctgtaaatgtagctacatgggaggctgaggtgggagggatcatatgaggcccagagttcgagaccagcctgggcaacataatgaaacccctgtgtcttaaaaaaaaaagtttttttttaaattagcagtgtgtggtggtatgtgcttgtagtcccagctactggggaggttgaagtgggaggattgcttgagctcaggagttcgaggctgcagtgagctatgatcactccactgtattccagcctggacaaaagagtgaaaccctgtctcttagaaaaggaaatagaagttggaaata

SEQ ID NO: 396781 - DNA, 786 bp, Homo sapiens
tgacttgccttgagcacatgtctggtagcttcttcctgggaacatagatgacataacgcatattgcctttccaggcagcttgatctgtcatgagacagctctggccttttagaaaccagcctttatactgagctgtgagcctgcttctctgtattgcacattttttgttcttaattctgaacaaaaagtttttgtgaattttcttcctggaaatggtcttcaccacttgaaacaactgtcatgcccatctgagcatatttcttaggtgaggcttcccagtttgggagacgcttctctcataaaatatttctgaattcatcagtatctctgttcctataaaacgcgtggctgtctacttcaggcaaatcctaaccaagctcaggtaacagtgaagtgattgtttgctgtgaaacagtattgtactgttgaagttaaagaggtctatgattacattgtgtttattttggattttgcattattgagtattttttactttattttctttttgtaaagcccatatcactacctataacaagcttttgataagtgaactttctaatttttcctattctatagctatgtaagggaatctttaaattttgccaggactttctagcctaatgcaacaagggaggttacataaactataataatttaaatttcattagttttttcccacatttgctgaagcaattcttctacacaatctatttcattatttctgggagttctaaatgtgtcccacaggaacacatcccccttcttggaactactgctcttccacca

SEQ ID NO: 396782 - DNA, 141 bp, Homo sapiens
tttcctccagttactctctggcacatcaccttattaaattacattgcttatgtttttgttttttttgtgtgtgagttaccattcccccttactagactataaggtacataactttgttttgtttatcactgtattttcagt

SEQ ID NO: 396783 - DNA, 395 bp, Homo sapiens
gttctcctcccacatcccctgcatcattatgaccaattaattaagaatctggaaggtggagccagaatgtggatatttctcaaagctcccagttaaatctaatgtatagccaagccagcgttgcaatccaccacactatacgttctctcctctcaaggagaagagtggtaagaacagaataagagtgaagggaggagcaagcagaaagatgagagaaacttgacaaaacttatctctgaagaatggaatttttatttgctaacatgctaatatagaactagtcttcttgtctcattgctacacctgaagacttaaaaacaaaaggaattgtaaaaagaaaactaattatttctatatatgcatatatgtacatatgcatgtttttacaggaaact

SEQ ID NO: 396784 - DNA, 248 bp, Homo sapiens
  misc_feature (44)..(44): n is a, c, g, or t
  misc_feature (50)..(50): n is a, c, g, or t
ggtacggaagcatctctaagcagcccgatacacatgttaatttnagcccngtaagactcatttgggaagaggtaggtcccagcatccagccagattttctgcaatagtaatttaaacacacttttttatttccttccctttctgaattaaaaggaacaaaaaactgtctagtccttcattgttctgaaatgggcatgatggaagaaggcgggtctggtaggatagctgtgactgataatggctgagaa

SEQ ID NO: 396785 - DNA, 4485 bp, Homo sapiens
aggctggtaccggtctgggagtttgggatcgggcggacgagagagctgcgagctaacgggtccggacgacggcggcggcggcggcggcggcggcgacggctttctgcgcgggcggcggcggcggccggagcggcgagcatggcccgcgcggcgccgggcgctgactgagggtcgtgctgcggcagcctggcgcccgacatgtgaaggggaacctgccaggggattactgtgagctcacagcaggataggctggccccgggggagtggggatgggcagaacctgggccaggagtattaggaaggagacctggaccctggtagggagctcagcacaagctcgcctgacccagatggtattggacacagtgccccgctgaacagcagctgttcccagcgccagaggaccccacagccacagtaggagctttgcgacccctacgcaactgcagctggggctggggccaccaggagaagggaccagcacctcagatgggaagcagaagggcaagacctactgcggaaaggatctcgatctctgcagcggagttttcccacactcacagagcttcctgtttttgtcctctcagggttggggtctggctcccctcctctggcagaggttttgggccaggaggtgggacaacacttgcatggaacccaagtcccctgaagcccctgtgctctctgttgtgattggagttctagggcttccccgctgccgggaacgaggggccgcctcattgtctgctcatgaaccacaaggaccccgactgctccagactggattatttcaagccgccaaagagggggacccctagagctggcagccagcaatcccaagggactagagggctgcaatggactgacctccccctcaccagggtggcaggagaggcagagcctctgtggcctagctagtgacggagagacccgatgaagccctaagcaggggccccgcctgactcagggacaggacagccactcctgccaacgtgtgttctccctacatgagggagggcgtggcaagggacccctgccactgtcccctgctgcagcacgtgcccctatgccctttgcatgtggtgccagaataggcaggctacgccgtggctggcccctcagcgggctgggaaaagagtggccacggtgaccgtcacccgcctgccggcaccatgaagtgctccctgcgggtgtggttcctctccgtggccttcctgctggtgttcatcatgtccctgctcttcacctactcgcaccacagcatggccacgctcccctacctggactcaggggccctggatgggacgcaccgggtgaagctggtgcccggctatgccggcctgcagcgcctcagcaaggagaggctctcgggcaagagctgtgcctgtcgccgctgcatgggcgatgccggtgcctccgactggtttgacagccactttgacggtaacatttcccccgtctggacccgagagaacatggatcttccaccggacgtccagaggtggtggatgatgctgcagccccagttcaagtcacacaacaccaatgaggtgctggagaagctgttccagatagtgcctggcgagaacccctaccgcttccgggacccccaccagtgccggcgctgtgccgtggtggggaactcgggcaacctgcggggctctggctatgggcaggacgtggacgggcacaacttcatcatgaggatgaatcaggcgccaaccgtgggctttgagcaggatgttggcagccgaaccacccaccatttcatgtaccctgagagtgccaagaacctgcccgccaacgtcagcttcgtgctggtgcccttcaaggtcctggaccttctgtggatcgccagcgccttgtccacggggcagatccgattcacctacgccccagtgaagtccttccttcgagtggataaagaaaaggtccagatctacaacccagccttcttcaagtatatccacgacaggtggacagagcatcacgggcggtacccttccacggggatgctggtgcttttctttgccctgcatgtgtgtgatgaggtgaacgtgtacgggttcggggccgacagccggggcaactggcaccactactgggagaacaaccggtacgcgggcgagttccggaagactggcgtgcacgacgcggacttcgaggcccacatcatcgacatgctggccaaggccagcaagatcgaagtctaccggggcaactgagccgggcctcgccgcgacccttccggcccatctatcgggcaccggggctccggcccgggacccaggaccagcaacccgcgaccaatcatgctgcagcccaggggcgtctgctgtgccccgccaatcacgagactgggggaccggccgggcctggcaccaatctgcgctgcggtcgggcggagcttctgtttctcccagccaatcatgtgactcaaggaaaacttccggcgctgtgtccagtctcctccaatcaatggccttcgggggcgggccagcggccgctcaatccccactccctcatgctttgggttagggttttctttcacgctttctgaggaggagagcatggcgcgggcctcggcgaacacttccgtcagcctcgggcggaggatcgtcttagtagctggccagacctggaggagagcgggcggtctttgcgggcctcaggagataggtggccgcccggccctttccccgcctgcccggataggtgcgtgcagacccaccaaagaaaagcggtcgctgcgggacccccagtcccacctcggccgcgctgtgggatggctgcgcccccaggggttcctgcgtctccaggaagccgggagtggcgccctctgcggggtggggtgctcccgggccgaactccggacaggtggaggggacagggcagagctcgaggaagccctgtccccttcagtgcaaggtgctgtcactcacgtgtgccctcgaccctcccgttcacccgcagccttctcagcgcctctccctgggccggaggcctcctcaccagcctacctgttgctctggaaaaaaatcccgtcccccgactccgtccctacccccagtcttcggccggctctggcccctggggagggggctgcacggcggaaggaggctggctatgggcccggctgcccgctgcatgtacctcctcctccacccatcgcctcttgcctgggggtaactttgcctggggctcattctttggttaagctgaagctgccgtgggtggccaaaccgcagattctttgcaaattctgagctggcagagctcgcagccgggagccggccggggaagaggagacttgcgcgccgcaagccgcctgcctccaccctgctctccatctcccgctctagaagggctgggaagctcgcggccggggttccacctggaagctgcttgcatggctgaacccagcttaggtccctgacggggctgctggtggaattctcccccttcgaagctggggaggtttaggagggggaaggcttctgtgaagctctcaaaccactaatagagccccctccccaacagtgacggcgcagatgctcccccttttcttagttgacaccaccaggcagcttcctggccgttggtaggttcctgcagctggctgagggaacagggaccggcaggggactttgttaggggagggttgggatgggcagtgggcccctgaaagttaatatattggaacctagctcgagtgtcgttctttccaattccgaaagtagaaagagtaaaaataggggtgattggggtggggttagtagaatgcctctctcagggcgctcccccctcccccaccgttttagagagctaggcctcagccagtcttgccactcccatctcagtgcttcctgaagaggctgttttgagtgttgatgaaaagcaatgcaattatgccaaacagtattgagcagaataatttatttcttttttttcttttgctttaaatcatgaatcccgccaggtacggtggctcacacctgtcatcccagcactttgggaggccaaggcgggcggattacttaatacttaaggtcaggagttcgagaccagcctggccaatatggtgaaacctcgtctctaccaaaaaaaaaaaaaaatacaaaaattagccaggcgcagtggtgcgcacctgtaatcccagctacttggaaggctgaggcaggagaatcccttgaaccgaggaggcgaaggttgcagtgagccgagattgtgccactgcactccagcctgggcgacagagcaagaccctgtctcaaaaaaattaaatcatgaatccccatcctggaagaggtaggtcccagcatccagccagattttctgcaatagtaatttaaacacacttttttatttccttccctttctgaattaaaaggaacaaaaaactgtctagtccttcattgttctgaaatgggcatgatggaagaaggcgggtctggtaggatagctgtgactgataatggctgagaa

SEQ ID NO: 396786 - DNA, 3863 bp, Homo sapiens
aggctggtaccggtctgggagtttgggatcgggcggacgagagagctgcgagctaacgggtccggacgacggcggcggcggcggcggcggcggcgacggctttctgcgcgggcggcggcggcggccggagcggcgagcatggcccgcgcggcgccgggcgctgactgagggtcgtgctgcggcagcctggcgcccgacatgtgaaggggaacctgccaggggattactgtgagctcacagcaggataggctggccccgggggagtggggatgggcagaacctgggccaggagtattaggaaggagacctggaccctggtagggagctcagcacaagctcgcctgacccagatggtattggacacagtgccccgctgaacagcagctgttcccagcgccagaggaccccacagccacagtaggagctttgcgacccctacgcaactgcagctggggctggggccaccaggagaagggaccagcacctcagatgggaagcagaagggcaagacctactgcggaaaggatctcgatctctgcagcggagttttcccacactcacagagcttcctgtttttgtcctctcagggttggggtctggctcccctcctctggcagaggttttgggccaggaggtgggacaacacttgcatggaacccaagtcccctgaagcccctgtgctctctgttgtgattggagttctagggcttccccgctgccgggaacgaggggccgcctcattgtctgctcatgaaccacaaggaccccgactgctccagactggattatttcaagccgccaaagagggggacccctagagctggcagccagcaatcccaagggactagagggctgcaatggactgacctccccctcaccagggtggcaggagaggcagagcctctgtggcctagctagtgacggagagacccgatgaagccctaagcaggggccccgcctgactcagggacaggacagccactcctgccaacgtgtgttctccctacatgagggagggcgtggcaagggacccctgccactgtcccctgctgcagcacgtgcccctatgccctttgcatgtggtgccagaataggcaggctacgccgtggctggcccctcagcgggctgggaaaagagtggccacggtgaccgtcacccgcctgccggcaccatgaagtgctccctgcgggtgtggttcctctccgtggccttcctgctggtgttcatcatgtccctgctcttcacctactcgcaccacagcatggccacgctcccctacctggactcaggggccctggatgggacgcaccgggtgaagctggtgcccggctatgccggcctgcagcgcctcagcaaggagaggctctcgggcaagagctgtgcctgtcgccgctgcatgggcgatgccggtgcctccgactggtttgacagccactttgacggtaacatttcccccgtctggacccgagagaacatggatcttccaccggacgtccagaggtggtggatgatgctgcagccccagttcaagtcacacaacaccaatgaggtgctggagaagctgttccagatagtgcctggcgagaacccctaccgcttccgggacccccaccagtgccggcgctgtgccgtggtggggaactcgggcaacctgcggggctctggctatgggcaggacgtggacgggcacaacttcatcatgaggatgaatcaggcgccaaccgtgggctttgagcaggatgttggcagccgaaccacccaccatttcatgtaccctgagagtgccaagaacctgcccgccaacgtcagcttcgtgctggtgcccttcaaggtcctggaccttctgtggatcgccagcgccttgtccacggggcagatccgattcacctacgccccagtgaagtccttccttcgagtggataaagaaaaggtccagatctacaacccagccttcttcaagtatatccacgacaggtggacagagcatcacgggcggtacccttccacggggatgctggtgcttttctttgccctgcatgtgtgtgatgaggtgaacgtgtacgggttcggggccgacagccggggcaactggcaccactactgggagaacaaccggtacgcgggcgagttccggaagactggcgtgcacgacgcggacttcgaggcccacatcatcgacatgctggccaaggccagcaagatcgaagtctaccggggcaactgagccgggcctcgccgcgacccttccggcccatctatcgggcaccggggctccggcccgggacccaggaccagcaacccgcgaccaatcatgctgcagcccaggggcgtctgctgtgccccgccaatcacgagactgggggaccggccgggcctggcaccaatctgcgctgcggtcgggcggagcttctgtttctcccagccaatcatgtgactcaaggaaaacttccggcgctgtgtccagtctcctccaatcaatggccttcgggggcgggccagcggccgctcaatccccactccctcatgctttgggttagggttttctttcacgctttctgaggaggagagcatggcgcgggcctcggcgaacacttccgtcagcctcgggcggaggatcgtcttagtagctggccagacctggaggagagcgggcggtctttgcgggcctcaggagataggtggccgcccggccctttccccgcctgcccggataggtgcgtgcagacccaccaaagaaaagcggtcgctgcgggacccccagtcccacctcggccgcgctgtgggatggctgcgcccccaggggttcctgcgtctccaggaagccgggagtggcgccctctgcggggtggggtgctcccgggccgaactccggacaggtggaggggacagggcagagctcgaggaagccctgtccccttcagtgcaaggtgctgtcactcacgtgtgccctcgaccctcccgttcacccgcagccttctcagcgcctctccctgggccggaggcctcctcaccagcctacctgttgctctggaaaaaaatcccgtcccccgactccgtccctacccccagtcttcggccggctctggcccctggggagggggctgcacggcggaaggaggctggctatgggcccggctgcccgctgcatgtacctcctcctccacccatcgcctcttgcctgggggtaactttgcctggggctcattctttggttaagctgaagctgccgtgggtggccaaaccgcagattctttgcaaattctgagctggcagagctcgcagccgggagccggccggggaagaggagacttgcgcgccgcaagccgcctgcctccaccctgctctccatctcccgctctagaagggctgggaagctcgcggccggggttccacctggaagctgcttgcatggctgaacccagcttaggtccctgacggggctgctggtggaattctcccccttcgaagctggggaggtttaggagggggaaggcttctgtgaagctctcaaaccactaatagagccccctccccaacagtgacggcgcagatgctcccccttttcttagttgacaccaccaggcagcttcctggccgttggtaggttcctgcagctggctgagggaacagggaccggcaggggactttgttaggggagggttgtccacctaaacgcaaactggaatttgatcccagagcctttttcaccaccatctccgttgtttctggaagcacccttcaggcaggcctgccagcttcacggggcctccagtggggtttaacggtttgaggtttcccctttttgaaattctgtttcacaagaaccctgccttttcaaggcctttggtaaacgtttgggcca

SEQ ID NO: 396787 - DNA, 2122 bp, Homo sapiens
cgctttctgaggaggagagcatggcgcgggcctcggcgaacgacttccgtcagcctcgggcgaaggatcgtcttagtagctggccagacctggaggagagcgggcggtctttgcgggcctcaggagataggtggccgcccggcccgtttccccactccctcatgctttgggttagggttttctttcacgctttctgaggaggagagcatggcgcgggcctcggcgaacacttccgtcagcctcgggcggaggatcgtcttagtagctggccagacctggaggagagcgggcggtctttgcgggcctcaggagataggtggccgcccggccctttccccgcctgcccggataggtgcgtgcagacccaccaaagaaaagcggtcgctgcgggacccccagtcccacctcggccgcgctgtgggatggctgcgcccccaggggttcctgcgtctccaggaagccgggagtggcgccctctgcggggtggggtgctcccgggccgaactccggacaggtggaggggacagggcagagctcgaggaagccctgtccccttcagtgcaaggtgctgtcactcacgtgtgccctcgaccctcccgttcacccgcagccttctcagcgcctctccctgggccggaggcctcctcaccagcctacctgttgctctggaaaaaaatcccgtcccccgactccgtccctacccccagtcttcggccggctctggcccctggggagggggctgcacggcggaaggaggctggctatgggcccggctgcccgctgcatgtacctcctcctccacccatcgcctcttgcctgggggtaactttgcctggggctcattctttggttaagctgaagctgccgtgggtggccaaaccgcagattctttgcaaattctgagctggcagagctcgcagccgggagccggccggggaagaggagacttgcgcgccgcaagccgcctgcctccaccctgctctccatctcccgctctagaagggctgggaagctcgcggccggggttccacctggaagctgcttgcatggctgaacccagcttaggtccctgacggggctgctggtggaattctcccccttcgaagctggggaggtttaggagggggaaggcttctgtgaagctctcaaaccactaatagagccccctccccaacagtgacggcgcagatgctcccccttttcttagttgacaccaccaggcagcttcctggccgttggtaggttcctgcagctggctgagggaacagggaccggcaggggactttgttaggggagggttgggatgggcagtgggcccctgaaagttaatatattggaacctagctcgagtgtcgttctttccaattccgaaagtagaaagagtaaaaataggggtgattggggtggggttagtagaatgcctctctcagggcgctcccccctcccccaccgttttagagagctaggcctcagccagtcttgccactcccatctcagtgcttcctgaagaggctgttttgagtgttgatgaaaagcaatgcaattatgccaaacagtattgagcagaataatttatttcttttttttcttttgctttaaatcatgaatcccgccaggtacggtggctcacacctgtcatcccagcactttgggaggccaaggcgggcggattacttaatacttaaggtcaggagttcgagaccagcctggccaatatggtgaaacctcgtctctaccaaaaaaaaaaaaaaatacaaaaattagccaggcgcagtggtgcgcacctgtaatcccagctacttggaaggctgaggcaggagaatcccttgaaccgaggaggcgaaggttgcagtgagccgagattgtgccactgcactccagcctgggcgacagagcaagaccctgtctcaaaaaaattaaatcatgaatccccatcctggaagaggtaggtcccagcatccagccagattttctgcaatagtaatttaaacacacttttttatttccttccctttctgaattaaaaggaacaaaaaactgtctagtccttcattgttctgaaatgggcatgatggaagaaggcgggtctggtaggatagctgtgactgataatggctgagaa

SEQ ID NO: 396788 - DNA, 4479 bp, Homo sapiens
aggctggtaccggtctgggagtttgggatcgggcggacgagagagctgcgagctaacgggtccggacgacggcggcggcggcggcggcggcggcgacggctttctgcgcgggcggcggcggcggccggagcggcgagcatggcccgcgcggcgccgggcgctgactgagggtcgtgctgcggcagcctggcgcccgacatgtgaaggggaacctgccaggggattactgtgagctcacagcaggataggctggccccgggggagtggggatgggcagaacctgggccaggagtattaggaaggagacctggaccctggtagggagctcagcacaagctcgcctgacccagatggtattggacacagtgccccgctgaacagcagctgttcccagcgccagaggaccccacagccacagtaggagctttgcgacccctacgcaactgcagctggggctggggccaccaggagaagggaccagcacctcagatgggaagcagaagggcaagacctactgcggaaaggatctcgatctctgcagcggagttttcccacactcacagagcttcctgtttttgtcctctcagggttggggtctggctcccctcctctggcagaggttttgggccaggaggtgggacaacacttgcatggaacccaagtcccctgaagcccctgtgctctctgttgtgattggagttctagggcttccccgctgccgggaacgaggggccgcctcattgtctgctcatgaaccacaaggaccccgactgctccagactggattatttcaagccgccaaagagggggacccctagagctggcagccagcaatcccaagggactagagggctgcaatggactgacctccccctcaccagggtggcaggagaggcagagcctctgtggcctagctagtgacggagagacccgatgaagccctaagcaggggccccgcctgactcagggacaggacagccactcctgccaacgtgtgttctccctacatgagggagggcgtggcaagggacccctgccactgtcccctgctgcagcacgtgcccctatgccctttgcatgtggtgccagaataggcaggctacgccgtggctggcccctcagcgggctgggaaaagagtggccacggtgaccgtcacccgcctgccggcaccatgaagtgctccctgcgggtgtggttcctctccgtggccttcctgctggtgttcatcatgtccctgctcttcacctactcgcaccacagcatggccacgctcccctacctggactcaggggccctggatgggacgcaccgggtgaagctggtgcccggctatgccggcctgcagcgcctcagcaaggagaggctctcgggcaagagctgtgcctgtcgccgctgcatgggcgatgccggtgcctccgactggtttgacagccactttgacggtaacatttcccccgtctggacccgagagaacatggatcttccaccggacgtccagaggtggtggatgatgctgcagccccagttcaagtcacacaacaccaatgaggtgctggagaagctgttccagatagtgcctggcgagaacccctaccgcttccgggacccccaccagtgccggcgctgtgccgtggtggggaactcgggcaacctgcggggctctggctatgggcaggacgtggacgggcacaacttcatcatgaggatgaatcaggcgccaaccgtgggctttgagcaggatgttggcagccgaaccacccaccatttcatgtaccctgagagtgccaagaacctgcccgccaacgtcagcttcgtgctggtgcccttcaaggtcctggaccttctgtggatcgccagcgccttgtccacggggcagatccgattcacctacgccccagtgaagtccttccttcgagtggataaagaaaaggtccagatctacaacccagccttcttcaagtatatccacgacaggtggacagagcatcacgggcggtacccttccacggggatgctggtgcttttctttgccctgcatgtgtgtgatgaggtgaacgtgtacgggttcggggccgacagccggggcaactggcaccactactgggagaacaaccggtacgcgggcgagttccggaagactggcgtgcacgacgcggacttcgaggcccacatcatcgacatgctggccaaggccagcaagatcgaagtctaccggggcaactgagccgggcctcgccgcgacccttccggcccatctatcgggcaccggggctccggcccgggacccaggaccagcaacccgcgaccaatcatgctgcagcccaggggcgtctgctgtgccccgccaatcacgagactgggggaccggccgggcctggcaccaatctgcgctgcggtcgggcggagcttctgtttctcccagccaatcatgtgactcaaggaaaacttccggcgctgtgtccagtctcctccaatcaatggccttcgggggcgggccagcggccgctcaatccccactccctcatgctttgggttagggttttctttcacgctttctgaggaggagagcatggcgcgggcctcggcgaacacttccgtcagcctcgggcggaggatcgtcttagtagctggccagacctggaggagagcgggcggtctttgcgggcctcaggagataggtggccgcccggccctttccccgcctgcccggataggtgcgtgcagacccaccaaagaaaagcggtcgctgcgggacccccagtcccacctcggccgcgctgtgggatggctgcgcccccaggggttcctgcgtctccaggaagccgggagtggcgccctctgcggggtggggtgctcccgggccgaactccggacaggtggaggggacagggcagagctcgaggaagccctgtccccttcagtgcaaggtgctgtcactcacgtgtgccctcgaccctcccgttcacccgcagccttctcagcgcctctccctgggccggaggcctcctcaccagcctacctgttgctctggaaaaaaatcccgtcccccgactccgtccctacccccagtcttcggccggctctggcccctggggagggggctgcacggcggaaggaggctggctatgggcccggctgcccgctgcatgtacctcctcctccacccatcgcctcttgcctgggggtaactttgcctggggctcattctttggttaagctgaagctgccgtgggtggccaaaccgcagattctttgcaaattctgagctggcagagctcgcagccgggagccggccggggaagaggagacttgcgcgccgcaagccgcctgcctccaccctgctctccatctcccgctctagaagggctgggaagctcgcggccggggttccacctggaagctgcttgcatggctgaacccagcttaggtccctgacggggctgctggtggaattctcccccttcgaagctggggaggtttaggagggggaagccactctgatggtgtcacacaagtaatatattcccctgccgaatagcgactgcgaacactctcagcttataattagctgacaccatgaggcatattgctgcgctatggtaatcctctacagctgactgacggaactgcaaccgtgagactactcggctaggtaaaggatgggcagtgggcccctgaaagttaatatattggaacctagctcgagtgtcgttctttccaattccgaaagtagaaagagtaaaaataggggtgattggggtggggttagtagaatgcctctctcagggcgctcccccctcccccaccgttttagagagctaggcctcagccagtcttgccactcccatctcagtgcttcctgaagaggctgttttgagtgttgatgaaaagcaatgcaattatgccaaacagtattgagcagaataatttatttcttttttttcttttgctttaaatcatgaatcccgccaggtacggtggctcacacctgtcatcccagcactttgggaggccaaggcgggcggattacttaatacttaaggtcaggagttcgagaccagcctggccaatatggtgaaacctcgtctctaccaaaaaaaaaaaaaaatacaaaaattagccaggcgcagtggtgcgcacctgtaatcccagctacttggaaggctgaggcaggagaatcccttgaaccgaggaggcgaaggttgcagtgagccgagattgtgccactgcactccagcctgggcgacagagcaagaccctgtctcaaaaaaattaaatcatgaatccccatcctggaagaggtaggtcccagcatccagccagattttctgcaatagtaatttaaacacacttttttatttccttccctttctgaattaaaaggaacaaaaaactgtctagtccttcattgttctgaaatgggcatgatggaagaaggcgggtctggtaggatagctgtgactgataatggctgagaa

SEQ ID NO: 396789 - DNA, 3853 bp, Homo sapiens
gtatttcaattgcagtgggactggggtttcagttgaaagttactgtgcctgtgtcttacagattacattctagggcttccccgctgccgggaacgaggggccgcctcattgtctgctcatgaaccacaaggaccccgactgctccagactggattatttcaagccgccaaagagggggacccctagagctggcagccagcaatcccaagggactagagggctgcaatggactgacctccccctcaccagggtggcaggagaggcagagcctctgtggcctagctagtgacggagagacccgatgaagccctaagcaggggccccgcctgactcagggacaggacagccactcctgccaacgtgtgttctccctacatgagggagggcgtggcaagggacccctgccactgtcccctgctgcagcacgtgcccctatgccctttgcatgtggtgccagaataggcaggctacgccgtggctggcccctcagcgggctgggaaaagagtggccacggtgaccgtcacccgcctgccggcaccatgaagtgctccctgcgggtgtggttcctctccgtggccttcctgctggtgttcatcatgtccctgctcttcacctactcgcaccacagcatggccacgctcccctacctggactcaggggccctggatgggacgcaccgggtgaagctggtgcccggctatgccggcctgcagcgcctcagcaaggagaggctctcgggcaagagctgtgcctgtcgccgctgcatgggcgatgccggtgcctccgactggtttgacagccactttgacggtaacatttcccccgtctggacccgagagaacatggatcttccaccggacgtccagaggtggtggatgatgctgcagccccagttcaagtcacacaacaccaatgaggtgctggagaagctgttccagatagtgcctggcgagaacccctaccgcttccgggacccccaccagtgccggcgctgtgccgtggtggggaactcgggcaacctgcggggctctggctatgggcaggacgtggacgggcacaacttcatcatgaggatgaatcaggcgccaaccgtgggctttgagcaggatgttggcagccgaaccacccaccatttcatgtaccctgagagtgccaagaacctgcccgccaacgtcagcttcgtgctggtgcccttcaaggtcctggaccttctgtggatcgccagcgccttgtccacggggcagatccgattcacctacgccccagtgaagtccttccttcgagtggataaagaaaaggtccagatctacaacccagccttcttcaagtatatccacgacaggtggacagagcatcacgggcggtacccttccacggggatgctggtgcttttctttgccctgcatgtgtgtgatgaggtgaacgtgtacgggttcggggccgacagccggggcaactggcaccactactgggagaacaaccggtacgcgggcgagttccggaagactggcgtgcacgacgcggacttcgaggcccacatcatcgacatgctggccaaggccagcaagatcgaagtctaccggggcaactgagccgggcctcgccgcgacccttccggcccatctatcgggcaccggggctccggcccgggacccaggaccagcaacccgcgaccaatcatgctgcagcccaggggcgtctgctgtgccccgccaatcacgagactgggggaccggccgggcctggcaccaatctgcgctgcggtcgggcggagcttctgtttctcccagccaatcatgtgactcaaggaaaacttccggcgctgtgtccagtctcctccaatcaatggccttcgggggcgggccagcggccgctcaatccccactccctcatgctttgggttagggttttctttcacgctttctgaggaggagagcatggcgcgggcctcggcgaacacttccgtcagcctcgggcggaggatcgtcttagtagctggccagacctggaggagagcgggcggtctttgcgggcctcaggagataggtggccgcccggccctttccccgcctgcccggataggtgcgtgcagacccaccaaagaaaagcggtcgctgcgggacccccagtcccacctcggccgcgctgtgggatggctgcgcccccaggggttcctgcgtctccaggaagccgggagtggcgccctctgcggggtggggtgctcccgggccgaactccggacaggtggaggggacagggcagagctcgaggaagccctgtccccttcagtgcaaggtgctgtcactcacgtgtgccctcgaccctcccgttcacccgcagccttctcagcgcctctccctgggccggaggcctcctcaccagcctacctgttgctctggaaaaaaatcccgtcccccgactccgtccctacccccagtcttcggccggctctggcccctggggagggggctgcacggcggaaggaggctggctatgggcccggctgcccgctgcatgtacctcctcctccacccatcgcctcttgcctgggggtaactttgcctggggctcattctttggttaagctgaagctgccgtgggtggccaaaccgcagattctttgcaaattctgagctggcagagctcgcagccgggagccggccggggaagaggagacttgcgcgccgcaagccgcctgcctccaccctgctctccatctcccgctctagaagggctgggaagctcgcggccggggttccacctggaagctgcttgcatggctgaacccagcttaggtccctgacggggctgctggtggaattctcccccttcgaagctggggaggtttaggagggggaaggcttctgtgaagctctcaaaccactaatagagccccctccccaacagtgacggcgcagatgctcccccttttcttagttgacaccaccaggcagcttcctggccgttggtaggttcctgcagctggctgagggaacagggaccggcaggggactttgttaggggagggttgggatgggcagtgggcccctgaaagttaatatattggaacctagctcgagtgtcgttctttccaattccgaaagtagaaagagtaaaaataggggtgattggggtggggttagtagaatgcctctctcagggcgctcccccctcccccaccgttttagagagctaggcctcagccagtcttgccactcccatctcagtgcttcctgaagaggctgttttgagtgttgatgaaaagcaatgcaattatgccaaacagtattgagcagaataatttatttcttttttttcttttgctttaaatcatgaatcccgccaggtacggtggctcacacctgtcatcccagcactttgggaggccaaggcgggcggattacttaatacttaaggtcaggagttcgagaccagcctggccaatatggtgaaacctcgtctctaccaaaaaaaaaaaaaaatacaaaaattagccaggcgcagtggtgcgcacctgtaatcccagctacttggaaggctgaggcaggagaatcccttgaaccgaggaggcgaaggttgcagtgagccgagattgtgccactgcactccagcctgggcgacagagcaagaccctgtctcaaaaaaattaaatcatgaatccccatcctggaagaggtaggtcccagcatccagccagattttctgcaatagtaatttaaacacacttttttatttccttccctttctgaattaaaaggaacaaaaaactgtctagtccttcattgttctgaaatgggcatgatggaagaaggcgggtctggtaggatagctgtgactgataatggctgagaa

SEQ ID NO: 396790 - DNA, 282 bp, Homo sapiens
tattacctaaggtgagccctcccagagctcccggagtataaaagcattaagcgcatgttctaacaaactcataaaaatcaataaacaggaaccccccacctgtgcaatggccccagtgttaagttttatacgtgtagtaatagtgcatatcaattttcaccacccttcctacgctagctattacagggcctaccaccaccggagggacagcgagagccgcaccattcatccatcccacagagttgtctacatgccaggcccattgcatcattgtcagtttta

SEQ ID NO: 396791 - DNA, 1034 bp, Homo sapiens
ctgcaccctctgcctcctggctcaagccatcctctcacctcagctactcaggaggctgagacaggagaattgcttgaacccgggaggcggaagttgcagtgagtctagatcgcagagtgagactccgtcccccccacaaaaaaacaaaaacaaaacaaacaaacaaaaaaacccattcagtcccgtttgactccggaaattcggtgagaatgaaaataagtttttaaggcttggagagttaggcacttttagagtttcaggaaggtggagtgtaatgcaattttttcttctccctttaccccatattttctgcatttattttatatcaccctttttatgtctggatctttcccaagggaagaagggatggcactgcagcttgagggctcgaggtcagacttgaagaagaacttccataaagagttttataatagtgggtgggtgagccacagtggtaaggtgtccttttctggagtgacttgaaaaacaaaaatctgaactagtttgtaagataaagtcctgctgagaggcaaggaaacagatgaattgacttcacagacttagcaatgtggggccttgagggctgagctgtttagtccagttccctaaactgtttcttggaaagagtgaatttgcacactaatgggagtgctggaacctgagctgaggatctcagaaggtcggggggtggtgggggcagttggcacactgcagggatttttttcctttgctaggcagaagatccagggaaggagaaccttgactgaggaacccgggagggtcctggagttggggaagtttgccccctggactggggatttaacataagatcaacagtaaaccttattgtgggatttgatgctactgccaccaagcaagagtgaaagaggaagaattagagagacagggccctggagagtgggctatttctgcctcttgtcccctccgtctgccccaggaacctggattgcagagactgtggtactggggaccatggggtctctttgggagaaagtttttgctttgtggaccag

SEQ ID NO: 396792 - DNA, 648 bp, Homo sapiens
taaatatttaaaacatcaagttaacattcctctcaatcatataataaagcatctacaagtttattaaaaacaagtctcaatacatttaaaaggatttaaatcacagaaagtatgttttctgaaccacaatggaattaaatcagaaatcaataatagaaaaaaagataaaatttgcaaatatttagaaactaagtagcatgcttctagataacctgtagatttaaaaaaaaatctaaaagaaaattagaaactattttaagctgaataaaagtgaaaaaacatacataaaagttgtgggataacactgaagccatagcagaaagaaaatttctagcactaaacatctttattagaaaagaagaaagatcttaaaatcaatgacttcaactgcaaccttaagaaattagaaaagaagagaaaattcagcctagagtaagtaagaaaaagaaaataagagtaaggaagaaaccaataagatagaaaacagaaaatctaagaaacccaaaatgaacaagattaataaaattaataaacctctagctctgctaatcaggaagaacagagaagacacaaattactaatatagggcataaaagaggtgacatgactccagattctatagatactaaaaggataatatgggaacat

SEQ ID NO: 396793 - DNA, 568 bp, Homo sapiens
cttccaaatggaatccatactctttgagactgccttggtttttgtttcgttaatggctctcttggaagtctagcagccccattaaaaaaaaaaagtgagtttctcatcctggaccaaagaccaggaggaagtcagtttccatttggaatactgaaggaacagctactgtctgaatcctcattgcagccataccagttgcttgtctttgcctgcatgtcaaccatcaaatgatgaaccagcctagcctcttaaggcacagacacatctaaccttagctaataggagatatcccaagaaatgcaagtaaacaatgcttgggcaaaccaatgcacatttccagtgaaacagaaagaaggggccatctgtaccagaggttgcatttgatgctctggaaactcaccacctgcttgagaaacatgttttctatagccaagagcatattattctgatcttgaactctgttcaacagccaagcctgtgcttgtgtctgaccaaaaggtcaaggatgagcccctcatttggccacttctggagcccccaccctctgtcaccacctccccaggcccca

SEQ ID NO: 396794 - DNA, 335 bp, Homo sapiens
taggcactaaatccctaatgagcttccctggtggacagcatttcatgtatgttgtccaaagttgttgctgagggaattaagcacagcccatatgattccacagggaaaggactcctagaaactttcatacttgtttttcactggacattgccgcatatgccttttccctttacttatatgctttgcatccttttactgtaatatatgatagccatgaataagactatgagtcctcctagcaaatcatcaaaccagaagattcatatggtttttatatcaatgaatttcctaatattgtatcaatatcatattcccagaataaatcacacttgatc

SEQ ID NO: 396795 - DNA, 397 bp, Homo sapiens
ttcaccatgttggccaagatggtctctatctcttgacctcgtgatccacccacctcggcctcctgaattgctgggattacaggcgtaagccactgcgcccagccgacctggctaatttttaaaagaaatttttgtagagacggggtatcactatgttgcccaggctggtctcgaactcctgggctcaagcagtcctcccacctcagcctcccaaaattctgggattacaggtgtgacccgtcacacccagccagtctagctctgactgtatctatctttttttttaaatttgtactgttcattgcagagcagggctaccccataggccagtgtgcccagagtagccgctgtcactatatgtaaatcatgtataggtttatgtgcataagtatattga

SEQ ID NO: 396796 - DNA, 906 bp, Homo sapiens
  misc_feature (17)..(17): n is a, c, g, or t
ggagctcggtacccgtnctccccgtagggggaagtctctgaactcatcaggtattagttaaggcaaaccacacaaaaattgaaagacaagttagaagtgaagtgggagaaatacgactaactgctgcatttctggaagaacctttggcagttatgtttttgtatttattgatttactttttgtatatttcaaataccaaagaaaacctgaagcagaatcatatctcattagaagccacatcttatttgtgattttgctgtgaaattgcagaaaacctatcagaaacaacaggcggcccttgggctactatgtgttggagagctccttggtttataaaagttttgaagaaatgttttggttttcttggaagtatggctttgcccgaagcagcgtttgtggttatgtcttcctgtgttataccatgaggttccacaacatcaggcttgattctccctgtaggtgcctatgtttttcatggaaagactttaattggtaattactaaatgagatcactcatggaccacccatgttctgaatctctttgaacaagtttaaggattcaaagattctacctgcagaaatatctttggtataggacaatgacagtatatacatatcaactgaggaggctgcactctacttccctccttcccctttccccgcctggtataagaaggcttgaaatagttttgtttttaatacatatttaatgattctcttatacttcattgctcatgcagagctttagtttaattcaagtgaaaggtggagtgaattccataggattgcctgcattctcctgtaccaggttattatattgaaaactctttgaaatacataaaatgatagccagagctgagatacctcttccctagagaacttttttttttttttttgcaatggaat

SEQ ID NO: 396797 - DNA, 268 bp, Homo sapiens
ggattttattccttctgctgtttgagggactttaaaggctaatgggcaaaaaggaaccggcaggtttagttcctgttatcatcctatatcttcctggaaaagggtagtacaaaatattctttcttctttctgtcagaagacttaactgcgaataagagaggttccatttggcctctgctttggtttggctgttcctaaacaggaatttgagcaaaaccactgagtcttctaggaggcccctcagcagctgaggttgtgcatgcaccac

SEQ ID NO: 396798 - DNA, 650 bp, Homo sapiens
aaaaactaaccccaaagccagcagaaaaaaaaaataactaaaatcagagctgaatggaatgaattgagaccccaaaatccatataaagaatcaacaaaaccaaaagttggttatttgaaaagataaacaagatcaacggaacactagctagattaacaaagaaaaagagagaagatccaaaaaatcacaataagaaatgacaaagttgacattacaaccaatcccattaaatataaaagatcctcagagactgttatgaacatttctatgctaagaactagaaaatacacaggaaatagataaattcctggaaacatacaatctcccgagattgaatcaggaagaaattgaaaccctgaacagaccaatatcatgttctgatattgaattagtaatataaaatctaccaacaaaaaagcccaggaccagatggattcacagccaaattctaacagacatacgaagatgagctggtacaatttctactgaaattattacaaaaaatcaagaaggaaggactcttccctaactctatctataaattcagcattaccctgatactaaaatctagtaaagacactggtgaaaaataaaaaaattctggtgaaaaatgaaaactacgggtcaatatttctgatgaaaatagatac

SEQ ID NO: 396799 - DNA, 392 bp, Homo sapiens
tgccgggtcaatctagaggaccccagcagttatacagactcacaaactgaactaaataagacaacagtgaacaatccttaagaaacagatatacatgacctttcaagaactcaaaatagctgttttggaagaaactcaaattcaagaaaacacagagaaaaaattcagaatactatcagataaatttaacagagattgaaataattaaaaagaatcaagcagaaattctggagttgaaaaatgtaactgaagtactgaagaatgcaacagaatcacattcattttaacttgtagcccattcattttaactgctacgtagaattctgatctgcgaataatccagttttatctactctttcccgatattcccttgagtctgtattaactgcttg

SEQ ID NO: 396800 - DNA, 205 bp, Homo sapiens
gtgccaaacagaaccagacaggacagaccccgcctcagggctcagtacacagctgctgcaccatctcctgtgggaagagggttgtcaaggcctgaagaaatgatgggaacagggtgatgggccaggggagacaccttataccaggagaaaagccttgtgcctctgtgcgaggctgggaaccttgctctggcctcgccacacactg

SEQ ID NO: 396801 - DNA, 410 bp, Homo sapiens
cagcttacctgggtctccagcttgcagttggcagattgtgagatttagcctccataattgcatgagccaacttcttaaaataaatttctctcagggcatctatatctatatctaatctgttggttctgtttctctggagaaccttgactaatacaaccatccttatgagatttttgaaaagatgtggagatgtggccgaaggtcactgaaggcttctgatctcccacatggtttctgtgtaggtggaataaaaagagatctagaagcttgggaaggtggtgaaagaggagttttggtgttgtattctcttcctgggaaatctgctctagccccgaggttatgagagaagttactgcctcagggtgatgacagcagcgaaggagtgaagcaggcccttccaatgtgatggc

SEQ ID NO: 396802 - DNA, 172 bp, Homo sapiens
caaagcatttcacatctatcgctgcattttatcctcatgccattttacagatgaggacactgggccagggacattagaggactgcctaaggccaggacaccacgcaatgccaaattcagacttcctaacacaatattcagcactctcttcattcttatgtttttctattaac

SEQ ID NO: 396803 - DNA, 472 bp, Homo sapiens
agtcttcttttccatgcactatttttttcttttgtaatagaatctttctctgcttctttaaatttgtatatccacatataacacttcggtaggtaggcaaagtaaagttccctactgtggtctcatggtaataatattgtaaaacaatacaaacaagaaatggttctaccgtttcttcaggtggaggtctgaaatttgcagtgctttactccagaaccataacttgataaaatgcagagctactagaggagcagatcatcttcctaaagtgccttgaaattcaagtcctttttaattgccgagaattcatgtcacttgtgtgacaaagctataaacatgcataatcataaaaacacattttgacatcctgaataaaatcaatgccatgttattgttaattttttaacaaacagatgagttttattaataattttaacagttcagcctatgtcttaatcaatgttttcctcct

SEQ ID NO: 396804 - DNA, 569 bp, Homo sapiens
ataatatgtgaacaaagcagaatatcaaagggttagaaactgtaaaaagaaaccaaaaagaaattgtggaactgaaaagtacagtaactgaaagtataataactagaggcatttaaaggaagattgagcagggagaaaaatagaattaatgaagacaggacaatggaaattatcatgtctgagtgacagaaataaaaaatactgaaaaaacattatcagagtctaagggacgtgttcaacaaatcaagatatgcattgggggagtcctgggagaagaagaaatagagaaaaaaagggcatatttggaaaaataatggttgaaaacttcccatatttgatgaaagacaaaaaaaaagcatccaagatcaacaaattctatgtaagatgaactcaaagagagtcacgttaaaacaaatcataatcaaagtttgaaaaaagacaaagagtgggccttgacggcagcaagggaaaagtaactttggtcaaggggtcctcaaataaattatcagcagatttattatcagaaactttggatactagaaggcagtgggttgatatattcaaagcac

SEQ ID NO: 396805 - DNA, 713 bp, Homo sapiens
gatattctttgcttaggatgattataacagcagttaaaggacaagttgcagttttagattcccgacattatgcctgaagtgttcttcagttaggttgacattgttttcaaagtgtgaggatatttgtcataatggactgtccaagtgttgatgtttgatgcaaattttaggtcacctttgtctctttttcctcattggaatatacttttgtttctggttaaggtgaagttaataattgaagagcactttttgatataaaatttgggaggtcttcatctcaatcaactaaagacattgtgcctctttgttttattaggtcctttaaaagacaaaatgaattaattttgagtgcatctctccctctcctgtgggatcttaattattaatatccagccatttattactttaaagaggtgttgcaatggaatatgttggaggtcagaaagactggatggggcttgttttgtagcatatattcactcattctgcattataaataatgaattctaaaagtttcaaaacattacacctccaatataatgttcctttaaagggaatcctaaatgaggagacataaacacgtagcagatgaatatttggtgaagtctcctcatactacagcaagacaaaatcacctgtagtcaaaatcccatattctcattccgttcattatattgtatctacactatcacctgttagatctagcagaattt

SEQ ID NO: 396806 - DNA, 483 bp, Homo sapiens
atgagtgtttacagaagctttgttgctagtggccccgaacagtgaaaaaaccacagtgtctgtcaataggagacagaataaatgaattgtggcggattaacaatggcgtgcttctcagaaatgaaaaagaacgaacgattgatacacgtgacaatataggtgaatcttcaaaacagcatgcggtgtgatgcggccagacataaaagagcatgtatcagaggattccgtgtatgggaaacgccagggaatcagatccatggttgtcagggtcaggagggaccttactggggtgattacatgtgtacatacattgtgtgaaactcatcaaaaccgtatacctaaagtgggcacattttattggatgtaagttatccctcaaattaaattaattttcaaagttttaaaaaatggaaccatttttgccacattgaaggaaaattatttccaccaagatttccctacagccaaacgatctaccaacta

SEQ ID NO: 396807 - DNA, 164 bp, Homo sapiens
tatgaagcaattgactctcatctagtaatatgttcagaccattttaaaataaatctttctatatagattttttttctttgaacactagagactattttataaatagacaactgctattgctgctggtagtagtttgctcctgatattctcctaatttcctttca

SEQ ID NO: 396808 - DNA, 337 bp, Homo sapiens
tcaagcaatcctcccacctcagccttctgagtgactgggaccacaggtgtgcaccaccatacctggctaatttttgtatttttgtagagatgaggtcttgccatgttgcccaggctggtcttgaacttctgagctcaagcgatccgcccacctagacttcccaaagtgctgggattacaggcgcgagccactttgcttgaccgggtcctttatatcttctggataagtgcctatttttaagcattgacagtaaagcgcttgctgggcagactggatgtgtgatgggaacttccctgagctgggggctccagctcttcaaggggggatccgggtggcc

SEQ ID NO: 396809 - DNA, 348 bp, Homo sapiens
atcacatttttccaacgctatagctaaaggatgaacactgatgcctccaatttcagtacctttgcggaaacatctaattagcaactaagcacttctgagcaggggcaagctcttgctgcttcgagcacacctgtgatgaatgtgtccagaaggaaggagtgagttttgctcagcacacgcttatcaagaacctgttgtgtgtcctgcatgtgcatggccaggaggaacatcctgaccaccaggtgctgaaattttgcaaaagaataagtgcaaataatggcaatacagcattaaaaacaccaaacggggccgggcgcggtggctcacgcctgtaatcccagcactttt

SEQ ID NO: 396810 - DNA, 488 bp, Homo sapiens
tatgagcctggtcccccccttctatatgcagacatcttactacaaaccctccagtgaatgtgtggcccaagggaatcaggagaaagagagacaaagagccactgagaggagatggaaaaaccaagaaagagaaaagaaaaatgagggagacccataaacagatggcaaagtggaggatgggtgagagatttgcagcgacagagtgaaagaagcagtcaagaaagtagcaggggcagaaaagcaattggcgaaatgtagagaaaagctcgatgtcccgagatgcaggacaacaagataaggagagggacagcaaagaaggagcctcctcagacagagagtgggggagaggagaaaggatttggccgagggcagacagagctgcgtggtgctgggacagctggaggggacagctggtgacaaggcgagcagagggagcaccacaacacagggaggcctgggatctgggagtgccagagagtggggataag

SEQ ID NO: 396811 - DNA, 1373 bp, Homo sapiens
caggaagagaggagggccaagggctgagtcctttttcaattaagaggaagggcctatctatttaagttctcattaattggtataagcaaaaagtaaacaataagggcaaggcactgctatagacttaaagctttagtttttcttcggtaatcaaagcatgcctaaaataaatatgccaacatacagttatatgaactgacatgtacaagctatgaatgagactatcttgccccagcgatctagggcaccctggctggtgaaagctgaaagccttcctctcaattgtgtgctattcaatggggttacaatgaaggtcctacagttaattaactataactccatcattcctggggaacaaatgcttgcctctctcaattcctcctgcttctttccctgtttagaatgtctgacttggggagctgtgcatttaatcactcccatctcttgaatacagcaaatacccagctctcctttaccttcactgagagcaatgcctgggattctgcacataccaactgcagggatctactgtaaagacacaggtcctagtgattttattacagaactgtgaaagagatgagattatactctgtttttttggtgtttgtattacctctgtttagcggaacactggcagcaaaaacaagtaaacaaaagcaaacctatagctttcattgtataggataaggaaattgtacaaaaagaactcaaaatattacttactaaaatggcattcaaaatccagcctccagtgacttactgctgttgaataaaggtgacaatctttggtgaaatctaaagagctattgtgcatagtgctagaagttataaccacctgcagacatttctgccgtttcattcgggcagctcagattgggaattggtgatgatggagaaagagctcttgggtcaaattactacactttggattttgatagtttaaggattttagtagccttaagagttctagacagacaagacagttatggataaacccctttggatcccatttctgaaagattcactcccttactgaaacacctgaccaagaattaagttagtcagccctgggtgtctgcaggttccacatgctcagattcaactgactgtagattgaaaatattcagaaacagcaacaacaacagcacaataaaaatacaagtaaaggacaggcacagtgactcatgcctgtaattccagtgctttgggaggctgaggtaggatgatcgtttgaagctaggagtttgagaccagtctgtgcaacatagcaagacctggtctctacaaaaaaatttaaaaatgagccgagtgggtggcacatgcctatagtcctaggcatgtgcccatatactcgttggcggggggaaggggca

SEQ ID NO: 396812 - DNA, 333 bp, Homo sapiens
tgctgagtgtttattacgtgctaggcactgttctaagcgttttgcagtcactaggtcactcctccaaaatggcctacagatgcaaacttcccctaatgctatccccatttaacacatgaggcagagggagagagcagcctcattcagatgagaagctttgaagaaaagagactgagtgcttcctgttccaccgtttctgtaaggggccctctcgaaactccccacgggattgttgtaaagattctcatttccttcagaggctggtgaaggcgtgtgctatcatgatgtggacctaaaaaggaagcagcatctctcgttttataggcacaggcc

SEQ ID NO: 396813 - DNA, 585 bp, Homo sapiens
tctcccttccctgtccatggcttagaaggctttgcatcttgaacatcctggatgcagagcggtcacaggccatccccacagataggttcctacagatggggtgtgtgaccatgttctctcctcctccacacccctctggggcttacagctaccaaagcccaaaatccttcagggctcaggcctcagggctaaacagtgattcacagactttcacacttccccacacacccccgcgcatgccaactttttgtttcggtaaataaagacattcaaaagtaatgaccatctactctggccctcatttcataaaagcaaggctactttatcaccaatgtcagatgaacaatctcagaataaggctaagttctaaaattaaaatacattttatttcatgacaaactccctctacattttcctcactattctgtagacaggcactggggagcctcccacacagctagggcccctggagcacaggctgcaaagaccccaggaggtcccagaatctacctgccttaggcccagagaggggtggacgttgcccaggaccatgccgctggaacaggaaaaaggttttccagtttt

SEQ ID NO: 396814 - DNA, 597 bp, Homo sapiens
aaaatttttttatctttttctaataatatacttgttacagtttttaaagaattatatacaaccatcaaagatattattttctttttattttgctcaattcccccgaggatcagaaatgaaagctccgaaacccctcaattgagccctaatcttagaaaatatcacttcaacatacacctgcaaataaactagaaaatctagaagaaatggataaattcctcaacacatacaccctcccaagatgaaaccaggaagaagttgaatccctgaatagaccaataacaggctctgaaattgaggcaataattaatagcttaccaaccaaaaaaagtccaggaccagatggatgcacagccgaattctaccagaggtacaaggaggagctggtaccattccttctgaaactattccaatcaatagaaaaagagggaatcctccctaactcattttatgaggccagcatcatcctgatatcaaagcctggcagagacacgacaaaaaaagagaattttagaccaatatccctgatgaacatagatgcaaaattcctcaacaaaatactggcaagctgaatccagcagcacatcaaaaagctta

SEQ ID NO: 396815 - DNA, 227 bp, Homo sapiens
gcagttttaggtttacagcgaaaatgtgtagaaagtatatatactcctccttcccaccctgatatatgcagttttccctactattaacctcttgcattaatgtggtatattttgaaaattcgtgtacgactatggatatatgattaacttaagtccattgtttacattaggattaactgtgttgcacatgctacgggttttgacaaatgcataatgtcatgtagcta

SEQ ID NO: 396816 - DNA, 549 bp, Homo sapiens
agctcttcatagctttcaagcttctttatttaaatcttcttcattcagaggtagctttaaaaaagtagtgtaattgaactttgtgtactgaattttcattcaaaacattttgccaaagatgctgaaaatgaagaggtgttgaaaagatatatactataatttaatccagatgtaaatttaggtagcagtttcaaataacttgcctattcctgagtaactgactcaatttaatcttttcaagtacaatagtcaggcctgttttttaatgcacaggtttcagatttcagttctcaaaaagataaaatggatgttgtatgtccgaatacctcttccccttcgagagatgaaagctgtgtgttctccatatatgtgcccgagcttcagttttccttactatttaaattatgtaaaaaagcatgctttgttgacagatttttaaatgacatattttttattaaaatgtacactctagctacacattcaagtatcaaatacagatcaatgaccactttcgtccaccttattttgaatgacttagatattacgctt

SEQ ID NO: 396817 - DNA, 591 bp, Homo sapiens
tgatacattgtaacacatgcccaagtatctccaaaactgacttcatcttttgtgaaagtgatgccaactgaacataccaggaagtcttaggcatttgtatcaaactgcctaagaacccagctgttagcttataagtcagtgaaattatattttatcatttattatcattgatagaacacagactaaaaggaaatacatctgaagtccatttctttaattcatcattatcttcagtggaaaaagatatgaggaacaacatcactcattggaaatgaactgtctttgtcatttcatttgtggtagttgtcctttcttcaaaaagctatttcttgaagaaaaggaaagttagtgaaatttgttttctcattatactttatccaaatttgaagtttcctaataaaagtagataattgccttttggcaagtttcctctttattacaagttcatgtaggtgtttgagtttgtttttcttatttataagaggcagaagatgatacctattttcacagttacttactaacttactgctttagtttgaaagaaactgacaatgtttcttctgaaactttttaacaatacaattaattagc

SEQ ID NO: 396818 - DNA, 596 bp, Homo sapiens
ggggccaggagttcctgaaccttgcttaccatcaggattgcctgggggttttcataaataccgagcacagagcacaattccatatctgctgaatctcacccttcagggagtggagctgggaattctctctctctctctctctctctctctctctgatatttctgacaaccatcagatgtgagaacagttgccataggcagtgagggtgccctaaacggttttaagcatgtggatgatatggcccgatttgcagaattaattggtggagtgggggtgagcatagaacaggaagactgggaaaaaccagtatgggtctgaaccaaggtagggacagtggggaaggattctggagcaatttaagaggtaggtcttcacagggctggatggggcttagcaactgattgacgtggagaggggagggaagaggttgggtgatgagtggatagaaggataattcatgacccagtataggggacagaaacagaagagtgggtttgcatggaagacagtgagttcagtttggaatttattgagcacttactatgtatagtccaagaactgctctaagcatttatgcgcatcacacctcatttatt

SEQ ID NO: 396819 - DNA, 386 bp, Homo sapiens
gagctcggtactcgagagatcatcgtggcacaaagtgagagcaagagaagaaaagctgaggaaattctgaaaagtcagactccaaagggaggagacaagaaggaatcctccaagtcattagtgcgacaagggagcttcactatagaaaaacccagcccaaacatacccatagaacttattccccatataaataaacagacttcctctactccttcttctttagcattaacatctgcaagtagaatacgagaaagaagtgagtctttggatcctgattctagtatggacacaacccttattctaaaagacacagaagcagtaatggcttttctagaagctaaactacgtgaagataataaaactgatgaaggaccagatgatctcct

SEQ ID NO: 396820 - DNA, 444 bp, Homo sapiens
ccatgccagcattctcaatggaggcaagaagggatcttatgggttttgcagcagggctgctttgggtatatgtttgtttgaacggggtagggacagtggatgaaggacccacctggagtttgctgccttgggaggggaggtgatgagctttaaacataatagaggctgggcgcggtggctcatgcctataatcccagcactttgggaggatgaggtgggcggatcacctgaggtcgggagtttgagaccagcctggccaacatggtaaaacccatctctactaaaaatacaaaaattagccaggcatggtggcacacacctgtagtcccagctactgaggaggctgattcacaagaatcgcttgaacccgggaggcagaggttgcagcgagccgagatcttaccactgcactccagcctgggtgacagagtgagacttcgtctt

SEQ ID NO: 396821 - DNA, 278 bp, Homo sapiens
actggatcacgaaaccagacgtcccgtttaacagctctaataaaatatgtcatcttcgtccttacaaaaatgatcaggctaagagataagatggttaatagtaacatctgaggttttttcagctcttatattcaacttatgctgtgactactacacaaagcagtctctttcttcatcatttgaattctactgctaagaccgtctagaaattcagagcatgtctgtgaatcccaggactgaagtgtgaatgaaaggtattcttattgatgcctgccatg

SEQ ID NO: 396822 - DNA, 383 bp, Homo sapiens
atttaatgttttctatggctgctttcaagccacagtggcagacatcatggtccacaaaacatgtaccatccagccctttacagcaaaggattactgatgcctgaaacagcctcgttttagtattacagtctaatttctgcaaagccgtgggcttcagctacagttgcttcacgtttttcctcagctgtgatataaaacaaagtttgagaaacatttcaagatgtgccaacaaaattgaatattaaaaacttggtgggatctggcaagatggccaaataggaacagctctggcctgcagctcccagcaagaccaatgtagaaggcagtgatttctgcatttccaactgaggtacccagttcatctcactgcgactggttaggca

SEQ ID NO: 396823 - DNA, 405 bp, Homo sapiens
atccccaccacaaccttgtgagatgcacatttaccaatcccattatacaggtgaggaaactgaggcttagagaggtgaaggagcctgcctaatcggaaagctggaacaggatcctggctcaggtctaactgacagcaaacactgtactcttcacctcactagtatgcccatctccatgttcttggtttcagataattaggtcaagaagtaattatttcataaaggccttaagctcagctgtaaactctgtaagtgggacattcaatgatagccccttctcttcttaccctacacgctatccctggtgagctcatcctctcttggggcctggggtatcatctgtgtttagatgacgctcatgtctttcttcaacttggatgtgaccttgggtcgaagtctagttca

SEQ ID NO: 396824 - DNA, 214 bp, Homo sapiens
tgacgggattacaggtgtgagccaccgcgcctagccctctggcctagactttctacccttgctactctcttctacctcctgacagtccccagtcctttcccacgtggccctgccttctgtttctagggattcgagtataaatttccttcataacaatcacttcttaatcacttgattaaaacaaattctgggtatattttaatatactttctaa

SEQ ID NO: 396825 - DNA, 495 bp, Homo sapiens
tggtcattagatagttaaaaagatttaaaattgctatatgtctagtttctaaaaattgctaaatgattttctaaggtaaacacctttccgtgtatccagtgcttaacagaattaatgttatgtgagttttcaaaaaaaagaaaggaaaaaaaggaaatctcttttttgtctcagccgacagcaagcagtgctgctccggaaagaaatgattttatttctagcctctctgcagcatctccctaccgcattagtatgttgctgcaaagctatccattgtgtaactttccccatcagtcagtcagctgtgtagttctctttcctatgaaatcgttatgccacaggagacaaaaataaaaatacaatgcaggttagttcattatatcctgacatctgtttcatgcagattgtgatgcaataaaatattagtaatttaaacagaatgtaattgtggtttgaaatcacttgggtaaatcgtgttattttaaaacaaatctt

SEQ ID NO: 396826 - DNA, 193 bp, Homo sapiens
ttatagttaacattattacctgaatgattagaaagattgttgaagtttccaaattctacttggcaaagagatgcataaggactcttttcattatgagtctgttcatgtctttttaagtgagctgactgtctaaaagatttcccacaaatattacagccaaagggcctctgtccagtatgaattaaatagtgtc

SEQ ID NO: 396827 - DNA, 469 bp, Homo sapiens
ggtggcctaaatatcccattttactgggaaagctgtggtgtagatgaagtggtgacagatggttactaggaattatgttatttcatttgattatcatggtaatcctgtgagacaggaagaggaaactaaagctcagaaaaagcaagtgatgaagtgatgaagctgggctttgaacccagatttgtcttactccaaagtttgtgctcagttcattatattataatatggcctcttatgaaggtaatggcactttcacaaagagtatagggaaaggtctctacttcaagtcatctttttttttgggagacaaggtcacactctgttgcccaggctgagtgcaatggtgtgatcttggctcactgcagcctcaacctcccaggttcaagtgatcctcccacttcagcctcctgaacatctaggactacaggtatgcaccaccacacccagctaatttttttttttttttttt

SEQ ID NO: 396828 - DNA, 719 bp, Homo sapiens
agtagagatggggtttctccatgttggtcaggctggtctcgaactcccaacctcaggtgatccgcccgccttggcctcccaaagtgctgggattacaggcgtgagccaccgtgcctggcctgtaaggtcttttaatgaatctattgtcatttggattatttaatagtcttaattgcacaaaactgtctattttaactaccataataacagtcagactaaaatgtttttcaggtgacatgtgaaatatcaaaaagactaatgattctctgcatttctaagacatatgattagaaatagcagcgtacggcatctgattctatctaaagatgttggtgaagactgcttagcttaaagttgtactcatagaattgattgtatttgtatttgccaatgaatgctactattccactaaactaggaaataaataactgtcattcagcctttcccacaaggttaatccatttccaccaacctctcctcatatcccttgcattctggtaatctgaaaatggcctgtaaatgcttactatggctagacttatggagaaaagaggtgttaagtacatttctaccgagacttcaaagtcatggatttagcagatgttgactgtaaccaagttttaaaaaaaactaatttatttgggccatgcacggtggctccagcctgtaatctcagcactttgggaggctgaggtagggggatgacttgaggccaggag

SEQ ID NO: 396829 - DNA, 719 bp, Homo sapiens
tctgctttcgttccttcatgctttccttgcttgtgtgttcatttgtccaaatcttgttcaagacgccaagaacctggacaccctccaccggtaacatattttggcgagccagacaagaggtaagcccagagttgggatttatttttcaccttttcctttctgctccatacagtggaatctctctctctctctcttttcatttccaactcaggacccttggtgggcagtgcctaaacagagacaactacaggtttctggctgtggccactctctggtgaaactaaggggtttctgtgtggaggtgcctaacagccaccgtccagtttgggtaagggacctggatttttttccctttatttcttttttctctctttctttttcaggcttttgatggctgcttcctagtattaaatagctccttagtaactgagcgcaactgtccagggccactctctggtttacctgaagggcaaggagtaaagggggatagctaccatgcctggaagggggaaggatttttctgtcttttccagttgttgtccctgatccctacatgtgggacagcttttccagggtgaactcgcatgcatttcaggtgacttaaacattcttttcctatgctaaattcttcccttcccctactctactggctagggacgaaagaaacccacccatcctccagttcctgtcattacagttcatggctatcactctagtgc

SEQ ID NO: 396830 - DNA, 270 bp, Homo sapiens
caggggagatactttttccaagcatgtagtagtgaatgccttgcacttggtagtcatgtgatatgagttgcttattggaaatgggtacaagaaggccaagtgaaatttcctggattgctggccgtctttatataccctgggctatgctgatgttattgacatatatacagagtcggactggatcttcagatgtggctatgtcagttttcatgacctttgcctgttagatggggcttcttaagaaatgtcactgattgtgaagatacactg

SEQ ID NO: 396831 - DNA, 935 bp, Homo sapiens
gttttgcttgttgcccaggctggagtgcaatggtgcagtctcagctcactgccacctctgcctcctgggttcaggcaattctcctgcttcagcctcccaagtagctgggtttacaggcacctgccaccacacccagctaactttttgtatttttagtagaaacggggtttcaccatgttggtcaggctggtctcgaactcgtgacctcaggtgatccacccacctcagcctcccaaactgctgggattacaggcatgagccaccatctcacttttaatcctccagtaggagaaatgaagttgtaaggggaaatgatagtgttagactaggcagaaggaatgattcatatatttttgtgcatacacattttaaatcctgattcccatgatcaggtgggaaggtaccattttcaattcctactggaagggaggggttcttaatatggtcagaatcctttgttgaaatgaccttggttaccttgggtatcttctatggtaggagtacaaagtagtatacatgggattaaattttaaaacaattaggccctcagacatacataaaaataactatctcatttactcctttcctcacctatttaaataaataagaaatacagttttggagaggggttttaagtagttgtatatgttgatactgaaggattaatgtttaatacctttggtataatgtttttaacttggtatttcagttgttgagtataatactggataaacacttaacattctgagtttataatgttataaacattacatacatgtttaatgctaaaaagtgtagaagatctgaatgcaattttttagtaatgattaattatgaacatagaaattctgtaactttctcacatatcaaggtgtacagctgcctttttttcaccaaaatataaatttttaccctattttgatttcagacatttg

SEQ ID NO: 396832 - DNA, 499 bp, Homo sapiens
aacctccaaaatgctgcttagatgctatgattagatttgatggaacaaacttattcctaacctaatgtgtgagcttataaaaagtaatgaaagaatgaaagcacctcatcgatcaatattggtctttcacccacaaagaaatatattaaagcttacttttcctcaagctacaaagcaagctaccattgaggaaaactgaatatacagtctttgaacttgacatgatttacattcagtgcataaaacagaaaatagtgggcattatattaaagctttatcatgtttctattaggaagaccaacagacatggaaaccagatgccttcaaaaaacaaaacaaaactctaaagtgattccatcaacagaaaaatggccctgtctccttccctcaagcctgcttttctatttcagaatcatttgctcaaatattcttgcccttgcccattatcaagcaataagctatctttgagtctggtttttggtccataccaccaatccag

SEQ ID NO: 396833 - DNA, 649 bp, Homo sapiens
tttttgtgcggcccatgagctaagaatggctttcacatgtttaaatggttgaaaaacatcaaaagtagaataatattttgtgacacatgaaaagtatgtgatatgcaaatttcaatgtccataaataaagttttataggaacatagcggggaaaaggcttttattcttttagtgtagccttttatgtttgaagagcaaattatattgccttgcaagaaattcaaaggtcagtacccaggtgctagcctctgtacctatctgaacttgctcctcttttttttttttttttccttttccagcctctcttctcatcatataaaccctcttgtctgtcacctggcagtacaattaaactcatggatgattcccttttgtagctgaagtttgagaggcaaaagttagctggttaatagaaaggaagtgagaatacatgttttttctagacaaccaaaatatccctttgcctactgtttattaaaaacaaataaaatcaaaagcttgttccatcaccactaagcaatgcttgtctctattttgtaggcctttactatgatgatcttcagtaatgttaatatattaagtgagtttggccaattcttgatcttttatcataatggagaaattatgataccccgaagggtatcgtctc

SEQ ID NO: 396834 - DNA, 406 bp, Homo sapiens
tcctttctatacttaacaaattcaggtttcaaataaattttacttatacacctgaggtaaagtcttaaaagatcttccaagtcatattacacttatctgcagcggtgcgaccttggctcaatgcaacctctgcctaccaggtgcaaatgattctcctgtctcagcctctggagtaactgggattacaggcatgtgcctctgcctcctggattcaagcgattctcctgcctcattctcctgagcagctgggattacaggtgtccaccatcacgcctggctaatttttgtagttttagtagagacgaggttttgccatgttggtcaggctggtctcgaactcccgacctcaagtgatccacccacctcagtctcccaaagacctattattcttacaataccacaggca

SEQ ID NO: 396835 - DNA, 545 bp, Homo sapiens
catatgtatctcctatgtactatgaaagtactagtttttcctctatcaaatacaacttgcctagaaatgtcattaaataaacaatcctatgattaaacaagtcagtattattttatctctgattctgtgctaatatatatatggttagaaaaacaaaatgcaatgattcttctctagattatttttatgtgagtttagtagtcttaatgtcattgtatgtgaattttttatgtaaacatcattcattattatttttattttcttgtgtttttggattatattttcccaagttttcatattatgatttcatcaggtaatcccagaaaaagaaaatattttggcttcctacagacacagagcacctcattactcagcatacaaaatagtgttctacaatgtgtttccacagaagaagcttctcatgttaattttttttggggggaggaggttgagatctcactctgtcacctaggctggagtgcagtggcgtgatctcggctcactgcaacctccgcctccagggctcaagcaatcctcccacctca

SEQ ID NO: 396836 - DNA, 409 bp, Homo sapiens
acaagttatctgttaattaccactgagtcataaagactctgggtctatctccagctcaagaataaaactgacaccaaggagggaacttatactttagctgtctgttagttaatctgaaatcatctctgggaagcaatatattttctaagattcacttttctaataatgttcattataggtacccaaaggggtagggaataaaagttaagagcactgagcatttggattcagattctgtcttgttatcttaagctaaatctatttattacaattaacctcctttcagttactgagtactagcgagtgacatgaactagtgactactctgtatatattatctcaattctccaaacaatgcaattagtactagggtacaattaaatagtaccataaaatatgccattaactc

SEQ ID NO: 396837 - DNA, 286 bp, Homo sapiens
ctcccaaagtgctgggattacaggcgtgagccacagcgcctgggccttattttttttgttttatagagatggggtctcactattttggccaggttggtcttgaactcctggccccaagcagtcctcctgccttggcctcccaaagtgttaggattacaggtgtcagccactatgcctggcctttattttcattttatattgcatacttgtgggtgtctggaaaatgccccttgttagttgcatgaagtgaaggagaataaaaggcacttggagcttaaaaaaactg

SEQ ID NO: 396838 - DNA, 447 bp, Homo sapiens
gcatatggtgaaaggagcctgaaggccggggtgaaggatgtaagtgaaagaacggcattgacaaagccccagccctgggcctagaccctgcagttgctaggttgctgtttgatgaattagtttgggccagaagaagacagatctagaaggtcagctttatgtcatcatttctccatcaacagacatttacagtctatgcatcaggtcccagccctgaacgtggaatcaaaagaggaaagggctgtccctgatttgacagaatgtccagttagttggagaagacaatgagtacacagttggtcacaactctggtgacagtaaaccaactgggctgtaggaacataggacccagtccagcttagaggaagaaggtctaaacgagctggattacccaataggcagactacactgaggttaccagcaagataagggctaccaaactaagaa

SEQ ID NO: 396839 - DNA, 1156 bp, Homo sapiens
tggtcatgttgaattgcccaccttttaataacttatgtcaggttggacttcagtatttatggtcataacagaaatgtttcttccagttatgaagtgatttgttttttcattaatagacatctgagtgcctactatgtggggggaaaaaagggctctcctgacagttgtttttttgttgttgttgtttgtttgtttgtttgttttccaataatttcagttgaagtatcaggaactacctgggattctgtcctcagggataattctttctgttgaaagtctccaagagtgtggtgatctaattattgatcaaagttcataatatggtttctgccctcctgaaacatatggcctacaaattatctatttttatgtttagtactttaaaaatgatatattaaaaaattaaactagagtgatgatacaactatctgatctttgacaaacctgagaaaaacaagcaatggggaaaggattccctgtttaataaatggtgctgggaaaactggctagccatatgtagaaagctgaaactggatcccttccttacaccttatacaaaaattaattcaagatggattaaagacttaaacgttagacctaaaaccataaaaaccctagaagaaaacctaggcattaccattcaggacataggcatgggcaaggacttcatttctaaaacaccaaaagcaatagcaacaaaagccaaaattgacaaatgggatctaattaaactaaagagcttctgcacagcaaaagaaactaccatcagagtgaacaggcaacctacaaaatgggagaaaattttcacaacctactcatctgacaaagggctaatatccagaatctacaatgaactcaaacaaatttacaagaaaaatcaaacaaccccatcaaaaagtgggtgaaggacatgaacagacacttctcaaaagaagacatttatgcagccaacaaacacatgaaaaaatgctcatcatcactggccatcagagaaatgcaaatcaaaaccacaatgagataccatctcacaccagttagaatggcgatcattaaaaagtcagggagcaacaggtgctggagaggatgtggagaaataggaacgcttttacactgttggtgggactgtaaactagttcaaccattgtggaagtcagtg

SEQ ID NO: 396840 - DNA, 359 bp, Homo sapiens
aatgccattggtgtggacattctggctcctgatctccgaggtttttcagaatgcaggacaaggatgtgttcttgcctttcacttccccttggccacaacatgcagtagtaacctctttaattaagagcgtttttgtttgcttgttttcccctgcatggaacatcagaaacttttggtttatcaaggcaagcttttcatgcagcatttagcctttttgtcccagagcatctgaaaactgaatattgtatatgtagttggatgactatttcatcaagacaagaaaccaccaatacatttacctgagatcatgctactgtactccagcatgggagacagaacaagacactttctccaaaaaa

SEQ ID NO: 396841 - DNA, 295 bp, Homo sapiens
tctgagcaaactatcgcaaggaccagaaaaccaaacactgcatgttctcactcataggtgggaattgaacaatgagaacacttggacacagggtgggggacatcacacacctgtacatttttaatacaatcatgtgttgtttaactacagggatacatctgagaagtgcactgttagagaattttgttgttgtgggagcatcatagagtacttacacaaagctagatggcatagcctactacatacctaggctatatggtatatcctgctgcttctaggctacaaacctggacag

SEQ ID NO: 396842 - DNA, 420 bp, Homo sapiens
aaatgttaaaacctacctatttgagaggcctgtaataaaagcagaaaacttccagtaatagctaacaggctgcgatctaccacacaaatttatcataacagtgagacaagcagagtcatttaaattaaatggtttacacaggaaatgggcatactgtaaactagcttagacctttcctgagatcacctttgaaatgttagtaaaaatggccttggaaacacaggcttttcaatacacatatgattcctgtttcaactccagaaaattgctcaagtggcactaatagcaagtgcctagattagacaattcatttctcaagtttattttgatcaggaagtctagagctgaaatgagagtcctctaattttgaattaactcatttacatacataattgccatgctagactgagtagtcatact

SEQ ID NO: 396843 - DNA, 611 bp, Homo sapiens
acttatcacctgggaataaaaaaggcagttttacttctttccaatgcagatgacttttttgttttttttttcttgccatattggatggaagggaaccttaagtatagggcgagagtgaacatccttgtcttgttcctgtttttgagggaaagtatacagtctttcattattatgtaaatattagctgtaggttttttgtagataccctttattggtttgaggaaattttctttggtttgctgtttttaccaggagtagatgttggattttgtcaaatgctttttgtgggtctgatcgagataatcacacaattttaatatagtgaattacatgacttgaattttcaaatattaaagtggtcttgtatttctgggttaaatcacattttggtcatgcaatattatttttttaaccctttttgcatttagaaaaaaagctgcagcttgctgccagttctcatgtaatttcacataaacacactctttgaggctgaagcaaatctgattttcagtgtgaaaataaaatataaaaactgttcttggagttatttctaaacagaactaacatcagaatcatctgactcatcagaatcatctgttttggaaaattca

SEQ ID NO: 396844 - DNA, 226 bp, Homo sapiens
ggagtgtagggtgctgcatggactcaggtgctgaggtcatagtggtaccactgaaactagctggggtcatgatcctgcagccttctgtgtgggcatggtgggatgatggcagatggcacccctaggatgtggaggtgtctgggctattggcctccaggtcagaatgcacaccagcagtggttccattaccaaaatggtgtcatactgtaacagcttgggtctcatg

SEQ ID NO: 396845 - DNA, 447 bp, Homo sapiens
tgctttacttgacgcttttgggaatctaggaaagttcatcattctgccatacccaagataatggccctcattttcctaggccagggtgggtggctacatctctaactgtcacatctgtattctgctggaggaaagacaaagaaaaagggagcaaaaggcaagtgccaagtggtcttaaagatggtttttggaacctgccgtaggacacttctacttacgtcctattgaccagaacctagtcatgtcatatctagctgcgagggaggctgggaaattttctatttcagactgccatgttctgctgaaatttggtattctcttggaggaaagagaatggatattaggagaatgaatagcagtctctgccacatcattttttatcattatatgcaaataatgtgaaaattagttctcgatgcattgatgacttctgagtgttaggaatca

SEQ ID NO: 396846 - DNA, 210 bp, Homo sapiens
cgcctgtagtcccagctactcgggaagctgaggcaggagaattgcttgaacctgggaggcggaggttgtagtgagccgagattgcgccactgcgctccagcctggtgacagagcgagactccgtctaaaaaataaaaaataaaaataaataaataaataaatagttttctttttggccggttgcggtggctgatgcctgcaatcccatcc

SEQ ID NO: 396847 - DNA, 183 bp, Homo sapiens
gtggtctggccagttttagttcaagaagttttctctgacccagctgaagacaggatcttagaaggacaatgaaaacaggctcagggctcagcctctatggggacacggggacatggagacaccctgttcttgcccatgttaaaggtttctttcttttgctaagccagaaactgcaaagaaaag

SEQ ID NO: 396848 - DNA, 184 bp, Homo sapiens
gagaggtctgtcccagaagacccagtgcggtttcaatggtcattcccttccaatccggtcaccatgaaccccagagctcctccagcagctgggagatgctcagccatgggtcgggtgtggtccaaggcagggctggcttccaaaatagtcaacagctcttaggaaagttccaaaccaaacaaag

SEQ ID NO: 396849 - DNA, 388 bp, Homo sapiens
tacatcagctaacagaacaaaaagttttacagtgctttctcatacaatgtctggaatttacagataacaccaatagttttggtcaggggttaataatattattattatcttagccaccagggccaggtggtggtgccaaggtcgtctagctatttatcttacttctgtttctttccaactttttgctttctcccttttctcctgtcttataaactagggaaaaggggaggttggggagaaactgagaaggacaacaggagaagtggtgacctcataccataatcctagcattttgggaggccgaggtgagagaatcgcttgaggccaagagttccctaccagtcctggtaacatagtgagaccctatttctaaaaaaaaaataaaaat

SEQ ID NO: 396850 - DNA, 161 bp, Homo sapiens
gtgacctataggctgggaccacagcaaagccgaaaggcaggaggcgagcccgtccagagagtggccaggagggacgtccaaaagcgggaactgacagggggaccacaggactctattatgtcctatcattatttatttatttatttatttattttatttat

SEQ ID NO: 396851 - DNA, 445 bp, Homo sapiens
cttttgggtctttgctcttttggggttttgttgtcttaaaagattttattaaaggtctttacaaggcaacatccagactccagatccagctgccaaggagaccctattacacagttggggctgggtagagcatggcttcctaaccatctgtcctgagatgggcatggcgaatagtatctcatctttagggtctacagtgctcacgtggtcaggcaggggattcttaaggccaatcttaccacttgggcccaggacgcatgagcttcactttgatgcccagcacaccctgtcttagcagcacatggtggatggcagtatcaatgcagtagttaacaaggtctctgctgtggatcatcagatcacacacaaaagttcatgaattcagttctctgtccttagagtttcgctgacaccatgacctcgtagctcttgccccactctccat

SEQ ID NO: 396852 - DNA, 660 bp, Homo sapiens
aagagacatagattggcgaccatttcaagtgactattggcttggccccaaatccaaaatgttcttttctaaataggttgtatttgcccactccatttttatgcatgattccctctcagtcttcagctctaaggcatacggaaacaccagtgtacacacaactgagtgacttcagctcaagctggtacatgctctggttggagaggagatagcatttttgactcgggacttgagctgaaaaataataggcatatactcagctgacagatgattgaatctgagtcttctcagtgaagcatagaaataaactggatatcgtaaagacttacaccaggtgatcaaatgatcaatcaatgagtatttattgaatggccactgtgtgcccaccatcacactttaaaaagttcctttcctcacagagtttgctgtctggctgagacagtaagatataagcatgcgtaaaatagagcacagtatggctatctgatactaggctgacgagggtcaggaaagaatgggggaagaagtgctcattgacagagcttagggggatacaactactgtcttcaaatgaggtgaaggcaagcaaagctgttctctgttactctagagaaaaaatggatagcagggaggcatgcttgggctcattgtaaagaacaat

SEQ ID NO: 396853 - DNA, 400 bp, Homo sapiens
taccatttgcacgtggaacttcagcaatgtaatgtccaggcaaatgagtatgtgtgcattatgtgtactctcccacacaaaatctgattctacttgggctaattcactaaattcttgtttacacatgaagctgtttattttgctttgaatgggaagctgttttggagtcatgtgaagaaggatagaaaactactgagaaatgtagctcaaaaacctggaggatgctggtagcagatgagttgggagtggattgcatggtgacaaccagagagcgtaagtagtctcttattacgtacagtatttcattggttatatcttgcttctggattgttttggaatttttttagccttactattttattagactggcaggggaatcataaatggaggaaataaataa

SEQ ID NO: 396854 - DNA, 455 bp, Homo sapiens
ctgtgatgtacccattcagtggtgtcctactcagcaataaagaggaacagatgctgacacacacgacgtggatgaatctcagaacacgcaacgctgagtaaaaaaagacacaggaatacatactgggtgatgccaatcacatgaagttcaaggacatggaaagtaacttatggtcgcagaaaccaggaagcggtggctctcagggctgaggactgactgggcagggccccaggatctttctggagtgatggaaagtttctctgtctttggggagccggtgactcaggggtgcccatttggcggagctcatggaaccgcacatgtgagatctgcgtctttcatggtaggtaaatttgcctcaactgaaaagctaatgctagtttcaaatttcaaggaaaaacaagcaaataaacaacctgcaattttaaaaaacacatgttaaaaattttgaggaa

SEQ ID NO: 396855 - DNA, 894 bp, Homo sapiens
attctactttatggttagttgcataattatttcattatatattacaaatgtaataataatagaaataaagtgcacaataaatgtaatgtgcttgaatcatcctgaaaccggttcctggtgccaaaaaggttggggactgctggattaaaggacagagtcagctggacatcattgtaacatcattgcttggtgttttagtagcattaagacttaagttttgctttttaaatttacttctatatgttgctggagaggatttacttctgtctctggtgatattcagctaggttttttagaatggtctgtctgtgggacaagaaaaaaatctcagctaacaaaataggtagggatttctggatgtaaacctaggagaagttaggaaccacagaagtaagccttaaatgccttttccaatctgaaagaaatagctataaaaacaaaggttttggcaggcttatggggagacagagtcagagttcagggcctttcaaagatatgtggtctgataacctcccaaacctttgagcttgttctctaaaaagcttttatcatctgtgtaaagggaaaacagaaatacaccattctgtgagtagagttggagccagctttgcatcacctaggtaacccagtgggcactcaagccttgaacttgtgttaaggtcaagccagtttggtgttactcccaggtgtctggtataagcaagtgaacattgttttggagcaagatactaggcctcaaagtactcatatatatgtgtatgtctgttttaaaatacagtgtccagcacatagtcaaagatggttaggcacattaaaaaatagggctataaatgaaagaaaacctagcaaaataatagacaagagaagcagatacccaaatttcaggtatagaaa

SEQ ID NO: 396856 - DNA, 888 bp, Homo sapiens
atagcaggtacagtagagagtctgtaatatgaagttacatatggaattttaaaacatatactccaggcagaattcaacagtggaaaactgtctcccacaaaacggttcctggtgccaaaaaggttggggactgctggattaaaggacagagtcagctggacatcattgtaacatcattgcttggtgttttagtagcattaagacttaagttttgctttttaaatttacttctatatgttgctggagaggatttacttctgtctctggtgatattcagctaggttttttagaatggtctgtctgtgggacaagaaaaaaatctcagctaacaaaataggtagggatttctggatgtaaacctaggagaagttaggaaccacagaagtaagccttaaatgccttttccaatctgaaagaaatagctataaaaacaaaggttttggcaggcttatggggagacagagtcagagttcagggcctttcaaagatatgtggtctgataacctcccaaacctttgagcttgttctctaaaaagcttttatcatctgtgtaaagggaaaacagaaatacaccattctgtgagtagagttggagccagctttgcatcacctaggtaacccagtgggcactcaagccttgaacttgtgttaaggtcaagccagtttggtgttactcccaggtgtctggtataagcaagtgaacattgttttggagcaagatactaggcctcaaagtactcatatatatgtgtatgtctgttttaaaatacagtgtccagcacatagtcaaagatggttaggcacattaaaaaatagggctataaatgaaagaaaacctagcaaaataatagacaagagaagcagatacccaaatttcaggtatagaaa

SEQ ID NO: 396857 - DNA, 221 bp, Homo sapiens
aagactttaaaatcacattgtttctattttaaaacttagaccatcaaaatttttctctctggctaggtttttaaaatattttatatttaaaagttgatttttttccacgattatgaataggttcctgctaagttttagaagacgagagcctacatttttctggtgaaagtgtttaaactttgagaaatttgttttatgttctaaccagatgttctggataa

SEQ ID NO: 396858 - DNA, 463 bp, Homo sapiens
gcggccgctgggggcgcccccgacccccgaggcgctgaggcggcggttcctcgagcctcgcctctcccgactcccagacgggcggcagcggcggcggaggcggcggcgcccggccgtgcgcccagcttgcaggcgcctggctctcacgatgatgaagaagaagaagtttaagtttaaggtggacttcgagctcgaggagctctcctcagtgcccttcgtcaatggggtcctcttctgcaagatgcggctgctggacggcggcagcttcaccgccgagtcctccaggtaactcgcctcccgcgccgcctcgcccctttctgcttggccagggcttgttggatgggcagcatctctccttggcccatttgctcgcctttccctagggaccgctctaaaatcagtcgaatttattgatctgcaaagtgctttgcaaatgggttcttctcagctggccttggttcct

SEQ ID NO: 396859 - DNA, 296 bp, Homo sapiens
ccatgcggacccagcggccagcgccgcgccttgggagttccctccgcgaagggggtgatcaaggtgcggcggcgccccaggggcgagtggggaggggactgtgtcggcctctgcgtcactctgcgggcgcacagagggctggcgaaccgctagtggacacccggcaaagccgcttctcagctggctcgctcctccagccccttccccagaggccaaggagacgtctcctcggctccctagcgttcgccctctttgttaacggtgtttctggggttcaggctccttcccagttcgta

SEQ ID NO: 396860 - DNA, 115 bp, Homo sapiens
tctctttacgatttgcaaacgtctctccgtgtcttttgcccacttgcctactggaatccaactttgttccttttttatgtggtttacatgataagattattgacgctatttctgt

SEQ ID NO: 396861 - DNA, 422 bp, Homo sapiens
ttacaagctcagagaccttaaccctggaacaaacccctaatgagtcagatatatcaaaccccgggactgagccctctgaaaaggaacagagacttcacgcctgaaaatatatcccaaacaggtcaagggactttgaaaccaaaagagctcagggaccacgtatcctaggacaccagtggacaaacagctcagagacctcacaaggtaaacacagtccgcaaaacagcccagtgaactcacccccctggaatgtagaccagaaaaagcgcagaaccctcgcattcaggattcagaatccttctgagacttagggtatagaccccaaaatatatttcagagaattaatatgctggatgcagagtatcaactaattcagaggcctcaaattgtgggacgtacacacccaaagagatcagagaact

SEQ ID NO: 396862 - DNA, 251 bp, Homo sapiens
tatcaaggcaaaaaaagaaaagaaaaacagattaggtaaagttattctgtgaaataaccatctgattacagttacacgtatcatatcaacttaatacaaatcttacacaatgaatttgtgtcaaggtttcccaagaccaccccaggtttggtggttcattagaaggactcacaggactcaacaaatagtcatactcagatctttaattgataacaaggaaggggacaagcaaaattagtagaggaaaaagg

SEQ ID NO: 396863 - DNA, 442 bp, Homo sapiens
agtcatgtaccatacagttcagccttttaaaatatacaattcaatggttcttagtatatttacatagctgtgcaactgttgccacaatctacgtcagaaccttttcatcacccctaacagaaatcctgtaccttttagctctgcctggtttatcgccttgtccccgcagcccctggcagcctctcatctaccctctgcttctgtgggtttgccgattccgggcattttatgtaaatggaatcgtatgatatgtggtcttttgtgatcatctttttacacttagcatgatgtttttcatgtatattacggtcgggtgtggtggctcacacctgtaatcccagcgctttgggaggctgaggtgggcagattacttgagctcaggagttcgagaacagcctgggcaacgtggcaagaccctgtctcaattctttttaattgtaaa

SEQ ID NO: 396864 - DNA, 298 bp, Homo sapiens
gtgtgtttgttttgttggatggatcctgccgaggcactgagagacagactttgctgggccctgttttgtaaacaaatctgttcacgcacgctttcttctatcattggatgtgtacactggctctgattttcccacccgacacgccaaagcctaagcatttagaagcttgttttcttttagaagtaggcaggcaccaaagaaaaacctgcatatgcatttaaagtgtgcacatctaccctaagtaagtctttggatctttacagttttaactctgggccatgtacagtgtatttcagcc

SEQ ID NO: 396865 - DNA, 505 bp, Homo sapiens
atttgtgaacttaaactatcttgctcaaggtaataaaattattaacaaacatactcagaatttatttcatctgagaaaaatgagtttttaaaaaatttatttacacattcaaatcagtatggtcctctttaaaataagttactttggaaggctaccacttactcatttattcactccatccatccaaccatctgatgcactcaaccaacatttatgtagtgcctaactaactacatgtgaagctatcacccctgttcaaaatatttccaacttcctccttgggagtgttttcaaaatcagctaataagtcaaccaagaaaattattcccgtttctgtgattaactggatttaaggcaaaactatttttcattcactctatttgatattgactaaccttcagcatttctaaaaatcaaaatttcaaagtaaaaagatctgtcatcaataagaccattcagaataagattataccatgtattatttaaaagtgtgcctcttggccgg

SEQ ID NO: 396866 - DNA, 273 bp, Homo sapiens
aatggattcaaaacattccattatccatctatggggaaaatatttgcagcctctgtatatacctttattttgtgtttctgttatctcttagagtctttcaaaattgttgatcagagacaaagggtggctgttggatcataattgtaaaatgatggacatcagaagaactatttagttaagtaatgagagaaggagcaagtcctgtagaacttagttctaggatatcacacagcacatttcaggactcttctttaaatccttaaggagaggtct

SEQ ID NO: 396867 - DNA, 644 bp, Homo sapiens
attagtctgtttttctttttctttctccctggagccatttcagaaatggaagatttccttagatactaattttctcagcacgggttggaaaaacaagcaaacaagagggcctagattctaagtcacatcattgtctgagagaaaaaggacttcaaacttttttttctcagtaaaaaaaaaaaaaaaattccatcagaacagctgcttccatttcctttgaacttgtgatggtagaaacattttggtaactttgttagcaggcagtaggattggtagataaggctctttttagtcttcttctggctgtccctgcatctgaaccctctgttgaacttccgctgcactttattcttaccttttccctggttctaaggcaccagagaaacaaaagttgaaggtgagcaaggagcataaagtagaatttttaaaaagtatattctagagcaaagaaatccagggagagaccccagttcttgattctactcttcatcctgaggccatagcctccatttgtggttttcttctgttaccctttccaggttccccttgcatttaggcaacactttagccatcattttctgggtagggatcccaatcctcctccctgtcccgaatatggcagctcttttcctcccatatttagt

SEQ ID NO: 396868 - DNA, 265 bp, Homo sapiens
attttgtgtagtctcacagcctcctatcctgggctggagctttggtgatgtgcacacagcactctgatgccagagggcgcagcctgtgctagggtaggtcagcaggaaaaccagtgaaaagagggagggggcatttctcctgcctgcccttcctctgtaaaatcacaaggggtcactcttagaccagagatggcaggagcagcaactgcttccaaggcaatttccctctggcctgaggctatgctgctctcagatactttgtgtc

SEQ ID NO: 396869 - DNA, 487 bp, Homo sapiens
gatttcctgggctcaagcaatcctcccacctcagcctcctgagtggctgggactacaggcgcacaccactacgcctggctagttttattttttgtagaggtgaggtttcactgtattacccaggctggtcttgaactcctgggctcaagcaatccttccaccttggcctcccaaagtgttggaactgcaagtgtgagccaccattcctggtcattcactgagtatttattgagtccctactatttgcaaggcaccaaggagacaccatgactaaaacaggcaaagattcctgcctttatggagtttatatcctgtgtgtggagaaagaacagcaacacataggctagtaccatgtatcctggcacatagtgaaatgctctgccaaggtgccaagaagggagggaggctgcaagtgctggaggggcatcgaagaaggcctccctcatgagagattggaggtgagacctgaaggaggtgaggagagcta

SEQ ID NO: 396870 - DNA, 468 bp, Homo sapiens
gacccgggtgaaagttggacagcagagctgggccatccgtcacggagagaggggtttgtgttttacactagcgagcttgaatttcatccagagagagacatgatcagatttatcctttgcaaagattggctgctgtatgtggagggaactgcagcaggatcagcgtgattgtcagaaggctgaccattcggcgggcccaacccggtggtgcccttagtctctagaaacgtggagggactcatagaggggcatcagttatgccagcacctgtcccaagacactaaaatactgttgcactttaagattcttgaactatgtttcaagtgtaaatttcattctacatacatatccatctgtatgcagatctttaaaatgtatgcatatgtgaatcccatctgcttcaagagaatttggaaaatcctagctgaaaatacacattttaaagaataaaagaaatagaaatatcgc

SEQ ID NO: 396871 - DNA, 331 bp, Homo sapiens
tctcacagctcagccatcagccagcagtgcaacctggagaagttctttacttctctgagcctgtttatttgtttaaaatggggttgaaattatgcctcattagattgttgagaaaaataaatgacatatattaagtttcagaacagtgcctggatgtagtaagtgttcaataaatgatagctgatttaatttttgtaatgcaacttaattatcaaaataccaaaaagtatccggacccaggcaaatttttttttttttttttttttttggggaaaaaaagctcttgcgtgtttggccccttggctatatggcccgggcgtggaagggatag

SEQ ID NO: 396872 - DNA, 495 bp, Homo sapiens
ttagctatttcacattatgttggcaaacatttactgattgctaactgtacgccagcactatcctagttgtttggggacagggcaacaaataagacaaacttgtcatctggtggagggaagccagacaataaacgtgtaacaaacaaggtaatatcatatactgaaaataagatgatgtgacagcaattgaaggcactacttgaaataaagcgaagccgggtgcagtggctcacgcctgtaattccaacactttgggaggctgaggcaggtggatcacctgaggtccagagttcaagaccagcctggccaacatggtgaaaccctgcgtctactaaaaatacaaaaattagccaggcatggtggcgcatgcctgtaattccagctacttgggaggctgaggcaggagaatcacttgaacctgggaggcggaggttgcagtgagctgagatcgtgccattatactccagcatgggtgaaaagagtgaaactctgtct

SEQ ID NO: 396873 - DNA, 505 bp, Homo sapiens
acattcttggtgccaactgtgaccgttaaatatgtggattctgtacatgcttcaagattgttcctggaggtcaagccttgtctgatattcctctctttttaaaaaattttattttggttttaaatagagacagggtcttgttatgttgcccaggctggtctcgaatccctgggctcaagcaatcctcccgccttggcctctcaaagtgctggattacagttgtgagctactgtgcctggtctgatatttctttatatggtcctcagttcctgccctcaaaattggcacataggatcactcaataaatattgttgaaggaactatgggaagggagacaaattgggaagcttttaaaattggttggttatgaagaaaatgaaggcctggacttgcgagtggcagggaaaatggagaaggaattaatcagaaatatattagaagaagaaataatagaactggataattgaactctgaatttgctagaaaagaaacatagtattacggt

SEQ ID NO: 396874 - DNA, 256 bp, Homo sapiens
cagtacagacaggagaagttccgtggttcttgctctctcctcatccccacacaccacccccaacccctttcaacagaacacacaaggtaaacccttgcttcacgtcattttgtctggacatctgtgacttttgtgtgacctcttcccaggcttgatgacctgacctcccctgccagggctgatttctgtataaacaaagtttgcccctctttgaacacacctgttccttcagtgaagttgatctctcagttatttt

SEQ ID NO: 396875 - DNA, 104 bp, Homo sapiens
cctaatagagcacctattctaaccttttcttcctcttatttagccttctcaattttctttctcataaatgatgccctgaacccactagctaacctgacaaacca

SEQ ID NO: 396876 - DNA, 297 bp, Homo sapiens
agtttaaagaatacttctaaaaaataacttcagtttacaataacttcagtttgctcctaaccaaaacttcattttacatttctgactaaagaaaaactttgctgcaaaagtcgaggtaaaagaaggttcttagggcataatagctcagggtgggaagggtctgccattagaaattatgaacatttataccagcaataaacaatgagtttctggaggcaacagtcatcaccctctctgaaagagcagaggagcaaaaccttggcaactcacataatgagcccttgtccaaaggaaggc

SEQ ID NO: 396877 - DNA, 885 bp, Homo sapiens
  misc_feature (5)..(5): n is a, c, g, or t
  misc_feature (808)..(808): n is a, c, g, or t
aggantcctgcttgcctgattttagttcttcatgcataactcactctgttgagccacaacgcctgtgccgctccctagtaatactgtattctaaacttcagtgttgtaatggaaacttttagtaacacgacaaccagttttcgtgtgtgtgtgtgttttggtacaacaggatcttgctatgttgctcagactggcctggaactcctggccttaagcagtccttcctcctctgcctcccaacgctgtgtgattacaggcgtgagtcgcagcacccagcctttcctgctcttgtgaaaagctagctgtcttgctcatctccctcacacctgtatgtttttatgctgtgggcagggccgtgacgtgcacaagacgacccacaggaaaccctggctgcaacccacggaggaagaatggcctgaggatggggaccgccttcccaccccacccctgttgataggtggatcttgaacagagttgtgttggtggctaggagtgctagaacctgtgggggtttgagctttcttgtagcctagtgatttattctaacaccaggacttggtctgagtcctgtggaggcgggtggaattgctgagggaagctgtcatcaggtgtgtgagctcatctcatttcctcagaccgtcggcttcacctaaaaaatctgttttctgctctttgaggggcctgatacctggccccagggctcactggcctgggcccccagcttcccttggctgctctggccttttgtgcaggtggcttttctgaattctctgctgtggcttgggctctttttgggtttggttcccanaagcagggttggggcccgcttttctggatttcctccaactttttgaaaccgaactttcaaaaggggtggtttatttt

SEQ ID NO: 396878 - DNA, 874 bp, Homo sapiens
  misc_feature (9)..(9): n is a, c, g, or t
  misc_feature (797)..(797): n is a, c, g, or t
aggttctgnttgttgatcagctgctgatgcatgagcagactctttggatcaccgtgccgctccctagtaatactgtattctaaacttcagtgttgtaatggaaacttttagtaacacgacaaccagttttcgtgtgtgtgtgtgttttggtacaacaggatcttgctatgttgctcagactggcctggaactcctggccttaagcagtccttcctcctctgcctcccaacgctgtgtgattacaggcgtgagtcgcagcacccagcctttcctgctcttgtgaaaagctagctgtcttgctcatctccctcacacctgtatgtttttatgctgtgggcagggccgtgacgtgcacaagacgacccacaggaaaccctggctgcaacccacggaggaagaatggcctgaggatggggaccgccttcccaccccacccctgttgataggtggatcttgaacagagttgtgttggtggctaggagtgctagaacctgtgggggtttgagctttcttgtagcctagtgatttattctaacaccaggacttggtctgagtcctgtggaggcgggtggaattgctgagggaagctgtcatcaggtgtgtgagctcatctcatttcctcagaccgtcggcttcacctaaaaaatctgttttctgctctttgaggggcctgatacctggccccagggctcactggcctgggcccccagcttcccttggctgctctggccttttgtgcaggtggcttttctgaattctctgctgtggcttgggctctttttgggtttggttcccanaagcagggttggggcccgcttttctggatttcctccaactttttgaaaccgaactttcaaaaggggtggtttatttt

SEQ ID NO: 396879 - DNA, 933 bp, Homo sapiens
  misc_feature (856)..(856): n is a, c, g, or t
caaaaaataaataaataaataaataaatttagattgaaattgagaagtgagcagaaagatgccagtttagatgtgatcagattttgttaaagaaatcctataaaatgccaggatattttggcctagtaatactgtattctaaacttcagtgttgtaatggaaacttttagtaacacgacaaccagttttcgtgtgtgtgtgtgttttggtacaacaggatcttgctatgttgctcagactggcctggaactcctggccttaagcagtccttcctcctctgcctcccaacgctgtgtgattacaggcgtgagtcgcagcacccagcctttcctgctcttgtgaaaagctagctgtcttgctcatctccctcacacctgtatgtttttatgctgtgggcagggccgtgacgtgcacaagacgacccacaggaaaccctggctgcaacccacggaggaagaatggcctgaggatggggaccgccttcccaccccacccctgttgataggtggatcttgaacagagttgtgttggtggctaggagtgctagaacctgtgggggtttgagctttcttgtagcctagtgatttattctaacaccaggacttggtctgagtcctgtggaggcgggtggaattgctgagggaagctgtcatcaggtgtgtgagctcatctcatttcctcagaccgtcggcttcacctaaaaaatctgttttctgctctttgaggggcctgatacctggccccagggctcactggcctgggcccccagcttcccttggctgctctggccttttgtgcaggtggcttttctgaattctctgctgtggcttgggctctttttgggtttggttcccanaagcagggttggggcccgcttttctggatttcctccaactttttgaaaccgaactttcaaaaggggtggtttatttt

SEQ ID NO: 396880 - DNA, 533 bp, Homo sapiens
acagatagaaaaaggctactactccagataaagaaatgaagtgaatgaaaagataccctggccaggtgaggtggctcatgcctgtaattccaacactttgggaggccaaggcggaaagatcacttgagcccagggggatcacttgagcccagaagttgaagaccaggctgtgcaacatggtgaaaacctgtctcaaaaaaaaaaaaaaaaaaaaaaggtaaaatataatccattaccagtgagtactgtgaaagaacaataaaaatctaaagaatgaagtatcttttggtaactcttggatgttgacaattctatttgtaaaagacttgacttaagcagtattaaaaatgtttatttgccaagtagctaaacttaaaggtaacaaaattagacaaaagcattttataaaacagtgtaaacaccgcatgttctcactcataggtaggaattgaacaatgagaacacctggacacaggaaggggaacatcacacactggggactgttgtggggtgagggaaggggggagggatag

SEQ ID NO: 396881 - DNA, 507 bp, Homo sapiens
gacctttacatcttgcttattccccactcctatcatgtggaacagggagtaagcccactgaaaagccatcagaaaaagcaaagtagagataggaattcagtttagcttttactaactacataataatgctgaccctctgttgttagagactttagtagccaagttcaacaatgaaaatatgttcctcattttttaatggtggttccttgttggggaagaaggatgtccctgcctattgttcaagattctctggtaaaggatagaacagccacctctacttttacaaggaagttttttttaacaagaatagtatgctattttctttcactgtgcgttaggagctacctgattcctattctgattaaacatttaatttcaaaataatattttaatagattatttttccttttgtttatttaggtcacagttttgaaatccaacaaaggaattctgagtttctaaaatagtagtttgtgggtcacatttaaatttgtggtaaggctgttg

SEQ ID NO: 396882 - DNA, 560 bp, Homo sapiens
agcagcgtctgcatgaaggaggttttccctaattgcacctagaaaacaagactttttttttctttaaatctttgccactgaatctggtgttcgtgaaatgatcgggagttacaagcacaaatcaagtttttctgtgtttctacaacatgctgcactacttcacactgaacatgatgtctggaaaaggtattctttattcttcattactgtccagaggaaaaacaagaggcatttcgtcagagaaattgtcaactctcttttaaccctaagagctttcatgcaagttattaagaaccaaattttctgatcttgtacttttctactaagtaaatattcctcatggtaaaaagtgataggagatagagacaacaaaaataaactagaaacatttttaaaaggctacagaaaactcctcccttctatattgatatttagaacagtcatgctttcattcctgtcaactttccactctaaagctattgcaattactcaatgcaaacaggaatgtattgtttttaagagcgtgggctctctgcacatcacaggttattaaactgggc

SEQ ID NO: 396883 - DNA, 215 bp, Homo sapiens
aatagttgtcagtcatgtcattcttcactcaaaaccatccagtagctttgtttcttattctaaataaagccaaaatcctcagactagctcccaaaaccccatagacatcatcttgccctaccctttcccatttcccctcagatctcaaggcctctaactctctccctcaatccccctgctccggccacaccagctgccctgcccctcctactgca

SEQ ID NO: 396884 - DNA, 437 bp, Homo sapiens
tagacaggcaatttacataaagagaaggatagccaatgaatagtttagaatgtaagtgcttccagagaaaagaagaacagaacaggacaatgggcagaggtgatctgaaaaagctttttttttttttcagacagaatgtcactctgttgcccaggctagactacagtggcgcagtctcggctcactgcaacctctgcctcctgggttcaagtggttctcctgcctcagcctcctgagttgctgggatcacaggtgcccgccacagcatacctggctaatttttgtatttttagtacagacagagtttcatcatgttggccaggctggtctcaaactcttggccttaggcaatctgcctgccttggcctcccaaagtgctggcattacaggtgtgagccacctcgccaggccagcttcctttttttttggtttttctg

SEQ ID NO: 396885 - DNA, 427 bp, Homo sapiens
cttataaatgggtgttgaattcatcaccaaaaatacagtaacttattttgtatctgttttattgaaataaaccaattaaatttctattatatgccacttcaaaacaaccaaacgtgacatctttaaagcaaatcaattatttggttcaaaagtttgaccctctgactttatggtcatgatgtatgatataatcatgtatgctgtccaatgcaataaataaggggttgtgggcaaaagcccaaccacatggcttaataatggagcccaggccccatctgttgaaaaaaagtagataggtatgaaaaaagggactcaagggtcacttccattaagagaggcagagaggacaagctgactggaggaagatgagccctcacaggttgagccccaaaatcatgggatgaagtacttaaggacactgagctta

SEQ ID NO: 396886 - DNA, 622 bp, Homo sapiens
gaaactctgtctcaaaaaaaaaaggataatccaatgtggaaattaataggagcagttgaaattattcaatcaacaggactgatgtttcttgtttattctgttttcaaccttggggtcacaggattcataaaatgattcccaaaggcatttaagtacattataggaaaaagagttcaagagctaggtatagctcaaacacactaaggaactaaagaaatatcaaaagagacttgctaataaaaacaaatatttcccataggacaaagaggcagagaagcagaggacatctctgaaattagggcaggagaactaataccattgttaaagaaagaagtagcaataatttggcagaggcaattcagacaaaaagttgtgatagcatagaaagctcactggacagacaccagtccagtgatttgcagagactcaaatatcttcaggatctctgcacacagaatctgaagatatctctgaacagagaaccatacatatgcatgttaaatccagaaaaaaattcgtttcaaacacctgaatccaaagacagattcttcaaaggagagagagagatagagagaacaaatatgaatacaaatggagaagcagagatgcgccaagataaatg

SEQ ID NO: 396887 - DNA, 137 bp, Homo sapiens
tgtaaagagctctggccaatcaacaaggagtggacagctcatacaaggacgaccaagtggccaacaaacataaagcgatactgagaggcaccaacttcaacgcgtgaatacgaccttatccctccaccatcgcagca

SEQ ID NO: 396888 - DNA, 677 bp, Homo sapiens
cataggagaattttaagatctcattctaagtgattctaagaagtatttattggatcgttgattcatgcactgtaatgccccttagcttcttaaaagttacataagtatttctcttatttagccaagatttttaaatgaatgagcagtacaaggagctagtgtgtataattaattactgctaactcctcttgcttcttccttatgttacaggcctactttcgagaagctgtactgtggctggcttgggttggctcacttgtgtcacccaaaagtacagtaatggagctgggataaattgaaaggcagagggaatcattattactcttttgggggataaaggaaatgaaaatttaaataggcgtgaataaccttctctagctatatgaagatctatagttttcaaactggacgtagagacatgtgtccattaactaatttatacattcagttataaggagttggtctcaagctccctggaggacgacagttattacattcacttggatcagccctgatgcgttggttattaatactcattaagcggaagtatgtagtcgactacatacttccgtggagtgtggcgagtcagctaaatactttgacgcaggtggggatagcgatgattatggtagcggaggtgaaatatgctcgtgtgtctacgtctattcctactgtga

SEQ ID NO: 396889 - DNA, 807 bp, Homo sapiens
aagataatcaaagaacacccacctctcaaagcacacagtgtctgcccactgatatggctagaaaccataggagcttcaaaaagggttcacttggttaactgagaaattagtcattctgtggatcctaagcaggatctcagccactttgtgtcttcatggctgaccctgctgtttgcagtttcctatacacagcatgcctgtccgagtaattagcccttcgcatgacccaaagtgaccttcagcgagtaactctagcaggcctgggctagctgaagggactactgggcttccggagccttagttatgtctgatgactttcaaaatcatcctggtggaggctttagcctcgtcaaggtactgtgtcttctaggctggtctcctgggctccctgcaagaaaccttttggcttctaagatttggacaagccacctagagtgtggctacacttacagagtaaacttgctctccgagctgaaaacaaggacacaggacaaggacacagaaaggacaagagctcttttaagcagaccagaaagcagaggggtctggggaatggggttttagcactgtacctaaagccatgttgcttttcagccccaaactgccctcaagcccattcctcagttgtcctcattttaccttatacacttctctcctaggatgtctgaattcagagttctgcgcgtgctctacacaactcctcctgcttggaattgcaattaccccacatctctctaatacattaggtgccctgtttttaaaatttatattgtatctctgttgtacacgcatagaacatttctgcaa

SEQ ID NO: 396890 - DNA, 959 bp, Homo sapiens
  misc_feature (9)..(9): n is a, c, g, or t
  misc_feature (13)..(13): n is a, c, g, or t
  misc_feature (23)..(23): n is a, c, g, or t
  misc_feature (789)..(789): n is a, c, g, or t
  misc_feature (934)..(934): n is a, c, g, or t
agcggtacngcgngccgagcggngagggcggagctgccggcggcccgggcgggctggcagctagagtgggtgcgatagccgcctccgcctctgccgcctccgccgtcgcctcctccgcccgggccgttcgctgctgcgcggggagagcgaggcggggccgccggggccgccatggagcccgactcggtgattgaggacaagaccatcgagctcatgaacacttcagttatggaagatcaaaatgaagatgagtccccaaagaaaaatactctttggcagataagtaatggaacatcatctgtgatcgtctccagaaagaggccatcagaaggaaactatcaaaaagaaaaagacttgtgtattaaatattttgaccagtggtctgaatcagatcaagtggaatttgtggaacatcttatttcacgaatgtgtcattatcagcatggacatattaactcttacctgaagcccatgttgcagcgggactttattaccgctttaccagagcaaggcttagatcacatagcagaaaacattctttcgtacctggatgccaggtctctgtgtgcagcagagctggtatgtaaagaatggcagcgagtgatctcagaaggaatgctttggaagaagctgattgaacgaatggtacgcactgatcccctatggaaaggactttcagaaagaagagggtgggatcagtacctgtttaaaaacagacccacagatggccctccaaattcattttataggtcattatacccaaagattatccaggatatagagactatngaatctaactggcggtgtggacgacacaacttgcagaggattcagtgccgctctgaaaatagtaaaggtgtctactgtttacagtacgatgatgaaaaaattatcagtggcctacgagataattctattaagatatgggataaancagcctggaatgtttgaaagtgtta

SEQ ID NO: 396891 - DNA, 1223 bp, Homo sapiens
  misc_feature (9)..(9): n is a, c, g, or t
  misc_feature (13)..(13): n is a, c, g, or t
  misc_feature (23)..(23): n is a, c, g, or t
  misc_feature (1053)..(1053): n is a, c, g, or t
  misc_feature (1198)..(1198): n is a, c, g, or t
agcggtacngcgngccgagcggngagggcggagctgccggcggcccgggcgggctggcagctagagtgggtgcgatagccgcctccgcctctgccgcctccgccgtcgcctcctccgcccgggccgttcgctgctgcgcggggagagcgaggcggggccgccggggccgccatggagcccgactcggtgattgaggacaagaccatcgagctcatgttaccgaagtgcatgtttgggattttgttgaagaaagctggatacagtaaacggaaagaatcttggaagatgcttgactgctgtcttttctcagactagtctgaaagggaaaacccccattcattctggattggtggatctgaagtacaaaatattttccagtgttctgtgccaaggtctttgtggctaggctgcgccaacctggtagagagcatgtgcgcactgagttgcctgcagagcatgcccagtgtcagatgtctccagaacacttcagttatggaagatcaaaatgaagatgagtccccaaagaaaaatactctttggcagataagtaatggaacatcatctgtgatcgtctccagaaagaggccatcagaaggaaactatcaaaaagaaaaagacttgtgtattaaatattttgaccagtggtctgaatcagatcaagtggaatttgtggaacatcttatttcacgaatgtgtcattatcagcatggacatattaactcttacctgaagcccatgttgcagcgggactttattaccgctttaccagagcaaggcttagatcacatagcagaaaacattctttcgtacctggatgccaggtctctgtgtgcagcagagctggtatgtaaagaatggcagcgagtgatctcagaaggaatgctttggaagaagctgattgaacgaatggtacgcactgatcccctatggaaaggactttcagaaagaagagggtgggatcagtacctgtttaaaaacagacccacagatggccctccaaattcattttataggtcattatacccaaagattatccaggatatagagactatngaatctaactggcggtgtggacgacacaacttgcagaggattcagtgccgctctgaaaatagtaaaggtgtctactgtttacagtacgatgatgaaaaaattatcagtggcctacgagataattctattaagatatgggataaancagcctggaatgtttgaaagtgtta

SEQ ID NO: 396892 - DNA, 1061 bp, Homo sapiens
  misc_feature (9)..(9): n is a, c, g, or t
  misc_feature (13)..(13): n is a, c, g, or t
  misc_feature (23)..(23): n is a, c, g, or t
  misc_feature (891)..(891): n is a, c, g, or t
  misc_feature (1036)..(1036): n is a, c, g, or t
agcggtacngcgngccgagcggngagggcggagctgccggcggcccgggcgggctggcagctagagtgggtgcgatagccgcctccgcctctgccgcctccgccgtcgcctcctccgcccgggccgttcgctgctgcgcggggagagcgaggcggggccgccggggccgccatggagcccgactcggtgattgaggacaagaccatcgagctcatgtgttctgtgccaaggtctttgtggctaggctgcgccaacctggtagagagcatgtgcgcactgagttgcctgcagagcatgcccagtgtcagatgtctccagaacacttcagttatggaagatcaaaatgaagatgagtccccaaagaaaaatactctttggcagataagtaatggaacatcatctgtgatcgtctccagaaagaggccatcagaaggaaactatcaaaaagaaaaagacttgtgtattaaatattttgaccagtggtctgaatcagatcaagtggaatttgtggaacatcttatttcacgaatgtgtcattatcagcatggacatattaactcttacctgaagcccatgttgcagcgggactttattaccgctttaccagagcaaggcttagatcacatagcagaaaacattctttcgtacctggatgccaggtctctgtgtgcagcagagctggtatgtaaagaatggcagcgagtgatctcagaaggaatgctttggaagaagctgattgaacgaatggtacgcactgatcccctatggaaaggactttcagaaagaagagggtgggatcagtacctgtttaaaaacagacccacagatggccctccaaattcattttataggtcattatacccaaagattatccaggatatagagactatngaatctaactggcggtgtggacgacacaacttgcagaggattcagtgccgctctgaaaatagtaaaggtgtctactgtttacagtacgatgatgaaaaaattatcagtggcctacgagataattctattaagatatgggataaancagcctggaatgtttgaaagtgtta

SEQ ID NO: 396893 - DNA, 998 bp, Homo sapiens
  misc_feature (9)..(9): n is a, c, g, or t
  misc_feature (13)..(13): n is a, c, g, or t
  misc_feature (23)..(23): n is a, c, g, or t
  misc_feature (828)..(828): n is a, c, g, or t
  misc_feature (973)..(973): n is a, c, g, or t
agcggtacngcgngccgagcggngagggcggagctgccggcggcccgggcgggctggcagctagagtgggtgcgatagccgcctccgcctctgccgcctccgccgtcgcctcctccgcccgggccgttcgctgctgcgcggggagagcgaggcggggccgccggggccgccatggagcccgactcggtgattgaggacaagaccatcgagctcatgtgttctgtgccaaggtctttgtggctaggctgcgccaacctggtagagagcatgtgcgcactgagttgcctgcagagcatgcccagtgtcagatgtctccagataagtaatggaacatcatctgtgatcgtctccagaaagaggccatcagaaggaaactatcaaaaagaaaaagacttgtgtattaaatattttgaccagtggtctgaatcagatcaagtggaatttgtggaacatcttatttcacgaatgtgtcattatcagcatggacatattaactcttacctgaagcccatgttgcagcgggactttattaccgctttaccagagcaaggcttagatcacatagcagaaaacattctttcgtacctggatgccaggtctctgtgtgcagcagagctggtatgtaaagaatggcagcgagtgatctcagaaggaatgctttggaagaagctgattgaacgaatggtacgcactgatcccctatggaaaggactttcagaaagaagagggtgggatcagtacctgtttaaaaacagacccacagatggccctccaaattcattttataggtcattatacccaaagattatccaggatatagagactatngaatctaactggcggtgtggacgacacaacttgcagaggattcagtgccgctctgaaaatagtaaaggtgtctactgtttacagtacgatgatgaaaaaattatcagtggcctacgagataattctattaagatatgggataaancagcctggaatgtttgaaagtgtta

SEQ ID NO: 396894 - DNA, 896 bp, Homo sapiens
  misc_feature (9)..(9): n is a, c, g, or t
  misc_feature (13)..(13): n is a, c, g, or t
  misc_feature (23)..(23): n is a, c, g, or t
  misc_feature (726)..(726): n is a, c, g, or t
  misc_feature (871)..(871): n is a, c, g, or t
agcggtacngcgngccgagcggngagggcggagctgccggcggcccgggcgggctggcagctagagtgggtgcgatagccgcctccgcctctgccgcctccgccgtcgcctcctccgcccgggccgttcgctgctgcgcggggagagcgaggcggggccgccggggccgccatggagcccgactcggtgattgaggacaagaccatcgagctcatgataagtaatggaacatcatctgtgatcgtctccagaaagaggccatcagaaggaaactatcaaaaagaaaaagacttgtgtattaaatattttgaccagtggtctgaatcagatcaagtggaatttgtggaacatcttatttcacgaatgtgtcattatcagcatggacatattaactcttacctgaagcccatgttgcagcgggactttattaccgctttaccagagcaaggcttagatcacatagcagaaaacattctttcgtacctggatgccaggtctctgtgtgcagcagagctggtatgtaaagaatggcagcgagtgatctcagaaggaatgctttggaagaagctgattgaacgaatggtacgcactgatcccctatggaaaggactttcagaaagaagagggtgggatcagtacctgtttaaaaacagacccacagatggccctccaaattcattttataggtcattatacccaaagattatccaggatatagagactatngaatctaactggcggtgtggacgacacaacttgcagaggattcagtgccgctctgaaaatagtaaaggtgtctactgtttacagtacgatgatgaaaaaattatcagtggcctacgagataattctattaagatatgggataaancagcctggaatgtttgaaagtgtta

SEQ ID NO: 396895 - DNA, 1058 bp, Homo sapiens
  misc_feature (9)..(9): n is a, c, g, or t
  misc_feature (13)..(13): n is a, c, g, or t
  misc_feature (23)..(23): n is a, c, g, or t
  misc_feature (888)..(888): n is a, c, g, or t
  misc_feature (1033)..(1033): n is a, c, g, or t
agcggtacngcgngccgagcggngagggcggagctgccggcggcccgggcgggctggcagctagagtgggtgcgatagccgcctccgcctctgccgcctccgccgtcgcctcctccgcccgggccgttcgctgctgcgcggggagagcgaggcggggccgccggggccgccatggagcccgactcggtgattgaggacaagaccatcgagctcatgttaccgaagtgcatgtttgggattttgttgaagaaagctggatacagtaaacggaaagaatcttggaagatgcttgactgctgtcttttctcagactagtctgaaagggaaaacccccattcattctggattggtggatctgaagtacaaaatattttccagataagtaatggaacatcatctgtgatcgtctccagaaagaggccatcagaaggaaactatcaaaaagaaaaagacttgtgtattaaatattttgaccagtggtctgaatcagatcaagtggaatttgtggaacatcttatttcacgaatgtgtcattatcagcatggacatattaactcttacctgaagcccatgttgcagcgggactttattaccgctttaccagagcaaggcttagatcacatagcagaaaacattctttcgtacctggatgccaggtctctgtgtgcagcagagctggtatgtaaagaatggcagcgagtgatctcagaaggaatgctttggaagaagctgattgaacgaatggtacgcactgatcccctatggaaaggactttcagaaagaagagggtgggatcagtacctgtttaaaaacagacccacagatggccctccaaattcattttataggtcattatacccaaagattatccaggatatagagactatngaatctaactggcggtgtggacgacacaacttgcagaggattcagtgccgctctgaaaatagtaaaggtgtctactgtttacagtacgatgatgaaaaaattatcagtggcctacgagataattctattaagatatgggataaancagcctggaatgtttgaaagtgtta

SEQ ID NO: 396896 - DNA, 337 bp, Homo sapiens
ccttaaagttgttggaaaaggattcactaaaaggaagacaccatacacatttattagttcctaacactattgttttaattgctgcagaatctagtgaagcggtgcatgatgatgactcagttcataacaagtgctgagcgagccttagtttactccatttaaagtgattacatcacataaaatttgattttgaattttttaattccaaatgacagataaaacaaaaactggatggttttctagatgtgaagtataatttatctagaaaattaataatgtcaattcttattttttgaggttcaaaacttactatgagtttcccttgcaattaatattg

SEQ ID NO: 396897 - DNA, 393 bp, Homo sapiens
gagatgaatggaacctgggctgttctgaacttcaactctggggggctcatggtctggggaaggagagaaactaaacaccactgtcttgagtgcagggctagatggtggttattgcttaatttttagaaccaaccacttggaggggtgatggcacttggagggaaggactgactcaagctcactggagggctcttggggagggcttcttagaggacatggggatttgagctggaccaagaaggaatgggtacttagaggttgggatggaatattcttggctaaggaaagcacttccttgtgttttggcccaggggtaggatgtgtttgggtaatggcagccagtttattcagtgcattacttaacacttctaaactttagttgtcttctgaaag

SEQ ID NO: 396898 - DNA, 668 bp, Homo sapiens
taaggaggttcactgatgtggtttctgtaacagcaaaaaggtgaaggtaactaaatgttcatcaacagctgattaattaaatacaatgacacatttatacaatggaatactgcatagacactaagaatgatgacacatacatctttatatagtgactcaaaacagctgtttacttgttagagagtaaattattaaacaatatgaatttaattttcttcaaaaatttaaatatttgcttcttcaaaatacacaaggaatgaaagcatatataccaaggaatttactgtggctgttcctaagcaggagagaatacaaacaattctcttaaaattactcatctatagtttctaattttcctgtaacatttactagcaggatgaaagataaacatttttttaaggtaaagaaaaaaactgaataatcacccaatttttctttccaccaatctcattttattcacaatgagtgaggtggaaattctgatcggcatattagaacatcataaactttggaggcagggagatccagattcaaatcctgactccatcatttaaccttctttaaaatgagactaatgcctgatcatgtttgcctgtatatgcattaagtctccctggaaggacagaaaagaagccaagagcagtggctgccacagtaaacagccataa

SEQ ID NO: 396899 - DNA, 461 bp, Homo sapiens
atgcaatcgctcatctcactgttgggaatgggggaaagttggaaaaagaggatcttgttttcatataacagtgtgaaggaatgattttgattgtgagggctagggaagttgagctctcaaactcataaaagggaaagcaggaaataagaaggaaactgattaaagcagcaaaataaaagaaaaaaagatgaaataatgtgaaataaatagtgtaagataaaaaataaaatcagatatagtggttattactctaaagacaaatggactaaattctgtcaaactaggtttaaaaacaacagttaaatgctcttagaatattgaaaatgaaggggcatgccaagaactagcaggcaacagctgataaatttaagaaatgcagcactactttcagataagattgaatttaagattggaatataatcgaatcttaaatgagataaagagggatattatctgaagac

SEQ ID NO: 396900 - DNA, 453 bp, Homo sapiens
aataacctcccttgggggtgagtgagttctcactctgttacttcctgtgagagctggttgttacaaaaagcctagcacctccctgttccacccacctcctctcccaccatgtgatctctgcacatgccagctcccctttgccttctaccacgagtggaagcagcctgaggccctcagcagatgtcaatgcccaatcttgaactttttagccatccagaatcatgagcaaaataaaccttttttctttataaattaccctgcctcaggtattcctttatagcagcatagaacagactatgacttccagttttggaaaaatacaaaggatagaggaacaagttaaacagcaccacaagaaagctagcaggcaaattcagaaagtaggatactgtgtagtgtagctggtccagtttcttcaacaagatgctatcatgaggaaaagaaaatgaggga

SEQ ID NO: 396901 - DNA, 250 bp, Homo sapiens
ccactggacttgggcacatgtttacaatctggagggcaatgtagagactaaaagtaggaaagtaggaagcaaaaggatgaaattctttttcccaataatgaatgtaatcacacataacactgagattcaatctttgtggctcacgcctataatcctagcctttcggaggctgaggcagatggtttacttgagcccaggagtttgagaccagcctggacaacatgagacccagtctctacaaaaaaaaaaa

SEQ ID NO: 396902 - DNA, 209 bp, Homo sapiens
tggtgtctgctggagaatacagtgtctgaagtggtatgctgagtggtgtatgagaatcggaaaaacacttttataggcttttcctatctcaaatagcatgcattagatatgatagtcaaaaaacaaataataaaagttggattgtctatttaactatcagagagacactaatctgagatgccattttatagttgagcaattcatttttt

SEQ ID NO: 396903 - DNA, 109 bp, Homo sapiens
attggtggcaagggccgaacatcgaccttcagggtcctgcccagtggaggtcccctccagcagactcttctctgtcatcagggctttgagcccattgtgtctcatcaac

SEQ ID NO: 396904 - DNA, 736 bp, Homo sapiens
ctactacctaacaggtctgggggccagaagtccaaaataggtctattaaggctaaagtcaaggtgtcagcaggactgcatcccttctggaggttccagagagaaggtgttcccttgcctttcccagttccaaaagccacccctattctttgcctcatggcccctaaatgcatcttcaaagccagaagcaaagcatattcaaatctccctctgtgacctgtgcttccatcatcaaatctccttcaattctgactctcttacctccctctttcacttataaagacctcttgtgattgctggacacagaggccggggctcacaaccataatcccaacagtttaggaggtcaaagcaggagaaatgcttgaggccagaagttcgggaccagcctgggaaacacagtgagaccccccccctcaattaaacaacaaaaagaaataagagaaaattagctgggcatggtggtatgcatctgtagtttcagctacttgagaggctgtggtgaaaggattgctttagccccagagttcaagaccagcctcggcaatataacaagatcccatctctacaaaaaaatacaaaaatcagctgggcatggatggtgtgcacctgtagtcccagatgcttggaaggctgaggcgggagaattgcttgagcccaggtggttgaggctgcagttagctacgactgcatcattgcactccagattgggtgaaacagagacacttgtgttcaaa

SEQ ID NO: 396905 - DNA, 318 bp, Homo sapiens
taatttttgtattttaatagcgatggtatttcaccatgttacccaggctggtcttgaactcctgacctcaagtgatccacccgtctcggcctctcaaagtgctgggattacaggcgtgagccaccgcacccagccaagaagtacagccttgtgccacatcacgatgtttagaccgatgatggaccatatatatgacggtggccccataagattataatagggcatatgcagaaacccgatatatggtgctcgatattggccttgaggatcaagcaggggaaatgactgatgttcagtaatgggacatgtgctgggaca

SEQ ID NO: 396906 - DNA, 501 bp, Homo sapiens
atgaaagagggcttgcattgctcaactaactaactcacccgtctctcctgcagtattagaaactacttctgtatgtacacgttacagtttctaggaactccatttttgcaagacagataggagccagaaaatttgttccttcaactgtatatcgctaattaaacataaaatcaaatcagcattttaggtacttgaataactagtctgtgcttacttttattcatatggaagcagtgtttaaattattctctgattgtaaactcacttatgtaaaccattatacaggaaaaaaatgagtaatgaagcaaagttctgaagcagatctatgtaagcaaatttcaataaccttcttaagagaatatgacacttagtagtggtgagggacattttaagctttttctatttacaagttttttttaaacgagggtgtttcaaagtaaatatttgctgttacgttatgccacatgatatactaataaatgaattaatgaaattaaccta

SEQ ID NO: 396907 - DNA, 297 bp, Homo sapiens
actacatacttccgcccagtgactatctgtccaaccttagacaagcgtcagtcttgttattaatctttgaagccaaggataattatttcaaaaagactatggaatcctcacttacaaacctctgtcttcctttatctccctagatacccacatagtttacaatggcacgtgtattcccattgcaaagccctgttcccaaatcaatctcttttctttcaagagagcccctctctgtttgttatttaagttgacactatcttgaaggtcaaatcaacgagctctcggaagtatgtagtg

SEQ ID NO: 396908 - DNA, 260 bp, Homo sapiens
ttcaacaccagacctctgcgatgggcttccggattcgaggccccgtccctttctcagaagagtaaggaaggcgagtgacttctagtcctggagacggggcctgcaagagccagagtatatagaaagctgcatggtgaaatgaatggtgtctgttccacttcacagtttatacccagcatctaactcaggacttggcacatcacaggagcctaataaatatctgttgaaaagtgaacgaaataaaagctacacttacgcaa

SEQ ID NO: 396909 - DNA, 462 bp, Homo sapiens
gatgtgtctgggtgtgtctccccacgcaggccatattggggaaggctcttggattctccttccctggtgggctcaggggcctgcaggagcatgcatgctctgtgggtctcctctctgtggaggcccctctggcttcccagccccgtggcatggatgtcactggagtgacagcactgtgacaacccactgtactttctgcgggttggacgcttcttgaacatggctggttcagcatctcgggggcctggacactgcctcgtcagcacaaatctctccccagctccttgctgggatatgtggaaacatttttcccatggaaagagagtgtggcctttgtcagggggccacggccagcccgaattacagtaaagattaatcccaaacaagagacagagacagagacaaagagcatcatacacttgggttttcaatggatgttttcataaatgtatgaataattta

SEQ ID NO: 396910 - DNA, 669 bp, Homo sapiens
ggttcagagttcaacttctccttgcagccagcatttggatacttttaatagctgttctctgttactgggcaggactggacacagagaaaatgatgacactctttaaaattcctggcaattatttcctgcaagaatgagattcctccccggccccaaaagctacgtcatgtttttatttcggtactaaacggagcaaaggagcgtgcaaaaatgaaactgatgcatctcacttagcattgcagttaacggaaaggaaatctcttgagagcaaggtctattttttatttttaatcttgggtaataataaagttggcagtctgtatatgcctgagtgcgtaaacaaatgtacataggcaaactttcaaactagacatcctttgtatcagtaagatggatgctcaatgtcttgggtaatacagagatacagaagagacagtctttacccttgctgagtgtgaaaagatccttcgtttagtaactgtaacaaccattctttttattgtgttttgtgtctggggtgagcaagctgaattctggattttattccagatcagaaattactccttattactaatccagtcttaaggatttacagaatgtttttctttcagatttagttaaatttcccagcatgcctctgaatgaggtaagaaacatacatgtcctaga

SEQ ID NO: 396911 - DNA, 758 bp, Homo sapiens
tcaagcaatccccccacctccacaaagtactgggattacaggcacgagccaccacacccagcccatttgtcttgctgtgcctgacttatttcacttaacataatggtctccaagctcacccgtgttcctgcaaatgacagaatttcactcttccaaagataatttttttttttttttgagatggagtcttgctctgtcacccaggctggactgcagtggcacagtctcagctcactgcaccctccacctcccaggttcaagcgattctcctgcctcagcctcctgagtagctgggattacagacctgcaccaccaccccccgctactttttgtattttgtagagacggggtttcaccatgtggccaggctggtctgaacccctgatctcaagcaatccacctgcctcgccctcccaaagtaccaggattacagatgtgagccaccatgtccggccccagagagaatttttaaatcacatgggttgtgggatcatgtgccttggagagagaaaaaccgttaggaaaaaagagtagaaaaccaaccaagcaaacaaacaaaaaatagcaggaagacaaagggcgtgcagtgtgctttcagtgaggatttacacaggacagaaacggtaggaatggctgtgtggctttgaaatgaaaagtaggttaatagagctgatcaatgcacggcgagtctggatgcaggatgccatgaaggatggctgttttaatgatgagagaggctgggagaagggccgatagga

SEQ ID NO: 396912 - DNA, 516 bp, Homo sapiens
agtcctcacttctcctccctgggcagggtcacccaacctggaactgtagcacaactaccctgagcttgcctgaccacttcaatcagaggcagcccagcagttaaaggaacacccccacgcagagatggaaccatcagacagaaggaatcaacggaagaactctagcaacacagatggtcggagtgtcaaatggccactagttctccaacaagggttcttaaccaggctgagttggctgaagtgacacaaatagaattcagaatatgaataggcatgaagataatcaagattcaggagaatggcaaaacccaatccaaggaatctaagaatcacaataaaacgatacaggcactgacagatgaaatagccagtataaaaaagaacctaactgatctgatagagctgaaaaacacaagaatgtcacaatgcaatcacaagtattaacagcagaagagagagaccaagctgaataatttcagaacttgaatactggctctttggagtaagacagtcaga

SEQ ID NO: 396913 - DNA, 334 bp, Homo sapiens
tatgggtaagggtgtggagacaacatgctggctgtgttcctggggcagtaaggaccctgagcttgggaaggagttaacagaatataagcaggagaggaaagtgaaaatccatcatggagaatgaaaatcaggaagaaaaatgtggattttatatggtgggaaacaacacagaaccaagaagcctcctctaagctaccagctggatcttaattgcatgatcccctccaggagacagaatgttccagccaggaggcatgcatacccacattctggctccaggaaacatgtacccgatcctgaggtaatccttctgagttccagctactcatcactt

SEQ ID NO: 396914 - DNA, 289 bp, Homo sapiens
cctccaacattgaggattacagtttaacgtgagctttgggcaggacatccaaactatatcaaaggttatttgaaatcagacagaaacttaatagcagatgtggatgaatgtgtccctaacacatgcagtgaacttaggaagttagtaggtttgagttgcgtgcatgtgtgaattttgtgtatttctcagttacttggttcaaatgggtgcagtttcctgcattcatctcatgtttcttacaaagaaaattgtgggtgggcttcccagaaggaaatcttgaatagggact

SEQ ID NO: 396915 - DNA, 614 bp, Homo sapiens
attttctttcctaacctagctctcctacaaacatgcaaataaactgaaccagctaaagaagtggtcccaaggttttaataaaaaaaacatttaacccttccctaaatattatctaatgagggagcaaaatgtgtcactctcccttaacagatgggattctcatggctgctgttaaaggggaaaaaggagaaaccaaactgggtgactctctgagttacatctttggctctgaactcggtgagtctatggtttgataggttggcagggcaaagggaaaaacagagttggagctgactgaggattagaaatggaatctggggctgggtacagtggctcacacctgtaatcctgaccctttgggaggttgaggtgggaggatcatttgagcccagaagttcaagaccagcctgggcaacatagtgagatcccatcactacaaaaaatttttaaaaagtagctgggtgttgtggcacgtgcctgtagtcccagccactcaggaggctgaggcagatcacttgagcccaggagtgcaaggctgcagtgagcaatgattacgccactgcactctagcctaggccacaaagcaagaccctgtatctaaaataaacataaca

SEQ ID NO: 396916 - DNA, 408 bp, Homo sapiens
ctgtttgtcagagccaggcttcagagaggcagatgcatcattagttgcttagtcagataatcacatattacttgctatagaaataaatgcaggggaggcagatgtcatgttaggtcatgcaaagttttatgaataaaatggcatttgagcaaggagtgaagaaatggagaagcaaagagaatgtcaggagcaggaaaaaggcaggagaacagcagacaggtgtggcaaagccggaagaaaccattttgataggagtgaaggagttcctgttgggaagagtggaaacgagactggggaagcaggatgaggcgtgtttttgaaggtcatatggttcaaggatccctcagttaggtatgggaatgctacaaaaggggcaaaaacggagtctcaggtttgggcgtacgggag

SEQ ID NO: 396917 - DNA, 414 bp, Homo sapiens
cagaacgggaatcccagggggtctccgggagtttgccagccacgctggtcctctttgcaacctcctctacctccccactcccatgtctgtgcccttagttcgaaatggatcagaaggctgtgtctcaggccagacacggtggctcacacctgtaatcccagcacttggggaggccgaggtgggtggatcactttaggccaggagttcgagaccagcctggacaacatggcaaaactccgtctctactaaaactatagaagaaaattagccaggcatggtgggcgcgcctgcaatcccagctgctcgggagccttaggaaggagaatcgcttgaacctgggaggcggaggttgcagggagcctagatgataccattgcactccagcccgggcaacagagcaagactctgtcttaa

SEQ ID NO: 396918 - DNA, 397 bp, Homo sapiens
acatcgccctactcaacccagttgaggcctccccaccacaagaacccaggggccatgccctgcgcatacacccgacccacactggagttccagactcgggcccacactggactctccttcagtggctccccaacctcagtcctactccagggagactcttgtcatccattcactccctaggttcgggcccttccagtcactacagacactgatagcctccctctcacttctcagccctgctgtctcccaacaccaaagccaacaatggctccaccgaactaactgttaaggacacatgccggacctctcggcagcaccccgccctgctgaccactcctcctccttcgcacacttttttctcttggcatttcttgacctcacacactcccagtttccc

SEQ ID NO: 396919 - DNA, 380 bp, Homo sapiens
aatagtgtacctgaacttctcatcaaggaagttggtataggcacctttctgtgtgcttgtgggcctagtaatgtagaagaaccttaaaatggattttttaaagagagttgttcctcccattctttcgggagatgtggttttggatactagtactgaggaaagttccccaagattagttaagatgaaacgtcttagctcactttcatctgagaagacggtggatgagcaaggtggaaccaatttctgtcatagtaattatgacaaatacgaacaccaacaactaggtaaagtaaaaacgtatttctttgcatcctttaaaaaagtattttaggaaagtaaaactatttttacaagtatgaattctagtgagcaggaatatt

SEQ ID NO: 396920 - DNA, 718 bp, Homo sapiens
tgtgtacatattactgacctatagatagtgctacataaggaggctttattcacatatatgtataggatagggatgtagaatgagtcctcgatgacagcaccttcaacctcgcttttctggctgcatctgagaaattgtgagttagggccatgggctgggttctgagaggacctaatcagttccaagcaccttaaagtccaagctgggaaatttatatattcttttaaagaaaaatgtctcctttagtagtggcagccaaagaaaaactacatttttgcctggcagaaatgatagcctattatcccacctgtagtacctgcttgtttaatgaatagttgaatgttgcccagccaattcatatgtcattttctccttgcatgttccccaatcctagagagggcttgagcctttgatatgctttgaatgtttgtcctcctcaaatctcatattgaaatgtgatccccaaagttggatgtgtggtctagtgggaggtgtttgggtcatggggtcactatcctcatgaatggcttggtgctgtcctcctggtaatgtgtgagttcccactctgagttcacatgagatctggatgttgaaaagagtctggcacctcctccctctctcttgctcacactctcaccacgtgatatgctgcctcctcctgtgccttccaccatgagtaaaagcttcctgaggctctcaccagaagcagatgctggca

SEQ ID NO: 396921 - DNA, 509 bp, Homo sapiens
cttttctcagttacattcattctgcatcttccagctaagtacatttccaaaggaacatcaacgaaatgccagttgaataaagcgattctacaactggatagcaggataaagtgctaggcaccttcccacaatttctccctttttcttctccaactaaacctcctaacttcaatttctgataactttatttcagaataatatgtattttcacacggtctccatctcacatccacaaggcatgagtcattattcaatgaacaatagacatttataatgaaccacatatatgtcaagaatccctagggaggcacaaaaacaaagacaatacaggttttgcagttatctcacatctcagtttatatcttgtactgaaaagcagcaagatatgacaaaacaataaccataaatattatagaagcttaacacataaacagaatgtgctacctggggtaccatggccagttggtgcaattctctaagaaagaaggaccaggaagatggatagagtc

SEQ ID NO: 396922 - DNA, 320 bp, Homo sapiens
acacagctcacaggaaagaaaatatgcatgactcttcaatatataaagatgttcagccttacaataggagaaagataaataaaactcccctgaagcatcctttgtgtatgaatgaataactggcttaatttgctggggctgccagaacgaagtagcgcagactgggagccttcagcaggaattcgtttgctaataaacctggaaagatgttggtagggtggtttcttgggaggcctctccccttggcttgtggatgaccgtcttctccctgtgtgctcatgtggtcttcccgtgtgtgtgtgtgtgtgtgtgtgtgtgtg

SEQ ID NO: 396923 - DNA, 372 bp, Homo sapiens
ccctttcgaaggagcccggagcagcacacccagcagaggtagtgtcctggtctccatttctcgtaacttgatcatgctggcctggtaagctagcatccctgacctccacattttcaaaacactgcacgaatacccaccatcactgtgcctttctttacttggggtctgctgtctgcgataggtccctctttgccttggaaattgtcctgccttcacttctccacaaagaaaaggctgggaatgtctcaggagcatttgaaaactgcatttaagtttctctttcatggagggttttcactcagaaggaaaccaaaacttccccaaaggtaaaatattttcctaagttatctccctaccatcagaacacttctt

SEQ ID NO: 396924 - DNA, 599 bp, Homo sapiens
agcaagcaaagcttcacagccactccccactgctcgcattaccacctgagctctgcctgtcagatctgcagtggcattagactctcataggagcacaaacactattgtgaattgtgcaagcaaggcatctaggctgcacactcattaagaaataatgcttgatgatctgtcactgtctcccatcacccccagatgggacccttgtggaaaacacgctcagggctcccactaatcctacattatagtgaactctataattatttcattacatattacaatgtaataataatagaaataaagtgcacaataaatgtaatgtgcttgaatcatcctgaaaccatcccctgaccctgtggaaaaatagtcttccatgaaaccagtccctagtgccaaaaaggtagggaactgccgctttaaatcatctgcagattacttataacacctaaacaatataaatactatgtaagtagttgttatactgtaatgcttagagaatcctgaccaaaaaaaaatgtccatacatgttcagcatagttgcaattttttcccaaatattttagatccaaggttggctgaatccacaaatgcagaacccacag

SEQ ID NO: 396925 - DNA, 308 bp, Homo sapiens
tggtctttatgtataagcatgaacaaaatgataatcagcttatgtaatctagaaatgttctaggggcctttaaaaccttggtctggcatttaatgccacatgtgtataatttttataacctttgaaatatataattgttacatagcatttgaaacctccacctgttatgtaaaatttggaaactatttcttgtctatcacttttccatgactgtggatgaaaattacatcattctcagtcgtgagtgttaagtatgttgtcctttaagtaactgtctacactcacgaactcaaattttctttccattc

SEQ ID NO: 396926 - DNA, 252 bp, Homo sapiens
tcccctgcacacgccgagtgcccaaacaaaaagctccatttctggaacacttaaaatatgtactgtaaacaaaattcaaagaaagaaaacattagaaaatgaatttttgtcaaattggactcaccaaatttcagcttcctcactatgagcaaaaccagcccctatcttctagacaaaaagaaactaaaatttctacagcacatcattaaaacatactacttattctcaaaaaaaaaaaaacaaaaaaaaaac

SEQ ID NO: 396927 - DNA, 337 bp, Homo sapiens
gcgtgggggtgcacagctgggacctggccgctcctccactgctctgggccaatatctttcagtatctgatgctgactgtaccagctggggacaagtaacatatctgggcatttctgccttgcttcatgtattctggttttgtgctgctgcatgttttatctaagaggctacatccctgccccggactctcaggtctgcgagcaagtgctgggtccatcaacagcagctctcacctactgtgggattctatttttttgttgttgctttatcacagtgaggaccacctgctacatataaacccactgaactatttctgccaactgtagctggcttttct

SEQ ID NO: 396928 - DNA, 878 bp, Homo sapiens
  misc_feature (876)..(876): n is a, c, g, or t
ttccgcgtcctctacctgggaaccaccgacccccgcccggcgactttgtcacagactctgttgccctgtgatctgcaggtcctgggagacgcacagccaagatgccagggcaccctggaagctgtgaagtggttatgtgaatcctcttcttcccagatcctgccaaaaggaaagattgtgacatatcactggaaccagcacttaggctattgtgacatatgcctgaggctaacacccagatgatataagtcttcatcctggaccctgtctacagaagtcattgcgatatatgtcttcaccaatcactgaggtcgaacgcccagtgatgtgactctccttcctggtccatgccctcagggaagattgtgacataccccggcccagcacacagttaatgtcactcttgtgcttgctgtctacccatgggtaggattgtgacatatatcgtggccaagcacaaagatataatgactgtcatacctcgaagaaagcaatagagttaatgttgctcctaggtaggcttaggaaaatgaggaagtcgtctttctgttcaaatctcactctctgacatatataaagccctagtgtgttacagagaatgtcataacagggctcctcacacaggtgagatcgtgttctatacacagcccaccaatcttgagaattgtcaccctcacacatggacagagtccactggtgaagtcctgaatcacacatgaatgcagttcacaattggaattgtgactgtcatcattgaacatctagccacaatttggatggtgattcttttttttttttttgagacagaatcgcttgaacctgggaggtggaagttgcagtgagctgagatcacgccattgcactccagcctggggnaa

SEQ ID NO: 396929 - DNA, 620 bp, Homo sapiens
ggactcttgtcactatttttatttattctaatgagaaatgtattcatggttccaggtcagtatgtcaaatgtctaactccctgtcttaaaaagggagttcccaaatgactgttcatataaccatatgtgtttcttgtggagactgtctgtattcttggctttgtcactggatttgtggcttagtgctgtcacgtttcctatctgaggcaaatgccatatatgtttagaccagcctttctcaattgtggcacttttgccatttttggccagttaaattctgttgtgggggctgtcctgtgcattgcaggatgtttagcagcatctctggcctctacctactaaatgccagtgcaccctccctgcagttaaatgaccccaaatgtctccagacataggcaaatgttccccggagaacaaagtcatctttggttgaggaacaaaatgaacctatatttaagatggtctaaatgtttctgagatggtctaaacatttataagcttaacaattaacttgaaactcttcaggactagagaagctatttgtaaatttaaacatctgacgccttgaaacacctttatcataaagataactaaaccagtgttctttgtgaatggccaat

SEQ ID NO: 396930 - DNA, 600 bp, Homo sapiens
tcagtgtgggaaaggaaactgctttggggctgcctatttaagaaatgctatgattctctctaggctcaagatgtgatttcttcattacccaaagccctggggttaatgtgacttttagggtgaacttttggactaacttaggtagtgatagaacagaggacaaaactactgaaaattccagatatgtcaatggtaactctggctgattgaggctgggttccatttttgggtatgggtcatacttcctttgtacttggggtcatactggtccaagttttaacttctagctcagcagttccagattttatcagtgtgtcaggaataattgctaagccaccccgtcagagactgtgttttaaactggacactatcttatttaccatgaaaggatctacagttgtcctttggtatccaggggggattggttccaggaaccttctggggtactaaaatccacagatgctcaagtccctgatataaatgttgtagtgcttgcatataacttatacacatcctcccttatactttaaatcatctctagattacttataatatctaatacaatgttaatgctatgccagtagttgttactctgtataa

SEQ ID NO: 396931 - DNA, 722 bp, Homo sapiens
caagtattaatagattttccttgatgtaatgcatgtttataggattaaacaatcctcttcctatggtccagtgacccttttccaggcctaatcacccacctttcctcaggaacagtgcatgtttttggtttgagccctaatgacatctggcccagacatgtgccagctgagccattgcccctctgtgctcttccctggggagtcctgctttcacactataatccatccatacatcagtacacacctatatgtctttctgatttctgcagccggtctcagcttgtctataattcacttcattttattctctttctgccaactttctgaaaagttcgtgctcgcctacccaggattatcacagcttctggttaggttcctggaacctgggaccaatccctttgactttatctgcctttttctaggaggcacaattgttattagcatgttgaaaggaattgccttttaccctggtcctcataggtttccaataaaacgtttaaaaaatttcagggtccacatttacattttaatttagaaactgtcttcatccaaagagtaaattaccatgtgggattagatgcttctccccacagctcagatagtctagagctgtgctgttcaaaatggtaaccactagctacatgtggatacatgaataaattaaaattaaataacattaaacatttagtgtcttgattgcactaatcacatgtcatatgctc

SEQ ID NO: 396932 - DNA, 485 bp, Homo sapiens
ttttttttttttagaagacacagtgtttcaccatgttggccaggctagtcttgaactcccaacctcaggtgatccacctgcctcagcctcccaaagtgctgggattacaggcgtgagccactgcacccggcccatctatagctttttatcagcattcatcagtttataactttcctatcaagcaagtcctttaattagccattccctcaaaagctttaagagctagtctgctgctgcctcctactgaattccttgctccttaaccccttctgtgtatttcccatgcagccgaccatttagacctagacaggataccccattctaaatctttattccacacctgctctgccagtaggcccttccttatgtaatattttctttcctttgcttccagtctcttatttcatactctcttatgacttttggcccagcaatgctgtcttaccttcctgttgatgtgtgtcattccttagtgaccaactcct

SEQ ID NO: 396933 - DNA, 501 bp, Homo sapiens
tgagatggagtctcgctctgttgtccagggtggagtgcagtggtgtgatcttggcttactgcaacctccacctcctgggttcaagcaattctcctgcctcagcctcccaaagtgctgggattacaggcgtgagccactgcacccggcccatctatagctttttatcagcattcatcagtttataactttcctatcaagcaagtcctttaattagccattccctcaaaagctttaagagctagtctgctgctgcctcctactgaattccttgctccttaaccccttctgtgtatttcccatgcagccgaccatttagacctagacaggataccccattctaaatctttattccacacctgctctgccagtaggcccttccttatgtaatattttctttcctttgcttccagtctcttatttcatactctcttatgacttttggcccagcaatgctgtcttaccttcctgttgatgtgtgtcattccttagtgaccaactcct

SEQ ID NO: 396934 - DNA, 570 bp, Homo sapiens
atatatttttattccttgtgtcttatagcccatgaagttttaaagtatgtcagctggttttcattttctatatttaattcttccttttttttcttactggcatagagctggcataattcactgaaattattcactaaattcagttattttaaatttgaaatactaacattctttccagttcattgagcaaattgtatacgacacaaaccttttagtaattgtgaagttaagctgaatttatgcagggtagattctctgctaaattgaaaataattctaggatgtatgtctggttctgtgtgtgcgtgtgtgtgaccatgtgttcatgaatgagctcaggtatgtatgcttggaggagaacgtgaggtgaagagggtcatttcagacaaacttctatagtgtttgttttggattaaattagactgctagtctgaactaagaagtagtatttctcctaattaatcaagctagtcctaggtacattttgcatatcattcattctgaccaaatgggaaacactatccgtattccccttaattattaatctatgctgtttctatcaaaagggcac

SEQ ID NO: 396935 - DNA, 494 bp, Homo sapiens
aaagacagtcctgacctgccagttccagagtctgtcctctgctccttccaccacccatatgagcatgcctagactctcccacttgtgatttttactgcagcaaaacctctccagtgaagtctctgtgacggaacacaacagtggtcagacccgccaatctgttcctttgctcttctgtggatgcggggctggggggcttctctgagcctcctctccagcatgtcagatatgtccagagtccattctccaccgtgtcctccccttcctactcctcctttgcttcatctagttggtgacacagggaggtgtccagttatgggcctcactgctccatggcagaaatcctggcatgccctggatgaggcttcattggccttatttgctgttgaaagttcaggattctgttgggacttctgattctataggagtactaacatcagataagtcctgcagcgggtggcttggggaagccctcaggccactgcattccagat

SEQ ID NO: 396936 - DNA, 260 bp, Homo sapiens
ttctcccacctcctccctcgccagcatttgaattgctgtcttttggatagaagccgttttaactggggtgaggtgatacctcattgtaatttttatttgcatgtctgatgattaaaggatattgagcatgctttcctatacctgttggccgtttgtgtgtcttcttttgagaaatgtctgttcagatcttttgcccatattttaatcgaattactcatttttttccgattaagtcgtttgagaatatacaatgatctggt

SEQ ID NO: 396937 - DNA, 534 bp, Homo sapiens
tgaagggccagcgtccctacccggtatgcagagcccggctcgtgatggtggctcagctgctatggcatgtccagattgcgccttggccacagtgtgattcgtatcgaggccgagccgaggcccctggccctgaggatgactcgagcggtctgatggacactgtgccacggctttgccgtctgtcatgcttcccagtgtgctgggagagggagctgccctgagactgtggctgtgcgtaaatccaggctgccccgctttccctccccttggttctttctgtcccgtcttcactgcttctgatttgcatgagcagggaccctgaaggactgtgtgcattttgcccactgccttggtcagagggctaccgggtgtggctgcagtgtctcaagggaggctgcgtggctgggtgctcaggtccaggctcggggctccaggcatgtggcggctcctggtagcaaagtgaggggtagtgccgctctggagggcagtgaaggacagggagatgggagaggtcagggctggggctgcggccgc

SEQ ID NO: 396938 - DNA, 277 bp, Homo sapiens
gcaaagaaatcatgaacaaaaaagaggcagcatcctcttgtgtgctgaaccaggctgaggtgggaagagtgactcaaagaatctcagaactcacttggttctatctatgctttgtgcaaacctattttctttgaaaatattactgtaaaatgtttgttatctacttaacgatcagggaggaaataattatagtcgtagccatcatttcttggacccttactaactaccaggcactatgttaaacactgtacatacgatatcgtcgctaatccccaca

SEQ ID NO: 396939 - DNA, 244 bp, Homo sapiens
tctgggcacgttgatttggagatgtgaacaggccatctgccacatgagatcatgaacccccatagcctaggcaacttgatgggcttcttaaccagcccctcacaggtgacttccaggaaacacatgtctggctatgggcctgcagatgtggacatggaggtcctttgcatagagcagattgttggagctctctgagatggcaaagagggaacttgaaaagagacagccaagtatagaaaattgc

SEQ ID NO: 396940 - DNA, 589 bp, Homo sapiens
ataagaagaagggtagggggcgggagtataaacagcagaccccaagccctgagagctcattaataaacctagttggatggcaaaatggaactacactctactgcagtggaattcaaagtccccgtgtagaagggagccatccaggcctccaaacaaagaccagcccagtggcagctctgaatgtcatccccgaatcactgagtttttaataaacttggaaagggaagggaaacatgaatgcatgggagaatcttaagcctctggctttagaaggctagtttctcagagtttattgcctgacagcgacaagtatcctcccagcatcctaagattataggattaaattgagagaagaacttcagttctgactcatgacacagggctttgggaaaagaattacatacatagcctgggtttctttgactagtcaagggcagatttcattggcctggaagtcttgcctccattggtgtatgttagatctccagggggagtttgaagtcagggtattctattcagaagcctttgagatcaaagtgggtgaccagctgccctccttcctggactccacagagcctctgtcagagag

SEQ ID NO: 396941 - DNA, 656 bp, Homo sapiens
agtgtgcatggaggaagaaaacagtaattctgattagaatattgaaaaaagtttctgcaggacacattatggaatggattggtttatggataatctcaagcatttacctccacctggtgaaatcagacagcaactgtctcttcttacatttatttggccacaagtatgcttagagcagctaagctcttgagcacataagcaagtatatggcggagtgggtggtggttccggaatggttgacgtgggaaatgcagagagagcacttaagtgtcagattatgacactgaatacgggaaagtgatgggagtgaggctggttaaaatttttcacccacgcagtctccctgtgttgcccaggctggagtgcaatggtgtgatctcggctcactgcaacctctgcctccagggttcaagtgattcttgtgtctcagcctccccaatagctaggattacaggagttcgagaccagcctggccaacatggtgaaacccctttctttactaaaaatacaaaaattagctgggtgtggtggtgggcgcctgtagtcccagctacttgggaggctgaggcaggagaatcgattgaacctgggaggcagagtttgcagtgagccaagattaggccactgccctgtaacctgacagagggatactctgt

SEQ ID NO: 396942 - DNA, 313 bp, Homo sapiens
agtgtgcatggaggaagaaaacagtaattctgattagaatattgaaaaaagtttctgcaggacacattatggaatggattggtttatggataatctcaagcatttacctccacctggtgaaatcagacagcaactgtctcttcttacatttatttggccacaagtatgcttagagcagctaagctcttgagcacataagcaagtatatggcggagtgggtggtggttccggaatggttgacgtgggaaatgcagagtttgcagtgagccaagattaggccactgccctgtaacctgacagagggatactctgt

SEQ ID NO: 396943 - DNA, 463 bp, Homo sapiens
ttaccaatgtcatatctttttatggtatattcacttcttgcctaatgcatctttcaaaacagaaaatgagataattcagtttgctcttactgaatttatgctgatttttaacttcttcctttactaatgctcccaagtcaaaagctgaatgacgtttgtaggattcctttggggttagatctcaatctttctgatttgtttccatcttttccctacttcccctacaacatccacctttttctttgggaaagaacctggagcaacatttatttttcatcagtgtggtatagtgatctgttacaaaagcacttaaaaatatagcaggtgccttattctggatattctatatatgccctctgagcagaaggcagacaggagtactgtacagtaagaaaaggacatcttaagtttaaatttggcagaactctaataactaaggactcggcttgaatatgctgagagc

SEQ ID NO: 396944 - DNA, 352 bp, Homo sapiens
ctttctgcctaataattttcaaaaaaactctcaaatacatggtcagcaccaccaatacagtattggtggtgctggcggttaagtagacattgtggactttttcttaagagagaattgcttacaattctgcaggctatataaatgtacttattttcttgctgggattacaggtgtgagccaccgtgcccagcattgttgtgtattttcttgacctcctacatcagagggtagtgggcttttttttttttttgagacggagtcttgctctgcaccaggctggagtgcagtagtgcgatctcggctctctgcaacctccacctcccgggtttaagtgattctcctgcctcagcct

SEQ ID NO: 396945 - DNA, 696 bp, Homo sapiens
ccctctagtgttcactgctcatcagattattcctccaacaaataagacagagaactgcctgtttttttggttccctatcgaaggacggagcttggaacaacatttataacggtttaatgacacaaagagtaaaagaccagtctatggcaaattccactgggacatcccattcgccacaaggactgaaatgacccactccgaaagcagcatgtgaagctttgagtctttcttccctccgccactctccagagaacattaaatcgtacttttcattcccctcaccatagggggaacccccttaatgatgacagagaaagaaaaattccatcacactgtcctatgataccattctgctgtcaagcaggcgtttccctggtcagagaatcaaacatggcttccagcaggtggatgttgctgaaggtcacagacagcaaaatgcagaggttacacatggaggaagcacaggttcccacagcaaattaagtcatctgtgaagccttctcatttcccagcgactaaatttatgactgcttttaagggtcatcatcgcttgcatgcacttgcactttatttaaagtatttgagattttggaaaagcagggttgtcccaattaaaaatacatacatgagctacatgtttaaagaaaatggggaaatttaaaaatgtgtttatgtaactcttttagtaattttaaa

SEQ ID NO: 396946 - DNA, 829 bp, Homo sapiens
atacatcattttcctctggtgatagttgttccctattgttatatatcagttaatgttcttttcctgcttgtgccagaaaatgcatttaaatgacactaaaaagaggaactttgatatgttagtcttcaaactatttttaataacaataaaataatttaaatgagctctatttttgccaaaaagcaggtttttaaggtaagtataataaccaatttataagtatatgctttatataattaatttttccttaaagtttcagagaatagaaacatatcagaagaattaacacaaaatgcaaactggtagattcagatctaaatttgttttgcaaattcaatttaatacagaaatgttaagccatttttaatgattaaataaaagtttacatgggaagcaaaacaaaaataatactgttaatttatgtattaaaggtttaattcatgacttccagtttccaatatggcatgtaagaaccttgggcatcatcactcccattctcactacaatgaaaaaacagaacaaactgaaactcaataactcttcttagatacatcagagaagtgaggtcaaagggcaatatattgctccctaaaatggagagacacacaggtaagatacagagaatcacgatttactgaagcagaagcctagaagcagaaacctccatgggaaacaatgctgttaggaaaccctaaactgtaattgacaaattgctgaaggcacagtgtggaaaaaattctaggggaactcaatcttacgaggcccccaaactttcatgaaatgtacctcctacagcccagttgggttctctcagtgaaaacctgagagg

SEQ ID NO: 396947 - DNA, 663 bp, Homo sapiens
  misc_feature (467)..(468): n is a, c, g, or t
  misc_feature (472)..(472): n is a, c, g, or t
  misc_feature (474)..(474): n is a, c, g, or t
tatttttaatgtatgaagcggttttcagatgtattctttattagtctcaatcacttgcatttcctttctttcttttctttttttttctttctctttctttctttctttctctctctttctttcttcttttctttttctcttttctttctttttctcttctctcttctcttctctcctctcttctgtcctgtcttctcttctctttcttgagacggactctctcattctgtcgcccagactggagtacagtggtgtgatcttggctcactgcaacctctgtctcctaggttcaagtaattctcctgaacctctagagtagctggggctacaggcgtgcaccaccatgcccagctaatttttgtatttttagtggagacaaggtttctccgtgttggctaggctggtctcgaactccagacctcaggtgatccggcctgcctcgtcctcccaaagtgttgggattacannctcntngcttccctcctttctcccccttctctctcatcccccttctttcctctctctcccccctctccttatccctcctcctcccctccttcctacccttcctcccccctccttcccccctctcactccacactcctctcatttccctctactctccttccatctctcctcacccctcccttcctccccccctcc

SEQ ID NO: 396948 - DNA, 861 bp, Homo sapiens
  misc_feature (665)..(666): n is a, c, g, or t
  misc_feature (670)..(670): n is a, c, g, or t
  misc_feature (672)..(672): n is a, c, g, or t
ttgaatgggagaggaggaagatgtggggttgcagtgggttcactgggaagcatgcattattctacatatactggggagcacatggtataactggcagagtgtatccagggggagaaaaaatagcatgttggttcttgattttattgtgtggcatagggtgtcacatagtaaggggacaactcaaatttcataggaaagattgccttacttggaatgtagagtcaaggcctacacccaatcccctgcatttctttctttctcctttctttcttttctttttttttctttctctttctttctttctttctctctctttctttcttcttttctttttctcttttctttctttttctcttctctcttctcttctctcctctcttctgtcctgtcttctcttctctttcttgagacggactctctcattctgtcgcccagactggagtacagtggtgtgatcttggctcactgcaacctctgtctcctaggttcaagtaattctcctgaacctctagagtagctggggctacaggcgtgcaccaccatgcccagctaatttttgtatttttagtggagacaaggtttctccgtgttggctaggctggtctcgaactccagacctcaggtgatccggcctgcctcgtcctcccaaagtgttgggattacannctcntngcttccctcctttctcccccttctctctcatcccccttctttcctctctctcccccctctccttatccctcctcctcccctccttcctacccttcctcccccctccttcccccctctcactccacactcctctcatttccctctactctccttccatctctcctcacccctcccttcctccccccctcc

SEQ ID NO: 396949 - DNA, 472 bp, Homo sapiens
ccaaatggcttcaccactgaatcctaccaatcttttgaagacaaattaataccaattatttgcaaactattaaaaaaaatagacaaagaggtgacattttccacttcagttatgaggcatcacccagataccaaaaccagacatatatcacaagaaaactacagaccaatatcacttatgaatatggacacaaaatcctcaacaaaatacgaaccaaccaaatctagcaacatatgaaaagaattatacaccacaaccaagtggaacttatcacaggaatgcaaggttggttcaatatccataggtcaattgatgtatcaatagaattttttaaaaaatcacatgatcatatcaataaacacagaaaaagcatttcacaaaatccaacatcctttcatgataaaaacactctaacaatgaggaatggaaaggaattaccttaacctgatgaagggtatctaccaaaaactca

SEQ ID NO: 396950 - DNA, 658 bp, Homo sapiens
attataagaagtcttcgtactaagttccctgggtggggaacttgttgtttgcctgtttgtttagtgacttggctggactattttagtaaaatctattttccccatctatgaagcctttgatgtcactcttcagcaagcacagcttagggcatatgtacaatcaccctggaatgacagtgattttaacagggcttttctatgactgtttcattccctggtctttttattaatctgtctgcctctgttggtgccacccccagttattaggctccactaattgtcagctgattcctctgttgtttccagcagtgtcctggggcatgaattgtttcacaatctgattcaattaagttgcagactccttacaggagtactttttgtggctagctttgaggttcattttgattccaggacagttcttcttagctgtttctttttaaaaattctatttgctaattctgtgaagaatgtcaatggtagtttaatgggaatagcattgaatatataaattattttgggcagtatggtcattttcatgacattgattctttccatccatgtggacggaatagttttccatttgtttaggtcctctcttatttccttgagcagtggtttatagttctccttgaagaggtccttcacatccttgttagct

SEQ ID NO: 396951 - DNA, 372 bp, Homo sapiens
ctttttggttacaaaagacttttttttttactgtatggaaatattaatattcaaatactgcgccttttgaataagttttagggcactgaataaaaggctcttcaacttggccacttaaaggggattgagccagatggtagtttaagaattccacagttctgttctttttgcctcatcgtagcccatcatactctgtttgctttcagattagtccccttttactgttctacttatttattcgatgactgaaactatcacgattcactgcccatcatatttctaactattctttatgtaatttggaagcaatttagaataaagccctgtcaaggttttacaaataagaactattaaagaataaagctttggata

SEQ ID NO: 396952 - DNA, 313 bp, Homo sapiens
caatcaggaggggaatagccaaatagaatgtgctatgttcatataatagactgtggtccaacagttaaggggaatgaacagtaagatctctgttaatcaccctcagtaactttcagatatgttactgtatcaagaaatctttcgtgttaatagaatggtagatgattggatacatgataaaatgtatatgtgtcatgtacagtgacaccaattgtttaacaatttaagaccctgtattttatttttaaaattttttttcatacatacttccacatcatgtattttctatatgtacatttatgtatgtaaactt

SEQ ID NO: 396953 - DNA, 487 bp, Homo sapiens
gcaaatgaagttagttgctttagaaagagatttagaactctgtcttacagcatacttctccccctaggcaagtctctatctctggagctggggaacaatggtgcacttctctttgaatgacaacccagctagaggacaaaaacactttgtggagttggggcaacagcctcgggtctcaacttgcctctcccaatgtggaactgctggattacaagctggggcatgggtgactgtgccttcagtattctcagtggtactgtacacaggtacagcctctgtaccatgagtaagaaatagttcctgcctctcagccccactcatccagaacttgacctcaccaacaggccactaaaaaaaaaaatcttgatatcctattcctttgagaaagataccctccaactaggaaataaaggaacaggtaatcttgtgttcttggctgcaccagtctggagtgaagtttctatctcagcaagctgggaaagaggaa

SEQ ID NO: 396954 - DNA, 432 bp, Homo sapiens
caaaaatgtctaagtcagtgtttttaaatgctgctgggatccccaaaccagctacataggcatcacttgtaagctgttagaaatgcaaaatctcatacccaaaccaagaccgaccgaaggaatcagaaactgggcaggtgggctgagtctagaaaaatgtgtttttaagaccccgtcagattcacatgcacctggacggccaccactccggctggtgagaccaagtctctgcacacacacctgttctttacagggcagctacagtccacctggttagccccctgaggttttaagctttttctccttttctgcacctgggaattcctcattctttccagcttgcctagtcatgcttataaagtaatgtttattatgttttatctcttttaaaataatatgcacactgactaagaaccagctgaaaatttttta

SEQ ID NO: 396955 - DNA, 607 bp, Homo sapiens
ctggttcctcttttgctgtgggtgaaagtctcagaaagcatgcaggtgacccgattgtcttgactctctctttaacatggacactcagatgtccatgacccataaggcctacctgcttcactgctggaagacccccgatccagggaccctctcccctcagaatacatctcctcatatccaaaaactgcatccaggggggcgtgctgcccagggcaggacctccatcccttagaggccagcttgtcagagcaacatggcccctgccatgttcactctcacacacgtgcacaggcatacatgcgcgcacacatgcatacaggcacatcacactcccacacatgcagtcacactcccacccacacaccacacactcagacatgtgcacacacacacacgtgtacacgagacccatggatctcctcctccccagctaggccaatgatggaacccaagaataggtccagactggagattgagccctgaggtccctcaccgtagacctcctttgggggcagcccatttaataagcacctactgtgtaccaggtgttgtgctgggagcgagttacagaatgagggagacatggtccccgccctctgggagctcc

SEQ ID NO: 396956 - DNA, 337 bp, Homo sapiens
agtaagcgaacagtaaatggtatatttgtaattattcttttttacgttgctttctacttaatatgcgtttattaagcttcaccttaagtataatttagcaaaggattatttcagttttcccttaaaccagtttataagtttacatagggaggttaaagccaacaggaatttttatgtaataaggaaattcaaatatttcagtatctgtgataagagttgtgttaatttgcagaggaataacacaaaacattgattaaatttggattgctaaatgttaaacagtgtttgtacaataaaagtgtgattcagaaaaagccttattataacatgcggaatg

SEQ ID NO: 396957 - DNA, 442 bp, Homo sapiens
aatcataggaatcatccccccagccacagcaaactgatccaggcagggaaacatgttccaacctgagccagtcagctcctctcccttgggaatctgaatttgagtactgagaaggaaagcaatagcagtctgagatgcctgtcacctacgggaagcatcctaaagaaaaaggttgccagttctagctgctgaaattccaggagcaggcttcatctcaggccaccatcctgctcttcctttaaacaaatccccattttgcttgagatagtttctttccattgcttgcaaacaaagaacacaaatgattcacaaaaaaaacttactacaacataatatacaccttgctgaatttacatcttgtactagtgaaactgaatattaaaatgattgctagatattaataacattttatgctgtcaaggacaatactttaaagcattac

SEQ ID NO: 396958 - DNA, 211 bp, Homo sapiens
atgagtctgctgatgtgatcttttaagaaacacctaggataataaatcttgaacagtagagattaaagaaaactaggtcataaaatcagaattttcaaagagaaacatttgtttgcataatccagaaacactttcacctaacaggttcttgaaggtgtagttacatgtaatacctgaaaactcagcccgttaggatactaagaataaacag

SEQ ID NO: 396959 - DNA, 261 bp, Homo sapiens
atgtagaggcttgaagttgtgtaagtgcctgacaaaatcccacacgacagaagctgtgcgtacaagcaagcatatatatgtgcacatgtacagcaactggtatggcaactagaaaaggtacattgaaggtcgggtgcggtggctcacgcctgtaatcccagcactctgggaggccaaggcaggaggatcacctgcggtctcaggagttcgagatcagcctggccaacatggcgaaaccccatctctactaaaaatacaaaa

SEQ ID NO: 396960 - DNA, 731 bp, Homo sapiens
ggttgaaacacaccccttctgcctcagcctcccaagtggggccttagatttcttacagtaaaatggggatgatgatagttcctacctgataagattgttgagaggacagtatgggttaatatgtaaatggctcaccacgcttggcctgaagcaggttttagattatttcagcaacactcaactgttatttatcgagcccctattatgtcccagggccttagaaatacagcattgaataaaacaaagtccctgtctcatgaaacttatgttccagtgagatagttttagggtgatatactagcagaggctgaacatccctgttggagggagattcaagttgcagggaccttccaacttagcctgttgacgtcatgaaattcaatggctcatcgccttagtctctaagaaagcttgttggctaaaacaaggccagtcaggtgagttgtacatgttccagctgcttcctagcagggaattcctgggggacttcagggggttgagatccttagcggatcacacagtgtgccttccgctttgcctcgttgtagtatatttatccagattaaatctgtaaaacaaagttgatttgaaaagttacagtatcaagacaggtagaggaaagaggaaaaaaaaagtattgtgttacttgatagggaagactaagattttgagctgactttatatagaggagactcagggcattttgtaaaaactgtcttcagctactgggg

SEQ ID NO: 396961 - DNA, 336 bp, Homo sapiens
gtgccgttgggagaggaataagttccgggacctgatgcacagtttggtggccccgatattcacggaccttaccacagacacaatgagagccccgtgaggccaagggggcatggatgaggtcccttgtggcgatcatttcacaacgcatacaagtatcaaatcatcacgccgtacgctgtaaatacatgcgactgtttccggttagactttcacaaagccggggagaaacaagttcaactaaggaatctagcaacattgtccccatttgctctgacaggtttctcagtggttgaccaaaaaaagcatgtgtttcaacactagtttcacttgatgatt

SEQ ID NO: 396962 - DNA, 445 bp, Homo sapiens
ctctttgcaaaagaaacaaaacctttgtcaacccctgccctagaccagcataggtagcaggaggcagaggtggcaggaccacttgagcctaggaggttgaggttgcagtgagctatgatcatgccactgcactgtagcctgggtgacaaagcaagaccctgtctcaaaaaataaaaaaaaaaattatgaaaattacaggagatagtttatgtaaaacatataagaagggttgttcaggaaatggtatcattgaaaagtcacattttgtgtaattctcttttcctcaatatgctttatgtttacaccagcgagaccaacatctccaggagtatgagccgtaacttactctccagatcctgtggttcctggcaccgtgcacagtacatagtaggtactcggtgagtacgtgggatctgtagctacctctcacttgggaatatatgtg

SEQ ID NO: 396963 - DNA, 262 bp, Homo sapiens
ctaactccatactaaggcttaaataggattacagttaaaattttctaatataaatttagtagccggtctccacctgaagaaatcgaaaggatggttaatgatgctgagaagtttgctgaggaagacaaaaagctcaaggagcgcattgatactagaaatgagttggaaagctatgcctattctctaaagaatcagattggagatatagaaaagctgggaggtaaactttcctctgaagataaggagaccatggagaccggct

SEQ ID NO: 396964 - DNA, 579 bp, Homo sapiens
ggaacgggtgcaggaagaagggacaagctggatgtgttttgaggatgggagagcatcagtccagctctgcaggtggaggttgctgagcgttgtcctatagggaactttatgcataagggaagtcaggtttagagtcctcactactataaagtggagttggtcagggctgatttgttccgattgaaaaccatgccctttgctttttgggtttacatttagatatttcccatcagagatcatgaggaatagcagtgggatttttctatttagcagccatggtgtggtcaaagctaccaaaattaaatttgaataatatacaaagttcaaattccctggcttccccgttttccatttttaaggataatttcaagtaagagagatgtaagtatttctattacatgtctgatttgaatatgagagcaacctgtctgctcctaagatgtcaggatttgtttccattttttatttccaggagtcagattccttgttaatgtaaaaatggttctgtttcctagaagttttgaatctgctatggatctaggtctggcccctcgttcttgagcttcactcttaatttcc

SEQ ID NO: 396965 - DNA, 692 bp, Homo sapiens
gattctcctgcctcagcctcccgagtaactgggattacagggatgcaccaccacacctggctaattttgtatttttggtagagacggggtttctccatgttggtcaggctcgtcttgaactcccgacctcaggggatccacctgcctcagcctcccaaagtgctgggattacaggcatgagtcaccctgcctggctgggctggccatggttttctctgggactaatgggtgtttaagcccacctcttgtccttgcagggtgccttgtgggttttttgctggggatctctggggatttatctctgcaattccctggtccaagagatgtctctcttccaataagccatttcaggcacctctctttccctgagccccacacccctcttttgtttccctctccctcctcctacagcctggaggtgaggtcattgagggatttcaaacctgcttctcagacaccccttgtgcatgtcctgcttagaggcctaactccttgagtggcgtgtgggagagggtgggaatagttgccatctattgcctggagccctcaaacgacactgagaaagagcccgcttttaataccctgcaagatgttacaaggaagtatggctcaagatggaggttaggacagatatttacaatgtcagccttggattgtttctgtttccttcatgtaagtggtatttcgccttt

SEQ ID NO: 396966 - DNA, 451 bp, Homo sapiens
agggcatccatacataactataatacaacaatcatagcaaactttttattggatgtatcatgtgtcagacacattttcaagcagttgacatatattgtcttatttaatccataaaaacatataaagtagatagtattatattctatagatgaggaaattgaagtcccaaagtagaaacagcccaaatatttattgacgataaaacggataaacaggtttttaaaaaatgttgacacatcaaaatattatgcaatggctgaaagtgaatgaagtatacacaataacaggaaagactcagaaatatcataaatttgagtagttaacgcattagaagagggaactggttatagtgcaatttttaataaggattaaataagttggaggagcctagattccctaattagcaggggtaagcaaaccataacccttggtgcaaatctgatctgctgcc

SEQ ID NO: 396967 - DNA, 271 bp, Homo sapiens
gtcagggcagagaaaggggacctgaagtcaaagagacttgtggggatcaccccatgacccatcccctgccctgaggcaggaccttgctgccagagacagaatggggcccctccattcaaggggggctgttctctgggcatgccatgtggggcatggcctcagtcacatctatagaagtgagatcacagggacaaggtggcctaggaggaaggggtgtgaggcccgctcccttccagcaccacactcactgccagagtctaaatctgcctcc

SEQ ID NO: 396968 - DNA, 430 bp, Homo sapiens
ttaatgtttcccggggtgttccttaagccaacccctcatccccaaatcccagcaggatgatgggagcactcttcccctcccctctaagaagggcttaatttggtgaccgattcctgggccactcacccacagcaggcagctggatgcaggatttactttctctgagtatccatctcctattctctctctttccatcactcagagcaccccaagatctggctacctcgggccctgaggcagacctacatccggaaggttggggacacagtgaacctactaatcccattccaggtgatcatgccagccccatactgggtccatgtctggggccagtgcaggttttggatttggaaacagataccaagagtcctgctagcagaggggcaatcttcccagccttggatagaaggggtcacaccaccagaagtct

SEQ ID NO: 396969 - DNA, 151 bp, Homo sapiens
gaaggtgatatgaattatacagggcaaaataggggttcagaaggttaatatctaaagaactattcagtcaaatgtagggtgagttttaatgtctctgaataaaaacacttacaatgcaacataagaaactagcctccctccccatctacca

SEQ ID NO: 396970 - DNA, 534 bp, Homo sapiens
agaattcaggacaggattgttcttctgaaaatcagatgttcaagaagaaaatatctgttgtgaactagggaaattttaccacaatgcacgtctttattattgatagtaacccaaagagggtttgtgtttattgttgttaaaaatgtgaatagtaagagctcttattagtagatggaaattcttttatgagaatatgaattggtgctcaaagttctaacagtaaaaactcatttatattgtgcatgtcagtgaggacgggagatctagaaaagtagatattgaattgattatttcatttccacaaaagtatacattgaatgggaagtttttaatggtttgttttagtggaaggcaatttggaggcaggtggaggagtacacaagtatatcagacatattattaattaggaagttccctcttcaacatcatattttatacgtgttagcagataccatggaaatatcagtgatttgatctcagtatattaaactcttactttttggaaggacaattgccttttgcctataaagtaaa

SEQ ID NO: 396971 - DNA, 332 bp, Homo sapiens
caacaagagcgaaactctgtctcaaaaaaatatatataatgaaaataaagtaaataaataaataaataaatgaaaagaaatggaaaggacccctttcaaatcctttctggttccataatatttagttctgtcttttagctgctccatattttaaatgattaaacagacttctgtcattcaaataaaacatttcctagtcatcttcagttagctgttttcttctgagggaacatttctcacaaagaaacatgtcccttgacccaacttgttagttacttcagatgttagaatggaaaatataccaccttaaggtatgtgctgaacatatatag

SEQ ID NO: 396972 - DNA, 911 bp, Homo sapiens
  misc_feature (731)..(731): n is a, c, g, or t
  misc_feature (898)..(898): n is a, c, g, or t
ggacagagctaggaaatgataaagaagatgaagatatgacaagaatactgttatagaaggctgaaaaagtagtaacccaggtcttacactgccaaaacaatttcaaaattatcaaagtcaataacttgaaatatagaaaatgtacctaatgaactttcgtacttgtccaaagttatatccaggcataattttggaagcatgtgctgagatttttttctacagcaaaagttaaggtatcatatgaagcagatgaactcagacaataactgatcaatttgcagagaaaagtatggagataatagggaggccagaacttcctgagctgggaaactaaactatagtcacacattgcttaacgacacaagcacatctcagaaatttgtcatcaggggatttcatcatggtaggaacatcctacttccagaaacctagatggtattgcctactacacacctatgctatgtgaaatagcctattgctcctaggctacaaacccgcacagcatgctaccgcaccaaatactgtaggcaattatgacacaatggtaggtatttccttatctaaacatatgtgaacatagaaaagcacagtaaaactatggtgttataatcttgtgagactaccattgtatatgtggtccattttgattgcattatggaacacataactgcacttcttaatttgaacctcttcagccaagaaaaattatttaagtaagacatgactcgggncagaaaatcaaggggaggaaatcctgggaccccaaaaaaagggtagaagcgtacacgagcggggggaagggtccaacaccaagagccccaacataaaggagccgccgagaactacatacacgccacgaagggcggcgaaacccttataagagagcgctgggtgttantacaccgcagcgg

SEQ ID NO: 396973 - DNA, 707 bp, Homo sapiens
ggacagagctaggaaatgataaagaagatgaagatatgacaagaatactgttatagaaggctgaaaaagtagtaacccaggtcttacactgccaaaacaatttcaaaattatcaaagtcaataacttgaaatatagaaaatgtacctaatgaactttcgtacttgtccaaagttatatccaggcataattttggaagcatgtgctgagatttttttctacagcaaaagttaaggtatcatatgaagcagatgaactcagacaataactgatcaatttgcagagaaaagtatggagataatagggaggccagaacttcctgagctgggaaactaaactatagtcacacattgcttaacgacacaagcacatctcagaaatttgtcatcaggggatttcatcatggtaggaacatcctacttccagaaacctagatggtattgcctactacacacctatgctatgtgaaatagcctattgctcctaggctacaaacccgcacagcatgctaccgcaccaaatactgtaggcaattatgacacaatggtaggtatttccttatctaaacatatgtgaacatagaaaagcacagtaaaactatggtgttataatcttgtgagactaccattgtatatgtggcgctgtcgttggacctttggagactaatggcttctaattggaacctttgccagaattttctttcacgggg

SEQ ID NO: 396974 - DNA, 440 bp, Homo sapiens
agtcaaggaccatgcctgtgtgttggttcttccttgctactaagttttccactcccttctggcagcacttcgccctctgaggtgctggctcagaagctctgaggagcttctttcataagctcaggttccagagcaaaacactggcaaacttttcttttcatgagaacatggactttgtactattttccttcctaaaagacgtttttgctggctattcctcctacctacggaagtaaacttttttttttttttttgagacggggtctcactctgtggcccaggctagagtgcagtggcgcaatctcggctcgctgcaagctccgcctcccgggttcacgccattctcctgcctcagcctcccgagtagctgggactacaggtgcccgccaccacgcccggctaatttttctgtatttttagtagagacggggtttcaccgt

SEQ ID NO: 396975 - DNA, 123 bp, Homo sapiens
ccacagtcagcccagattcaaggggtgcgtcaatagactctacctcttcgtggaaggagctgcaaactattgtgatcacgtttgcagtctaccacaaatgtattgctatatgttagcgctatt

SEQ ID NO: 396976 - DNA, 283 bp, Homo sapiens
ctgctgttcccctggcctggaatattctctcctccgcttccatctttgtgactcactcctcactaccttcaaacgccatctccacgaaacctcccctgactaccgtatctaaaattgacaactgcctggtctcctgcctctcacatcccctagactcctcccagacttttttttttctatttcatttgtcaccatttgacattttgatatagtctattttttccttatttattctgctcatggtctgtcactaaaatgtaagtttcataaaagcaaggatttt

SEQ ID NO: 396977 - DNA, 673 bp, Homo sapiens
tgaatagctgaaataaatcatataatcagttctcagaaatggtttaaagagaaaaaattaattattgctctaaaagtatctctgacatttgcaaacacatataacatgcctctttagcattcaaaacaactctgccaaaactcacttaatatagaaaaaatttcaaattgtttgccttcaaaatttgctgggctgctacacctagatttctcagtgcccacctccgctgcatgtagagacctcaagcaaaatccactcctggaaatcttaactcaatggtcccatcaagggagaacacaccaagcacaggagacatgaccatctaggatgattcctaactacctttatagtgaagatgagatggtcagaaagacgtacgtcctgccaggcaacgataaggatttaaaaaaaaaaaatttttttaagaagaaaaatgggctgggcacggtgtctcacgcctgtaatcccagcactttgggaggccaaggtgggtggattacaaggtcaggagatcgagaccattctggttaacacggtgaaatcctgtctctactaaaaatacaaaaaattggctgggcgtggtggcgggcacctgtaatcccagctacttgggagcctgaggcaggagaatggcgtgaacccgggaggcagagctcgcagtgagtagagatcg

SEQ ID NO: 396978 - DNA, 508 bp, Homo sapiens
ccgctttccccattcaaggttagtgttccatttttagccctgaaatacacatgaattagattactagactattcactgatcaataatgtgaaaaaaacaaaaaagaaaaactatgagtcagaagaggaaaaatagtgactcatcagacagagggcgtctctattctattaatttcaactgcacagtctataataaccagtgtgtgagagtttcagccttcatccaaataacgtatgtgaaaccacaaaggaattcaagctgcagacaacaaggcacatttaagaggttacaatgttagtgttgagcttggggacatagaatagagcattgatttctgataaattattgtgtgcattgacattttcggcacaggcatttctttctatattatggttccataaaaaagtcagtttgggtccattaattgcctcagagggaagggtgtgtgtgtgtgtgtgtgtgtgtgtgtgtgtgtgcgcgcgtgtgttaggtggaaaggtggaatgtg

SEQ ID NO: 396979 - DNA, 101 bp, Homo sapiens
tattactcaatcaactatatgccactccaatagtgtatcatcctcactttctttcggtgtaagaaaggcttgtcattttcctctagccctagtggaaaact

SEQ ID NO: 396980 - DNA, 392 bp, Homo sapiens
acaaaaagatcatctctagattgctggtaatacctcatacaatgtaaatgccatgtaaggagttgttatactgtaccgatttttaaatttgtattattttttgttttttttccccccaaattttctatctaagattagttgaatctgaagaagtggaacccacagatacggagggctgactgtagtaatttgacacttcatttttcttaaggtgtatgaaggtcctttcttctctatttgtaaattatgtggtgaataacagtattaaaaaataagctggcttaaaagatgtcagactcacctagggaagtccttactggacataacgtttaatggcaatctgtgggtaataattacaaaataaaatgcatatttgtgaacaaggactgaaa

SEQ ID NO: 396981 - DNA, 541 bp, Homo sapiens
atgcagagttgggaagatgtgcagtagcataacatgataagggtttccaccatacgactgatgtgtaccattgagtaggtataaataacctcaagaacatagacgatagtaaaataattaggaagtgatcagctttgaatatttattacctttgcatttcatatcttttttatttaaatgtatataacttaattgttaataatgactgttcttaacaaatgactcacagaattcctgaaaatttagcaaatgactcttgtcagccagtacaaaccagctccaacacaccactgggtgggatggaagagaatctgattcagaaagagcatgaaaactttcttgatcaattgagatttggtccattttttttccctctctttcactacacaaatctcaggaaaaaataaactgtatatttgtttggactatggaaaggtgcgatagaatgatatttgttctcttccatgtcaatgagaactacagaaagagttaactttgttcattacaggtaaaaataaactgataacaaaataaaattagc

SEQ ID NO: 396982 - DNA, 416 bp, Homo sapiens
tccagcctgggtgacagagtgatactctgtctcaaaggaaaaaaaaaattggtcattctctttttctgatttaaaaggattttgttcctccatggaaaactttaaaaataggagcaagcgtgtatattcttccagacttctaaaaggaattgcaattgctccttttgtagcagacaccatcagggacttgcctggggcctctcatctagcaagtgggagagtccacactggaacccagctgctgaatcctgaacttcattgtgctccattgtattttttatttttattttaaaaaattaattatttatttttgagacaaggctctgtttcccaggctgtgtggtgcagtggcatgatcacagctcatggtagcctccatctcccaggctcaagcgatcctcccaccttggcctccc

SEQ ID NO: 396983 - DNA, 455 bp, Homo sapiens
atccctcctccgtcccaccaccgttcttgtctaatggccccaagaaattccttccagagcactttcctggcagaaccttcctctctcagcaaccctcagggaagacagagaactcaccctcccgctgctgtttggctatagaggctcagcagggaggcccaggcgcccaggccaagagaagatgagttttcagggctctctgagctgaacccagcagtgggtctctggccaacacactgtcccaatccctcctagaacccacagatgagggtgtgactgaaatggaagaagcaccaggccttcaggcttggaaccttgggcacttctccagactggggaggagggagtgtttgttcagcccaggtatacatagcaccttctgtgccccaagccctgggccaggcaccaggtggcaaagctgccatcaaagagggaggtcacaagttagggtctgg

SEQ ID NO: 396984 - DNA, 323 bp, Homo sapiens
ctctctctgctacttcctaattatcagaagcatcaaatgagaatgtgctttgtaaactattaaatggtaagcagatgaaaagggtagttgatattatctcatccagtttcctgctctttgcaggaattccccctacattttccctgataaaggatcgtccaaccacatattgacttaaaatctgtaaaattaaaactgtggtttggccggccacagtggctcacatctataatcccagaactttgggaggccaaggcgggcggatcgcttaagcccaggaatccaagaccatcctgggtaacatggtaaaaccccatctctac

SEQ ID NO: 396985 - DNA, 462 bp, Homo sapiens
cccctggccctgtcatgcagcagatctgtccctactcattcatcagctcatcacctccttcatccgtgcagtaaacagagatgaactgagcatgtgaagggtcccaaagaaggtcatgcaacctgtcttagtttgcaaaactgtaaaatggaaatagaaataccttcttcctagaactgattccagtaccaaataagaaaacttgtaggaaacgtggcatttgtttttaagtgctatgcaaatacaatatatatatatttttttgagacagtctcactctgttgcccaggctggagtgcagtggcatgatctcggctcactgcaacctctgactcctgggttcaagctattctcccacctcagcctcccgagtaggtgggattacaggtgtgtgccaccgcacacagttaatttttgtatttttagtagagatggggttttcaccatgttgcccaggctggt

SEQ ID NO: 396986 - DNA, 175 bp, Homo sapiens
tgtcccaggggaggaggtgaaattcctcagctctccaccaagattggccacaaaagcctgatcccctggaacacagcaggcctcacatagacggtcagccattggatcataggaactgccctggcctgactcacccaatatggaggaggtgcctggggatgccctgtgtgaacac

SEQ ID NO: 396987 - DNA, 221 bp, Homo sapiens
actaaagaaatgtaaattaatccactttggtactactgttttgcaaatgttcaatcaacaagctctttaaaacctaccattttgaaagtctaccattgaatgacttaggaacgcattttgacgcgttgttgggtggctatcaatttaatttgtgcagtctttctgaagaacaatctagcaacattcttaaaatagggcattaaaatagttatatcctttgg

SEQ ID NO: 396988 - DNA, 539 bp, Homo sapiens
ctgtgtttcttttgtaatatggatggcaagttattgaaattttatgaattcattactataaaccggatacagttcagtcctctttctggaataaatgcacttctagacagttaccactatagcactctatcccatcccactgattgtataataaaagtcaacatgtattaagtactcttcaagtttggtccaagaggcatacatgtgttcgtttaaatccccaccagaacaaccctataagtaccattgttatcaccattttacaggtgatgatctgaggttaaatgagtcacctgagttcacacagactggaaggaacagagccaggatccaaatccagacatttgacatcagggcttacactctttttttttttttttttttttttgagatggagtctcgctctgtaacagggcaaaaccgcagggttcgcattctgggcccacggaaacctcggcccccggggctcaaagaattctccggctataaacctcccgagcacttaggaccacgggcacccacaaccaaggcgtggcaaa

SEQ ID NO: 396989 - DNA, 533 bp, Homo sapiens
gatgcaggttatgaatccattcaaaaataagatttttgcatccttcatttaataaagcaaggtggtaaaaagtaaaggaatggaaactgccttattttcaccagaaaatttagccctagtcacttggtgagtttatgttatacttcaggaacccaggcttctgttcttaccctgtttcagaggggaaagttacatctttatgctttgttatcttgacatgggcacgtgagttgaatgcagtgccatttagttgagcattggaggatagtctgtaaattacgacgaagttgtttagtcagttaacataaatctttggggattataaaccttggtgtagcaacttaacatttaaggtagaatagaattaaataaataaagcccacattctcttttcttctggctgacttcaaggaatgcactgagcgccatctgctggttgttactttttcaaaactattttcttaccaaaccactgtcatttgaaattgactctaggtatatataccaacatataaaggcagctttatgaagag

SEQ ID NO: 396990 - DNA, 231 bp, Homo sapiens
gtttgagtcctgccagccgaatacatcctagagatgggctgtacagcagagcgccgtcagtgttggacacttacaatctgttaaaagggtaggacccatattaagtgttctcgccatataataaaaagtgtaaacactaaggaaatcaatggactttatagttaataatatctcagtctggttcgttaattgtaataaatgtaccatgctaacataaaatattaataatgg

SEQ ID NO: 396991 - DNA, 593 bp, Homo sapiens
ttacattattttgttggaggtgttggggaacctttcatggaaggtgtgtggtagactgttggacaggtttcctcaactttcgttccactctttgaagaggttagaaaattaaaacaaaacaagcaatgcagcttcccttgagctagctttatgaatgcagcttagaccacttaccgattgtttgcatatgaatcagacttagaaaaatggaagagatcaaagcctgtcttgctattgttgattctggcaagtgaaatcatggggacaatagttcagaagtagtggaagtggtaggattcaatatccttgtgcctaatccccagtttcatgggcataagaggcttaaagttttaatagcaggagcatctttttgacccaggattgcagaaatgattgcgtgcctttgaattcaagaactcaaaaccttcctccatgccacagctactttagttattttagcccttcctattgtatatgtatgaaatgcactttctgcttaagatacctattgcggtttttatttccttattaaaaccttggaaaaatatagcacttaaattatgttttgtagaaattcactaagcaaataaagc

SEQ ID NO: 396992 - DNA, 562 bp, Homo sapiens
gaccctttcttctctgtccatttgaggatgaaattctcagattttaatggaatggatagaacttcagtgaattgggagagctcacacagcaccccaaaagccttttttctaaggaaaagcagaactgtgatggagtcaggttcaggattctcagctctgttcagcaaaatcttaagtcattacaggtatgtgtggaaaactcagtaatctggcagaatattagaccaacctttgcatgtttttaactttttaaggatatctttaaagctcaatttccatctctttgttctcaaaaagttttataattgtcaaaaatttggatactattatgtaccaatagtggtttcattatttgcttttaataagtggcaatgtcttgctaaagctaacctgacatttgcccttcccttcaaggtctttctgctatattggtgtccagctcatttgttaaaactctggatttgttcctttgacctcagctgggctttgattaactaagataattcttgagttctagctcccatcatttaagcctttagggccttcaatttaggaacttcca

SEQ ID NO: 396993 - DNA, 616 bp, Homo sapiens
tatggaactcagaaaagtgataggggctacaagtatggatttgggagtcaacagcaaatagttggaagtctactttgagtatcaagctttccttttctcaaaaactgtgtgtcatagtattggcttctggtacattggacaatgagccctttttgcttgctaacactgctgcattctgtatctattatttatcctggacatctcgccatatcactacacagaaaaattccttattcttggctgggtgtggtggttcacgctgcaatcccagcactttgggaggccgaggagggtggatctcttaagctcaggagttcgagaccagcctgggtaacatggctctcagtattaaggtacttctacctatttctttttgcatgtcttgtaatttatgctttatgaaagttgttacttggtgtggtattgtaactattataaagtccttatgaattatagtatttagaattacaaagtgcacttttttgtcttatgttttctggcttgaattctgccttgttttattaagatcatgactcatgctttctttttatttgtatttcctggcatgcctttaaccatccttttatttttaacctttaacctatgttttaagtat

SEQ ID NO: 396994 - DNA, 249 bp, Homo sapiens
tcctgagagaataggttcaggaagtaaggcaggttttagggatggtttagggagttctgtagaaatggggtcagtgaatgaggcaggttataggaaggatttaggggctcctaagggaatgggttcagggagtaagacaggtttcagggatggtttagggggttctgaagaaatggagtcaatggatgaggcaggttataggaaggatttgggggctcctgagggaataggttcaggaagtaaggcagg

SEQ ID NO: 396995 - DNA, 579 bp, Homo sapiens
caacagagggagactctgcctcaaaaaaataaaataaaaaaagtctttggaattacccgcagcttggacccaaatgaggcagataaacttgaaataaggtagatgtaagctgacagtagtgattggtcaccatgtgacaaactagcattgatctgttccaagtatagagtaccaatgtgagaaattgaatgagttgtacgtgaagcagggaatgtgtattctgtcagactcatcttggtacattttggactagttacttggtaggaagtcaagtcatgtacagaattaaagttctctgactggctgcagtggctcacgcctgtaatcccagcactttgggaggccaaggcaggcagatcacttgaggtcaggagtttgagaccagcctagccaacatgttgaaaccctgtctccactaaaaatacaaaaattagccgggcgcggtggtgggtgcctgtaatcccagctactcgggaggctgaggcaggagaatcgcttgaacctgggaggttggggttgtagtgagccgagatcatgccactgcactccagcctgggcagcagagtaagaacctatctc

SEQ ID NO: 396996 - DNA, 521 bp, Homo sapiens
ccatgttggcaagggtggtctcaaactcctgacctcagatgatctgcctgcctcggcctcccaaagtactggaattacaggcatgaggcaccccgcccggcccaattgtgtgggcttctatgtaggcagaactgaccataaactgtggctcaggtaaccgaaactgagtcattgaacctcttcagggaccccagtaaaggccaaagtctgcaagcctgcctacattgctgtaaatgggtgccttcatccaggtctctggaatggcaggacctctgccagactgtggctgggagtttgagctggttacagagtaagttcagaattctctgtgggaccaacttgggtaaaccctatcctggtctgtagccatgaacaggggtactgtagtttcccacgtgaatgagagcctgccttctgaatagaacacttctcaaccttacgctttaacagcatttcacaactcccaccctagctctcaaatctcccttagaggcacttattttggaaatggcatcttgcta

SEQ ID NO: 396997 - DNA, 802 bp, Homo sapiens
  misc_feature (41)..(41): n is a, c, g, or t
  misc_feature (242)..(244): n is a, c, g, or t
aaagccccataatccaaaaggaaaagggcaggggaaggaantaaaggttctttcgcttggggaaaaaaagaatgcggaagacagattttcccaaaaaagccaaaggccaaggttttttcaccccacttccttagtaatttgtgaagaaaaggtttttccccccaccccccccaaaatgcccaaaaaaccccaaaaagtcccaagtgacctaaagtcagtgattcaactggaaagaaacctcnnntgtcctccagagctttttggaaatactcaggatcctggccgcctttgtaacctttcctaaacgtcaggcctggacttaaaagattttttaaaacctcccaaagtactggaattacaggcatgaggcaccccgcccggcccaattgtgtgggcttctatgtaggcagaactgaccataaactgtggctcaggtaaccgaaactgagtcattgaacctcttcagggaccccagtaaaggccaaagtctgcaagcctgcctacattgctgtaaatgggtgccttcatccaggtctctggaatggcaggacctctgccagactgtggctgggagtttgagctggttacagagtaagttcagaattctctgtgggaccaacttgggtaaaccctatcctggtctgtagccatgaacaggggtactgtagtttcccacgtgaatgagagcctgccttctgaatagaacacttctcaaccttacgctttaacagcatttcacaactcccaccctagctctcaaatctcccttagaggcacttattttggaaatggcatcttgcta

SEQ ID NO: 396998 - DNA, 300 bp, Homo sapiens
tagaggaccccggtcaacttgctacacactatataacgcttttgctgtacacacacacacacacacacacacacacagacacacacacactcattcttttgtaatgttattttatataaatgcataatagttttatcaacaatattttaattataccaacacataacaggcaattattttaagtgctctatagttttagaataccaactgttgttatcattctatttatattatacagaatacatgtttgtgtattactatttagcaatcaaccactattttagaatctacagatgggta

SEQ ID NO: 396999 - DNA, 345 bp, Homo sapiens
tcggtacctgtgacgtgagctggaagacggtttcaccatgctgcctaggctggcctagaacccctggactcaagtgatctacctgcctcaggctcccaaagtgctgggattacagacattacccacagcccctggccaactctcctaaagttctaaacacatgttcatttgtttgtgtacttacttattgattgattgattgattgagacagggcctcgctctgttgcccaggctggagggcagtggtgcgatcatgactcactgcagcctcaaccttccaggctcaggtggtcttctggcttcagcctcccaaggagctgggtgtccaggcacacagcaccgca

SEQ ID NO: 397000 - DNA, 217 bp, Homo sapiens
ctgttagcatatctgaaacatggtacttgtgggtcttactgtgaactgatgagtaattatagttttgattggggtagagaggccagtaacgttgactgtaaaatggaggaaagaagacagactagaagagattgggaggagaaagaaggagatatccagatctatattttaaaaatcctgatattccacatgcagataatggcaatcatgcataagt

SEQ ID NO: 397001 - DNA, 484 bp, Homo sapiens
tcctccaagtctcatctcagtatcacttttgtaaagcagtagtaggtaactttccctctcttaccatgctattccttgtacatcttaacacctgtcattaaaaaaaaatttttttgcaggtctatttccccattagactgaactctctgagtgtggatttatgtttttcatctttatagttcctcagcagtgtcgggcctcgagtgactattccagtagttactgaattagttaattaattaatgcatgcatgcatatatgtgtcttgccacatgagtcactcctcaaccagtcctccctcatcctgtaattgacttctattttatctgaatgcacaacaacatccctctttcatttcatttgcttggctcttggaaagataaattggaatctttatgctaacatgttggctttctttccccgcatggtgttttctgtatcttatttcaaacctgtaataagattgttggatcgaacaagggca

SEQ ID NO: 397002 - DNA, 447 bp, Homo sapiens
agagatgaagagagtgtgcaaccctgacacagctcagctggtgctttgttaagagatatttataagtcttcagattatgccccccaatttccaggcaacgaagagacttctccaagtgtcgtgctttgtgcattagtaataaggacacatgctccacagtaatgctggaacacaggatgatgctcttcagctgtgtgcttcttcctggcggagcagatgatttcataattagcctgaggaaacaggcagacctaacagccaaggaaacaatgcacctgaattgacaaacgaagttcaaggctttaggcaaccaatggcatatttctagagtgttggaaggagaggcaagagtctacttcaaagaaactgaatggtggtttattgatttttcatttgtaatagagccatattaaaataaagttactggtgaaggggatgaattcatta

SEQ ID NO: 397003 - DNA, 411 bp, Homo sapiens
gacttaaagaaaactcaaggaatttattttttttcaggtgacagagatataaatttaaatatcacgatcagggcataatattattaaataagacaaccaatcaaaattacagactctttcagaagttataaggttagttcctcaagacattgaaaccatcttgaagtctagtaattatacagtactaattatcacagttagagacagagagatgcagagaaaagtgggggattctaagatacaaacttgcaatgcgggaaagaaaagggcagaatagaagatgagcaaatgagctgggtgcagtggctcatgcctgtaatcccagcactttgggaggctgaagtgaaagaggcatttgaggccaggagtttaagaccagcctgggtaacagtgagactctttctctttaaa

SEQ ID NO: 397004 - DNA, 953 bp, Homo sapiens
attgagcccacatccagattttaatagtgccacccattccttactggtgagaccattctcttcctacggtccaccccaccagctgactgcctctcctccccactacagtttcccagctgtctcctgccaccctgcttccatttgctgttgtgtatgctccaattttttaccttcacacgacgaaaacttcaggggcaaaaattatacctatgataatgtaaagagatcttagaacaactgagactggcagtaaaaaattcaaaattttgacattcctagtttggggagacgagttagattcagggatagctatgaaattgtgctgtctgaatttgtaaagtatttttcaaagcagattaacaggacacagtattatgaggaaatcacactgattttcactttctttctcgcttgttggtttccctaaatgcttaaataagaatataattacaatatttctaaacgattgtgcaactgctctgaagcttgactatttacctcccaccactcagaagaatacaagcggtatatatctgttaggttacccattaaacgactgtgacagatcgtatttctggttaattgttagttccttatgaccttagactttgcctgtgtatttaataacaccatctgctgtctagggtagcaataccacctttttacatgaggattactgttcttacttcgtaaacaaaagtgctcaatctgaggtgttgaaactgtaccacagaattatttaaattatactacctatggaaagcttaaagaagaaaaaattaactttcttctctatggtggctttattagcttcaagtaaaatatcagaatttatacaccataagaaaagtatttttaaaagatttacaagttttattattggtctgcaaaatgaaatgttttaaaagaacgttgtctctgttatacttgttttgtttatcttcttctagccg

SEQ ID NO: 397005 - DNA, 1149 bp, Homo sapiens
tagggccaatttgtcaccctttaaatagacttatttgcatataaactaaagcaccttagggcatcattaccgaaagtgtctaagcaaatgtctgatatagttacgtgcctgcattaaaagaaagcagcccccttatcttgccttaatatccttacagtgttttaataagttcataatgcatcctgtatgtgcattttttggtataaaacaccgaaaggtggagaattgacttcagttctctccatcctttccccttaagtgttggtggcgctgcaggggcaacgtgcctcccattggaagtggtgacttcctctttgatagaggtttgcctgtctcttgaaaatgaaaagaagcggagattgatctctggagtcccatggtccagtttggactattgggaatattttttatgggatgttaaaaacaatattagagacgtgagatagtaaatttgtggtaataccggatccaggaagcttacagtgaagagtatgaacttaacctgaaaagtatttctctgttctataaatctctcagtgacatttggattaatcaagcataattaaatgtagttagatttttgtcagattgtagttcaaaataatattcatctatggagagggtaatatattatgtagaaattttattaagcactttagttaagcaaacactaaggagaacaaaatcaacctcaggaaggttaattactaaaaaaatcacaaagtatagtagattatgtaaatcattttaattttgaataccatggcttgagctttaatttacatagagacgtattttggatttgtttttcacattatattttctagtacaggattgcaattgcattcttgaaaagttctactcattttaggattccattaagtttgcttaacttttttcatgttataatttccaaaagcaaagaattacaattgtattctagctaattattttaatgtttcactaactttgtgtgtattgtaagaccatatttttatttctatacaaatgatgattttaagagaagtatcaggagagagaatgtatatgaaagcatcgcgtccacgcctggctttgcaataagtgttcatttaaaagaaagacatttacaaaggtaaaacataagagtttagactatagcgataaatc

SEQ ID NO: 397006 - DNA, 976 bp, Homo sapiens
ctgccaagtcttttttaaagaatctttagatgtcctatctcatgtatcagtgatgactaactgctctcatacagctttgccaccaagcccaaccgtgccacaagcaaaggaagaaacctcaaaagaagtttattaactaagctgaacatcacttccattgaaaacactgtagaatctttagcttctccgcaaagtagacttattatttactttaaaatactttaatgatatcctattccaatcaaagtaagtaaaaggtttaaaggatgggtcagccccactgggatccaacctacatatgtagatatttaccttttcccacagaatctaacaggattgctatgttagatactttgttaaacagataaactgtggtcttccgtatctagaaggccttcttctttcttcttccactatgaaaggatctaagaaaatagttttcgatgtaagatatctcaaatatattcacttgaacaggactggatgaggcaaggttaatgtattaccatccatatgcattagtgcattcctgctgatacctaaaggcaataaattcccccaatctgcccatccttttccaccctgaagccactaaagatgatatattagagggcagctgactccgatactaatttagaagcagctttcatgcctagctgagatcaaaatgaataattgtgataaaatagagcagtgacatcgtaaatataactgatacaaattggaatttgtttttgaaaaagtttccaaaacagatacttttactatagaacattataaaaatagaaaatgagaatgaaatctaagaagttatttttaatacaatctttaaaactcttattttgccagtggcataaaggcagtaagtggctggtatggtttggatctgcatccccgcccaaatctcatgttgaaaggtaatctccagtgttcgaggtggggcatggtgggaggtgattggatcatgggggcagtt

SEQ ID NO: 397007 - DNA, 251 bp, Homo sapiens
gcatttatttatttttattgggacagttgtcctttcttattgatgtcttcatgacttttagatatgtaaacatggaccattattgtatcatatataagaaatattttctctgtttggtaatttttctttttaactttgtttctggttctagtcttatttttagtgactcactcttgaatataaagagagaaccaagaatcatcagacatgtggagaaatgatgtaacatgaaaagtaatatcaaaacaaag

SEQ ID NO: 397008 - DNA, 259 bp, Homo sapiens
ttggagcaggattgagagtgcctggtatgtggagagacctggctgttgtggcatgagtccgagggctcaggggccggctgcttcccggcctttgtcttccttgcaggaaacaggccaggagttacaaggggccagaggatgctgctgtggttatggtggaagttaacagctttgggaagtgtgcatgtgtgtgagtgtgtgtgtgtgtgcacttgtgctcattgtaaagagagacggtaaagaaatgaggagagactgc

SEQ ID NO: 397009 - DNA, 263 bp, Homo sapiens
ttgagcccgtttggtgctcctgacatctcctttcatgtaatgaaagctcagtctgtctaacctctgttggaaccagggtttgggcaaatattattgctgccaccttcatttgtttaatgcggtggcttcaaaaaccatgggcaaaaactgccaagtttgactcccatctccctgtggtctccatgaggggcatgttctaaagaagcccaccaagaacagaaataatttttcccacttgcttagtttaaactgaaataaacttg

SEQ ID NO: 397010 - DNA, 1357 bp, Homo sapiens
tagtaaccaaacaatagttttaaaacaattacatatgatttctgatccattaaattaaaaaaattaaagtataacatcaatgctaatactccattgttggctggaaagtagtttggcaatatgtaccaaaagctttcaaaatgtttattccctttaatgtggagtccctatactcacacagatcccagagtccaagggcctggattcaaatccagactcctccatttatcaacgatgtaaacaggggtaatgtaaaccagcacatctcgatttcctcatctctaaaatgagaataatcataatagtacttacattattggattactgtgatgattaaatgaataataggacttttgggaacagtgcctagcaaacagtggtacaatataagtttgctaaatgaatagatttatctattttaaaaatttacttgaggaagctaccaactgagaaaaggatttatgcagaaaattgtgtattatagtactatttataatatttataatagcaaaaaattaagagctataatagagaatgattagctatttcatagaaaatgaaattaatgaaatgtgatgcagtcattaaaattatgtttatgaactttgtgtaataatgttgaaatcataattttaagtgaaataaaaagcaaaatatataccagcatatttggcatattacaataattaaattacaataattaaatttttatttaaattacaatagatttagattacaataattaaaaagaaattttctttgctttggaaggaagattagataaaggattggaaggaagtcagccaaaatgttaagagtagctgcttacagatagtggagctataaacgatttattttttaatgttcttctctattttctatttgtttttaaactcagcattctttagttttgtatattttttaattcacatttttaaggtagaaagtgatactttgtgtaaggatttggaaggcttaaactcatggtataattaaccaaaatacatcaaatttaataattcttagatatacaaacttcagaagtcatattctgagataatttctttaaatattaaaattaagagaaaaaaagacaggctcttaagcagatgcaaaaatacctatgttacaagcctgcacattctgcacatgtatcccagaacttaaagtaaaataaaaaaaataataataagatcatgccagtggtttttaaacatactttatgtatttaattgaaaatcacatctcctttaccttctttcagcatatattgtacttaaaactctgaacattagccctcagaataaggaaatgaataataaaaaaagcaaaaatagaaaactctaaaataactgaa

SEQ ID NO: 397011 - DNA, 202 bp, Homo sapiens
acgcatgtacacagaggcctacatacacacaggggaagaggacatgaatcgctgacccccagtgagctcactgcctagcacggagcccgtagcaacagtgtagtgagaacagcacccatgaagagatgcggaagctactgtaggaatgggagtgagctagccatgctggggcagggagccacagccgcgctcagcctggagg

SEQ ID NO: 397012 - DNA, 410 bp, Homo sapiens
taatggtagaacagttgagaaggtgattattgtagggagtggaccattgcgcttcttttatggggtggtgagggaaggaatcttctaataagaacttatgtctttggtcccaagtagctgatgagaagaggactagttctgtttgagtctcattgagtgtaaaaaagctaggaaaaacgttaaaaaaaacacgacttgaaaaaaatttgtattacagcacctctttttgaagtgccatctcatttatcgtgtattgttggaatacatagttaactggtgttttgaagtgcttttgccatcagagctcctagagcaaatggataaggataaaatctgacttctctttctctttaataggcaccgtttttgttcaccattttctgagttctggttaggatttggcgacagta

SEQ ID NO: 397013 - DNA, 380 bp, Homo sapiens
aatttaatatactttctgatgaattctgtcacctaaaagccaccacatagttccatttctgaggcatattttatctaattctcctacctggattagtcctttctgttggtacctatattcaatctataaccagtgatattgtaactggcaagactgaaactcattttgaaatgtaaaaaacactggaaggagcccacaaggataatttagtgagagttctctcatcattttatctgctgtagttctaagaagtgatatggtcttagcaactctggcaagcaatttctggtttgattaagatttaagtcacatatagactgggcgtggtgtctcacgcctgtaatgccagcactttgggaggccgaggtaggcaggaggct

SEQ ID NO: 397014 - DNA, 306 bp, Homo sapiens
gtgctattattatcctaactttgcagaagagcaaagctgaggtttaggatggctaggtaatgtatccatggtcactattagtaagggtcaaagccagggtttaaacacagacctgtccaatcacaaagcctatgctttaactagtatgttacactactaggtagttacttcagtgaagttaatgtatgagaatatttgagtagctcttcctactaaccaatagattaacatacaaataacagacatacacacacacatacacattttgaaatgcaatacattactatggcggttatatcttatttg

SEQ ID NO: 397015 - DNA, 400 bp, Homo sapiens
gcagtggcaccatatggttggacgaccaaactcaaactccttcttcagcctcccaagtagctgaaattaaaggcacccaccaccatgcccatatatatatatttaattttgtacagatggggtcttgctatgttgcccagcatggtcttgaactcctgacctgaagtgattctgctgcctcgaccttgcaacgtgttgggattataggcatgagccactgtgcccagcttcatccactattttaaagacaaaatacaagtgagatcatcaggcaagaaagagcataactttcagactttcttcttttgtgccacatacacatatattcttgcatctcttcctgccttaggggaacaggtgtttcttctcctgcctaatacttaccccatcctctccaatc

SEQ ID NO: 397016 - DNA, 492 bp, Homo sapiens
gaatgttcatgagtcacaggctgggtttctgattggcattgagatcaagcaagaatttcttaaaaaccaaaatggctcataagagcagatgtgtattgattctgctatggaaagaatggcccagtgtttaatgacacagtgcctaaccttgtttataagaaaatcatcaccaaagctgctagactgattttattttagtaatctgagttggtttataactcattaacacttatgagacacttattatgtagatggtactgtactatttgggggtggagggggaaaggaaagaaaaatagctttcaaatagtttcctatcacatagtaatcataacttttagtaaggcaagacaaagataaatcaagcaattaaagggaaagaacttttctgggaacaataaggtcaaactaaatggggatttcattcattctgtgcctttctgaatgcccttccctgattattgacctagaaataaaattgaaattgggcta

SEQ ID NO: 397017 - DNA, 485 bp, Homo sapiens
agcaatgagccgcaagccttggactcgcagagctgccggtgcccgtccgagagccccaccagcgcggctcacgcctcagtctcgccgccccaaggtgggatccgacgcccaaaggagggcgccccaaggtgggatccgagcgggccgccctaggaggagtgaaccccgcccgggcgcacagctccgtgcgcctgtcctccctcctccagcgaaatcacacccgctttgcctcctcttgcagcaccgcgcgtgcctaggttctcggtctgcgcagctgggagtctccccgaccagcgccgcggagccgcccgcttccgctccctctttccgcgggtttgagcctcccgtggagaggaaaggtcacgaagtttcaaaggtgaaatggattttcggcggtggctggtgcgggagtcaatgggcagggcggggcaagcctggcagtcatcgacccgagcagggacccggctggccgcctccccttgcag

SEQ ID NO: 397018 - DNA, 593 bp, Homo sapiens
agaactatgtaccacctaagacaatggccacttgacactcagttttgtatccccagcacctgcttagccttatgtaaacacttcatacatgttagttgaataagtttccggagatgaggaaaggctttttggaaagaggttgtttgtgctagatgttgacagatggactggatttagatccatatctttctttccacccaagggcttatacgaccaccaacatgattaactttaacactgcttaactttgatacctccaagcattcactgctgtttcttttacataaactcttattttgtactaaaagtcttactctacatttgcaatgagtattaatttgtaagttccatccaatctttttagaaaaaagttgcagtaaaacttataaaaacacaagtctattaccctagattatgttttccttacttttgtgagcaacaatgtattaaaatcaaactttatttcacttttgagatacatatgattatctccaatcaaattatcttcatcttgaccacttatacatttattttgccccctatgatataaaacaatttgctggcctgttctcatgagactacattaaggaaaa

SEQ ID NO: 397019 - DNA, 474 bp, Homo sapiens
agcagaaaagtgatattgttctcaacatgacagatatttgagttcctacaatgggaaaggcacattaatgatgtttttctttattgcctataattatggttcgatatactcaggaaatctcttgagagagatatctaacccttctcaaagatggcttgaaatgttcagcacttgggagaggttgtcatagttaaaattaattaggaacaagttcatccaatagcaagtctctcaggaataatctaagagtgcattcctttgttttcactctatttgcagacagaatgctagtaacagactaacgtgtaatagaaaaagattgagtatcattagcaacgaatcatagttcagaatctctgcaatctctaatagtgtgattttaaaggcctaatctaagatattttacttgttctttagggaattacaaaaagcactttatatacttgtttgtgagtttggggcttaataaaattg

SEQ ID NO: 397020 - DNA, 301 bp, Homo sapiens
attggccatttagtgccccctaccacacctttatatgccaggccagagaagcctgttttggtgtatttgggaattcaaattctacaaaattcttggttaggtgtttctaggctgttagtctgaggatgcctgaaatgcttggttaggagcattgaagttgatagtggagtgccttgaaatcgaaaggcacaatcctgttcagctcttgtctttaccacgtcttagctgtgtgaccactgagcctcagtttcctcatctgtgagatgggcatgacactaacttcaagaatgagagatggggg

SEQ ID NO: 397021 - DNA, 557 bp, Homo sapiens
tgtttcaaataagcatggatatagtgggcaagattgactatggaaggctgtattgagctcttagaaaatggtagagggagaaagtttgatttatacattgtacataattttagggggcaagaaaggaaatatggaatgatattgctgtagatgtttcttcattttggccactagatggtgacattgtataaaaacagcttggttgtagaaggtaagatactcaaaatttggtgtgggattggatagctgtatttaacaagtaagcccaagagtgtcacttaatttttttatattcgtcattcagccttgtagcatttttggcgaatttattgaacttctctttttggtatttaatttatatgtgtatactatcctgaagtattttgttaatatctctgtgcctagcatatttggtgatgataaactatatacgataaacaaatacttaaacaaatgctacctgccctccaaaaaattcacatagcaaaaaaaactagttgatatatttgatgtgtctaagaaacatatttaagatacattaaacaaaatagaaattt

SEQ ID NO: 397022 - DNA, 264 bp, Homo sapiens
ataaagtcactggagcaccccaaccttgtttgcccagctaagattggaaagacccatgcctggcctaagtttatacgcaaggacaaaaacttcttcattaatcatgtggattaaagatgccgattaaaggatccatcccctcattctctaatcctgtctggctcagaaaggaccatctggtcacaattataatttcagatacatttattttgtaactatcaaagttattaaataatattaaagaagttttactaaacagagaaa

SEQ ID NO: 397023 - DNA, 122 bp, Homo sapiens
tccctggatctgatcattgcacagttctgtgtctgctgtctgacagacactgtgctaagtggtggggacatagcattgaagacaaatgttttccaaaccttacatagcattggctttgcatt

SEQ ID NO: 397024 - DNA, 185 bp, Homo sapiens
gtgctccccaccttcctctcttgattgagtcatgctcctagattcagtcattgagaggcttctcttaaacactgcagcatgggaccattcatctaccaaccttccccttccttgaacaataactagtgctgcaggctggttggactctggggagtgtggccctgcgtatctggcagtttggttat

SEQ ID NO: 397025 - DNA, 483 bp, Homo sapiens
cagttggaggtgtgtccagccgagattataccactgcagggaacttgacgcatttcaaattgcgttatgtctgttatcctctaacaacctgggcaagataatggatatgtgtggttaactccaatttcatgataagaaacatataagtctcagagtgcataatttcttgctacaaaatttggtgatggaagcaagccttgctgctttttccagttagccatgactgcttttcagcagtactccagtggcatgtgaggggaaccttggaaaccataatgttggcatttactcatgatagtttttgggatagccagtgtgtctgctgtcatttaaaatactgctcttgggtagtttacttggtttttctatcctctggaatgttagggaaaccattccaaggtcctggaaatacaacatttctcccaaatagtccatttatctggcagaataaaatttccagtgactcttcaggatgatatctga

SEQ ID NO: 397026 - DNA, 375 bp, Homo sapiens
attgtttgttttgtctttcccatgagaatgtaaactatacaggagcaaagacacagtgttatttattgttgtgccccagcacctatgacaaagtcaggaacatgataggtggccaataaatggtttgtgagtgaattaatttacattaaaaatgtcagtctgaatttacccagatcctctttcagttccaaaatataagccatggcagccatcacaagaatgtacctcatatacctgtaagacataactgttcttcttaatgcaggccagaaatgaagccagaatccaaagctaaaccaataagaatgagagcaaatactgctatcacccagaggggtgttgaatctggatacagctgcttaggggtttagggct

SEQ ID NO: 397027 - DNA, 455 bp, Homo sapiens
ggttccttgggaatatttatgcttttggtatgttgaagatactaaagacataatttaggtgttacaaaatgatgaaagcgaggggaaagaaggaaagtatgattttgggagatagtttgaagtaatagttttatgcagcaaaatatttgagaaataaaaactgtattcagaagattgagaccagaccacaaaaaatcagagaaatctctgggtttctgtaatctaaccattacacttacagaaaaactagatgatatagtgatagatgtttgatatgaagtcgtgctgtataatacaactctacagattattatatcaagtcatttatgaattttactccttatgttaaaagctgaataaaaagtagctgtaggataaaaggaacatttcctctgtaaatcttttccttacattattctcgttagcatggaggacatggttcgtgaatgttctat

SEQ ID NO: 397028 - DNA, 501 bp, Homo sapiens
gcaatcctaaattaaataagttactcatagtcgaataatttgaaaaactgaattataaaggaagaaaaaaagttttcaatttttaacagcaaaaattctacttaatatgggattatggtttggggtaaatgaaatctacaaatgttcaaaaccaaaagcctaaaaagatctaaaatagtctcatttctctgcttcaaagatcagtgaaattgctacctgagttcatccatttcacagttgatctgcatgggaaattatatgtgcttctctgatttttctttggatgtgtcgcttttattctaactgctggaactatttgttgtacctctttctgaagatcagtttggggctaaattacaagctccatcagcgcaggggccatggctgcctcctgactgctgtaggctgagcacttggtagagcatcagcccacagatagcagcccagtgaaccaatgaacaggtggaagcaagaatcaaagtgttaaatgagagttaacct

SEQ ID NO: 397029 - DNA, 549 bp, Homo sapiens
cacatgaatgaatgcatacacacaaaggaattaatgcacacaccaagggatgaatgaatgcatacaccaaggaatgaatgagtgttcacaccaaggaatgagtgagtgaatgaatgcacacgaaagaaagaatgaatgtgcacaccaagtaattagtgaatgaatgaatgcacacaaaggaatgaatgagtgaatgtacacaccaaggaattagtcaatgaatgcacacacacaggaatgagtgaatgaatacacacaaaggaatgaatgtacacatcaaggaattagtgaatgaatgcacacacagaggaatgagtgaatgaacctgccacttgtggagagtgaaaaaagcctgagagatccccagatgagggagcccccatgtgtgcccctgccgttgagaggcctggacatgctggtgcatggtgtaagggcttgggcttgggctgagctggctcacaggcgacccatcaagtgtcacaaatgaccttgaaccgctgccacaaatgaccttgagcagcacgcttcccctcccgagccttagcctcc

SEQ ID NO: 397030 - DNA, 336 bp, Homo sapiens
catatcatccccattgtgcagaaggcagtgtcgtgcaacttaactaccccatcctcacgtgggaagtggcatcatctcagctcaccgcaacctctgcctcccgggttcatgcgattctctagcctcagcctcccgagtagctgggattacaggcgcccgccaccacgcctggcaaagttttttatttttagtagagacggggtttcatcatgttggtcagactggtctcgaactcctgacctcaggtgatccgcttgccttggcatcccaaagtgctgggattacaggcgtgagccaccatacttggcctcatctggcttttcttagatttccctt

SEQ ID NO: 397031 - DNA, 200 bp, Homo sapiens
cccatttccttatggattcatagccaatcagctttccagaatccccccaggaacagctggcacaggggaacacactccagggggaaggtggaagttggccaagccaaagagacccctagaaagacacctccctgcaggaggagggaagagctgtctgggaagctgagactccccgtccgggagaccccgttgttgactgg

SEQ ID NO: 397032 - DNA, 606 bp, Homo sapiens
tccctccatccgcccctcccccccacctgtccccaccttcccttcacacccatctaggcggagtgaagacttgccctctgcgatgggcagcactgccagggcgccctagccgtcgccatggtgacgcgcatcccaccctaggtcagagctgattggtcactctatccaggctggcggagggggcagccaaagtcagagcgggatggggggagctggggacacccagccacaccatacacgacagatgccaagggggaaggaaggccactaaaatggcgccgcggcctccaaaggccgctgctgtgggtgcgcatacccgggttggagaaatcccggcggttctgcaccgcgcggcctcgcctgggccctggagggcgcatccgtcccgcctgggctgtcccgcggctcatggccaagcgctccttgcccagcccggaaccgggcgcccgagccagcgaacaggccggctcgccccagctggccgagcccgacccgccgcgcgctcgggccaggcgagcgcggcgcggcggattagccctgagcccgcagcctcgagggcgcggggcgggcgcgtttggggtatgagggcggggcgggcggcggccg

SEQ ID NO: 397033 - DNA, 498 bp, Homo sapiens
ttagcaacctgagcgccccgcccaggtgccttactattggtctcgtggagcgggatgggcagctctgccgtgcaatcccagctcgcagcccttgccccgcgtgtactcacgggaggactcgcagacgttactgccctcttgcgtgccccggccacccccgggcggcttgtagccggtgcgcggggtggctggggctacgtgcagagctgtcgcggagccggaacagcagcggtgaagcccctcggctcggccgagaccgccgtgcccattgctcgcctcggttgccgccgctttagccgcagccgctgctgccgccgccgggggagaggcagcctattgtctttctccgcggcgaaggtgaggagctgtctcggctcggcccgcgggggagccccgggagccgcacggtgagagcgcaacttagttggcggagttgggggaagttttgtgatttgaggaggggtcggggtgcggagcgcggcccgtcccctgcggccg

SEQ ID NO: 397034 - DNA, 538 bp, Homo sapiens
ctatataaattgaaaatacttgtctatagaaaagtagaaaatgtcatgtcatatgtgaaaatgctgtatgtaagaaaataagttatcaatactatattaatccactttatgacataatgtaaaagcatagacttaatacacattttaagtctatttttaagtttgattatgtttcaaaaaaactcaattaaaattcccagtcccagtgtaataattgattcaggcaagggtcagcactggatattacaattattggataatttttagagaacagaatattcatgtggtaccaaagtattactccagaaattgcttagtaattataaagagaaaaatatatgttttccatagagagaaactagcagtcacctcttaaccaagtgatgaaatgtagcatgcctaggagtaagaaatcttgacattatgtgtctatcgatggactatataaagtttatatcacctatgacatttaactcaatgtaatcacatccctaggtctaacctccagtttactggaaatacagggaatagagagaat

SEQ ID NO: 397035 - DNA, 132 bp, Homo sapiens
gccttggcaataccaccttctaagctttcctcatggatgtcatttaccaatcccctatcaatgaccaatcacagctccacattcgttatatagtttggctcttgattcacaaagttcctccatcgttatggg

SEQ ID NO: 397036 - DNA, 570 bp, Homo sapiens
agttcaagaccagcctggcaaacatggtgaaacccgtttctactaaaaaaaaaacaaaaatacgaaaactagccaggtgtggtggcacatgcctgtaatcccagcttcttgggaggctgaggcacaagaattgcttgaacccaggaggtggatattgcagtgagctgagatcgtgccactgcactccagcctgggccactgagcaagactctgtctcaaaaataaaaatgaaataaagagaaaagaatcaagtcataccactataaaaatacaacaaattgcaaagaaagtgattggaagtgaggaataagagaaatataaactagctagtaaaaaattaacaaaatgccagtagcaagttcttacctatcaataaccactttatatgtaaataggttaaattctccaattaaaagacacagagtggccggatgaattaagatccaataatatgctgcctgtaagagattcattttaatcttaaagacacacatagtttgagagtgaaaggatgacaaaagatagttcagtcaaatggtaaccaaaaaagagcaggggtggctatatttg

SEQ ID NO: 397037 - DNA, 358 bp, Homo sapiens
gtctgaggagcacgggcttattctacaaaggcataaagatgcactggagggtcttaagcaggggaatcctgtgtcccggattgtgctctgtgaggacccatctgtctgcttcgtggagaaggcgtagagccgggtgagggccaggacagaggcagcgcacacactgggctgtgtgacatcctggtgcctgcactggggaaggctgggtgtcacctgcagagggctgattcgagagatgctttgagagtggccctggtgagacttgctgatggatctgaggtgactctcaaaggtgagagaggaggcagtgatggcagctgggtctgtttcctgagatggggaggccagagctttaaga

SEQ ID NO: 397038 - DNA, 171 bp, Homo sapiens
ctgctaacatcacaaaaagagatctgtatcacctatgaagtagtttaaaaaaatatcaagcctgagtctgatcaaacttgtagatccaaatactattttataggaaacacagaagatgggggcaatgtttaactataccataaggatgtaactagcaacatgggaggaatt

SEQ ID NO: 397039 - DNA, 163 bp, Homo sapiens
ttactacccgtatcccactgcccaaggaaaccaccagtttctgacagaatatattctttttgtctgcttttgtactttatataaatggaatttataatatgtagtcttttatatctgtcttctatacccaacctgtgtttgtgacagtcatctttgttattgt

SEQ ID NO: 397040 - DNA, 461 bp, Homo sapiens
caggatccacctcaggaccagcctgtcctagcagttttgggggtagctgcctgaccaagcatggagggcaggggcctgtgcacacaaggggaacccagacccacaacttcagccctctgcctccagtgatgccctgaccctgacctcacaggtccacagggcccacccagggcccagacacccccgaccaggacacctggaggcctggtgtagggtggagaaagccggccacactggcgggcccccccagaggatgtggctgcaacaggactgggtcctctgtggctcaagccacttgcccaaaaggcagccaggctgctggggctgcagagcctgggggacccgcaagcgatgtccacatggtttcccaaaagaggtcctggtgatgacacaaggccgggtccacctctacccacagacactgtcacggtgctcatggaccagactcgtgggctcgcgga

SEQ ID NO: 397041 - DNA, 1049 bp, Homo sapiens
actgcgggctgggcatccaaaaaaagtttttttttctgttttataagtgcttcttgcagagcagggctaacccataatagtacacccagagtagccagcatccaaacttttaaaagttcccctggtagccctcgtgtgtcaccaagtttgagagccactcttccttaccctttctctaggtaatttcatccctcgtatggcttcagttacagtctgtatgttaacagttcccaaactaaattactgtcctggtcgctgatccttatatccaactgattaattagcatttacactagaatattgtacaggcaactcaaactcagcatgtttaaatctgtcctcaaaatcgtacccctcacccccggctttttcagtactttatctctggttcaccgaatgataccaatgccctggttgtggaaactggagactcgagtcctgtagggaacctgcctctcactcttctatatctagtcaccacatcttgcctctttgaccttctcaacgtcactgccgcactccggttcagcctctgtcatctccagcccagtatccttggttacagatctctccgtaactgttcatgctcccttctaatttttcttcgtattgcagtcttggtgatctttgaaaaatcccaagctaattgtgttcctctcctacttaaaaccctttaatggtttcccattgctcttaggacaaagaccagaacccttgaccctggacaacaagaccctgtgtgtggctgttctccatctctctatagggtcaccttgtggtgtgcttttctttgctcattgcactgcagcctcacagattcttcagttggttgtattccttcctcttagagggcttttgcatatgtggttcacttgtctaggaggctctttgctttgctccctggcttttggctggttgctttaagtttcagtctgaaagtcacttccttggaaaagccttttctgatcccttcaaactaggccatgtctcctcattaaactctcatagccttatgtgttttccctgtgagcacttaaagcagtaaacac

SEQ ID NO: 397042 - DNA, 202 bp, Homo sapiens
caatatcttccctaaccaatgccatcaacctgctatcttctgaattccaatggattaaaccataggcctgccaaaaagtagtgaaagataatcaccaaaataatttcattgctatgacagagccttatggcgacaacctccattctttaccaacattttctctatccctaactttcctcttgcagtcccctaacccccctcc

SEQ ID NO: 397043 - DNA, 368 bp, Homo sapiens
cacgtacttgtcccccagcttcaacagttacccacgtttgcccatcttgtttgatgtactgccaccccctgccctgtagcaaatcccagtcttcgtgtctcctctgtaaaagcatcagtgtgtatctttaacacataaggatataagtgctgccatcacatccaacaaaattcacaaaaattccaggatgtcatctgaaacccactgcgtatgcgttcacacttacacttctctgatcacctctcaaatgtcttttttgcaagtggtttgaattcgtcctgtatctaaatacggctgcacattgcagtttgtcgaggtctttcttttcttttctttctttctttttttttttttcagtcttgctctgt

SEQ ID NO: 397044 - DNA, 664 bp, Homo sapiens
agattaaataaactagataaaagccattagaacggggcctggctcagttagcactcaatacattagatagtattttactaaaagtgaaaattaccaaatactctaatccaatgtgaactatttagagccatgcttgaagggtcaactttggaaacagtagctgagataatacatatgaagagccatttgaaaaggtaaaagcagttaagaaaaaaattacattacttttgaactgtgatacatacaacacagctaactgaaggcagctgtagtatcttttgactgagaattttattttgaaaaaccgttattcacacttgtcactatctttcaacaaaacaatgagttctatcatttccaccaaacacaaacatttctctgtacttcaatagggctaatctgttgtttttgaatcaaaaatacagagttaaataactaaaagtataactggattgtttgtaacacaaaggataagtgcctgaagggatggataccccattttccatgtgattcttacatattgcatgcctgtatcaaaacatctcgtgtaccccataaatatatacacctatgtacccacaaaatttttaaatttaattttttaaaaaatcacggttaagtcttggttcagtccaccatcagacagtcctaataggttaataag

SEQ ID NO: 397045 - DNA, 664 bp, Homo sapiens
gtccttccttgcctcttccagcttctggtggccccagatgtcccctggcatgtggcagcatccactttccatgtggcgttctctgtgtgtcactttgcatagtcttccctctacgtgtgtctgtctctgggtccaattttccccctttcataaggataccctaatgacctcatttcaacttgactacctctgcaaagaccctctttccaaataagatcacattctgagatactgggcgttaggagttcaacataccattttttggaggaacacaattcaatccttaacaataacattttcaaattgacaaaagtgtagagatagcaaattagtggttagggatggtgggtgttaggggttgttgtgactataaaagggtagcacgaaggagatctttgtgatgacagaatatttctacatctcaagtgctgtgacagttacatacatgtacaataaaatggcacagacctatatacacattagactcatgtcaatgtgctgattttgatattgtgctatagttatgaaacacctaattactgaggaaattggacaaaggatacatgggacctctctgtactgtctttgcaactttccgtgaatctatattttaaagtatgacatatgtatatggacatactcacactaagacacacaagcagtt

SEQ ID NO: 397046 - DNA, 362 bp, Homo sapiens
tgccatagagtccctgtcctggattccatgcctgagggtgtcccattctggctttctttcagccttgcccttccatgtgggttgaggatttcatagggccaaggggatgtgcacaccctgccctctaccctctagtcttatgcactagctacacaagaccccagaaataggccttacaacaagcctgtttcccaggcctgctcttccaagagtaggctgcatccctgctgtgtacttcctaggcctaagggatagctaaggggcagctgtttggaggggatagttggagcttagatggagttggaccttcagctccacatgcatatatgcaaagccctgatatataggccagggccagaggt

SEQ ID NO: 397047 - DNA, 677 bp, Homo sapiens
ggacagagcctaaagcgtattactttaacacactacgtgtacaagcaaagctacaaacacctatggagtaaagctggtcaactgggctgaggccagtccatttttcaagcttttataaagattacttcaggtgacaatttttactgaaaacttgttttgttttggttaacagtagtgatagatttgtagataaactgaaattcaaatgcttattcatgcttcaataaaaccccttgataggttacgagtttcttcttgagaatagatttccttactgtgaactactgagtatttcctgttttaggtcagattgtaactaccgcgaaatgatctattagaaaaatttgggtccttctagtgccagaggaaagaaatgcacaattaaatacactcagatacaaaaagcaactgaaagacaaaggagaagagaatagagaagagccttatggtcctgacattttatttttgaagtgtaagaaaatgacatttgagattttaatgtggttttgtctgagctcaatctaagattttacttatttctacgtaacacgtcatcattagtttcagctgacctcattgccacatgcatagctgagggcttgtggaaagaaatcacagggatttccagaaaaggtgacctcaccacagaagcacaggagcaaggagaccgaggaagg

SEQ ID NO: 397048 - DNA, 484 bp, Homo sapiens
ctaattttctgcaccacctcaaaatatcaaagaaaactggggtgtggtagccaccgcaaggacctccagtgcacatgtagctaaacatacacaagtgagaccatgcttctgcgattagaggcttcttccttcactgtcatgagcataacatggtcacttatgcatagtccttagatcgtaatcagaaccccaagaaatgtttgctgactgaataatctttcatttgttcaactgaaggcagtgtcatagtggccagccatgcagcctgtcacttgaagaaaagtgcttgaggaagaatgaacatttcgacattacttcttgctgatctacaattttaactctatttgtacagccagataactgagtacatgatttacaggaataaatgagagtcacctgtggctgtacgtttgtgtaagtccacatactttttacgtaggttgttatatttatgaattgggtgatgctcacagatcttggttac

SEQ ID NO: 397049 - DNA, 165 bp, Homo sapiens
tgaaaatcattccatgtgagtagaagtagaactgcctcattgtttctaatgaccgccacatattttgctctgcagatgtagtataatttagctaactggtatttttctgactgtagtcttttttctgactgtaaacccaataagaggttatatattaatattgac

SEQ ID NO: 397050 - DNA, 486 bp, Homo sapiens
tgggagctattattattaataataatttcaaatcagaatcgggtttttctaagaaaaaaatagatgcctcagggaagaagtcaagattcattaacaaaataaatagccaagattactctttaattcatattaggttggattctgtgatgctgtttagtgtctgtatattcccatcctggaaatctcttatagtcagcattccttggaattgtggtatagattttaccatctcaaattttcatggtttggctggcccacagtggagtaaagacacagatcttgctctgtggaggtgtagagtaatcactaaagagcagatcagccaggcgcagtggctcatgcctgtaattccaacactttgggaagctgaggtgggaggattgcttgagcccaagagttcgaggctgcagtgagctacagttgcatcactgcactccagcttgggtggcagagccaaacactgtctcaaaaacataaaaaataaaa

SEQ ID NO: 397051 - DNA, 198 bp, Homo sapiens
catcaatgagagcggatggatcagacctgagcggggcatatgcacttctgctggggaactcagcctgaacttttggtactgtttctgatggtgaggatactgttactatggacaaggataaacttgaaaagctctcctacaatgtagagaaaaaaagccaaagggatgaaagcaacacacgagaacataatagatact

SEQ ID NO: 397052 - DNA, 152 bp, Homo sapiens
attacaactgttagagtactcaaaacaaatttagagtacaaagtatcatcacaggttaaacagctgtatgaatgtgcaggagattttactactgtactacacagactgggaggtgggggctctagggaaatacggtgtatgctgtataaact

SEQ ID NO: 397053 - DNA, 801 bp, Homo sapiens
ctatgtgtgagttgtattactggagaaagtttttttgttgttgttttttatttgtttatttttttatgagacagagtctctgtctgttgccaggctggagtgcagtggcgtgaccttggctcactgcaacctctgcctccctggttcaagtgattctcctgcctcagcctcccaagtagctgggattacaggctctcatttcttgatacttgggtgaagaacaagtaggaggtctggaggctcaaactgatatgtaaacaaattgcttttattattattatttgccattagaaaaacaggtgaaacagtcatggactctactattcaggaattattattctagagccagtaaatacatggttgaattaagagtaatgtgatcagaatgaagaagggagttgcacagaagacttgggctttatttgggacactgctcttatgttgttgtgagttctgatgtcaccacctgaagggacatcatagacagaagagttgttacaattatttctgttgcttttcccttgttaagaatcgtttctaatatagtttttctagaaagtactacatgttttggttaagtcggttgttagtgtgtcatgcaaaatagagaagaggcttaaaccattaaaatcagaaaaattctgggagtcaagttcttgttggtccagcttagaaaagatagaacacaaaataagccagcagcacagagaagagaagctgagggccaactccctgccccagccctatccagacctatgctctatgagccttgtccaggtctggccccaccctgaaatctcc

SEQ ID NO: 397054 - DNA, 617 bp, Homo sapiens
tctgtgcaaacggttgaatgaatggtaaaaataataacaataataaaaataataaatcagtgtgtatctcctctgtaaagttttgattaatatgaaaaagaattctaagctagtcaaactggtgtattttgtgctgtgaatttgtttttctgtaggatgaaacatgggcttagaacacctgtgagcccacttttcaacatgacccagcaaactggtcagtaacaaacagctgcaggtccctgaaacaaacaaacaggatgaagtctccccttgttttatgtccttgggagcctgaccttttaaccatgtggcagtaccttctcttggtctccacctactagggaaaaggaattttagggttcatgtcatagtcagctctaaaaatcatataaaatagttaaaagcctttgcaagctcaaaattaactactctaggcttctgtgaaaggaagtaggcaccgtcccacactgtagctcagtaactaaggtttctgcactttcacagtggcagtttgggtttgataccccacctaggaagtaagtcatttctggtttaatatctgcgtgaccttgtctagtctcttctcctccgcagactgtcttaaattttcctttctc

SEQ ID NO: 397055 - DNA, 444 bp, Homo sapiens
taccaattctgaatatattgttctgcttgttgaagtcctgtaagctatctttttcattctttttacttctaggattggattatttccaatgacatgtctttaatctcactggttctctctttcacttaatctggtctgctgttgaacacctctactgaatttttcagttcagttattatattcttcagttttataatttctattggccgcttttgaaatactttctatctcttttttgaaattatttgtttatgcatttttctcctgaccttagtgaacatctttatgaccattattttgaattcctcattgggtagatcatacatctccacttcactagggttggtttctgcagatttatcttgatcttttatttggaacccatttccctgtttttctatttcctttgtttctctgtattagtgtccgtgcattacataagac

SEQ ID NO: 397056 - DNA, 342 bp, Homo sapiens
agattgtttcaaataaattatttctgttattcctgggaaaggggtaataatattctatcaggtataaaaattcacactttgtatttttgtctttggaaaaatgatcataagaagccaataaaatattaaaaccaataaaagacaaaggaaagttgctttaaaggagaggagttcataaaagcagtagaggtattgtttattctgttgaaatgtttatgatttttaaattactattaagttttgccatggggaggccaggtgcggtggctcaaccctgtaatcccagaactttgggaggctgaagtgggcagatcacttgaggtcaggagtttgagactagtc

SEQ ID NO: 397057 - DNA, 294 bp, Homo sapiens
aagggtggagttctaaaatgaagaaaggtaagttgccaggagatatgagaaagtcccaaagaagtttcatctgtctttgcccaggcagcaccctggggctcagttttctatgtgattctggatgcttcaaccctacagtagtttgcatgaaatttctaggagcccagccagggacaaatatacagatcccaagtctagactgcacaacttaattaacttgtcccttaaagcagtctcccagacaccgtttggtatatgtgcagtcgcttactgacttgaggtgcaacaccatcc

SEQ ID NO: 397058 - DNA, 440 bp, Homo sapiens
tgggactacaggtgcatgccaccatgccccgctaatttttgtgtttttagtagagacagggtttcaccacgttggccaggatggtctcaaactcctgagcacaggtgatctgtctgccttggcctcccaaagtactgggattacaggcatgagccaccctgcccggcccacacttctcattttgagtagctggggtctggactgtgcattttgactgtactctcttaccctttcagtctatttagtggattgtgtctcacactggctggaatttgtggcttccaacaacctactggaggtaattgcccacaggataaagtgagaaaaaggagcaaaatgggaagatactgaaagagaaactgtctcaatttgggaaggacttgttaaaaagacaagcattgctaattagtagcttagtatctaatctttgtcactgaagg

SEQ ID NO: 397059 - DNA, 366 bp, Homo sapiens
cctggctcggcctccctggctgctctgagaggcctggcccgggctctgcaggcgctggagccagcggaggcatctggatcccataagcttgtcatgagctggtttgagcagaatggcctcaacagcccccagagagcccccctcacccctggctgcactgatgcaactcccatctgtccccagcccacagcagctcccagggatggagagtgtgaatcctcagggagggttgtctagaggccctgggctggacggggatcccatgctgaccggtggacacggccccgaatccccctgcactgcacttgctgctctgttttgcctgtaagcatctcccccatcagaccgagctcctccaggataaga

SEQ ID NO: 397060 - DNA, 215 bp, Homo sapiens
aatcaattcacattaaaaagacttacgtatctctacttagcttgcttaatatatccatctactgctttgaacataagaactacagttataactgatttagtattcttatctagtgactgtcatgtacagttctttttctgtcgattgctttttctcattttaagtgatattttcctgcttctttatatgattttttttttttttttttttttgag

SEQ ID NO: 397061 - DNA, 755 bp, Homo sapiens
gcttgttttacacattattgtctgccttccttttctcagtgggctctttatttgttaaaaaagtgcaagacgtccatgctgtagagattagtgcgtttcgatgtgtgttccaaatgctagttgttatcccttgcttaatatacagaaaaactgggtttataggcccaaaaggtcaacgaattttcctcattctcagaggagtccttggttctaccgccatgatgcttatatactatgcttaccagacaatgtccctcgctgatgccacagttatcacgtttagcagtccagtgtttacgtccatatttgcttggatatgtctcaaggaaaaatatagcccttgggatgctcttttcaccgtgttcacaatcactggagtgatccttatcgtgagaccaccatttttgtttggttccgacacttcggggatggaagaaagctattcaggccaccttaagggaacattcgcagcaattggaagtgccgtatttgctgcatcgactctagttatcctaagaaaaatgggaaaatctgtggactactttctgagcatttggtattatgtagtacttggcctcgttgaaagtgtcatcatcctctctgtattaggagagtggagtctgccttactgtgggttggacaggctatttctcatattcattgggctctttggtttggggggtcagatatttatcacaaaagcacttcaaatagaaaaagcagggccagtagcaataatgaagacaatggatgtg

SEQ ID NO: 397062 - DNA, 327 bp, Homo sapiens
caggttatcttgaactgcctgacttaggccagccctacagaagtgctgtttactcattggaggaacagtaccttggcttggctcttgacgtggacagaattaaaaaggaccaggaagaggaagaagaccaaggcccaccatgccccaggctcagcagggagctgctggaggcagtagagcctgaagtcttgcaggactcactggatagatgttattcaactccttccagttgtcttgaacagcctgactcctgcctgccctatggaagttccttttatgcattggaggaaaaacatgttggcttttctcttgacgtgggaggtgagt

SEQ ID NO: 397063 - DNA, 245 bp, Homo sapiens
gataccttgcacctcacagacacaatggatgatttcttactcattggtagatgtcaagactagacctatcacattactaacaatttggaagtctcttacacttaaatcaatgagtcccaaagtgcacactacttggatgctttcttagacagtttagccagccaattctaggatttctagacaaagtatgaatttccattaggtcttcatgctttagtagactagtattgataggtatacactgg

SEQ ID NO: 397064 - DNA, 566 bp, Homo sapiens
tgaggcaaaacaaaccctggggaacttgctgctccattttccttatgtcctgaaatccttatccagtcatcttgcttttatctgcctttcagagtcttctggtagttgttctatgtgttttagttataggtttttagttgtagttaatgggagaggtgggaggtgattaatccgtcttatctgaaaatggaagtctcatctgtctatctttttattgaaacatggtcttcgggtcgtttaaacgacccgaagacatcaatacctcatgccctgcaggtcacacagtgtaaggaggtgcgaggaaaacagagaacacttggccaggagccaccccagggtccccattgttggggcctggcggcgcagccactgacggatcctggagctgtccggggctgggctgcagtgcaggcatagcgggtgcgtggcttgaggaccaggacagaccctggtgtgggcaagcagggtgtggcccacctgataggacaggtggggtaatactgacagaacgtgcgtgctcctaggggctgcctcctagaggtggctcttcaggactctgacccaca

SEQ ID NO: 397065 - DNA, 224 bp, Homo sapiens
agcctcctttgctggtttaggaacatttctattgagagagagaaaagtaacaacactctaatgtgttcttttttttgctttttaaggaccaggattatggaaaaattaccattaagcttcaacaaaacagtcatctttcatgctgtctagtacagtggctctcgaacattttctgccttagcaaacctgattggctcactgtgtcagggaatctcaccatgaag

SEQ ID NO: 397066 - DNA, 566 bp, Homo sapiens
caaatgttgtctccgtcttctattaattaatcacaatgtccccatggcgaagtgtcctatgactaatgcaaactgtaactgtgtggcatgaggccaacttgctcatcttcctttctgaacaagcctccccagatccacgggggaggctgggtgagtggggagccacttcctctgggtatcagatcaaaccatgaaatctgtttctgggttgggcctcagaaaagaatttctcctggggacatccaaaccctttagttatttttgacacttagtccagccagaggtttggagagttgctggggctaagctcggggtttctcccaactccgcatcaacggtgctgtggaaaaggcaagccagattttccagactggggaaggcagcgcggctgatgcattttcttctcacaggaaaagccaactagctgtcccaaagatgagatcttcaatgcactgcaaatccagacagcacctcctgcaaaaagggactcaaatcctccacatgacaccatctccactgttatcatcccagactgagtgacccctcgcatctgtccgtctgcctca

SEQ ID NO: 397067 - DNA, 372 bp, Homo sapiens
atgtgagttggggtttcaaaatactctgatttaaagaaaaaaaagagggcaagcaaggtggctcacacctgtaatcccagcactttgagaggctgagtggagaggattgtttgaggccaggagtttgagacagcctgggcaacatagccagatcctatttctacaaacagaaaataatttattaaagaaaaataagatgggccaggcacagtgattcatgcctgtaatcccagcactttgggaggccaaggcaggaggatcgcttgattccaggagctcaggaccaacctgggcaacatggtgaaaccctgtctctacaaaaaatacacaaaattagctggacatggtgatgtacgcctgtagtcccagcta

SEQ ID NO: 397068 - DNA, 325 bp, Homo sapiens
ctgacttaatgtttggccagtcagcattcattgtgaatgtatatgcttatctgtgatagggacaatgaaaatccaaatagccaatgaaagaaaaacaagcaaatctgtaccccatgattaatgaaaatctgaccttgatttgcgaacactaaaggttatccaaaaaggaaagataacactacgtactggaatagtcaaaacctcaaaagttgatgcaaaacgcttaatttggcagggcgcagtggctcacgcctgtaatcccagcactttgggaggccgaggtgggcggatcatgaggtcaggagatgagaccatcctggctagc

SEQ ID NO: 397069 - DNA, 208 bp, Homo sapiens
ccctgtgatttggggccacgattcctggcagcgagcagagatttcaatggaaacttcttactcggaagcaggctggaaggggatattgaatgagagacgtagttgagaccagcggaggggctggcttcaatggctcctctgctcttccttgtaaagagaacagcaagcttgctgcctgagaggggacaagatgggaagtgcaggttgc

SEQ ID NO: 397070 - DNA, 626 bp, Homo sapiens
tcccagtgacgtacccaaagcccgaactagagaaattgagacagatccactcagccaggctttgggtcttacccagttttcctcgtgtcacgaaccctcagtttctccctggagagcgtttgtctaatgtggctcagtatcatttgtgaaagggtctagctaagcgtggcttccatgtaagtgatctaagggacggagagtcctcaacataaaactaaatagccatgcttacagcctctctgttctgcttctctttcctcctcccattctccatttcctgcagaagatgaacaagtatttcagtctgttcaggctgctagagcagagtactgtagacagggtgacttataaacaacagaaatttacttctcacagttctggagactgggatgtccaagatcaaggcgccagtagattcagcgtctgcttgaggccccattcttcatagatggcaccttctcactgtcttcacatgctgaaaggatgaataagctcgattgggcctcttatcagggcactcatcctattcataagggctctaaccccatgacagccacctcccaaaggccccacctcctaacaccatcaccttgggtgttaggatttcaacatacacattttgagga

SEQ ID NO: 397071 - DNA, 438 bp, Homo sapiens
agcagcccaaaaccggtaacaacccaaaggtctactgaccgatgaatggataaataaaatgtgatctatccatacaatggaatattattcagcataacaaggaatgcagtactgatccatgctatagtgtggatgaacttcaaaaacatgacagccaatgaaagaaaccagcaaaaagaccacaaactatgattccaggtacatgaaatgtccacaacagggaaatctatgtagacacaaagcagatttgtggctgtcttgggcttggggtttgggaagtgactgctgatgggtattggtttctttttggggtgataaaaatgttctggaattagatagtggtagtggctgcacaactttgtggattcataaccttgtgaatatattaaacactgaattgcatactttgtgtggtatgtaaattataactcagagagg

SEQ ID NO: 397072 - DNA, 373 bp, Homo sapiens
attttctggagaggttcaaacacaggctatttggactagggaaaaatactaggtacagtgaaagtcagggtgtcacactgaaaacaggatctcctgctctcttccctaacatggctcccataacacaagcaatcaggccttcacacttcagccaggagactggaagtcttccctaggtataccccaagagaagtgggaatgacactgaaatggtttccccaactaaatagcctactgagaacaactatagtgacgttcatattccgtaagcccctctaccacccagagcttccaatatactttttagtcttccactctgaaatatgactagacagccaagggttaccagacaacaaaggaaaaaggaaataga

SEQ ID NO: 397073 - DNA, 636 bp, Homo sapiens
ctttactctttagattcctgtctctcatggcttaaatgcttatctgaattttgaagaagacaagattattttctgctaggcgaggtcagaaataactttaacatttaatttaactcctttatcatgtttaattgcatagtaatagatattttggttgaaggtttatacattaaaaaaatacataactgagacatgaaacactttaagtgctcatacctcaaatggtcttagctgtgctctttactaagttgtgataaaatctgtgtcctgacaagtattcatctactcaaccagagcccttaactccctaaagttagtgtggataactgaagtgaattttgtacttagctaggaagatttgtttggctaaccaaggactgtcaacacaaatttgatgttttttggtgtgtgaattagccaaaggagtaccctttctttcctatcctctggactatggccattttagaagcatcttaagtatatttacctaggggaaggataaagaaaaacagaaaataaaagaacttatagtggttaattttttgtgtgtagctctgtattttatttctttccaacatcacaacgatgatgtgaaataaaaactctttaccaaaatatattctcccctccactcag

SEQ ID NO: 397074 - DNA, 587 bp, Homo sapiens
ggagctctgtgtcaggaaccgggttcaaagaccacgtattagtgcaaaagattgtataccccaatctacaagagttttaggtgccccgtgtctggaatcatgggcagagaccaagtatgtatttcttatcgtgggctactatgacagtaatgccacagactgggtggagaaatttatttctcccagttccggcggctagaagtccagggtcaatatgtttgatttctgttctcttgaagcttctctctcagtggcttgcaggtgactgtcttcttgctgtgtcctaacgtggtccttcctctgtgggccgacatcgctggtgtccctcttcctatgggggatactagtcggattagagccccactctaatgacctcacttaaccaattatctccttaaaggccctatctccaaatacactgagggtcagggctttcacttatgaattttggggagggtacaattcagttcatgagactctctcctccaagttgacgtaaaagccaggggacagtgagggggacgggcagttatgaagcatcattaattctccttagaagtgctgcttttcttctgtcagtgaacact

SEQ ID NO: 397075 - DNA, 773 bp, Homo sapiens
acaaagtgcattagtagatctcccatggcctgtgtgtatttgttcctaattgttatctttattttctgggcctgactggagcaaatgtgagtggaactaacggagggggcagaaggaaggtcagaggttggagatctgccgatcagcactgagcccagaggcagcagctgtctggactgactcagtacctgctatgagagagcaggaaaggatggcagacactgcagttagcacagagacagaaacattctcagtctgagtgtgtgttacatgccagacacacagttggttgacagtagggaaaagagaggctgagggtgtggctgggtagctaccaagccgtgagccagtgatgggcagcgacacagtgagtcagaggaagagcaggtctgcaggacacgtcagccctgctgccaggtgtggtgtcagcccaaacagctgcacctgtgggtccagaggtggtcagcggatatctagtttcggtcggccttcattcagcctctggctgtcatggccactgggttactgaaatcatggcttgtttccttctgtatctctccatcttcgtgtacagcttccctttatccaacacgaagtcaggcagattgtccttgtaaggcaaactaaacattagcagaggcaagtacacacacaacaacactcaggaagttagagaacattctttagtcgcttgaagcaaaagggcttttcctggctaggaagcaaaaagaaaacattgtttctaaacttgaagctaatgccatctaccattt

SEQ ID NO: 397076 - DNA, 197 bp, Homo sapiens
gctgagatcatgccactgcactccagcctaggcaacagagtgagactctgtctaaaaaacaaaccaaaaaaagtgtgttctttaaagtagaatatttgctttttacaatatagttctcagaatgatccagttccatttattattctagaatgtggtgcaaactcaatgacattggaagagactctttttgttgggca

SEQ ID NO: 397077 - DNA, 212 bp, Homo sapiens
ctagagcctcagtgttttaatgagctccccagactagtggttgcaaggaggccagtcctgcagcacagcgatcggccttcagaaacacagggagggagttgtgtggtcagctgcattcaggagacgggagttacacaggattgaaccatgttctgcagcaggacttctaggagccttttaaggcgctgagcatcgtctcccaaatttagctg

SEQ ID NO: 397078 - DNA, 524 bp, Homo sapiens
gactcgatttacttcccctagattgtctcgcacaaatcccctgatgaacattctgctctagccatggcagtctattcatgtcatagagatgccttgggccgtctttccttgggtcttttttaatgctcttcccctcctcagatgcttgtctgaattctttgcattcttcaagttcttatgtagcttttcctggctgttaaagcctgaagtgatctttgtattttgtacagtaaataatgacgtgtatttgattctgtaaatatacattaaatattaaatactctaaatattagagttacataaaatttaaagttcctagaatgtgtgaaattactatatcctgcatttctgacaggtagtcatttactctctccttacccattaccctagagcacagcacttcccaagccaacacattgatccatttagtaaaaccttgaccccgtttgtccttttgtcgtagtgtttcttttttctgttttgtttgtttgttttgagacaggatctcgctttgtcacccatgc

SEQ ID NO: 397079 - DNA, 496 bp, Homo sapiens
ccacagagtactacagcagaccccttgctccctgatttcattacataaacagagattgactttatcagtccccaagagagtgctttagaagtaactctagctgctctgttttcaaaaactgtgtttggattgtgccatgctcagttggcgaggtgagctgagaccagtaaagacaaaggacctaaacatctgaatccatttgtgttccccaaattctgaaagccaacagatgtactccatgtgctgctaggctaagctttgaaaatttaaaaatacatattttttccactgacaaacagaaagtgacggtattctgtatttctttaattaaaatccaagcgttctcaaaggctccgggacttactttaaagcttctttaagactgagctatttattttactattagcaaataacagagaatcaagattctaattcagttttaatcacaatctttgcttttattttggaaaccctgagttaatcttttttcttctaa

SEQ ID NO: 397080 - DNA, 504 bp, Homo sapiens
  misc_feature (341)..(341): n is a, c, g, or t
gtcccaaaagcaagtaggagtagctattcttatattagacaaaacagactttaacaacaattgaaaaagacaaagaaggacattatgtaatgataaaaggactaatcaaacaggaaaatatcacagtactaaatctatatgcacctaacactagagctcccaaatgtaaaaaacaattaccactagacctaacaaatgagatagacagcaatacaattaatagtgggggacttcaatactccattgacagcactagacgggtcagaaagtcaacaaagaaacaatggatttaaattataccctagaacaaatggactcaacagatatttatagaacattcnacccaacaactgcagaatatacattctgttcatcagcacatgggacgtcctgcaagacagaccatatgataggccacaaaacaagtctcaataaatttaagaaaatcaaaattatatcaagtattctcagaccacagtggaataaaactggaaatcaactccc

SEQ ID NO: 397081 - DNA, 421 bp, Homo sapiens
ggtagcgtgcctgttccctttcagttgagactgttgaagccaaatttctgggtgtttaagtccctaccatgtgccccctgggcccagcctcagagggttcactcttagtaagaagctcacgtatggggcactgctggccatggagtgcccgcgtgggccttgagcctgggctccatctctcttcatcttgcacgtgtggaaactgaagctcagagcagtgaagcgcccgggtcacttagctagttgtgaagagctgaaactggaatccgggattcccgatacctagcccaagagtctgggaactgggagaaggcagaagctttggattccttcagtcctgggttcaggttctaaccctgacgctttctagctgagtatcttcagtcaagtcggtttccccttctgagccttaatttcttca

SEQ ID NO: 397082 - DNA, 308 bp, Homo sapiens
gtcagctgctatttgtgctgttacgtgttcatcaccagctttctggagacacaaactcagtattcaattatacacttttttttttttgagcttccagagtgcttattgcaaaataacaaaaagattttaactacctgtaccatggcagacctgtgcagaccatctctctgttctgtcagcaccactcagccacttcatgtcactgaacctgcagttttccaccagctgcgggaggcccagcggtgtcttgcgtccggcaggccatggcttggaccacagcacagctctctggcacactgaggggctgg

SEQ ID NO: 397083 - DNA, 450 bp, Homo sapiens
gttaatttcttgggaaatataaatcatcatagctagtcattctttcatcgtgggaagctaacagtcctgattgttcaggattataattatagtaaattctgaatttgtgacgtgtgaattttagaaggttacaaaacaacttccagacaactgagtcataaagtttttgagagaagtatgtggcacacgtctaattcattgtcctttctctccagtggtatagttatgatattaacctaaattgcaaaaggaatcgttttagttgactgctgcttgaaattgtgtcacttttccaaatttaggtaatgtctgttacaaggagtatattttggaaacattaacttgactgatacttatttccctggttaagtgaccttcctgccatgtgctgagtgccaggacttactgcccctcagtaatttggaaggggatcctgggccctgcctggaa

SEQ ID NO: 397084 - DNA, 418 bp, Homo sapiens
agctcggtaccccaccactcctatagatcagtgtaggtgtttgagtgttatataataaagaatttgtctggtccacgtcccaggctcctgagatctactaagtccttggaattcctcaagtgacagggatgtctttgttattcattatgagctcctgggaccgtgcctgaatttatgctaatgaagtaactcctagatactttctggatgggtgctggctgtgctgtaaaggtcaaccatgtggccgggcatggtggctcacacatgtaatcccagcactttggcaggccaaggcaggcggatcacgaggtcaagagatcgagatcatcctggccaacatggtggaaccccatctctactaaaaatacaaaaattagctgggcatgactgatctataggattaatcggtagcgagcct

SEQ ID NO: 397085 - DNA, 235 bp, Homo sapiens
ctgagcataccactttctttcaggtgaagttataggactgttaggacacaatggagctggtaaaagtacaactattaagatgataactggagacacaaaaccaactgcaggacaggaggaggattcccctggctgagaaccactgccttattgcaagataaatcctataattataactatcactggcgaaacagaattctcaacaagtatctattcctttgaatgtttggatcaa

SEQ ID NO: 397086 - DNA, 195 bp, Homo sapiens
acacagttagcatatcccaaactttattacccctctgtcttttgtcccccaacttcaaaacccatctcctatttcatttttgtatttttcttatattttaaaaactttatttttgaaataatttaacaatgacagagaagttgcaataattcagagttcaacactaattcagcagttattaacattttcccacat

SEQ ID NO: 397087 - DNA, 362 bp, Homo sapiens
ccaggaacatgttaaaagtagatgagatcctgaacggagggcatcacctccaaagcccgtgtcccagttgacagtggaaaggactcagagagatgcctctagctcaggtgaggagtggatgtgattttaagccaaggtggaaaacaagtggggaaactggttctgctgttaagagcccaacagctgtggctatgtgtttggattttgcgactcgaatcaggttcattaattatggccaaatgttagcaagagtttataatgataagctgtgcaaagagtttcaaaaattacaagtatttctgaattgcttacacggacattggtagggaaagagaagagaagatggaaaacaaggaatatac

SEQ ID NO: 397088 - DNA, 333 bp, Homo sapiens
aacagttcaaatggctctcttactaacaaatgtcaacgtccttatgtgaccattctgttccagtctctgtaccatccattcaagcctgctagctttatcctgccaaagaaccacgacgctccaaactcacaaaccattatacaagcccaacatatactctatgccgttctcgttaccaacacgctccaacccaacgtaaaaccttcctagtatcaactcttcctttatgagcttttcccatattcctactccctcaacatctaccggcccatactcccaagtctctctgctaaacgcaattctagcccggagtcacaccctctacagcctaat

SEQ ID NO: 397089 - DNA, 373 bp, Homo sapiens
caacacacaatagatttactggtaatcgtttgattttttcaaaagtactacattcctgtataatttgcatgattaaaatgtatttaatataatttccacctgtgataattttcttgtgtataaataggacattgctcttgctattagcagctatatactgtaatatttatagttgaaccacagggtttagcagacttcagcccatacactgaacctgtcctattgcctgtttttgtacaacctgcagctaagaatgtttttatattttttgaataatacaaaaatatcaacagaataatagttcgtaaaacaaaattaacaaaatttaacatttgtgtctatgaataaagttgataatattgtaaccacagcc

SEQ ID NO: 397090 - DNA, 321 bp, Homo sapiens
cgggtggatcacctgaggtcgggagttcgagaccagcctgaccaacatggagaaaccccgtctctactaaaaatacaaaattagccgggcatgatggcgcatgcctgtaatcccagctactcgggaggctgaggcaggagaatcacttgaacccggaaggcggaggttgtggtgagccaagatagcgccattgcactctagcctgggcaataagagtgaaactctgtcttaaaaaaaaaaaaagatatttggagggaaagtcgccccccgtccacttcccttttatagcctggctagttgctgccctgctaatagaaccat

SEQ ID NO: 397091 - DNA, 820 bp, Homo sapiens
ctttgagcacacactattaaatatttttatgctgcctgcccttggcttatgtcaaagcatcagcatgtaactttatctaggtaccacagggaaagctactttaaatatgaagacttctggagaaaatttcttctgcagttcctgaaattcacatctagacattgaaagcgggatgtgcttgtgctgatcttaaggaagctattctctttttttttttcattgagatgaagttctgttcttcttgcccagggtggagggcaatggcatgatctcagctcactgcaacctccgcctccagggttcaagcaattctcctgcctcagcctcctgagtagctgggattacaggcgtccgccactacaactggctaatttttgtatttttagtagagacggggtttcagtatgttgaccaggctggtcttgaactcctaacctcaggtgatccacctacctcagcctcccaaagtgctgggattacaggcgtgagccactgtgcccggcagaagctattcttttaaacagaagaaaaatctataaattcatcaggtgtaataaaatcaaatccttaactctaaatgacagtgaaaccagatgataaagtttgttgcttataaagaatctaggaataaaaggcccttttgacttcagtttttcatataaaaaatggagataatagtacttccctcatatgggaaaggttatacagcacaagctacagggcctggcacatagaagtacttgacagtagttgctagttatggtggtgatgataggtacttaacaatctgctatagatttcagcagtagctcttctcatg

SEQ ID NO: 397092 - DNA, 429 bp, Homo sapiens
tctggaaagcagggtcatctaattctcaccaaagttaatctagggcaccctagaatattcctgtcagaatccttattcttgcactgagaatagttatgtccttgtgctatgactggacagtgatttgttcatatgtgaagtatgaattgcttaatgtgacctgcttctctgaatttatttacagaaaatgaaagtgatgatgaggaagaggaagaaaaagggccagtgtctcccaggtaatgttgtggaattgttggctgttaattcagtagtgacatctggagattgtagatttagggaaaatgaggaagtgatgaatagaactatttcttccattcacccagctacaaattgtgctgatttacaatgttgtatgtcatttgtggcacttgtgttggttttaatttcatagtcctctcaagataggaa

SEQ ID NO: 397093 - DNA, 447 bp, Homo sapiens
cctcaccttatggacaaatttgactttgcttcagaaatgtctcgtgattataattttgtgtctgtttcctactccatgaaaatttgcagttgcaatatagggagctatttaaggagttgcttctgttcgtttaggagtaactaattatccatccatccatccatccatccatttgtccatccagccatccgtctatccatccatccatttgtccatccatccatccatccgttcatccatccatttatccatgcatcctctgttcatctatccatatgtgcacttgtctatccattcattcatccatccatctgcccatctatcttccatttgtctgtccatccatccatttatccatccatccatctgtccatttaatcatctgtctgtccatccatccatctccatattcatagccctgtatcccttaatatgtttggcaggagg

SEQ ID NO: 397094 - DNA, 347 bp, Homo sapiens
agcagcttggtgcaaacatatcatcctctctcactaactgatcaccctgccttaggacacagaaaaggaacatcccttgaaggcaaaatgaaactgttccttcttagaactgctaaagctgttggccagaaagtgactttgagaggtcataaagtttatatctctatcttcaagcaaaatcacacctacatggaactttcccagcctaaagacctccaaggaaggaaggcgacaactcccccgtcttccttgtgagttgctggtgttctagggtgtgtaactttctggtcttactgtaagagcttgaccctgaggcacttataaacacatggttcttaccgttccta

SEQ ID NO: 397095 - DNA, 509 bp, Homo sapiens
tccaagtcatgaaattatctactatcgttgttatcacattctggaagtgcaggtcttgtttcctgcacttctatttctttgctgaaacttactttttctaatggttttaagagtatttgggattgcctgtggagtgttttcagttgccggttgaatatttcagtcttttgtcaaataattgcaacatctatgtcatctcagcactgctgtcttttcctataagagttgagattttcctacccctttatatgccaattttgaattatatccattttgaacaatgcaaaattacgttttgaaaccttcaatcttgtttaaatcttacaaatactgaaacttttgttttagcagatagttgacgtaattagattcaggctgcaagctgcaacctgtcttctgagctgtggttccaatatcagttcagttttcaaagccctgcaatgctattatttaatttttatttttgagacagggtcttgctcttgtcacctaggctggagtgcagtggt

SEQ ID NO: 397096 - DNA, 291 bp, Homo sapiens
atgcccagctgagaaatcatcttttctaactgcactttagaagttaagctgcatcacttcctctgcattttatttgttgaggggcccagtttcaagatgaagggacatagactctgcctcttgatggcaagtgtatcaaagaatatcaggtttataaaaaccgtaagttttccaacagtccagagaggaggtgatgacagcctagattgaggtgtgagcagtagaaggggagaagcagttgaattctggatagattttaaaggtggaggccaggtgcggtggctcacatct

SEQ ID NO: 397097 - DNA, 416 bp, Homo sapiens
tttttttgtagagaaagggtctcactgtgaatgtcacccaggctagctattttcaaacatttattgctttggaaccagagcccatatgtggataaaggtaggtagcattactcttgatgatgcaggcatgagtgatgtcctctccattccccaatcctcgagccccttgaaatgctatttgaggaatgctatcaaaacaccagtgctctttgagagaatggtgcaaaaatttaaaaaaacagcctttggctgggaatggttgttcacgcctataatccaagcattctgggaggctgaggcaggaggatcgcctgaagccagctggagaacagcccagacaacatagcaagacctcatctctattttaaagttataaaataaaataactgtggccgggcacggtggctcacgcctat

SEQ ID NO: 397098 - DNA, 557 bp, Homo sapiens
aaactatcggctaggtacgaggccctgggttttacacatccacagtggttaggagtagaggactggatttggtgagagaagtggggacttaaagagtataagtaagggactttgagcagagagtggggaggctgtgggtactagttgaaataaaatggccaatgggcatgttcggggtgagcagctggtccactcactacactctaactggaatccatgtctatgtatgagctcacggttttgcattttctttcacagtaaaacattttctgtgatgagcttctattgtgagtgcagcactttccctatggtcagttctctttaaacactgtacctcctcccaggcagtgcttctctttatcttatcctcaggctgtgtttcctgttgtttcctatttacagaagttagaagaagagagatggagacttggacctcataaatgggtgtgggctgcccaccaggtcttagaccaggttggcaggaggagccaaaactgcttcacttcttcttacttagtgcatgaatgtggtagggctggattcacttataccaccgc

SEQ ID NO: 397099 - DNA, 395 bp, Homo sapiens
aagctgatattaaatccgggtctcagcaggagaattaaggtatttaggatcagaggagaaaagatgtaaggagaatagcattaggtgaaaactggacaattacaacttagaaaccattggtagataatctccttaggtacattatcttaactttccaaaacaatgctgcagtgtttagtttgtagcaatttgttggaaggtagaaataaaccttgcagtaatttctttattgttaacttctccttgttatagactatgaaccttgtaaccatgagaggtatagaagaataatagatcatgtatttttagatacgtagctgttaagatccttaagggaaagaaacaagcccagttagtattctgtatcgcaccttgcatatgctgagtgttcaata

SEQ ID NO: 397100 - DNA, 255 bp, Homo sapiens
cctggaaggcagaggttgcatgcagtgagccgagatcgtgccattgcattccagcctgggggacagagtgagattctgtctacaaagtaaataaataaataaaaattaaaaagccctacatgatctgattctcactaactgacctcttctcccgcttgtctcccactcggcactttccattccagccttccttacctccttgctaatccttgaacgtggcaggcacatttccattttaggtctttgcactggact

SEQ ID NO: 397101 - DNA, 574 bp, Homo sapiens
ctgtccctgtgcagatgttggtcacatctgcctctgtcctgacactggactcccaggctgtaactactcagctccttcagccccctgggcttgatctccttgaaggcagggatgcagggaacaaggccgggagtgggagcagcctgtgtgaattctcaatccctgggggaagggggagggttgggccccagggacagcagggactggagctgggtgctagagagcagagcctgttgggctgcatgcagggagcttgcgaattttggggcggggacagggcctggagcaggtataaagggctctggcatcattgtgctacttctttctgtgagtccacgttcactgaccatttggggtgtacccagcatctggcggatcactgggccttctgggagtacaccatcaggcgggagagacagtggacacagaccgttaccatgccctgtgcccattttgctgcttctctggggcccagaaggatggatgctgagttaggagttagaactccttcatttgcttagactctgaggaacaaatgagatgacgtgggtataaaaactccttgtaaagcatt

SEQ ID NO: 397102 - DNA, 553 bp, Homo sapiens
atctgacaatacatgagaaatgtttcataattcaacaaaaatttattaataaagtttatattttccatgcagacttttgtcctatatttcactaaacgtatgcagttagaatactgtactcaaaattattttaattaattattttgtgtaatatattacatacacatccatgttaggtttatttgttcatttgtcttcaattttcaggtttgcttatctctccctcatccttttcatttattattttgactatatgtaaaacatttcatggttcaaaatcaaagctataggctgggctaggtggctcatgcctgcaatcccagcactttaggaggttgaggtgggtggatcatgaggtcaggagatcgagaccatcctggctaacacagtgagaccctgtctctactaaaaatacaaaaaattagccgggcatggtggcacctacctgtagtcctaactactcgggaggctgaggcaggagaatcgctgctacctgggaggcggaggcagtgagctgagatcacgccactgcactccagccttggtaacagag

SEQ ID NO: 397103 - DNA, 641 bp, Homo sapiens
tggcaaaaccccgcctctactaaaaatacaaaaattagccaggcatggtggtgggcacctgtaatcccagctactcgggaggctgaggcaggagaatcgcttgaacccaggaggcagaggttgcagtgagccgagatcgcgccactgcaatccaacctgggcaacagagtgagaccccatctcaaaaacaaaacaaacaaaacaaaacaaaaaagaaaagaaaagaaagaaaaagaaagaaagcctatacctggaatgggctctctctggatttgggctgaactggctaggatgtctacccaaaattagcataaatcatcaagtcatttagtcatcaaatatttattgagggcctattatgtgtcaagaactatcctaggtgccagggatacagacatgcacaaaagagacaaaaatccctgcagtgatgggggcctttattctaaggatgcagggacaggaaagagtgcgtctgcgggagggcctccagcatttctctacagagagttcccataggagaccgcacggcagtctagagctcttctctggcccacccaggcaacagcctaggttcggggaaacaagaccacagcgggttatagccctcacatccgaatcttgtaacagtcccaaagacacag

SEQ ID NO: 397104 - DNA, 344 bp, Homo sapiens
aatgttaggagaattaagcatgtgcatgagactccactgtaagaggatgcctggaaactctattcctttgctgaaataattcctattcctttgctgtaataaactgtaactgtaagtataatagcttttctgaatcttgtaggtctttccaatatatcatagaagctgaggatggtcttgtgaccccctaacacagagagggagaagtcaacaggtgcaggataacagcttaaggaaaagaaaacagggaaaggccgattcctgcaaatcctatggggtaactgtaaagagaaatgatttccactgtctggaagtttaagtctttattttccaaaataaaaatg

SEQ ID NO: 397105 - DNA, 305 bp, Homo sapiens
tctgcacccaagtagctgggactacaggcatatgctaccacacccagctttttaaatttttgattttatttatttttgagacagggtctcactctgttgcttatttagtctcacccaggctggaggctctactgctcatcatagtaacacaattacagttcactgtggtcttgacttcccaagctcaagtgatcctcccaccttagcctctagagtagctgggactacaggtacacaccatcagacctagctaattttggtattttttttgtagtgacgggatctagccatgttgcccaggctgg

SEQ ID NO: 397106 - DNA, 136 bp, Homo sapiens
atttcaggatggactgtgacttggaccagtctggttccaagtacccctcacccaagccagaagaataaaagatgcaggcttccattggcaggtgctgtgttcacccctgaaacgggggacccatgggtcagatcaa

SEQ ID NO: 397107 - DNA, 504 bp, Homo sapiens
agtgttgggattacaggcatgagccaccgcacctggcctcaatttggtacttattatttcagtacatgtttttatacgtgtagctctagttattcattttaattgctttatggtatttccttatgaatatatagtaaatacctaaactcttaaagatggatatgttggttattttcagtttttcaccctaacattttccattttgtttggtacacatttccttgtttacttgtataagaatttttttaggaaatacatctaaaagccattttcaacatggctatgtccattttcaacattaagggttgttgcccagttgcagttcagcaactggtatatagtttaaaccctcatgaaccagcagtgtatgagaatggctgttgcactatattttcctctatagttggtcttacaagatttaatttcagtaatttacagcatgcaaaatgtcatctcattgtctaaatatgtgtcttccagatttctagtgagattgagcatcat

SEQ ID NO: 397108 - DNA, 445 bp, Homo sapiens
ctccatcttgacacctcattcctaaaacttctcagctttggatctcatgtccctgaaataatcttctcttataagcttgtcctcctaccttctcttgcaatcatccatctcatggtcatatctgagaaaggaaaaagcagctctcaataactgatgggtaggagcttgtctggatctaaaagtgaggaatagtattctcttgtcaaatataaagtttcacgatacactaatgtcagacaaggtcactctatgactgtgatggagcttaacaataacaagtccactccacaatcacatttgagcacatacattaccaaaaacacagtttttcttacccaacatctccctctgccagccattatgaggaaagctgcttttccaccaattacagccctacccccactttgtttctctttgctcctagatagaaagtcctaagataccc

SEQ ID NO: 397109 - DNA, 140 bp, Homo sapiens
aaaacacaggcaaagagatgtggcatccaacacatggtagaacaaagccttgaatttaaggaaaattaacaactgcaagtctaggaagccatgaggacatcagtgagtggaatccgcaaagaatgtcttcaaaaagaatg

SEQ ID NO: 397110 - DNA, 384 bp, Homo sapiens
gctgctgttgaaatttttcctcctctagacttgtgccatggatttttctggaccattttaatgtctaaaattagtcacccttaaatttcaccatatgtggctgggcttggcagttcacatctgttatcctagcactttgagaggccaaggtggaaggatcacttgaggccaggagttcaagaccagcctggaacatagtgagagcctgtttctacaaaaagtttaaaaatatccaggtgtggtggtttgcacctgtagtcctagctactggggaggctgaggtgggaggattgcctgagcccaggagttcgaggctgcagtgagctatgatcatgccactgcactccaggctgggtgacaaagcaagaccttgtctctctatta

SEQ ID NO: 397111 - DNA, 548 bp, Homo sapiens
ggtatgcatgtactttatattgacaagactaagaaggttcacccaatacagggagactcccatgtgaagacaaatcctaatcactcctctgtcatgcagaaatgtcttgtaaatccttgaattacagctcctttgcttcaaggatttaaagctctatattctcccctgtctctggcagcagcccgagtgctcaatgggaagacctaagcctgaggttcaagccccaggtctgtcagttgccatccgtgactttgggtaagtcatgaattccccaggtctcggatttcttagctaaaaaacgaggataataccacttcttccaacctgtcagggttgttgagaggatgaatgcaagcaaacttttgttaagtacacttgcctaggcatggtaggatccaaaaattagtaagacactggccttatcagactcatgcgcttttagggtgtttagacttcaataggtaacttcattatgatatgagaagaaacagcttagatctaaagtgttctgtaaactctaaagtgttatatacttgtgaaaaaagaaa

SEQ ID NO: 397112 - DNA, 665 bp, Homo sapiens
attgtctaactcaaggtcaataatgcattttcttgcataattgttaaaattttaacaacatttggatttttatctgtatttttccatttagtatgtgctagcagctaattttgttttgctatccagtactatttgttggatagcagtattgtgtccattcaattataattcttcttcttttatataccacatacctataaatgcttgaatctatttctgggtttgttatactgttgtgtttgttactgtacctatagcatactgtttaaattgctatagcattgtggtgttttgctatgtagtaaccaagttcttccctctttcttttttcttttcctttttttttttttggggggaaattatcttggctaatttttcatacttattcatggaactttaggatttatttaagatcaagttttataaataattctattggaacttcatttttgagtgcaatgaagttgtagtgaattttagagagctgacattctcaaaatattgaccattccacacatacattaatgttatagtaccatgtttgtttagatttccttttatatcctttagtaaagctaattttctcaataagctcctgtaccattttttgtttgctttattcccagatattgtttatcatagtagtgaataggattttttttggt

SEQ ID NO: 397113 - DNA, 410 bp, Homo sapiens
tgaagccatcttttcctattagacatcaccttggggtcagagaaggaacacaccactccaggcctgtctcccaggatcctaggactctgtggaatgcatccctttccctagaaaaagaagacaaacttttgctttggttaactttgttaattttatgtgtcaacttgactgggccatgggctgcctggacatctggttaaacattatttctgggttgggctgtgagggcgtttctggaagagattagcatttgaatcaagttaaacagttaacttgattggactcacttaagcagtttgcccttcccaaagtgagggtctgaatatttattgacaaaaaggcagaagaaggttgaattctgtctctctgcctgacttgagttgggacatcagtcttctcttggtcttgga

SEQ ID NO: 397114 - DNA, 333 bp, Homo sapiens
gagtaactttagggcatattttggagatggattcccaggacttgttgatagacatgtatgtggagtggagagtcatgctttggcttaacagagtagtgacgtttactgaaactggtaagattgggagaggattaacagctctttgatgggcttgagatgcccactagagacacaagtggagattaagttaggcagctggggctcctgggaaaacactgagatgaacatataaattaggcaattatctgtgcctagatgatcttcaaagccatgggcattcccagccttgagatggttatttttcactgtaaattaataaattgggtaacttat

SEQ ID NO: 397115 - DNA, 408 bp, Homo sapiens
tcattccctgataacaccaaaatgaccttccctggttatataccacaatgtaaatactttattttttttttttacatatacttgattgctccttgtctataggttacaggagacttgtcactcctgttctccaccctatctccagtatcttgccaagtgccaatcatgtagaaagaactaaagcaatgtgttttaaatcaattaatggactgactgttacagaaaacaaaaatttgagagcatgcttcagaagaagaataagaaggaactggattgtgggtgtgtataatttgagacaaaagcatccaaactaagtgaagataccccgcaagttgctgtgagatttgttctcaaaccaaaaaggggtcagggttggagtcgtgggtgtatagaactgggtgtcatctc

SEQ ID NO: 397116 - DNA, 939 bp, Homo sapiens
atcgcgtctgccagggctgtagagctctaagcctactcctcagaggcctccgtgaactccctcagaggcggtgactttggtattgaaatcagtgcttcaagaagcctttttgtagcctctcattttgggactttcccggagctctgggacattctaccctccctgtagtctccctccccgacaaagcagaccagatctgcctgcagagggtggggctgaaccaagtagtgtctgagtttgagcccttggcatctagcgtccatgtagacaagaggctctcctcagctgcaggttcatcttcaggacctttctgttaccccccccagacaatccagacactgatgcgtccaaagcaaaaaaccccaggcctattagttaaacacgattgtgtcgtctccccacctcaccttggaggttcggggaacatattagcatattagcatattaaagactacaaagtctgtagtgaaaacacctgtttaatcttaagtaacacaacattttcatactgacccgacctgggcagccctctccttgtggggggcagctccttgcctgggcacacagagataagaaactgacagggctcgtgggatgccaagtagggatttctctgagagaggggctcatgggccaggcctttgggaatcaccacagaaatggaagcctggtgtgtgcttcctggaggcccctgggcgaggcactggctggaagggagaagataatttgctcatggaggtgggggtgtggctggggtcaggagcctcctgcctgtgcccacctcaagcttaagacctgaccctcacagctcctcagcaagggaggctctaggccagacagtggctgcccacacccgcagttctgaaccagtattttgggatgcctcccctaaaaatgtgattcctttcctttccattatgttcctgctttgtccattat

SEQ ID NO: 397117 - DNA, 289 bp, Homo sapiens
tttaaatgggaaaggcagcttttagaaaacgtgggagaatatctttgtgaccttgggatacacaaagattgtttaaacaatatacaaaaagtacggccgggtgcggtggatcacctgaggtcagaagtttgagaccagtctgtccaacatagtgaaaccccgtctctactaaaaatacaaacaaacaaacaaacaaacaaaatagccaggtatggtcacacacgcctgtagccccagctactcaggaggccgaggaaggagaatcgcttgaacccgggaggcagaggtt

SEQ ID NO: 397118 - DNA, 983 bp, Homo sapiens
tctcgcttaccggtcctcctttaccttctcttagcttctctttaggtcctagggaaaaatggagatggcagtatctttattttagggtcgtttgaaggattagcaataatatgtatcaaatgcttggccaaagtgtggggcacatggtaggaatgcagtggcagcgattattatcatcactttaattgcaaaactggaagttcagattccaggaggaggatgtagttgctgtggactggccttctcaggcaaaacttcacttggaataggcttggaagactgtataggagttacatgaagtggaatggtttgactcaaagtgcagaaatgggactacataaatctgttaggtttcttgaggaagtaggggagatcaggtaggggaagggcaagaaatcctacttactaggaaagatggcttcctagctagtttggggcacaaatactcaacagaccattgctatggtgaaaatggtagaaatgagaagagcaatggagggaggaagacctgtgtcatgaaaatacttatctgactgttcagcattattgatattgtggtctggatgactctgtgtcatggagacttgccctgtacattataggatgtttaacagcatccctggcctccacccactggatgccagtaggtagcattcttcacccccatacacatgacagtcaaaaatatctcctgactgccagatgtgccttggtggggtcactgaagaccactgctttagtaattagactaagcatcagtgaagatgagattttcatttcagtgttggaagggagaaaggagtggagttcatttaaaataatagaatgaactgctctaattatagaggtgtagcagaagtaacatggttcagagcattgacagcaaggccacttataagctgtatggtctttggcaaataacctgttgtacttcagctccctcatgtgtaaaatgggggcaataattgcacctaccttaaatc

SEQ ID NO: 397119 - DNA, 519 bp, Homo sapiens
caaaaacaacaacaacaacaaaaacggtatttcttcaagaaaaggtatgaacgttcacaataactgggtaaggattgaaaagtgttcctcggctgggcgcagtggctcatgccagtaatcccaacactctgggagcctcaggtgggaggatcgcttgagcccaagagttggagatcaacctcggcaacacagtgagacctcatctctacaaataattttaaaaattagcccaggcggccggacgcggtggctcaagcctataatcccagcagtttgggaggccgaggtgggcagatcacgaggtcaggagttcgagaccagcctgtccaacatggtgaaaccccgtctctactaaaaatacacaaaaaatgaaccgggtgtggtggcgctcgcctataatcccagctagtcaggaggctgaggcaggagaatcgcttgaacctgggaggtggaggttgtagtgagccaagattgcgccactgcactccagcctgggcgacagagcaagactccgtctca

SEQ ID NO: 397120 - DNA, 372 bp, Homo sapiens
atcccccccccggaatcgcacggagtcctcggaggaggagcagcgacctatgcgtgccgcctgctcctcactggaggagcaggggccttctgtgactggacagctttgctccgctcccaccgcccccgcccctcccaggcccggggactctagaggccagcacgtctgcgacacccagccagagtccccacaaggagaacagggctctcctgagaatcagggcggtgcctgacggcgcaggcacagaatagggaccacagttctgggctctcctgagaatcagggcagtgcctcacggcacaggcacagaatcctgagaatcagggtggtgcctgacaggcacagaataaggaccacagctctgggtgtttc

SEQ ID NO: 397121 - DNA, 405 bp, Homo sapiens
tcgtactgaagttatgaaaagtctgtgcagttcttcatgcacatctctcagagaagcaaacggaagaccaaggacacttctgggacagcagagtgataaggagacaagaggagaaagcaggccagctccatcccactcagtccctcccacacaaacagatacccctcccaggcccggggactctagaggccagcacgtctgcgacacccagccagagtccccacaaggagaacagggctctcctgagaatcagggcggtgcctgacggcgcaggcacagaatagggaccacagttctgggctctcctgagaatcagggcagtgcctcacggcacaggcacagaatcctgagaatcagggtggtgcctgacaggcacagaataaggaccacagctctgggtgtttc

SEQ ID NO: 397122 - DNA, 473 bp, Homo sapiens
caaatagcacaattctaggatgatatactaaccaagagcactacggagcataaatgtttaagcaactgcagaaatggaagctgtaaaaacaaatgattttgctattgctaaatcatgactaaaataactcctaatgttaaaaagctaaatatcaggtcttatacaatcttatctatatcctattgtaatgttttacacaacttttgttttagcactttttaaccaaaaaatagttattattaataataaaattatgggccaggctcagtggctcagtcctgtaatcccagcactttgggaggtcgaggcaggtggatcacctgaggtcaagagttcgagaccagcctggccaacatggcaaaaccctgtctctactacaaatacaaaaattagctgggtgtggtggcacatgcctgtagtcccagctactcgggaagctgaggcaggagaatcgcttgaacccaggaggcaaa

SEQ ID NO: 397123 - DNA, 475 bp, Homo sapiens
tgtgaatactgaattaaataattcacaggagtagtttagcacagtggctgaagctctcaatcaataacagctacctcagtcaataaccatctactagtagctatctgattgctactctagagggtatgctccattcaccctatttcaaggttagagaaaacaaggcggtttgccgaggtcacatagctcacagtgacagagccagaattggaacccaggcctgagttggctctgctcatgagctctgacgtgtccttcaacagggaacgcccacggtgcccctttattggagccgcagcagtgctggagggaagcagcgtgtgcagccaggagaggacttgctctttcctttgaatgccaaaatctcaaggaatgggcctgggcatggcctgagcctgggcaaaggtgactcttcacagatttcctttttgttctaagcagcaggcataggaggagtctgcattcccggagcgtg

SEQ ID NO: 397124 - DNA, 232 bp, Homo sapiens
ccaagatttcgtccctgccctccagcctgggcaacagagcaagactccatctcaaaaaaataaataaataaaggaaagaacattacattttctcttccactgtggaataaatacgaatcttgaaagcatggatatatttttccattgcaaatagcttgggttggaaatgacaagccctatttcttattccatccttgtcagggtggtaataggccagtgactgaatcaatta

SEQ ID NO: 397125 - DNA, 389 bp, Homo sapiens
gttttttgttttctaaccccctgcattcataattctctttttttaaaaaacaaaacaaaaaacatcacttcaacctctttttctactgattcctttccagaagcctctaactaggttcaatctccctcatgcccaatacatacatgctgccttgatcccaagctttcgctagctatcacaacctctccatcactccctttccatccaccactcttaaaggacactactctagttaccaatacattcccactttcccttcatcctgctgcctcttgaattctggcttttgctcgcaccactccacagtaactattccgacaaagctgtttcaaacttcctattggattgcttgccctcctccgttgcttatgggcttcttctcttttatg

SEQ ID NO: 397126 - DNA, 199 bp, Homo sapiens
gttaaatgcctaatacatttcagacatcatgccaggcacggggatgacagggcatggtggcaggcacctgtaatcccagctacttgggaggctaaggcaggagaattgcttgaacctgggaggcggagattgcagtgagccaagattgcaccactgcactccagcctgggtgacagagtgagactccatctcagaaaaa

SEQ ID NO: 397127 - DNA, 430 bp, Homo sapiens
gtcatatctgttcgggttaaacgaggctcatcgcaaaataccaggacacaagtgaacagaattatgtaagagaaactaataaaatttacaattaactatacattaactaatcgatttaatttgctgtgaagtggactagtaatgtactcccatttaattgtcactccctagaaatttcatggaactttgaaagtgtgataatcctccagaggtatactcaaactaaaaaacaaatacgtaacacaagaatgactgtggaaccaccaaaacatatcatgtatatggaaatacccaaagaaacatttttcaagataaagatttaaaaactcagaaccatatatatatgtgtgtgggtgcatatgcacgtgtgtgtgtgcacgcacgcgtgcacatgcgtacgtatcagaaagtcctgaaatacaggcagaat

SEQ ID NO: 397128 - DNA, 441 bp, Homo sapiens
tgagacggagtctcgctctgtcgcccaggctggagtgcaatggcgcgatcttggctcactgcaacctctgcctcccaggttcaagcaattctcctgcctcagcctcctgagtagctgggattacaggcgcccccccaccacgcctagctaatttttgtatttttagtagagatggggtttcaccatgttggtcaggctggtctcgaaaccctgcccttgtgatccacccgcttgggcctcccaaagtgctgggattacaggcgtgagccaccgcgccaggccgcctctgaggttttaaaatctctaagcttctcctgtttcaagtttctttgtaacagcgcttgtcaaccttggttgcactatccaaatgtccagcctgtaccccagaccaattacatcagaaactctagggggcgacccagatattggtaatttttaaaa

SEQ ID NO: 397129 - DNA, 209 bp, Homo sapiens
agtttcttcaaggtaaaaatcataaaaagaaaatttaaattactggtcttccttaaggactggcaaaattcttggagaaggaggctttttcacctttaacccaattttcttcagaagttactctgagtgatcttttagatactttagcacagtcagttttcttcaaaagttaatcattgtaatattttagataagaggaaccaagaagc

SEQ ID NO: 397130 - DNA, 434 bp, Homo sapiens
atactttaaaatggaggaaataaaaatgatttatataagaatgatgtttctatgtattactaaaagtttaatagtataaattggaagatgatttgaataattaattttccatacacctatatggtaaacttacaacaacaataaaaagtctcaaaaatatataataaaataattcattagtaatctaaagttccctattttaaaaaatattcttgcattgcaaaataaagcaataaagaaaaatatttggaaatatataaaacaaacggtaaaatggcagacataaatagaattataccaattataatcttaaatgtgagcagattaaaatccattccagaggcagagattgtcagaccggattaaaacaagtgatcccaatatacgctgagatgcaaggatactaacggattgaaagtaaaaagatgacaaaa

SEQ ID NO: 397131 - DNA, 246 bp, Homo sapiens
tatttcaaataaaaaagaaggcagagaaagacccagaggaaatctatcaatcaaccacaagctatatcagcaaaactcatcaacttcattcctaaaactatgtcgatccttgagcaatgtaggggttaggggtgctgaccacccactcatttttctatgaggagaattctttctactctcttagcaattttcaagtatataaatccatgtatactttttttttttttgagacagagtctctccctg

SEQ ID NO: 397132 - DNA, 610 bp, Homo sapiens
cttgatggcctgcagactctgagagccaccccggcttcccagtgacctccttccactcagcacccccttcccctgggagaccggaacgaaccacactgaaatgagcacgtcgaggtcactgtcgaacccaccgagggaggccaggacagcctcatggccaggctgagccaggagcccagaccagttcctgccagggagaggagccaccaacttcccctagtatctccctgctgtctcagaggctcatgttctggaaactatcattgtctttaaggtgattttatgtatattaaagtcacgtacagtagtgcccttatccacaccttcgcttgctggagtttcagttacccatggtcaaccaaaggccaataataggtgagtacagtacagtaaaatattttgaggacaggcatcgtggctcgtgcctataatcccaggactttgggaggctgagccagcagaattgctggaagccaggagttctagaccagcctgggcaacatagtgagaactcatttctatcaagaaaaaaaaaaaaaaaacaattagctgggcatagtggtgcatgcctctggtcccaggaggctgaggtggaaggatcacttgagcc

SEQ ID NO: 397133 - DNA, 533 bp, Homo sapiens
cattgtacaatattcatctttatccctcttaatattcctttttcaaaagcctatttcattgatgtcaatatagctactgtagctttcttatgatttattgcttacatggtataatttttacctgcctttgacttttaatctatttgtgttttcatatctaaagtagatttcttgtacataatacataattggttcttgctttctaaaaaaattagcttaacagtctctgccatttaaatgtaatgtttggatcacttacatttgatgtatttattatatgtgtgtgctgaagtctattattttgctatgtgttttctgtttgctccatctgtttttttccctttttttctcccttctttcagaatatttgagtatttctgagggttctgtctttttctccatcttcattattgacctattagctatacagtgagtcttcttttaatgtcatcaatgaattcttggaaatggcaaatttaagtgaaacaacacacagcaggtccttgaataacattgtttcattataacattga

SEQ ID NO: 397134 - DNA, 753 bp, Homo sapiens
tgcaaaatcatgaataatacaaaaggatgttaaacttttcaacaaatccagatgggtaccaatgtcattgagaattcctgagaatcaccttgattgctgcttcagacctaggagcctgaattgaatatcacttaccagttggaagctattggcttaagtgacaacagtttctacaataacattggtatctatattgtttacttttaaaattgtacagacactaagtttgtgcaaataaaaaacatccaaactttaacattcagtcacttcccttgctagccttctatttcttctcccttatcatttagacgttggtgcaaatagaaagagtgatggattgtgaaatgtaggccagttttttcttttgagacggagtttcgatcttgttgcccaggctggagtgcagtggcacaatctcggctcactgcaacctccacctcctgggttcaagcgattctcctgccttagcctccccagtagctgggattacaggcgtgtgccaccacacctggctaatttttgtgtttttagtagagacagggtttcaccttgttgggcaggctggtctcaaactcctgatctcaggtgatccaccctcctaggcctcccaaagtgctgggattataggtgtgagccaccacacccggcctgcaggccagttttaacactaacctttgctggggccttgcaaatctcttcattttgcatcttagttgtcccttctgcaaaatgagagagttggactagatgtcc

SEQ ID NO: 397135 - DNA, 449 bp, Homo sapiens
ccaatttttaaatttataagcatctgtgttgtagcttaatgactttaacagttttttcctcaatcatatcagaatgtagtttgatgattatctgggtgaagagttttggtggtcaacgtatggctaagaaagttatatattaaagatgaagggttttggccgggcgcggtggctcacgcctgtaatcccagcactttgggaggccgaggcgggtggatcatgaggtcaggagatcgagaccatcctggctaacaaggtgaaaccccgtctctactaaaaatacaaaaaattagccgggcgcggtggcgggcgcctgtagtcccagctactcgggaggctgaggcaggagaatggcgtgaacccgggaagcagagcttgcagtgagccgagattgtgccactgcagtccgcagtccagcctgggcgacagagcgagactccgtctcaaca

SEQ ID NO: 397136 - DNA, 406 bp, Homo sapiens
ctcgtgatgagccggacccaggctgggcccagattagatgtcaaccgctcaaaagtcttcaacagctctcattactttgagggatattagaaattctttgctttgaaaagcaattttccaactgtgttccctattctgctgacatttatctggggcatcaaagcataccttctaagcctttacctcttcctcctcaaaatatttctcatcatcccattccaaatagaatattccagggggaacagggaagaggagaacttgaggggggttagggggttaagagggagaaggagagaaagaacagaaccaaaccactagcttcctatctcattttccatcacttgctcattccttttctacggtagggtcatactgaacaacctcaacttcccttaatgtgccatgc

SEQ ID NO: 397137 - DNA, 133 bp, Homo sapiens
tgggaaagactttaaccagtcctttagccttactaaactcatgagaattcatactggaaagaagtcatacaaattggaagactgtggcaaaatcttttaagtattgctcaaatatatccagccataattcata

SEQ ID NO: 397138 - DNA, 369 bp, Homo sapiens
aagccagaggactatttactgtaggccctattcagggacttgaacttggagataagaacgtagttatacacctcgggtcatccattgctaagcgatcaaccttaaaggactgctcctgtggagataaaagctgtgaacctgcaactggagaatgaacgtcgtgatggctgagggggaagagcttttgcatcactaactttcagagctgaacgagctccagagggaggtcactgggaatctgacgatatccctgtggtcagtgggtacctgactactttcagaaaggtgattgttgactgtttctttgaaggtccttggggatacagacccaaatccctgtctcctccactcttggtttgctgtgccatg

SEQ ID NO: 397139 - DNA, 464 bp, Homo sapiens
ccccttgatgtgacctgtgagcagcttcccaaggcaggaaattccagaagtgagtcagggccagggccctggagccacttccctgggtccccagaagcagcctttctgtggctgtcagaggggcatagctgggtgcacaccagggtggggccagtccagaagctggcagtattgatggagacccctctgtgtcccactccctgcttgggggagccattgaggcatagtggccagtgtgggaccctgcatctttagcatttgtatctgcagtgttgtgcacatacaagtgactctttttgttttaatctgttagcctagaggggcagagtagcagactgagtctccacggctttccactaccccagccttcagcattccatctccagcttctctagggacactcccactccatgaccacctattctgtggacttacagtgaggagcaattagctgtgtcagtcag

SEQ ID NO: 397140 - DNA, 720 bp, Homo sapiens
gaatacacttgataaccactgaatagaacactttaaggcaatgaatattatggtaaattttatctcaataaaaatataaaaaacccactaacattcatgggggaaaggcataattatttataattatataaataagggaatcttgaatcatgaagtattatataaatgagggaatcttgaattgtgaagtattaaaatgtgcttcagaaatgatcaataagtcaaccagtaatctaaatctcaggtatgaaccacagtttaatatgtttttattatggggtattgatgaattttaaaattaatttgggaaagtcatattgattatttaataaatatgcttatatataattggctagttttgtggttaaaaattaaggtggaatcttaactctcaccatacaaaaagtaatttccatatacattaaatgatatcatatgagttttattcaactttaaaggaacacagaggctaggtccttgcctggatcagtggtgaatttatcctgtgaaccaaggattatggtggagcatccacctcttcacctctagcccttcttctagtcttcattcgcttttcatttttccaattctttaaatttcctgtgttctgtgtgcatcctctcaccatcttttgatcaaacacaactctcaagtaagtttatttttttttatgattattttttgagacagggtctcactctgttgcccaggctggtgtgc

SEQ ID NO: 397141 - DNA, 775 bp, Homo sapiens
caactgaaacatctcacctctggaaaaactgtaaaaattgcaaataaaggaatttgggataagagggcatatgctgtatacaggcatcctcacaaaccgctgattataaagaaaggaccctgacagaatgtcaaaaatagtccacaaattggaaggcgtgcactgaggctccaggtggccatgatgcagcagactctgaactcctgtcactgcagagtcacagcatttggccgcagtagaagccagaacctagcaccacaaccaacatagtcacagcatggccaaggccccagggatgtggggaagcccaggaaggcgccctctcagcaccactggggccaaagtgaaagctggacaggacaaagctcccaccaaaaccaccatggccttaccctactctcactggggttcctggagcaccagatcatggatgctgcatcaaccagccccagcaaaggcgcctttggcacacaattcctcagtgctacagctgggctctgtgctgagagaaacgcaacagccagacctacccagtggcttttccaagttctcaggattgctggggtctagccaagtgaccaaaggcaaggaagcaacagacaggctccgccacaccatgggagcaatccggtggcctggcacagagtgagcactccacacatgcccagcccttccctgtgctcctcctccaggatgtcctctctcacgcagtgtcgctgccgtccttccactcacgtccatgctggacactggaccatcacctctgacccacccg

SEQ ID NO: 397142 - DNA, 426 bp, Homo sapiens
ttaagtgattcttctgtctctgcctctcaaaatgctgggatttataggcatgagctactgtgcccagcctctattttgttttatagcagcatcactgtgaagtggataataggacacatattatggctatttcactgtagaggaaacagtcggaagcactgactctcctaaagtcatcccatagctagtctctttaacagtgacaactgttaactaatccatagcagatgtcactaatccatagcctgtgacagcaacgtggaactctagatgtggcaaaacactgtgcctttttataatctgtgccattttcattttctgttaatattagtttcttttatgataacactctgaagataactgtattgtttatcacctttaactcttgtagttattggaaccagtttatatactagcattaaaaaa

SEQ ID NO: 397143 - DNA, 189 bp, Homo sapiens
aagagaaagcagcagaaactgaactgactaaacaactgcaaataagaaagcctcaggctgggcgcggtggttcatgcctgtaatcccagcactctgcgaggccaacgcgggcggatcacgaggtcaggagattgagaccatcctggccaacatggtgaaaccccgtctctgctaaaatacaaaaaaaaa

SEQ ID NO: 397144 - DNA, 251 bp, Homo sapiens
cgtgacaaaattgctgccaacaggccccctttgtctgcatcagcatgaatgcaaataaagtcagtgagcaaaggtacttcaagtccaagaaatcagccaacacccaagcaaaaatatgttaataggcctatttgaatcatgccagacatcaagacccctctttatactggagtcaaactctctgttttctttatactgtgtatgcaataaacagaactaggaaaagaccattcatgcaatagacaaagaag

SEQ ID NO: 397145 - DNA, 371 bp, Homo sapiens
ctgagacagtggctcacaagtgactaatgggcaggtgtggtctacagtgtggatacaccggacagagggatgattcaccccccaggcaagatggagcaggatggcacaagagttcatcatgctactcagaatggtgtgcgatttcaaacttagggagtttttcatttaatattcttggaccatggttgactatgggtgatggaaaccttggaaagtgaaactggataagacaggactgctgtgtatgtaaatccacgaaagaatgttattcagccataaaaagggagaaatcctgccatttgtaacaatatagatgaacttggaagacaatattgtaagttggtgtgagagggttggtgtgagagcgttgg

SEQ ID NO: 397146 - DNA, 499 bp, Homo sapiens
gtgtcttcaaacatccctttagtgtgctaccatagcaatagagaacagactattttaaaacgtttgagtactatgaaagcaaagcatgctttataatcaattgctttcctctagacaaaaagagcacaagagtagtcacacattcagactgtactatatttctaagtctaatttgtcctgtaagcataaatatttagatagaagaacacagaccaccattcctaactgagccatcaaagggtacaaactgaaatgagaagaaacggccttcaatatggcaatattttagttttactatttcactgaaaccccacaaggaagaatagagatgtagaattcaaacagcctagcctacatttcatctatcagtaatttaagattctgcagtgaaacctggcaggagtatttcttgaccatgttttgtgtaattataaaacaatcttaaacgcagcaatcaagttactgatgcaccatttcaaacccacaacactatgaaata

SEQ ID NO: 397147 - DNA, 377 bp, Homo sapiens
agcctccatgtaactgggactacaggtgcctgtcaccagaccaggctaatgttttacatttttgtagagacagcgtcttgctatgttgcccaggctggtctcaaactcctggcctcaagtgatgctcctgccttggcctctcaaagcactgggcaatgtccctggtcttcaataaatatttgatttatttaagcaaatcttttttctgagcacctactatgtgctaggcaccattctaagtacttaggatacatagataaataaaataaaggttcttcccttcaaagagcttacatgtcagcaagtaaaggaaaagatgagagaaaatataataaatcagtaaattatatatcatgtcaaaaggtgataggtgttat

SEQ ID NO: 397148 - DNA, 515 bp, Homo sapiens
acaaatgaagaggggcaggcgcaggatgtggtagcagcggaccataggcatgggactcaacctgtgcggagccccaggggtagagaaaggatggctattcgggatctataaatacccacaagagccaggcaggtgacgcatgtcagacactttggtgtattattcatttctatttttaaaaatgtcctccttcctgcttttcttgacttatacccacttatcctttatttttccatctttgattgaaacttaaatctttccctactcgaagaaaactagcagtccaaatccaattactgtatcagttcataagtgctacatggctcctgctgggaagtcaggtgggagtggcaaggactggggcaaactggagagcaaattcttctgctgaagaggacagccattcttcaactccagttgttcagaagctccaaatcttgcaatttctcagaaaaagcaagcaagcaacctgaattttgatacatgagtcaaatttttaaacagtgccttaatgg

SEQ ID NO: 397149 - DNA, 523 bp, Homo sapiens
attatatcaattatatctacttggtgtagacagcccagcctgtctttcagcataggaaaattggtcatgggtagatttttcagggtgacttagtttgagaccaagaaatagtcattgctgtttttgtcaagtataaaatagattccagaatgcattccttcatcctcgaaggcccttctcattagcattggacctaattatctagatataatttgttaaaggttttacacttctttaaagaaggctactgagtcaccagcatttaatattcattcattcattcattcattcattcatttaacaactattcactgagcacctactatctgctaggcactgaagatacaccaggaaccaatatagattaggtccaagctctatggatctcacagattataaccacagcaacatttgctatgtgtcattaagagtttgaaactttaatatcttaacctaatatttatatttttcttatcactaaagaaaaaactattatcaataaatttgataactgataaactca

SEQ ID NO: 397150 - DNA, 273 bp, Homo sapiens
tcagagcagatttaagtgaagttacagaaataggaatgtgacatttcctacaacgggtgtgctggagcaaaatgtattccctctctggtttgtggggaaggagaatgctaacagacaagactccaggttttcgctcttaaacctggtgcctagaaatgcattttctactggatgcagacagaagctccatatagacatatccatcgctgcatcgctcatgccttgtgttctccctaattttccctttttaaaccacagaggaagaaaattcca

SEQ ID NO: 397151 - DNA, 699 bp, Homo sapiens
atcttcagatctagttttttattacaaaagacaactatgcttacaaggtgaattgaattacaagccttttactactttttggtgagttaagaaaaagctatttaatctaacaaagtttcactttagcactcagctaaatagaaatttcgaaattttatttaaagatatgataaaataccatatggccctggtttcaagagaaattcatttaataagttgtgtaaatgagtttattagttaaagtgaacttacaaaatctctgttggttttataaaccaaagcaaactagttcatttgaattgctatgtgcccccctagcatttttaaatgcaagacaatgtatttgtagaaatgatcattctttctcagggaatgctaatttaccatgctcccatggtaaattctacaggaaactttcatggaaaatgtcaaagttaaggaaagtttagactcaaaaataataaatttttggtaatgatagtttttggaacacgtataattccatttacattctcagcttttcaattgtatttatctgaaaattagtttcataaaatgttacatggttataactcaatattactgtataaagtatttgagaaatgtctggtaactctcttgtgattaggtaacttcatgactcaaacctcctgttactgttttgatgctagctagcacttattaagctaccttttaatg

SEQ ID NO: 397152 - DNA, 202 bp, Homo sapiens
ggtcagtgatgttacagtaggacttccttgcttttcttcatggcggggcttgggcgtggttgttggctaagctccccgagactccttttttctacatcatgctattcctgtggccaggggctctgtcccctgctcagcagtgttccagggagggtgttggtcagttttggtcatcccagcacttaggtgggatgcagggtgg

SEQ ID NO: 397153 - DNA, 415 bp, Homo sapiens
aggtggtcccccagctacaagctaagtcctttatcttatttaactcctgcaacaagacatttactgggtgtctgttatgtgccattcactgttttcattgctggggatgcaaagcttaataagacagagcagtttacatctgggcctgtacttgtgctacttacctcactggcctcatccaatcccagccctaacagatcctgtgtatttaaaattttgatattttgttcatcacagattttttttcattaattttgaattttttaaatattgtattaaaatattacttatcttgattactgagctttttggctcccgtaaattttgtacctgaggtgaatgccttatttgtcgtggttttaaaatatgtttgtaaacaactaaattaataaatagcaaataattattgaataaa

SEQ ID NO: 397154 - DNA, 493 bp, Homo sapiens
caaagaggttggggaaattgaaaatgtttatgtcctaaaagtggtcacggaagtttcagctgagcactggctatattctttttggatgcctggaattcttaagacttcactttagcttcaaggagcttacagtctagttggaaagagagatcagatacataaattaacaatgccagacagccatggggagtacccatgggaatgggcatctcagggagtaggagtttggaaaggaagcaggaaaggtggtagtgagatgggaagagttatgggggtgaagaaagggggaagagaacccatggtctggaatgctgaataaactgaaatttgcagaaaatagtcaagacctgtgctgttgggcataatcatcatcaggaataaatggcacccaggcagaacacactttcattctgtaaatatttaagtgccttccaagtgcaagacactgtggcagacactgggagttaatattcaagattgaatgcaagccaaa

SEQ ID NO: 397155 - DNA, 330 bp, Homo sapiens
tagccactgaggcagaattgatactgctgtgaacagctgaccattaaagtttcatgtgaactgccatgtgatctgcacagtttgtgcgcctttccggatagtgaaacacagggagagaaacatgttcccagtgttgatatttgaaagctgatctgttttgtcatgtgctctgggtagaaggttgctgtgtgacgtgctaccaagatcatgtgctctgtcctatcagaaagcttttcaaggtgagtgaagtgtgttcagggggcacagaaataaagcagagttgccaggcgtagtaactatttgctgattgtgtaacaaaaaacataagtg

SEQ ID NO: 397156 - DNA, 318 bp, Homo sapiens
aagttatcctggcctatccatcaagtgccacccttcaaagctcacagcatgcctggataatcctgccagactcagaccacactctagccatatttccctgacaggtgtaacgatgtgctctacaggtccacaatccaagccataagcaacccccaaatgaagaccatcgatccaatctatacagtctcccaagagcatccaaatacagggcaggcaggcagcaggtgcacaatctcaggatggaaatactccgtcaatcattcattattctttgattgagttgacttggtgctcagtgctgtgctagatgctgtggga

SEQ ID NO: 397157 - DNA, 410 bp, Homo sapiens
agaaaggaaaaggatgacaagatacttctataaaaactttatgctaataaattagacaacttggacaaaatgggcaaatttgtaaaagtgcaccaattatcaaaactgactcaagaagtcatagaaaatatgaatagagccaggcacggtggctcatgcctgtaatcccagcactttgggaggctgaggtgggcagatcacaaggtcaggagattgaaaccatcctggccaacatggtgaaaccccgtctctactaaaaattagctgggcgtggtggtgggcgcctgtaatccccactactcgggaggctgaggcaggagaatcgcttgaacctgggaggcagaggttgcagtgagccgagatctcgccactgcacaccagcctagcaacagagcgagactccatctcag

SEQ ID NO: 397158 - DNA, 604 bp, Homo sapiens
aaaattgtccctaaatactgaactttacatattaactcccttttatcttgcaattataaaaatattttcacaaatattagaaatatatttaagctagaagattgctttaaaggacagggctatagctataagtactaattcatgaaaactatttagtttcaaatataaagctgctttttaattatatgaaaatgaagtaccacatctactcctacaaattaaaaaattgtcctttccttatttatttatttttgagacaaagtttcactctgctgcccagtgcactgacatgatcacagcttactgcatccttgacctcctgggctcaagtgatcttcctgcctcagcctcccgagtagcactgactacaggtgtgcaccactacgcccagataattttttatttttttctggagacaggtgtcgccatgttgcttaggctggtcttgaactcctgggctcaagcagtcctcccactcagcctcccaaagtgctgcgattacaagcatgagccaccacacccaggtctaagtgatactttaatcaagggtagctctcttgctcctgtttttgccatgtgacatgcctgtgccccctgtgtcttc

SEQ ID NO: 397159 - DNA, 409 bp, Homo sapiens
cacacacacacacacacacacacacacacacccatcaacaaatagtttttcctggaaggaacttccagtagtgtatgagaaagcctattgcaccacaccatccccagcaatgagaattactactgtaaaaaaatctttgttacattaaatttttggaggacatctcattttcttgattgcatttgattaactcaaaatgtatttctacagggtggggaacatcacacactggggcctgtcgtggggtggggggatgggggagggatagcattaggagaaatacctaatgtaaatgacgagttaatgggtgcagcaaaccaacatggcacatgtatacatatgtaacaagcctgcatgttgtgcacgtgtaccctataacttaaagtatataaaaaaaataaaataaaac

SEQ ID NO: 397160 - DNA, 479 bp, Homo sapiens
cctgtccttcctccttgttaacaaccctgggcactgtcaagccagaaatctgagagtccccttagactccctcactgcttcttgtccaaaccctcatcatccatgcttggatgccagcaacagcctcctcactggcccgagcctcacggtggtcctgggccagtccattctcttccctgggccagacagagcttttccaaagtatagaactgcccatgtcacttcctgcttcacaaccttccgcgctccccagcgcttgcaggacagagcccaaacttcttagtgatggtcaccccagggctgtgcacgttgctggccttcacctcacctgcaacaccccaattcctcctcttgggagacccctccttaaggactgccccctgtactctatacacgtctgtggctctaaggagcctgttttctctgtcctctgtccactgcgaacattcttgtccttgtccttgctcctggcttggtgc

SEQ ID NO: 397161 - DNA, 278 bp, Homo sapiens
aatcagcagtaataagacagtcaagacagtcaggcaagagggctgctttaaggagccacatttaaacatcaaaggcattcctatttagcaggagcatgcaatttttaaaaaatggaattatcccattcacagtatctagaaataaccccagcaagaaatatatgggacccaggctgggcacagtgtctcttgcatgtaatcccagcattttgggaggccgaggcaggcagatctcttgatgcgaggagtcggagaccaacctgggcaacatggtgaaa

SEQ ID NO: 397162 - DNA, 200 bp, Homo sapiens
aaacagtagcaaaagtcccaactccggatcagaggatgatcatctcatgtaataactccagtctatttccgtcagcctgtgtgaatctaagaaccaacccaactacatccatgcagtcagggggtttcacctgcccagtgtgggcagatgggggccaggggttggggcctggtcatggccttggcagctcactctgtctt

SEQ ID NO: 397163 - DNA, 738 bp, Homo sapiens
taatctacttcttcacaaaggaaaagatttgtcatgcttctttggaaatgggactgaattctgatgtattagcttttacatatgaaaatttgtattttaattccttgagtttgaataacagataatatgggaaatctaatatcatacaggctcagaatatctgctctgttcagtatcaaacttatcctttgcaaactctcttcttcctgttggtttgtttttaattttgaccaataataccactggttcttggcccccatgtccagcccagctagtcaggaaatccagtcatttccacctttttagtattgtatgtctcatctttagtatatcgtctgtgctataagtcttataccactatcctgtttaaaattcttctggaaagccaagtaaactagaaaggataaagttgaaacttgttagcatggcacatgtggtccttcctgatgtggccgtagcctgccttttcagacccatctctttctacttcctactcaagtgaatttgattcctgcttcaagcaacaggaacagctcctttttcttaacctctgcatttactttttcctgtatctggatttttctttttcctggaaaatttttatttgttctttagggttcaactcaagggaatcacttgtatgaaacttttccttttgtcttcaggtagaggtaagcatacattgctctgtaattccatcatgcctttatttattcacactgtgagagatggtattgt

SEQ ID NO: 397164 - DNA, 433 bp, Homo sapiens
tgacatctattaacttctaagtggcaagagtgattcttgtggttagacctgaatgggaacttgtaagtctaaagtgaaaatctaattagatttttcccacaaaacaattttccgcaacgcattgtggacataaaggtttgatgaatgtatagccaggcacagtggctcacatctgtattcccaacactttgggaggccaaggcaggaggattgcttgagcacaggatttgagaccagcctgggcaacatagtgagactctgtctctataaaaaaataaattagcagggcatgacggtgtacacctgtagccccagctactcgggaggctgaggcaggaggatcacttgagctcaggagttcgaggttgcaccatgattacacctgtgagtagccatgcactccagcctggacaacacagcaagaccctgtctc

SEQ ID NO: 397165 - DNA, 455 bp, Homo sapiens
agtgcctagaatagtgtttatcaaatagtatgtccttatgatccccattttttttctatattctccagaacaatcaagctgtattctccaggacagctttacagagcaactaaaatgttgtctgtaggcaaaagatttgcataatttgtttttaatatttgaatgttgtgatatttcacatgtgaaataacctagaaagagaaaaaaatcttcatttttcttttctctttcttgagacagggtattactttgccacccaggctggaatgcagtggcattatcttagctcactgcagccgcaaactcctgggcacaagtgatcctcccagctatggtggggaggatgaagtgggaggaccacatgagcccgggtggttgaggctgcagtgagctgtgactgcaccactgcacttcagcctgtgcaacagagcaagaccctgcctggaaaaaaaaaa

SEQ ID NO: 397166 - DNA, 533 bp, Homo sapiens
catgctgtgaggaggaagaactgactttgccccagaaactgtcatgggcatacttgatttgttagtttccttgggggataaagaatccacagcacagcacctgctgagtggttgttggctcagagaaagcaattgaagcctcatgctgatagcaagagatgtatcagatacaggaggatgcctcaatcagcattctcagctgcagtcaagaaaaatgaattgtggcctatgtaaacagaaaaggttggcgggcatggccagtgcatggcccaatcacaccactagcctgggctggtggtgacagttctgttgccatctccatcactggacaccatgccagtccttctcatgtcagaactacatactgctgccatccaacaccaagatgtgtgctttccatttgctgtgaggccttgagccagggccggggctgcgagggtagctggggtggagggaacactcagcacctagaaaacgagtgcttggcgttctgcttggtgggaagctgggaatggcacccaccgagactcata

SEQ ID NO: 397167 - DNA, 509 bp, Homo sapiens
cccatagttagcaataatagagtagatttcatcttgtatgttttatcacaataaaaaagaacattcatgcctttttaaaaacattattttgagtacccagtatgtgcaaaggagcctcttattacaaatcatcgttagattaagggagttgatgcttttagtcaaccatgctggagaaagaacaacactttctaaagaggcaaataaactatatgttaaaagtaaccagtccatttctctgtctcatagggttgtggcaggcactttagaaactttaatgtttttctaacttcatttaccgtaggtaagatgcctaacaaatggatgagctcagttgtttcaagagtttgtctcccatgagccaatgcccatcacacacacacacacacacacacacacactcacacacgagcaattatccttaagaaaaataatatttatagcacttaaagtgttatttaagcaacttttcctgcttaattccaaagaatgacaatacatccaaaaaa

SEQ ID NO: 397168 - DNA, 212 bp, Homo sapiens
gcggccgcctactactactactactgctcgaattcaagcttctaacgatgtacggggacatgagccaatgcccatcacacacacacacacacacacacacacactcacacacgagcaattatccttaagaaaaataatatttatagcacttaaagtgttatttaagcaacttttcctgcttaattccaaagaatgacaatacatccaaaaaa

SEQ ID NO: 397169 - DNA, 431 bp, Homo sapiens
accccaaatttataacagatacattaagatattccagagttgtgactagagggctagatgtgaaagacatacttttcactgatcctgaaatatattcagcaattctgtacttactgatatttatttcatatcaaaaacataaaagtctggccaggtgtggtggcgggtgcctgtaatcccagctattccagaggctaaggcaggagaatcgcttgaacctgggaggcggaggttgcagtgagctgagatctcgctgttgcactccagcctgggcaacaagagcgaaactccatctcaaaaaaagaaaagaaaatgcagattcttatgtttcaccttagaaccattaaatcacactctggggagggagccagagaatctgcaacttaaacaagcactcctggtaactctttcataatcaatctggaataaaa

SEQ ID NO: 397170 - DNA, 561 bp, Homo sapiens
acatgatacaatcgagctctgtacccaggctgcaagcttgggggcatggtgatgaaagcggcgtgagctcagcagtgcactggatgggcagaagaaatagccagcagtccacagtagttaactaagcacttcgctttccttttgatcacctcactctttgaatgggatttgtggacagggtggctaactagtttccccttagggttcattccagatcattagggtttagtagaaaccactcatggttagctacccacctttgattttagaggtggagatttatacattcagttaactacagctattcaaaagctcaggaattttctacttaaagagatgttattggggaacaaatgggcagaaaaaaattcctttagcttatattatataatgagaatggctttccttttaaaactgcttcacctgaagtgaattctggataacatacattcatggtatccaagtgtatagttttcccttcttgcttattgatccagtgctttcttgtgtttcttatgctggtaatttcccagttgatattgggggaagaacagcaaggca

SEQ ID NO: 397171 - DNA, 325 bp, Homo sapiens
attctgtggctgatttcctcctattttgttttttgttggttggttggtttttgctttttcagtagctacccaggtatacaaatagcttctttgcagttctgatcatctttaggggccgcattgggcataattggaataataatactagctaacctgcttgcagggcttgctctgtgctgtgcactttgtgagcactttaaatataggagccaaacctctctttccaaaagcctgaagggcaggtgtcctcgcagttcccattccatagatcaccatccttccatggaaagtactctgtggactgtaacttgccatctagactttt

SEQ ID NO: 397172 - DNA, 503 bp, Homo sapiens
cgggtgatctaaggatccctcataggtcgcaagtcaggcatggtggctcacgcctgtaatcccagtaccttgggaggccgtggcaggcggactgcttgagctcaggagttcaaaaccagcctgggcaatatggtgaaaccctgtctctaccaaaaatacaaaaaaactagccattttgtaattacattacaaactgaaaaaccgtgaaacatgaaaaaataaagtctgcccttttcaaacagaaaattaataaacaacaggctttacagttttaacaccagtgttcaaatccatctggataatttcataacctgtgacctcaagcaagttagttatggagactgagctccacttccacatgtataaaattgcaaaatgaaaatacaggccaggggctcacacctataatcccagcactttgggaggtggaggtgggagaatcacttgaggcaaggagtttaaagaccagcctgggcaacatactgagaccccatctctatttt

SEQ ID NO: 397173 - DNA, 701 bp, Homo sapiens
gaactatgtcacagatgacacacaatggaattgggccttgaaagattgagtagaagctcattgcaggaatggcttttcttttgtccctttctctcctgtttttttcatatattctaaatctgataatcatactcaagcccaaccctctactccccaacctccttggagctgatctcaggtgattgggaaatatgaacaccggagagaggcttcctctctgtagccatccttccctctttcctactgttcctcttagtcctgcttgaagcttattcttgtgctcttagcctgtttctctggttatccattctctcttctgccctggcttggtttctgctcaagtagtcaggtcaggagttagggtaggggctttggagcaaaacatgagtttaattcctgaccttgtcccttggagactggtttcgtccacttcttaatcgtttttaccttcaacccctccctgtcttctggcatttctctttcaaactctaacttgcttgtgtacccataaaaataagtcacttccctcctctggcccttacatcctctctgctttccttcttaaccaagcttctttaaaaggctagactaccctgctgacactccatattcttcaatctattgctatctgtatgcctgtcacatacctcaagcccatcacattcagaacaaaattcttcttcctcaagccagcctttctg

SEQ ID NO: 397174 - DNA, 528 bp, Homo sapiens
acagccccattttctggcctgctatgcctccaggaagactgactggccttagtgcaggcctaggggatgcctcttggaggtggcatcagccctacctggatgacagagactgagagtggcagagaggtggttcctacggaaaactggagtatagcgaccaaaagaagggagctggaatgcgaaggagtcaaattcacttgctgtccatgacctctgcgtatatggcaatacaacacacagagagccggcagtctatttatcgtgctgttttgcacctgaatattttttccctagctgaacatacacacccgggtttcagaaatttgggcgagaagggaaggagagaaattgctttctttcctaaggtctaagggaatgtgacatcaaaaagaagctccaaatctgtgacagggctttgggcagttataaagtgctgaacagtctgtccgttaatgcacgcgacaaacattttattgggttcctactttgctccagaaacaatgttgggtttttaatttaatttaattt

SEQ ID NO: 397175 - DNA, 364 bp, Homo sapiens
ctagtctctttattagtaaataataaatgtaatataaagttatagttctacatttaatccacttctcttccttccttttgaagagtgtaaactcaagatgggaaaggaggacaaagccagaagtgtgaaagatatttaagcagttttagttgacagtgagtttagtttcaattaacagtgtgatgtggttgctaaaaaagctagtatgattttgggatgcaataaggtaagcacagaatctatgaagacctcctggtgtgttgtattccatgtcggcttcccctgctaacactgataaagaaggtctaggatgtgctcagaagggagtaggcagaataggggattgaagccaaacaataataaa

SEQ ID NO: 397176 - DNA, 156 bp, Homo sapiens
agatgcaaaactagtgtcttgaaactcaggggccagcatcgcttcacttggaaacagtggccatcattagtctttactaagccctgtgcatcaggtggcagcagggacattacttatttaggactttcgtaggagctggtactttgtaacacttaa

SEQ ID NO: 397177 - DNA, 285 bp, Homo sapiens
tggaatgggtcgggggtgtcggttcctttactgggtcatctggtaaactgcagggtttctgatgtgacattgaaggaagacatcaatcctctaagacatttttttcctcttcccctgggaatattactttttggactgtcttggtctgttggtaagctcaagggaatttgtcagagtttttttggtttttgtttcttttggctcatgtttaagcatcgattggcagagtttttgaagtcatcctcagagaggaattacagtggttcggaggtgttttctatagtg

SEQ ID NO: 397178 - DNA, 281 bp, Homo sapiens
tcaaggcgaggctaccccattcacacccacacacccaaacagggagacgcatcccaaaagaaagctccatcttctcagtgtgtgtccccagcccatttcactaggagttctctctgcttcccattcttaggaatgaactgtctctcctgaatccctcctagagtcccccaatttggcctaggctggatgaggctaccatcagctgccctggagatggaatagggatctcctcagaccccagagcggctcccagcacctgctaaggctggaaggcctcctgt

SEQ ID NO: 397179 - DNA, 500 bp, Homo sapiens
ccctcatctcctcctgcaagtctgccattgtggagccacgtggaaagactcaggagtggtcagcattagaagcctggctgagccagaggacaggaaagcagccggcacccagggcctgatgtgccactcgtcagcaaggtggacatgaagacaagactgggaaggagcaggccccaggccctcaggaggacccccttcacaagcgccactgctcactagctatgtgaactgggaaaagtttccaacccctttgtgccttggttcccttacccattaataggacagtaatagtccccacctcatgggcttgctatacaagatgagttaatagatgtgcatgatgtaaataactaagaataacgcttggcacgtaataagtactgcatccgtgtttgctattattattctgctccccactccccatgtgttggagtcccactggggggggcaactgggattccattacacccatttcaatgaaggtgttattaatagctctg

SEQ ID NO: 397180 - DNA, 405 bp, Homo sapiens
ctgtccgtttcgagggctggtcatcttggagcctttggggagagaagaaagagatgcaagaaggacagtgaccaatttgtttttccttttttaaaaaatgtcaagtaccctgttttgggaatcccctcatccctgggcaaaccaagatgcttggtcaccatagcaagaagagagctggagtctaggtgaacagtccaaggtctaggctccattcttcctgagtggtttgggtaatcctcgtttccctctctcaagagagaggtcagatcatagagtgtccaagggtgctcccagcctgagactctggggaatgctgggcccctcaggcctggagacatcctctgtcctccttccagccccggtctgggctgttcacagacaaggtaccctggagggccttgcagc

SEQ ID NO: 397181 - DNA, 474 bp, Homo sapiens
atctcagctcaccgcaacctccgcctcccgggttcaagcgattctcctgcctcagcctcccgagtagctaggattacaggcatgtgccaccatgcccggctaattttgtatttttagtagagacggggtttctccatgttggtcaggctggtcttcgaactcccgacctcaggtggtccgcccgcctctacctcccaaagtgctgggattgcagatgtgagccaccgcgcccggccaaacctgggtaattttgaaattttgttgttgttgttggttgtcacaacttgtaggtaacatcaagtgggtagaggccagggatgctgctaaacgtcctacgatgcacaggacggtgccacaacaaagaattatatggcctccagtgtcacttgtgccacagttgagaaactgaaactggatatgattttcacaacattaaagtcctttctgaccttgcatgtagttgcctcttccaag

SEQ ID NO: 397182 - DNA, 340 bp, Homo sapiens
caaaaaagctggatgttgtggagaggaatagagaaaattagaggttgaacatgtagtaagagtgagtgaatattttttagaatggggagataagtgtgtttgtttgctgtctaggagtgagctatagaattgtccaggtgagatggaaagataacagagagaagatatgagaacaaaatcctgtaggaaattagataatatcaagaacataaatagaaggcctggcacaaagtctcatgcctatgatcccagcactttgggaggctgaggcaggcagattgcttgagcccaggagtttgagaccagcctgtaacatagcgagaccacatctctacaaaac

SEQ ID NO: 397183 - DNA, 486 bp, Homo sapiens
gtcaggtttagacaccctctgagacaccaatgctcctcaaaggagtcttcaggttacctctaagagaattatttaggaaccctgctgctgaaaatgaagattcctggaccctaccccagaccttccaggatttaaaaatccagggggtgaacctacatttcacaagcttcccagatgattagaatacacaccaaggtgtataccatacacagagttgtccctgagtatccacggtagactggtgcaaggaatccgtgtggataccaaaatccaccaatgctcaagtctcttacgtaaaatggtataatatttgcatataacctacccatacctctaatactctttatttaaataatttatttattttctgagacagagtctcgcactgttgcccagactggagtgcagttgagcaatctcgactcattgcaaccaccacctcccgggttcaagcgattctcccgcctcagcctcctgaatagctgg

SEQ ID NO: 397184 - DNA, 341 bp, Homo sapiens
  misc_feature (273)..(273): n is a, c, g, or t
  misc_feature (291)..(291): n is a, c, g, or t
  misc_feature (336)..(336): n is a, c, g, or t
tactaatctgatttttggcaactgcaaaccttcctttccctcttcaaaccattccatccggctgctgcaatgacccaccatatcaaaatggttcttgtaaatcacactcaggtcaccaatacaaccaagtctcttcagaaatcttttttgtttttttttttttttcgacacacattggattttaatgagaaaataactgtatacttgcattgaatgcctcacaatcactctaaaaccaaagcaggataataacatttaagtggttaacatacncaggtaaaaccagatacngagtataatttccaaacacggtatttgctgcttttttcccctccnccccc

SEQ ID NO: 397185 - DNA, 424 bp, Homo sapiens
cagcagagtcagtagaaaggtcgtgatcccatgcccttttaaaggaaagcagcccctaggaatactctggtgcctggatgggtgagaatgtgcttgaaagatggattaagaagccaggacactttgggcttaaaactcagctctgccacttacattcctcatttctttctatcctgggtctgccaaaatgtaagaaaagttttcacatttttttaccagtttttctcacccatgaccaccctgtctcaaaatgattatgcaacagcccagagtcccccattccaaaattctttgcaaagagcaagatttccctcgctatttctgaattcatccacacctctatttctctctctttctctaattctcccttctccctacttcttttttttctccctttcctccctcagtggttttctttattctt

SEQ ID NO: 397186 - DNA, 197 bp, Homo sapiens
tcctctccccgctagtggtaccacggctaccactagcaattactgacatgtgggatcttagggctacttccctataaggctgcagggcatgtggtgttggctacgcgcatggtaaccatggtagccctgtggttctccacatgtgcgccttgtgacctgggattggctgcagactagtaataaactgcgtcttctgg

SEQ ID NO: 397187 - DNA, 246 bp, Homo sapiens
gtgggtcattggcagagaaagataatactaaaatcttagagactgtgaaaagagattatattaagcaacttgagtgattacttttttgccagttaaaagaaatgagataatttatattgaagatgattgctatatacagtgctttgcacaaaaggccacatatctctttttaccttaggtaacatgatgtataagctactttcacatatatcttcttaggtcatcacaaggatttgagatcatcat

SEQ ID NO: 397188 - DNA, 154 bp, Homo sapiens
accgaattgacgcgtctcttcacagaactgataatatgcacaaaggcagaggtgtgaaaaaatcctttaagatttagaggggtggccgggcgcggtggcctcacgcctgtaatcccagcactttgggaggccgaggcgggcggatcacgaggtc

SEQ ID NO: 397189 - DNA, 440 bp, Homo sapiens
ttttttttttttagctacacctgctgaaatgggaggggttcattcttggctctactgttttctgagaacttgaacaaataaactgctcgatatcaatttgtttttattttcaatagcaaaataaagataggaacattacgtgcctgcgaggagatcctttacctaaagcgcttagcacagtgcctggttcatgctgttcacacagtgctgtgtgttcatgttattgacagcctcagtgacagcctcagtgagcttaggtcactatctttgggccttggctgtccccttctatcaaatgaagtgattgtttcacccctttataggtccgtgtttctgactcactttaataggactgaaactcgtgattgtctctcctccacgtgtagactagccgactaaaagaaggctatatgatatatatatacacgtagttgtccctt

SEQ ID NO: 397190 - DNA, 345 bp, Homo sapiens
cccttctactcaacctggtgactcatctctccgattgcaaagagcaagacacgccactccgccttcaacgccaaagcggggatctgctggggcacagtatgcaatttaaggaaaacccccaaaggctacaggcgacctgctgatcaggaaagaatttcgctcttgtcaagtacatcatccttcatgaccactaactttgtgttttttttctttcctttgttgttctgtttcctattttgccaggaagtatttccatagttgctgagaatcaaagcacaaaagaaatccctacctatgtaaatgtttgaatggaggacgccagtaaaaaaacaaaaacaaaaacaa

SEQ ID NO: 397191 - DNA, 133 bp, Homo sapiens
aagcgacattttgtttgaaaagataatattagttaaaatgatattatgtacagctagccaatactctgaatacatacctaaagcaaagcatacatttgacctatagatccggatcttgtattgtcccatgccc

SEQ ID NO: 397192 - DNA, 705 bp, Homo sapiens
cgagcctctgcctcccgccgcctcctcgccctccattcctcgctccccgtcttctcccggccacaccgccactgctgccgcctccctgggaacagtagccgggggagggggactggcgcggtcagagcctgcgaggaggtgcggggcgccggggcgtaggggagcgcgccgggccctgcccgagatcagataacagccggcgggggagggggtgggccggccgtgctcacagccggaccgagggaccgacgccagccgccccggcccaagcgagcgcccagcggccgggggcgcggtccaggcgcgcgcccccgacccgtggctggaccagggcgatccgctttgcagagaagacgcgcccctcggcatggagcgcccccgggagctgccctgaggcggtggcggcagcggcggcgaagcagccagcgcggcagctgccggggccaggaacggccgcccggagcttggaggacgccgagcgcgccgcgcccgggccactgaccgaggatgttctagtgactggatcctttccagttggtgcctgggaaatggcagcactactaattcagccttgaagacagtaccgtgcccactcagcaccattacatagaaagatagaactcaagaggagccgcctgctggagctagcctgggggcgagccaagtccccaaccccgggatgaccggggcagccgggcaacccta

SEQ ID NO: 397193 - DNA, 331 bp, Homo sapiens
agtgactagaacaggcacaaggggacttctggggctctcgttccattctgacgatggacgggtttgtggatacacaggcgagattatgttgtgagaatccatcaggctgcatattatgacttgtgcatgtaaaacatgtatgctacacctattaaaacgtgtttgttttagaaatgccttcagtatgtacagctatgatagatcaacagaaaaaataaaacactttaaaatttctttaaaaatttttaaaaagcagtgccttcaaacacccaggctattgtgcagcgtgttgctactgtctgtgatgcctgcgaggcatgggtgagaggag

SEQ ID NO: 397194 - DNA, 617 bp, Homo sapiens
tttacctatataacaaacctgcacatgtcctcctgagcttaaaataaaagttttttttaaaaaaactgttgtcctttttgcttaaactatgttatgatcaaaggaaaaacaaaaggtagaaaggagaaaagggaagcaagtaaaagaaggaaagttgaaattgatcacctctttaccccctggcttgagatgagggtgggagggcaaattaggtggcaatatcaagttcaagagaaaggcagcaggacctttgcccagtccttgctgccagtagatccaagcagaagcctcagcacagtactctgaacactagatgatgctgacaaccaagttgcatgaagtggcaattggtcctagttgatcaatatggaaatagagagatatttccctgtatggtcaaaggaaaagcaaagttgggatcaccaactgtcaaaatgatggtcctcctaaggccttgtctccccagccaggtcacacttccccaacaacagttggcagtggaaggatctgcatcattttgattaagtattattattagccacaatgaggtctgtaataatcaatgttaatttatacacctccctttcccaaaagcctctgattgattgagagaagta

SEQ ID NO: 397195 - DNA, 521 bp, Homo sapiens
cggggccccctgatgccccctcaggctgggtaggctgacagggaggtgttccataagcctgtgccagcgtcgcctgtcagcggcagagcctgagatgcacagcctcctccttagaggttccgagtgtcgcccctctccggatgggccaataagtggctgctctggacaagtcccgcgttctttcactgcgctaccgagactaagtgcactgatcaagcccctaccccggggactgcccgggtggggaggcaaaagagaccctgcaaaaccaacacccgaggacgcacttgcgtctcggaagcccagcttgtgggaggcagagcccgtcctgaggggcgacgagggcagggggaccaggaggggctcgtccaggttctaaccagagcctggatggcaaggggcggagtcctggcagtcgggatgggcgtaacgcacaggctcaaggcataaggcacagcgcactcgggtcacaggcggaggagccagccaaaccctctccccgcgcccgtagccgcgtcccc

SEQ ID NO: 397196 - DNA, 309 bp, Homo sapiens
ctcaggtagacctaacagggctgcgcactacttaaagcaaacaagaaagagcctcactttaggcaagcctatggcaggaaagcctcattttaggtcttagtacattatacacaaatccaatctgataaaaccaaggcatacatttctttctcaatagaatgttgcaccttacaccaagattctcagagcctcgggctgcctgaggccaatctgggtactctcataatacctcacctggcctgggttctggtccagatgtgtcagcatggacacagggctggatggggcaggggggttaggtctacctgg

SEQ ID NO: 397197 - DNA, 1102 bp, Homo sapiens
gagatttctggataaatgaggccattctgttgagaaccaaatggctttcatgaataaaaatgttttaaagatattttacatattgcttacttttaattatattttatagtcagctctctaattgttcacaggttgatacccagatgtgagatgtcctagtcattgggttttcttctttcttttgatgcctttctttttttttactgctcatttgcatcttctttagttagccagcagaaatagaaaggtggttgaaacacattcagttttattatccatttttttaaaagatggggcataaatttgaaactctttgcaaaaatgaagttttgaatttaaaattgtttgattatctctattcatcttctacctctggttttcccagattcacttattcagagttaattgaacatctcacgaacccatatctcaagcctactaggcaaaatatactttatcctttaaagcttcttgccctattacgacagcaaggcaaaacttttatttggtagcaaatggttttaggcaaattgcagaattttagaagaaacgtctgagttgtttctctcatacagtgatttgtctggctatcttcgtatgtgtaacctaacggttgctctctgaaaggaaatgttggcgtgcgtctatagtcgcaggtactcaggaggctgaggctggagaatcgcttgaaccagggaggcggaggttgcagtgagccaagattgtgccatttcactccaggcggggcgacagtgagaatttgtttcaaaaaaaaaaaaaagaaagaaaaaaagaaaatatgagtcatatattttgttattaagtgtgttatttatttagaaagtcatttattgaatgactagtctttgccaggtatatctagctacttggtgtaggtgaaagggaattagaactaaattataccttgtgtctttatgtcttgataaatacaatgggggaaatgggcatgtaatgtatagttacaatataatgtactgagttttataatttcacaataagagagtatgtacagagcttttcatataagggagagcatccaagtttgtcttgggtgttcaaaggctttagagaagatgcaaag

SEQ ID NO: 397198 - DNA, 543 bp, Homo sapiens
caaaattggacatcatggaaaaaaaaaacattcagataaggttcccatctttctaccatcaactggtagatcctgggaggatgaggtgtaagagataaacgaggagagaagatactgatacccaacacaatttgatcttcagtgttgtctcatcttgaaatgacttaataacagagatttccataagaatcaggattcatttttgacccaaaaatggaagcttccactccaaagtcacaaataaggtttctggttttatttttagtgtgaggtaaacagtatattcaatattaaaccaaatggtaaaaacacatggatggtatattaatgcagaccttccattattaagtatattttggaacactcatggatttttcaaacatatgttggaattagaaacctgtaaaatctgctgcagtgtgtaatagctatttgtttgaatgtcttggcagtgcctttttagtagctaatgttcagtgtaatcttgtgcctttttagtaattaatatattaaatataatcttgtctgagtttttaaatggtc

SEQ ID NO: 397199 - DNA, 332 bp, Homo sapiens
ccatatatatttaactaagttccacgctaaggtctggaactattattgcaatgatgctatgttataattaggctactgtaatgtaataattgactttatccataaatatcatgccagtaacaaccaaatgtaccataaacaaagtcaagccatatatcttttctcttgtataataaacacacgttattttcatttaaaaacttgaaattattctgtatatattcattcgctcatttgcaaaaattatggtccagatctgatgtctgtcttttttctgcttttctcagagataaagaatgcttagtaccaagttacaggtgtaagacggacat

SEQ ID NO: 397200 - DNA, 435 bp, Homo sapiens
cttgaacttctagcctccagaactatatgaacagtagtttgttgtttaagccacccaatctatggtattttgttatggcagcttgagcagatgaataaaatacagccttttctcagtatctgcaacagactgatttcaggacccccctcccaatcccataccaaaatctgtggatcctcaagctccttgtatacaaaatgacgtagtatttgcatatatcctacgtatatcctcccgtatatttcaaatcatttctaggttacttacaataccatatgcaatgtaaatgctatgtaaatagctattataccatattgtttgtattagtttttactcttgtattattatttttgtgtgtgaattttttaaatctgtggttggttgaacctatggctgtagaacctgtggatatggaaggccaactgtatgtaaaaa

SEQ ID NO: 397201 - DNA, 163 bp, Homo sapiens
tgagatccatccattgtggatcaaacctaacagacaatggcagcaagaagtggggagagaagagaaactttctctgaagtcttgcctattctgtgcctccaacaatatgccccttccccataacttgcccaacgaatctcttcaactgtatcctttgtaatat

SEQ ID NO: 397202 - DNA, 505 bp, Homo sapiens
ttaagttgatttctttttctcattctctttcctccataccatatggaatctctaccttctgttttttaagtgattatccgaggcattttgacatgcatatttagctttaaaaagcccagtggcaggagcccctctctctcttacttgccccccatgccgtgcataagctgggatgagacaccaagctgggattcccatgctgtgtagactctagtacagattacccttaatggcaaaaaccgcaattacttttgcaccaacctaccacttgcagagattctagtaggtttaatcttctccaacccccttcacggtcccacggcccgtctttgccctgagccagaacactggaagctattttagcggatgttaacggggttctaggtgtgtataacgcgatatctgccgagcagtaagtgtttgtgagaaacacctcgttttcacatttccatcctcagttccccttctcatgctaacagcaccttgattcttcttcagaattcga

SEQ ID NO: 397203 - DNA, 395 bp, Homo sapiens
ctactactactactaaattcgcggccgcgtcgacacagccaattgtggtcctgctactttcagaaacaggtagacgtggattatataaagagcaagcaataaaaattcattttagccgggcgtggtggctcacacctgtaatctcagcactttgggaggctgaggcgggcagacatgagatcaggagttcaagaccagcctgaccaacatggtgaaaccctgtctctaccaaaaatacaaaaaaattagctgggcgtggtggcgcacacctgtaatcccagctactcaggaggctaaggcaggagaatcacttgaacccaggaggtggagtttgcagtgagctgagaccgtgccactgcactccagcctgggcaacagagcaagactccgtctca

SEQ ID NO: 397204 - DNA, 454 bp, Homo sapiens
ctgtattgcaagtaaaagacaagagtttggacttggtaagatggtggaagagttgggagatatgagtggatcaagacatatttggggagaaaagctgtaagacatgatgtgagtttgtaatggggcatggtgaaggagaagtcaagagtgatccacctttagaattatggcagggaacggtgtcatacaatgagatggagaaaaagtctactgtgggatctcatagtttagagatgtttttgagacaaaaaagtgccaacgggtatcaaaaaaaaaaaaaaaacaggcagatttactgatctcacaggagagagaaaagttgagcatgggtagggctacacagaaaaagaagacagactgattgagactaagccatgagaacattcaatatttatttactgactagaaatggatgagtttacagagacagagtgggagaggccagtgaggttta

SEQ ID NO: 397205 - DNA, 324 bp, Homo sapiens
aggctgggaagtccaaggtcagggtgtcagcagatttggtgtctggtgagggcagcttcctggttcataggtagccatctttttggtgtaacctcacatggtggaagggacaaggcagctctctgggacctttttaataagggcactaatcccattcctgagagttccacccccttaacctgattacctcccaaaagtcccaccttctcataccaccacattggtgattagtttcaatgtacaagttttggggaggacacaacattcagtccatagcatatgtcagtggttgttaacagagtcagaaggagttgagaagtcaaa

SEQ ID NO: 397206 - DNA, 291 bp, Homo sapiens
tgcggatgtgtagatttttcgggaaatgtgaaagcttagggaaaagggacgtttttcttccgggcagaggcagttccatatttcctatggggaaggagtttttagctccactctgactgaaaagtaggaaaaagagggaattcaagcgcttgaaaattcgcctgctttgcatttcccgaaagacagaaaacgtcagtgatccatttcacagatcaagggtacagaaaagtgtagagcagtttgagatgtttattgggcttggagaggtagcggacttttgccatcattccc

SEQ ID NO: 397207 - DNA, 514 bp, Homo sapiens
gtttgagaccagcctggccaacatggtgaaaccctgtctctgaaaatacaaaaattagctgggcatggtggcatgcgcctgtagtcccagctacttgggaggctgaggtgggaggatcacttgaacccagtaggtgtaggttgcagtgagctgagattctgccactgcattccagcctggtcaacagagcgagactctgtctcaaaaaacgaaacaaaacaagacaaagtccatgctcttatgcaactaacattctattgggagagataaacatgtatatatataaaacaatgtcaagtattagcaagaaaaactgaacaagatggagttgtagagagtaatagaaatgaaggacctattttagaccacaaagtccaaagtcaaatgtttttcaagtcaaagaggaagaaggcctctcctactggtgaatctaaaataactgaaagtaggatcttgaagagatagttgtacacccacgctcattgcaacattattcataattctttatctattc

SEQ ID NO: 397208 - DNA, 373 bp, Homo sapiens
ctagaaattgatccaaggaccagatgcttaaagttcacttcaattggtcactagaaagatcccagcaatccccagctggtttctcaggctgctgattccctttatttggtaatggggtgtgtgcagtacgttgattaaaaaatatgcatttccattccattgcttttgaaggggggcagttgtctttctcttattaaagagcttgtgatacacaggaaagtgatgtaattttatatattagtcaaacgtgaggattttagataagacagcaagggtttttttcccctagtttgtagaaatctagaaatttaagtgatgatttgaggatcgagaagggagaactgaatcaaaataaaatctactacacacattc

SEQ ID NO: 397209 - DNA, 404 bp, Homo sapiens
tgctgggattacaggcgtgagccaccgtgcctggcctgacctcctgtcttctgtttttgcccactgtcaagggtagacttcttcaaggctgtacttgtgctatcctaaagaggagtaatgggagacatttctgactttgtcagcatgctgcttggcagcacctgcctcgtttctggtgaccatttggaaatgtgtcctttatctggtagcaaggagcatttacattgatccctatgcacttaattggcatacttttattcctctggattttttttttaaagcataattgttcgtgtctacatgatgtaacatgctgctgacttttaagcaaattaacagagttcgtgctgaagcgcaagggtgcagggaaacaaaatgggagggttattaaaggggtgaggcgg

SEQ ID NO: 397210 - DNA, 460 bp, Homo sapiens
attgatttggcagtaatacttgtaaatttgtatattccaactgttaacaaaaactctggcccagagcacctatgtcaagtcttggctctgcttgttagtggtgtgaccttagacaagttacttagccttattgtcttagtttccttattataaaaatggggcagtgatgatcataatacccacttgacagggttttaatgaggatttcgtgaattaatatctgtaatgtgccagaccagtgttttgcatggagtaagcacttcatttgtgattcctataatttctgttacttaattctcatgaggaaacactagtaaaatgaagtaaaacataaaccttcttattatatgactactgtgctttctctcattagaccagttaaaaatctaagcctttagctttaactatattacccttattcaaacacataaaagatttttcctacatgctaggttttttt

SEQ ID NO: 397211 - DNA, 595 bp, Homo sapiens
cacgtttaaacattttcatggatacatctggttgctctccagaaagcttatatcaatttctattcccaccagcagtgaatgaaatgtgcatttctttacacccttgttgacacttttggtgtgatcagccttcatcttttcttccattctgagagatgaaaatatgtgtttatttgactgttagctagggccaggatgcttttaaaggtgtttcagccatttgtatcttctgaattttgcttctgtcctctgcccggtttgattggttattgggtttttttctttcggatcttaacagagtttacttaggaaacttttctgtgaagcttaatgtctgtagctattgtgaatgcaatggttttcctaacttatttccgagttggtggttgttggtgtgtaacagcacctgctttttgggtgcatccttgcagttcttgaaaataacttgtgtgttgcacgtggctttctattgcagtgcctgtgagatctgtgaggtctcctgagggtgtaacacagtgacgtggcagaaacctcgtatctactgaatggtgctgctgcattgctatttgtggggaagttgagtcatacataaatc

SEQ ID NO: 397212 - DNA, 434 bp, Homo sapiens
gaggagctgggacaacaggtgtgtgccaccacatctggctaatttttttacttttattttttcatttttgtagagatggggtcttgctatgttgcccgggctaggctctcacctgaaatcacatggctggtctacttggtatggccattcctcaccctaaatcacattgttggtgtgcattaaagcttccagccaaacaaagacattcctatcaggtatggtatcttacagatcgccccctacgtgttaaggatgaaggccagatcttttggggacaagattaaattctttttgttgttattgttttgtagagatggggttttaccatgttgcccaggctgggctcaagaaatctgctagcctcagcctcccaaagtgctgggattacaggcgtgagacactgtgcttagccaagattaaattctttactacac

SEQ ID NO: 397213 - DNA, 426 bp, Homo sapiens
ttggaagagttgagttctggttctgttgtatctatcagtcataaaacatataaatcattttaatctttctgagtttattcttcagctgtaaaatggaggtgataatacttatcaaaactgctataccaggttgtaagggtcagtgagatattaaatgtgaaagtgaataatacaatatgtaatatatatgcatgttgagtatccctgatccaaaaatctaaaatcggaaatgctctaaaatctgaaactttttgagtaccaaaatgatattcaaaggaaatattcattagggcattttgcatttcatattttcagattaggggtactaaacccatatataaatacataacataggattataattaacattaaattcatgtggaaaatgagtttattccctccctaataggtagctcatgccgacga

SEQ ID NO: 397214 - DNA, 368 bp, Homo sapiens
gaatctgtcttctattaagctagacattaaagagatgcaaaaatgtgaaataatgacattcttcacactaaattgttttgtttgggaaaatatagttttgtcataaaagttattttaacatataatatttattactttttaaacaatttaaaaatgcttttagttttaatttttaataaggtagatattgataggtgtaacccatggaaataaacaaaagctccttgaaactctaataattttttttttttttgagacggagtttcactctttttgcccaggctggagtgcaatggcgtgctctcggctgattgcaacctccgcctcccgggttcaagcgattctcctgcttcagcctcccaagtagc

SEQ ID NO: 397215 - DNA, 163 bp, Homo sapiens
taaaaataatgatataagtaggtgttgttatttactgtttgcatttaagaaggaaaaacgcatgcatttactcagattattaaaaagcgaattttatttgtctgatccaaactttatatttattctctttattggaaagcaggaagaagggaagacaggcagg

SEQ ID NO: 397216 - DNA, 362 bp, Homo sapiens
aggagacctgggtgtggctctgacacctgagacataaggtcactttctgggccactctaatatattatagccttttcattaaaaggttagactagaggttaaattcacaagaacactgaaaatggtctctgtgggtgattcactgttattctataatgagcattaaactgtcattttctgtttccttctgtatcctagctctactgtgattccttctctttcctggtttctctcaataccatagttaattttctttctgaattccaagagcacttgttcttttcacttttttactttgcctaaaaggttactgggttttatgaatattcatatttcttgatttaagtctccataacttaatt

SEQ ID NO: 397217 - DNA, 183 bp, Homo sapiens
aatggtttgtgccaagacccatttagagttcccagctccaccttctcaagcttacctccaccaagtcaccttcacccatctcacagacatccagacctgcttgagatgcccggcacccaacagccagggattagagctttttattgaaatccctgctatcattttagaccaagttcctgaatg

SEQ ID NO: 397218 - DNA, 567 bp, Homo sapiens
tttcacattcttcaattatttgtgttgataaataattgaatagaagttttaaacctgtgactatcctagaagttttaagtttttacattaaaacctattagatatgtaaatgtatacatttttattcatttttgaatgtaattctgtttaaaatcttaacatgacgaaatttaggaaattgttcgaagtcttgtctagatgagcaattttgaacactttacataacattcagatttttattgcatttattttaaaaacatacataaaacctttttcatctgtagaaataaactagaaatgaaactacagggaatattgtccttgtaccaggaagtaaaatctaccaactgtaggtctctattggcacggaaatgggcatcattaggcaaaacccagaaacaggttccagtacatagtgaaccttactgaaatgaagaaatgacatttccattaaataggaaaagcatggattattcagtaaatattatggcgtggctctcaccaaagatagtactataaggaaattccaagtatagtaatagcacaaatagaatcaaaaaacaattt

SEQ ID NO: 397219 - DNA, 403 bp, Homo sapiens
cataatcctgagtctcaagagattgcacctcctttatcattcctgattttcaggcaacatgatatggcatccattctgcatcaataactctttacaaagtgtctgtattttcatcgtcggtaagagtcgcttctacaccatttataaatatggaatttgaaattttatataaaattatatatgactacctaaatacatattgggttagaaaatactgtggtggtgttggtgactgctattttatgttaccatcaaaagaaaaaaataattttcctgatatgagaacctgaggaaacatggaaatatcagaatatgctcatttagattaagaatgtggaaaaacccttttcatcccattgttctgctaccgtaagtttttaaaaaatcaaacagaattaaaatt

SEQ ID NO: 397220 - DNA, 155 bp, Homo sapiens
ctaaggttataaaaggttttttgagactagctgaataaaccatatcctgttccttccttgggaaaacttgtttatattctaactgtttttagaccttgtaaaatttggtgaactccttcctcattagcttaaattcttccacactcagcaaatat

SEQ ID NO: 397221 - DNA, 418 bp, Homo sapiens
tgaactactggacatctgacaactgaggggtggcgttgggcacactgtgtgcacataaaaaaagggtttgtgggggaactaaaaggcaaacgagggaaagttgctatctagaagccatgggtgggacagtgcagggttacggaaggactggttcatgctatagattgtgtcccaggagaggctatgctctgacttcttcctgtgtccatgcaggcagatgagactataatcaggtggcacagaagcctgggttggtgaaaaaaccaggttgccagtacagactacctttcaagctctactgataatttacacttaattaaaaactgaagttaaaataagcaaagaaatctttccaaggtgacaaactcaggaagcggcaatactgattggaacacagacatatctgactcagatgtca

SEQ ID NO: 397222 - DNA, 330 bp, Homo sapiens
tgagatacaccccacccccaccatatagctagggccctaaaagggttacatccgtagtgcagtatttggtgtgtacattatactgtaattgttttctgtaaaacttaattgctatcaaaagaaaaaaatgagttttaaaaaaattgtcctgggaatttgttaccacaggtctgtccctcatttagatttgggggttaaatatatacccatgtggtctgaaaaaccaagcctagaaattaacttgaaattaacttctgggtgatcatgccctgcaggaatgacagaagcaaatttatcctctcaggataaatacatccctaaattcagacc

SEQ ID NO: 397223 - DNA, 685 bp, Homo sapiens
atggaggcaggtaagtggctcactttatagcgtaattgccctcactcttcaggtcaggaaaccagtgtagggattctgctaattgttgagtatgtctattccaattattctgcagctacagagataacaagacgacccactgcaagacagacctaaactaaaactccattgatcacctaacctccctaagcccctactctcacttgtgaaccagagtgatgcattagttttcctggggtaccctgagtctgagttcagaaccaatgtccagtaattcccccaaagtctgattattcccttttccccaatgcacagtcaacttggcaaagtgctataggtccctttggggaaggctgagagaaaaatgaacagtatacaattttggtaatgcagtggggacacagcctcctcattatttaaggagatatgggtctgcaaactggcccaagtcttggaattgattcaggagctgtgactccgtttttttgattcgagttagacttttattcacttgattcttctttttatacagaacagataagaatttagtaggctttccatctcttttatttctatggatactatgaccagctagctaatgccataagtctctgtaaatcggactttctaactacagttttgactttactgtccattacagtaaccatgttcaccttgtctttgg

SEQ ID NO: 397224 - DNA, 549 bp, Homo sapiens
cagttagtaaccctgcaatgacctctaagcattcaagtgaaaggaagagtcccacatctctcctttcagtgaaaagctggaaatgattaaacttagtgaggagggcatgtctaaagccaagacaggccaaaagctaggcctcttgcaccaaacagttagccaagttgtgaattcaatggaaagattcttgaagaaaattaaaagtacttctctggtgaacacacaaatgataagcaaaacagccttattgctgatgagaaagttttagtgatctggatagacgattaaacatttccttaagccaaaacctggtccagagcaaatccctaagtttcttcaattctgtgaaggctgagaaacttcataaaggctaaaaggtgaagaagatgtaggagagaaatttggagctagcaatggttttatcatggggataaggaaataaacaatttctataacataaaagtgcaatataaagcagcagcagatgatggagaagctgtagcaagttatccagaagacctaagataattgattaaggtggctacacta

SEQ ID NO: 397225 - DNA, 296 bp, Homo sapiens
tcaaggctggaagaaattgaactaaaactcatagatagaaggagaccctctttcagtgtatagaaggaaaaaagaaaggtataatcacacctctagggagtggggcttggagggtgagatggtgctttttagaagctcatataaaagggccatatcacttgagatgcattagactgcaaataataaatgtcctaagtaaacaggttaaacaataaagatacttattatctcatttaagaagaaatatatccagatttatttaataataatgtgaaacagtgaatcaaattatctga

SEQ ID NO: 397226 - DNA, 463 bp, Homo sapiens
tgcagcttctgtctcctgggttcaagcggttcttgtgcctcagactcccaagtagctgggattacaggcgtgcgccaccacacctggctaatttttgtatttttagtagagatggggtttcaccatgttggtcaggctggtcttgaactcctgacctcaagcgatctgcctgcctcgggctcccaaagtgctgggattacaggtgtgagccactgtgcccggccattttttccatttaaaaccctttaaaaacacacctgaaggtgcagcttcctttcctgaagggaattaaaaccatgctattagtaggcatgggatacgggagtagatcatctttgggtgctggtccagaaagtagtgagtaagtgagacaagcaacgataatattgtttagcacaatgctttgtgacagggactatagtcgtccctattaagtcagaatctcttgggacaggtgactgag

SEQ ID NO: 397227 - DNA, 311 bp, Homo sapiens
tggttcttgtggctgctcccagtgcaattgctgtaagccctgttgttgctcctcaggctgtggatcctgctgccagtccagctgctgcaatccctgctgctgccagtccagctgctgtgtccccgtgtgctgccagtctagctgctgcaagccctgctgctgtcagtccagctgctgtgtccccgtgtgctgccagtgtaagatctgaggctctgaacccagaccttcaggtttcacctgtttggtgaaagcatttgttatgatttccctgaattaattcatcccacgcatcctccctgaggcacctgccc

SEQ ID NO: 397228 - DNA, 261 bp, Homo sapiens
gatgtgaggcagtgacagtagcaggtgtgggatgggccagactaccctccacatggattgaagacacacaagggcacctccatttcaaaggaccggaagtctggagtgagtggggatttagcttaacgtctgctcaggagaaaaagacgtgtaggttagaggggaccacaggctcaagctcagcatgttaaaaggtttttagcgtgtgtggcttttagcgtgtgtgtgtgtgtgtgtgtgtgtgtgtgtctgcgcgtgcag

SEQ ID NO: 397229 - DNA, 352 bp, Homo sapiens
gtctatttatagttatgtgtttatatatattttcctgagaagagggactcaaatgagtataactgtactatcaagtattttactgacctattagagcactaatccttttctgctttttataagttgtttgatagctgtatcattacttactgacttaggacaagatttaaattattatcacataaactataaatagcactatcaaatatgccgtgtaagcagcacatttcctctatccctggcagttcattccagtgccctcttgttcttttggatgaagggaaataatatgcccttcacatttagaagcagcgaaattagaatcctgcgaagagctaccctatactgctct

SEQ ID NO: 397230 - DNA, 485 bp, Homo sapiens
atgtatctaactatttatctatgtatccatcagcttacacatgtacctatctaatcatctgtctacctctatctgtctgctaatcatgtgtgctcagggtcttcagttggattaattatggataataaaggcaataagaagagggcatggtgtggactcagcacatttctttccttagaaacatggccaggctgagcacggtggctcacgcctgtaatcccaacactttaggaagctgaggttggtggatgacttgaggtcaggagtttgagaccaccctggccaaagtggtgaaacccatctttactaaaaatacaaaaattagccaggcgtggtggtgggcacctgtaatcccagctccttgggaggcttaggtaggagaattgcttgaacccaggaggcagaggttgcagtgagctgagaccactgactgcactccagcctttgcaacacagcaagactctgtctcccccaacccccccccc

SEQ ID NO: 397231 - DNA, 505 bp, Homo sapiens
actgatactcaaaggaagatagtaagagaggacggaaggaacaaagagtctataaaacaaccaaatggcagtagtaagttcttacctatcaataataaccttgaaagtaaagggtttaaattctccaatcaaaagacatagagtgcgtgaatgggttaaaaaaaaaaaccgatctcaatagtatgctgtctacaagagactcacctcacctgcaaggacatgcctagactgaaagtgaagggatggaaaaagatactccatgctaatggaaatctaaagagtggcaggagtagctatacttatgtcagataaaatagactttaagttcaaaacttttaatggagacaacaaacatcattttataatgataaagggatcaattcatcaagaggtcttaacaattataaatatatatgcacccagcattggaatgcctaaatatataaagcaaatattaatggatctgaatggacagattgactgcaatgcattcatagtagaggac

SEQ ID NO: 397232 - DNA, 221 bp, Homo sapiens
ttatatttctacatataattgaaggcacaatcatgaaaaacaaagtagctctatatgcattaagtccatgatctattcagtgaaaaacacaagttgcacatgtcttacagaaggaaaacttaacactgaacatagattctcaccatctgctctttgtcctgaggctccaatagaaatacagtgaagaataaacattgtataagcacacaattacaaaaaag

SEQ ID NO: 397233 - DNA, 266 bp, Homo sapiens
ggggagggatataaaggagatctagagccctatcttccatgtaagtatgccaataggaaatccttagaagtcaaagaccaaaaagtagtaatataagtatttatttagacatattatcaaaataattcattttaaaagtcgaaagagtttgcctctggggagtgataaacttaagtgggaattaagaaattgttgatttttgtcataagtcttatagtaccatttgatcctttaaacaatctgcaactattgcttagataaaaata

SEQ ID NO: 397234 - DNA, 874 bp, Homo sapiens
catttattaaatctcatctgtgtgccaagtattcataggtatcacctcatgtaattctcacagttattattgcggtattattatttcaattttcatgtaaagaaataaaagctcaaagaagaaaatgactcactgagttctgaacacacaattctctgagtccaaacctctagcactttctagaataccatgaagagtggaagtaatatgtaacattataattaatgttttattattttactctcttattgttaaatttcacacagtaaaatctacacataaacattcattttaatttaaaatcaaattatactgacatagtgccaaaataactgctctatgagatcaataaatccaatctattctgatatagaaaggcaaaacccgtgtgcattgctttgtaatagtaaccaaacagtcattatgtttcagccatttcaggaacttatttgtgattgttgtatattgattataattctggtcagttgtagttaacaagccttttttttccttatactttcttttttccaaagaacctattttgttttatagcatggttggacttttctctagaaaattacaaatgtattcaatataaccagtatttatcccaactttctgaagaagaaacttctcctacttaactccaaccttatgactcttctctgatatttttccagccataggtgttagcatctgctgttgtaaaatctttggtgttgattggtgtggactgagatgaggaccagagccaagatcactttttacaagaaatattatacaattctgccccttgtccaactctataaattactagaagtttctggaagtgtgtacatcttcaagctcatcttaatcatttccacactgtcat

SEQ ID NO: 397235 - DNA, 101 bp, Homo sapiens
taacatcaagatccaaacagctcacacattttgtcttttaataaggtcactctccttttctccccatgccatttatttgttgtcccttctgtcgtcttctc

SEQ ID NO: 397236 - DNA, 601 bp, Homo sapiens
cctcctagccctcttacccctcttagccctcttactcctcctcagcctcccaaagtgctgggattacaggtatgagccaccgcgcccagcctaatgaggtattttctacctaatgaggtagcaccttcagcttgccttcatctttgtatgtagtgtttcaattatataatatcccagctttaaaatttttaataattttgtgtttattttcatttgataaaggaacaaggttgacttaaaactctggtcttaatttatgttagtttttgtttagaatttagattacgtatctttttacacaattaattatgccaacacatttctctgtagggaaattcgtctgtaggaataacagttttaactgaagtgggctgacttgggagcctttgagagttagcgcagtggagtggaaaaaccgcttggaaaaaattagactaaagataccaacatcagaggttggtggagaaaaacaactgaaatccattcttggtagtgttcatagcaggctaaccttaacccccatgtgggctctggtgaccctctctactcaccacacccactcactgtgggggaagggcctgaaacttggtgaaagactaag

SEQ ID NO: 397237 - DNA, 294 bp, Homo sapiens
tgaattagaggacccgagtgtctcaagacgaggtcttgccctgttgcccaggctagagcgcagtgacacgatcatagctcactgcaaccttaactcctgggctcaagcaatgctcccacctcagcctcccaagtagctgggactacaggcatgtgccactacacctggcagtgtttattctgataaatacatttatgagctcaaaaatgtaactctaaaaccttatctctgaacttccatattaccatcagaaatttagatagttgtttagttctctttttctttgtagaacat

SEQ ID NO: 397238 - DNA, 469 bp, Homo sapiens
cgcacccctgcgccctcaagccatgctgctccttgtaaatacccgctgctgcggtggccctgagcgaggaacaagccattcggacccgaccgatgtaaatacagccgcccgtccgcccgccttcctcccgggctccccggccttgcccgccccctcccgggcgtccctgtccagggccccggcttggtttccaagtgtaaataccgcctcgcgcctcaaatccccctaccccgtgtgaactctagggcatcggacctcaaggggttaactggacagacggggggcgggaggggagagcgccccctcccattgtatagccttgaacccgattgtgaatacaatgtagcaacttcgctggcgcctgccccgcactccccgtcccgtccacttctgaaactcctgttcctaatgacaaagtggctatgtgcaatggatataaatgtactgtgagtctctcggttcaaaaaaa

SEQ ID NO: 397239 - DNA, 325 bp, Homo sapiens
  misc_feature (207)..(207): n is a, c, g, or t
tgacctgttggcggcggccgggcgggaggctgtgggccgcggcggtctcccggggttgaggggaggatgcaggagtcacacgcggaggccgggtgtaaatagattgttataatttttttcttaaagaaaacgtcgattcgcaccgtccaacctggccccgcccctcctacagctgtaactcccctcctgtcctctgcccccaaggtntactccctcctcaccccaccctggagggccaggggagtggagagagctcctgatgtcttagtttccacagtaaggtttgcctgtgtacagacctccgttcaataaattattggcctga

SEQ ID NO: 397240 - DNA, 470 bp, Homo sapiens
ggaactgcacaaacctgcaatatgtactgcataagtaatactgatttctctaaagcatactagatttcctattgcccaatatatgaaatacttattatacttattaacccccaatgcaatctacagaaatattctaataagcaaacagcatatattatgtgtctgaagaatttgtatttttgcttatctgcaaaaagtagtttgcacaccctggtggctccaagtgtttcttacaaataggtctaaagatagggacacagaaggatgctgacaagaccgtagtgaacaaagcacatcctgtgtggcttgagcctctttttacagagacaaaatgacacacacacacacacacacacacacacacacacacaaagttgagactcatacaatccttataaccattctatgagtaaggcactcgtgttacacatatttctcagacaaagggacacaccgggtactcctctaga

SEQ ID NO: 397241 - DNA, 613 bp, Homo sapiens
ggaaaagacaaaacttcagtcatggctcattcttaatctctttagtaatataatacagtctgtactataatagtatgagttaattttttctttaaatgatgggctgttattttacttaaagggcagtgagaggccaggcactgtggctcaagcccataatccagcactttgagaagcctaggagggaggatcctttgagcctaggagtttgagaaccaatctgaaagagatcctgtctctccaaaaaaaataaattagctgggtttggtggtgtgctcatgtagttgcagctactcaggctgaggcaggaggatcttgagattgactttttgaaaaaaaaggacaaaggcagtgagatgagaaaaactaaatattttatcctaaattcatttggtggtattataacaattatgaggatatcagtttttacatacttttcttttttttaagaagaaaagtccctctcttacccaggctgtaatgcagtggcattatagctcactgcagcctttaactcctgggctcaagccatcctcctccctaaccctccccggaactataggtgtatgctactatgactgtattagtccattttcacagttacgaagaaaca

SEQ ID NO: 397242 - DNA, 537 bp, Homo sapiens
tagagaatgtggaagaatagtgaatagtgtcagagatagttaaagtccatacaatagtagagaaggtaataagtaatagtggcttggactaaatatttgttgaataaatgttttaaaaaacaggctacctacaatttgtgttgaagatatgaatgaatgaagtttccacacctttatgtggagacctgataagtaagcaacaataaggaagggtccccaggttggggagagccccaagttgagaacaataatgaacaattattgtatgaacaattgttagaaacagctaatcacaaacaacctgcgggcacaatgacctcattccacacgtagcacccttcagcaggaccctataaaactttcctccagcccttgcctctttgcaggtagccccttctctgctgagctgcccactgcaacatattttcacaatttctctaataaatctgcccttctttacctacaactatcttggtaaatggctttaccacctgcaaaactgaccctaggttgtgctacccacaggtaccgagctgc

SEQ ID NO: 397243 - DNA, 498 bp, Homo sapiens
tagagaatgtggaagaatagtgaatagtgtcagagatagttaaagtccatacaatagtagagaaggtaataagtaatagtggcttggactaaatatttgttgaataaatgttttaaaaaacaggctacctacaatttgtgttgaagatatgaatgaatgaagtttccacacctttatgtggagacctgataagtaagcaacaataaggaagggtccccaggttggggagagccccaagttgagaacaataatgaacaattattgtatgaacaattgttagaaacagctaatcacaaacaacctgcgggcacaatgacctcattccacacagggttctcactctcagagactcgtataaaagatctcctccagccacatgtgcctcatgtcgcagctagcccattctagggggtgctgccgcagggcgacacaacttcacaacttttttgctgatgcgtgcacagttatttacccacgatatatcgttggttaatgacg

SEQ ID NO: 397244 - DNA, 347 bp, Homo sapiens
catccaatgtaagacagtcataacagggaaattgagcgtggggtacattgacaactctgtactatctttgcgagaattctcttaatttaactgctttcaaataaacagtttaagaaatacatgaaaacccagtgtgctccctaaaaggtgagatcctcatgttctctaagaggagtggacatcccttcacagacccagacatccagattgatgtcattcactcccttttctttcatggtcccctcagatcacaatttttgaatctatacttatttgccttttttttttttttgagatggagtttttgctctgtcacccaggctggagggcaatggcgcgatctcagc

SEQ ID NO: 397245 - DNA, 828 bp, Homo sapiens
ttttctgagctcgttttgtaaatggctgctcttgaacgtaaggataaattgactgatgaggctgaggtttggagccaatccccgcacaaggcatttggcatcaaacacgagaaacccttggctattcaaatgaggaaactcaagtaactttcccagggtcactaaagtcggagacctcaaacgtggacccaggtcaggctccagaggtccaccaggacgacccatcatggctcatgaatgtatccgtaaaaatggcagaactgctctttccagctgccttcctacctatcatgggggtcctaaccgagctccccatcatgacattcaaggcctaccttataggatccctgccttacaggagcagtttcagtgcagcaggcacactgaccacctttctgccaagacctttttgccagagggcctttgcacttgaatttctttagacttttcgcctggcttagctcgtctgtcaccttggggaggcatttttctttctttctttgtttctttctcctttttttttttttgaaacggagtcttgccctgtcgcccaggctggagtgcaatggtgcgatttcagctcactgcaacctccgccttccaggtttaagcgattctcctgcctcagcctcctgagtagctgtgattacaggcacgtgccaccaaccctggctaatttttgtatttttagtagagatggggtttcacgatgttggccaggctggtctcaaactccttcacctcagcttacaggtgtgaaccactgggcccagcctctcctctcttccctgctcccctcccctccccttccctcttctctctcttttc

SEQ ID NO: 397246 - DNA, 454 bp, Homo sapiens
agtgtggagaggcgagcgtgtccactcaagactcagggtcctgccctcagcacccccacttccctgccctcgtctactctcgatgctcccacttgccctcccagtgctaagcaaccagaggaagcccatggccaccaaaaaggctttcctctccggctagatctccaggatcctgcttgtatgttacaaatcaaaaagtttggcctaggctggacacagtggctcacacctgtattcccagcactttgggagacctgaggtcaggcccacgtggtcaaaccccatctctatgaaaaataaaaattagctgggcgtggtggcacacacttgtcgtcccagctactcaggaggctgagtcaggagaattgcttgaacctggatgcggaggttgcagtgagctgagatcgcgccactgtgctccagcctgggcgacagaagaagaccttgtctcaag

SEQ ID NO: 397247 - DNA, 365 bp, Homo sapiens
ggaggaaaggtgcagaatgagagaggagagggagagagggcagtgggtgacaagcagagtagagggagaaccacagcagggaggaagcctagggagttgggggtgctagagagtgggaacaaaggaggtgtaacaggtaagagggaattttaacaaggagagcagagagggagctcagatggggaaaaagaggcggaaatacgtggagattggggacaatcagaaagattggggagaaagagctacgagaggtgaagtaagttgcagagcatcgggcagaacagacataaagaggagaaaaacagaaaaggggaggaaaggtgcagaatgagagagccttttctggggagttagggtaccgactt

SEQ ID NO: 397248 - DNA, 269 bp, Homo sapiens
ccagatgagcgatgagttgattggatatggatggtggttgtaatattctaatttgtgactttatactctaatttaaaattcatttctttaaattgtactcgtgaggatgaaaattaccactcttttctgtaaggcttgtgcattttgtatttatttgtatcaaaagatatttggaatttctgtttagccagagagcatttaaattaagtcattcgtggtaactcttttcttccctgggatggggtagaggatagagtaactgagaaatg

SEQ ID NO: 397249 - DNA, 516 bp, Homo sapiens
agccgacagagctacgtggtgctgggactgaaagagagggagagagggcagtgggtgacaagcagagtagagggagaaccacagcagggaggaagcctagggagttgggggtgctagagagtgggaacaaaggaggtgtaacaggtaagagggaattttaacaaggagagcagagagggagctcagatggggaaaaagaggcggaaatacgtggagattggggacaatcagaaagattggggagaaagagctacgagaggtgaagtaagttgcagagcatcgggcagaacagacataaagaggagaaaaacagaaaaggggaggaaaggtgcagaatgagagagggacacacacaatagtgaagaaagtgggagaggaccccatccagatgagcgatgagttgattggatatggatggtggttgtaatattctaatttgtgactttatactctaatttaaaattcatttctttaaattgtactcgtgaggatgaaaattaccactcttttctgtaa

SEQ ID NO: 397250 - DNA, 374 bp, Homo sapiens
tatcggttttcatgtctcagcttgagatccttgatttaaatccctgatttatttttactcgtgtccccagtgccaatgtgggagagttcagacatgttttcatattcactgagatgtcagagaaattaaagaagagacagatttttcatatcagtcagttaaagactaattacaactgtgctttccagcaaaccagtgattgtaggctaattttcggttatgaaacagaaactgaggttaatgaggctaattgtgtttaccagcatttttgaataaaagaaaagaagccaactcaattttgaagagacttctttgtcaggaacaaattggggaaaattgctacagtggtatcagcgtttcctaaaactgctaag

SEQ ID NO: 397251 - DNA, 393 bp, Homo sapiens
gggggcccgccttggctgaggcttggtttttaaagattttcgttagttaatcgatttaaaacaaagctgattcctggcatatgggaaatttcaaaggatagcaactgtgtggaaaaggtctattccactaaaacagcataaatgacgtataaacccaagaagctgatgactgcatatgaaacaaccaaaccaagaagcaaaatatggtctatggagcacagtactaacccgggaaaacaagctttactcctggctcgattatacacctgctgtattttaatttttaactcaatgttgagcttatttaaataaataaaacatgctacttaaccacaatttcaaaaggaaaacaaagtcacaaaagaatgcaataaattacacaattggactaac

SEQ ID NO: 397252 - DNA, 431 bp, Homo sapiens
  misc_feature (31)..(32): n is a, c, g, or t
gggtgggcatgttgggaaagaacagacagtnnccgcccggctttccgattgttttttataaaaacaaacaaagctgattcctggcatatgggaaatttcaaaggatagcaactgtgtggaaaaggtctattccactaaaacagcataaatgacgtataaacccaagaagctgatgactgcatatgaaacaaccaaaccaagaagcaaaatatggtctatggagcacagtactaacccgggaaaacaagctttactcctggctcgattatacacctgctgtattttaatttttaactcaatgttgagcttatttaaataaataaaacatgctacttaaccacaatttcaaaaggaaaacaaagtcacaaaagaatgcaataaattacacaattggactaacatattagataattaaaggtgattctattccc

SEQ ID NO: 397253 - DNA, 400 bp, Homo sapiens
  misc_feature (31)..(32): n is a, c, g, or t
gggtgggcatgttgggaaagaacagacagtnnccgcccggctttccgattgttttttataaaaacaaacaaagctgattcctggcatatgggaaatttcaaaggatagcaactgtgtggaaaaggtctattccactaaaacagcataaatgacgtataaacccaagaagctgatgactgcatatgaaacaaccaaaccaagaagcaaaatatggtctatggagcacagtactaacccgggaaaacaagctttactcctggctcgattatacacctgctgtattttaatttttaactcaatgttgagcttatttaaataaataaaacatgctacttaaccacaatttcaaaaggaaaacaaagtcacaaaagaatgcaataaattacacaattggactaac

SEQ ID NO: 397254 - DNA, 487 bp, Homo sapiens
ttgaatccgggaggcagaggttgcagtgagccgagatcgcaccactgccactccagcctaggggacagaacgagactccgtctcaaaaaaaaaaaaaggtctgggttaccctaacatatcaattcatcctcaatttattctctccgtagattgttttttataaaaacaaacaaagctgattcctggcatatgggaaatttcaaaggatagcaactgtgtggaaaaggtctattccactaaaacagcataaatgacgtataaacccaagaagctgatgactgcatatgaaacaaccaaaccaagaagcaaaatatggtctatggagcacagtactaacccgggaaaacaagctttactcctggctcgattatacacctgctgtattttaatttttaactcaatgttgagcttatttaaataaataaaacatgctacttaaccacaatttcaaaaggaaaacaaagtcacaaaagaatgcaataaatta

SEQ ID NO: 397255 - DNA, 418 bp, Homo sapiens
ctaagaaatgatcaatgatttgagatgatggatatgccagttactctgatttgatcactatacatgatatacatgtattcaaatatcaccctgtatcccataaatatgtatagttattatgtgtcagttaaaaattaaaaaagagctactgtttcattttaatatggaagttaaaccaactaaaaattctacttctgccaaaaaacggcataagcaaagtgaaaacagcaaaatgggagaaaatatgtttgcataaatgggtaatatttcttttccttttttactttaattttctggcaagggttaatataataaaaatacctttactctggaagcaaaaagagttccttcttgatagaaatgccaggtataaccataggcagatggtagaagacacaaatgacaactaagataacta

SEQ ID NO: 397256 - DNA, 470 bp, Homo sapiens
ctaagaaatgatcaatgatttgagatgatggatatgccagttactctgatttgatcactatacatgatatacatgtattcaaatatcaccctgtatcccataaatatgtatagttattatgtgtcagttaaaaattaaaaaagagctactgtttcattttaatattccacataacttaaaacatcctaatcaacagtttattctgtcacattctgaggagtttgtgaacaaaaattaaaacacagataatgtattcacatatataaagacatacatgtaacacataaccagtgtaaagctgtagtcaaaagctctcaagcaaaagaaaatactacttctcaaacagatggaaaaatcctgaatatcagctacaaaattaaattataaacactaaagtttaaaacttctgttaaagaataaactagagcattgttggccgggcgcagtggctcacgcctgtaattccagca

SEQ ID NO: 397257 - DNA, 660 bp, Homo sapiens
agaagcatgggcttctaaaacttgtagaaactaaagaaaacccaaatgcataacattttcccgaagggtaaccctctttccttcagctttatctctccaatgttgcagcctcagtcctctcacctgtagggcgacctgcttaatcctcttcagaggtcccacctctcaatacaaagtgttaatcattcccttggaaaaaggagcttagaactcaatcttcctatttgtaaatattggggtgagaagcagggtgttggatatttagggaaacattatctatttaatcttttaagagtcttctttagcaataagagcatgtaggaatcaatatgaaaataaatgatctgtttggtagctattcttgagtttcacagtgatcagaagctccaggaaagatggagagggcagactactcgcgtgtcctgtgtccttgggcagattacttctcctgtctctgccttccactatcttgggagatattgagatatagaacgagttgacgtatgcaaagtacttatatgcctaacacacagtaagtgctcaataaatgtgacccattattatcacaattgtttcgaacacaattatgaaaagacatctatttcttcaacgtcatctttgtatgaaccaagaatattcttttgggtagtctgtgcattt

SEQ ID NO: 397258 - DNA, 346 bp, Homo sapiens
aaatccaaaaaaacaacaaaaaaacacaaagattagctgggcgtggtggcgggcgcccctaatcccagctactcgggaggacgaggcaggagaatcgtttcaactaagcagcgggaggttgcagtgagccgagatcgctccattgcactccaacctgggtgacagagcgagactccgactcaaaaaaaccaaacaaacaaacgaaaactcagtgggagtgtcttcactatgcagtcgtctattcagcaaccttgacaacaagctctggcactcagtttctatttcccgggagttgcccagcgctccgcccacgcccgcttgcagaactcgccccgcctccgcccca

SEQ ID NO: 397259 - DNA, 2009 bp, Homo sapiens
  misc_feature (1257)..(1257): n is a, c, g, or t
  misc_feature (2005)..(2009): n is a, c, g, or t
agtcccttaaaattgtcctatatgctgtggctgctgctttgtatattcctatgactaagtctgaaattgaaatattctccagcacagtagttttgacccttgggtgcatattggaatcatctgagcagctttaaacatactgatgcctaagtctggaccacagagactctgatgaagttagtccacctggggtgcagactgagcactgagatttttcgaaactctccaagtgattctaatatgtgaccaagattgaaaaactctgccttggcaattggctctgacaggaaggacttccactgacaggggcacgatgggatgcaatcatcaggctgtatgaagttggagagagcctatttcaaagataccaaagatgaaaggtttacacacacactgcacacataaacacacacacacacacaaaagatatatatatatgtatatatatatattttttctttgcacatcttccgagagtaggattttgtgctcagcattgaggaatcaaagaagtacaattccatcatcccagtcaacaaactcgaattgttgggaacatcttcccttggatttcgggaaattttgttcgtcaccgactgggttagataaacatagtcttaacacctagtggaggtaaagacagatagatacatagttaagaatcacccgagactgtgtggcaaagggcatgtgacacagttacaaaggaaatgccatggaagtggttacttatggcagaggaagctttcttggatgaggtggcttttgagttgaaccttaaggaactgttgcattttgacagttggagaattaggagaggacttctaggttgaccaaaggcaagcagccttcaaagagcagggccatttggagactagcacatgtttgctcagacacagtagaaataggggatagtgtgtgaggatgggaagctggaaaagtcagtggaggatagattatagagacattgaacttgatgctatgaaggtggggtttaattccacaggcaatgtggatccatctatctttgtaagtccataagtgctgtgatgagatggatgtttctggagaatgataacttcagggttggtgtcaaaaaaagttggagatgaagaagctgaaaccaaaagggatgagtagggagtagggagacaagtgccatcactggaaccagagaggatggccacatttctaggacagtggcaagagaaatgggaaagaagggagtgctcatgtaggagaggcatttctgtggcngcacagatagaaatttataacacaacagatggttgtggaaggtaagttagaaggtgaaattggtgatgaccctgcagtttctaccttgggtggttgagcctccagaagtgcacagcttttaagttgtaggtgactggggcttttcgaggttccacaggtttcagacaagcatcatgaaaacacgtctgctccattcatcactatgtgcctggtccatcgtaggcacatgtatttgttaaaacaaacaggtatttgtaaaataaataaatgcaactctctgagaagggagtacctgagactgaacaagttttctgaggaggaagatagggtgtttcgtttttgctctgttgaatttggattctaataaggcagcaggtggttggaattgcaaatctgagatttaagggaaaggccaggagtgaacatgatgagattgtcctcaaggggctaaacatttaatcagggattcaagatgtatgcatgagaaagtagctaaagataaaattagcagtgtcagagggtggtccagccactgtgtgctataggagttcagaggaggaagcatttgtgatacagaaagccccatcctagaccacttcaaggagtagctactaaggcagggtttctaaggatgaatatgaaaatctaggaagaaagggaagaaattccaggttgaaggaagaatgtgaacaaagatataggaacaggaatacataggggagtttcctagatccttcccactcgaggnnnnn

SEQ ID NO: 397260 - DNA, 425 bp, Homo sapiens
tatttttttaaattatattcaagcctgaacatagaatctgagagctgtagacattaaggtagagaaggtctgatttatccaggtgggattgttggtgtgaatatgattttgtgtgacttttggtttcatctcagttttataagagcaggaacatctcctcagccttggtgtagaccaggtttggtgcagggaaaaataatgacagacattttcaagtgtgtgttataaacttctgaaatttgcatctgcatttatttcagggtcttttttttttttgagacagagtctcactctgtctcccaggttggagtgcaaccttatcttgactcactacaacctccaccttctgagttcaagcgattctcctgcctcagcctcccaagtagctgggattataggcgcctgccaccacgcctggctaagtt

SEQ ID NO: 397261 - DNA, 662 bp, Homo sapiens
gatatctggtttgagatataatcatctttagtatttgccactaccatcgaccacctgggaatgcagtaaaattaagaagtacattttgatgaacaaaataataactaatgagtaatttaaaaagtcaacgaacacatattatgtataagtatacaacattttgttcataagaccttttcaccaactccaaatttatatatattaagtaccatcatgtcactatttttgtgagtcatattcacctggaaaaaatataaattattagatattttatattttaccaatttggaaattaagatgagaatgtttttgtgcttaaattttatctttgtccaaaaagatatccatgaagattataggcgtgttacatttatctttgttgttttctactctttccctgcagtgagaggactagtcaaatgcttcttattgccaatcatgagaactacacatattaataatagatggaaaagcttacagaattaaatgaacacagtgacttagtgtaatacataggggctgtatctttgttgactagttgatgtttatctaagcgcaggaagattatctgaagaccattaccgaaagtatggaaaataggatcttttctagaagcaaagaattgctatcatatgaagtgcttgcatttatttgttaaagca

SEQ ID NO: 397262 - DNA, 473 bp, Homo sapiens
aaacaggacatggagtggaagagaagagagagtgggtaagaaagggggaaagaaaaaagaggcagccagcaagaagcaaagtataattttcatcaacattcattcattcatttgacaaacatttattgaatgtttaggagggaccaagaacattcaaagcccacctccatgctattcctcccttaaaatcctctgagtcttcattgacatggatccttttgaaatagctcgttccagtgaggacatagatcttgaggtttaccttttcatccttagggttgagacttcacttgataatatttggactggattttaccaaggcaaagaaaatgttacaggaaggcagagaaaccctatgaattgggatttgcccaagacctgcccttcatggttgaggcaggcatctggcatccaggcagcagtttgtttcccttggatgcccacaggccctgcgctgtgttctcacttcacca

SEQ ID NO: 397263 - DNA, 262 bp, Homo sapiens
actcctggcggtcgctcgtcggataacgcgatgatagatcttgaggtttaccttttcatccttagggttgagacttcacttgataatatttggactggattttaccaaggcaaagaaaatgttacaggaaggcagagaaaccctatgaattgggatttgcccaagacctgcccttcatggttgaggcaggcatctggcatccaggcagcagtttgtttcccttggatgcccacaggccctgcgctgtgttctcacttcacca

SEQ ID NO: 397264 - DNA, 115 bp, Homo sapiens
taccaggaaaagtaatctctgaaacaaacagtgctccctaaattccaccttattataatttttttatgtagtcatccacccattcatatttggaaaatgaaatgtaatattcact

SEQ ID NO: 397265 - DNA, 427 bp, Homo sapiens
gttacgggggctgggaggagggggaaatggggagttattaacaaacaggcctagagatctgctgcaccacatacgacccatcgtcagcaataacgtcttgttcacttgaaatttgttaacggaatagacctcatgttatttggagggcccggaggaagacaggaagagaagggaatgtttgaaacttcttagagatggattaaatggttgtgaccaaaatgctgatagtgatgtgaacagcgaagtccaggctgacaaggtctcagctggaaataaggatcttacttggaactagagcgaaagccacctttgttacgccttagcaaacaacgtggctgcattctgtccatgccctagagataccacgccagggtgtctggcggaagaaatttcttttctttttttttaaacggagtctcgctctgtt

SEQ ID NO: 397266 - DNA, 683 bp, Homo sapiens
ggtggtccctagtttcctggcactgggccctgggatgataaggcaaaagaagattgccttctgcgggggtatgggccaggtaggggaggtctggctctggctagatttagttcgcatgtcaaaggcaagctcctggctgggccctttgctagctgaaataattgctagccttgggagggacagtcactccccagccagaaagattttaagaggtcagaacatcataacatccagaaaatgttcagttgtttaaaatgcaggtacccagtctcactccagccttccaacaacctgcttgcctttccccttctcacccaggcctttacaccgtggcttactacttcaccacaggacggcttctgtgggggtggctggcccttgctgtcctcctgcccgggttcttggtccaggccctgagctacctgtggttccgagcagacgggcatccagggcattgctccttggtgatgctgcacctcctacagcttggtgtttggaagcggtaagaacagctgcctctttcacgtctggagcacaattgcacaagtgcagtgagaggaatcttctgtccatgtggattctgtcctcaagctcataaaagttcagcattgggaagaggttcaaagcggccacagcaaacccctgctctgatattggcatgcccgggtccagcctgcactttt

SEQ ID NO: 397267 - DNA, 894 bp, Homo sapiens
cacgcgaggctcctggggctctcggccctgctgcaggcggccgaacagagcgcgcgcctttacaccgtggcttactacttcaccacaggacggcttctgtgggggtggctggcccttgctgtcctcctgcccgggttcttggtccaggccctgagctacctgtggttccgagcagacgggcatccagggcattgctccttggtgatgctgcacctcctacagcttggtgtttggaagcgcccacaaatccacttgtaaatgcagcatgagatgacagaagaaggcctatctcatccttagcatgcaccttggtttagcaatttttctttagtgaaagttcaaggttgtcaaaaggaaagttaaggtaaactctaaaggcactgggacgctgcactgaccagtctgcagaaggaactggaggctccccaccgaggctggctgcagctgcaggaggccgacctgtcggcccttcgactcttggaggccctgctgcagactgggccccacctgctgcttcagacatatgtttttctagcctcagacttcacagatattgtgccaggggtgagcaccctgttttcctggtcctcactctcctgggcactggtgtcctacactcgcttcatgggcttcatgaagccaggccacctggccatgccatgggccgccctcttctgccagcagctctggaggatgggcatgttgggaacccgcgtgctgagtctggttctgttctacaaagcctaccacttttgggtttttgtggttgcaggtgcccactggctggtgatgacattctggcttgtcgcccagcagagtgacatcattgacagcacctgccactggaggctgttcaacctgctcgtgggggccgtgtacatcctctgctacctc

SEQ ID NO: 397268 - DNA, 210 bp, Homo sapiens
aacaatgaaaaagtaacacaatctctcaaatatttattgagtatctactatggctcctctggaatattacagaacaggtgattattcttgttttcattttatgtgtttagaaaggtatagtttggcaatttagaatgaaaacatattcctctttctcagttcattccttccacacccccaaagaattctccgaggaagggtgcgaggctc

SEQ ID NO: 397269 - DNA, 1097 bp, Homo sapiens
aattaaagtatggtgtaattaaatatataaattgataaaaacctgatatatataaaaatattaaaccatacttaaattttttttgtttaggaggataggggaagtcatccagaagattgattccattttattattatgtcttacaacagaaatatggcaaatcagaggctttataatgaaagttgcccagttttcaattaagtgtatgtattttatgtatgagtatccctacccctcaaatctatatagaatgtttttgttagttcatagcagctatatttaaaaaagatgtgtagcatttgttttaacaagtctttaacaaattgagacttggttgaagtggtctcattcttacatatagtcattgaatgaatgaacatgtgaatcatgtgactcacaatttgatgaagcatatgtcagatttccaacacaatggtgcagacaacctgtgctttagaatttcattgaaatagaccagacaattcagattggtgtcttcatggaagagatagaacttaagtgatctcaagagtgaatttgatttaggctttgtaatccatgtgttgcatgggagtcaagtgtcatcacaggaaccataggtagtaaagcaaaggtatgatggaagccaggaccagaaagaaaatctacagtgtactgaaggaagctgggaatcgttgggcaagaagaggtaaacagatactcagataatcgattcagaaacacacacagggtagcaagttaaaactgaggcagaccggcaaacacccagacagttgcagatgctggacaggaggccaagcagtgtgtcatatatcctggcttaaaagaaccagaaggaggcaggtacttcattgcagtttaaaaaaacctagcaattcctaagaattcatgattatcatagacctagtgatacttaagtaaatttattgagtacctgttctccaccaagcactgtaacccaatacataaattatctcactttatccacacagcagtcctgtgaggagggtactggtattcctgttttacagataaggttcaaaatgattaagtcacctccctcagtgcgtataactggtaaataacaatctagctct

SEQ ID NO: 397270 - DNA, 416 bp, Homo sapiens
aggattataagagattattgtgaataattgtctgctaaaaaaattgaataatctggatgaagtagacaaattcctagatataaacacactaccaaaactggcttaagaagaaatagaaaatctgaacagagctaaaaccagtaaagaaatagaattagtaataagaatcctcccataaaagaaaagtccaaggcaggacccagtggctcatgcctgtaatcctagcactttggcaggctgacgtgagaggatcacttgagccctggcgttcaagaccaccctgggcaatgtggtaagatctgatgtctacaaaacattttaaaattaaccgagtgtgatggcatccacctgcagtcctagctacttaggaggctgaggccagaggatcacatgagcctgggaggtcaaggctgcag

SEQ ID NO: 397271 - DNA, 557 bp, Homo sapiens
cacacacgcacacacacgcaccacgataatctggaggccagggccaggagacatagaaacaagtgatatgttagaagatgatgaatgctatcaaggaaaagtaaagcagagatgagacatagggaatacggttggctgtcggggggaggagcagatgacttactatttcatctaagggtttgtgggtgagatctgagtaagtgggattgtagactatgggtttatctgggggcagcatatctggggcaaagaccttgaattgagtgactgtttggtgtgcttggaaactgcaagaaggccactgtaactgtggtggtgtgaaagagctgggagtagattaggccagagaggcagtcgggggccaggtcaccaagagccttattttactggccattataaggactttagcttttgctctgaatgagatagaaagccatcatgtggtggggtagttacatagagaagtgacatgatttgacttcggttaaaaggtttactgagccaagactagactggacaaggcaaaggtagaagtaggggaagacaacttagaaagt

SEQ ID NO: 397272 - DNA, 578 bp, Homo sapiens
atggaaaaacatcccatgttaatggcttggaacactgaatattaacctggtagtactcccaaaattgacctacagattccatgcaatccctatcggaattacagctgactttgcagaaatcaacaaactggtcgtaaaactcatatggaaatgcaagggaaccaggatagccaaaacaattgagaaaaaacaaattggaggactcacactcctggtttcaagacttactacaaagctatagtaatcaagatggtgatgatggtataagaacagacatatatatcaatagaacagaattgagagtcaaaaaagccctcatatttatggtcagttgattttcctcaatggtgtcacaacaaatggggaaagaattgtcttttcagagatgatattgctggaacaatcaaacatctacatgcaaaagaatgaatttagacccctcacatgtacacaaaaattaaaatgaattaagtgtaagtgcaaaaactataaaactcttagaaaaaaacataggtttaaatatttgtgaccttgaattagtcaatggtttcttagatatgacagcagaagcagaagca

SEQ ID NO: 397273 - DNA, 801 bp, Homo sapiens
tctcagaggactgggatggggctcaaccaattcagaactatcacctgctcactcaccctccagaaatcatcgatgcaggtactgacactaatggatcttagctgcacttggctgagaaataaatcggttctatagatcggcaataaacacagctacagcagggaacgcagcttcagcagtccacctatgcctgcgagaagaaagggatgggctagacggggaatgggaatttgactgcagattcatgtgtgtatgatgtgtgatttggatggatggctaaactgagttttttctctttccacacgccaacgccagatacctggttgcaggcctctggctgcaggaaccatatgtgctgctggatggggtagtgcagcacagggacgtgggaagacccactgtccccagaggccttcccgaccagagtgcagagcgcctgtgtctccacatgactcagcaatgactgtggcctgagaatgcctggctgcacagaaacatcaatctgggatttaaaaataaacaggctgggtgcagtggctcatgcctgtaatcccagcactttgggaggccaaggcaggtggatcacctgaggtcgggagttccagaccagcctgaccaacatggagaaactccatctctactaaaaatacaaaaattagccgggcatagtggtgcatgcctgtaatcccagatactcgggaggctgagggcaggagaaacgcttgaacgtgggaggcaaaggttgaggtgagctgagattgcaccattgcattccagcctgggcaacaagaatgaaactcc

SEQ ID NO: 397274 - DNA, 656 bp, Homo sapiens
agaggcaggggagtttttgagatgagcctggtgcagatgtgggatgggcagagaggagagggatgaatcgctcagcctcacaacacagagtgagcagagacttggaaccctaggagttgacagaatgctttggacccagctggaaatctgtgtgggtttgtgaagatgtagcaggcaagaaaggagacttggggcctgatcttggaaggctttggaatgtttggcatttggaatctatcttaaaggagttaagtgggtagtatttttaaaccacctctagcgaatcagtctcctatccaggaaacttagttgtttatcagcatctcattgaatgtgaactcgttaacgtggtgacctacactcatcttgttcccttaaacatatgtacagagataccttttctcttaccagttatgtaccgtgaaagtgtggcacaagtgtaagaatacttagtagctttcactaacaatttgctcattgattgatttgctttttaaaattttcaaataacagcttgccttcatttatgttcctgtataaaaatgaactcagcactttcttaggaaggctcttgatctggttacatggaccaaatgaattccatgcaatcagtagaaggacagaatgtgaagtgaaacaaatcataacatcctccc

SEQ ID NO: 397275 - DNA, 610 bp, Homo sapiens
tccagtcttgctcccatcaggatgccataaagcaaccagataccctaattttgttaatttttagaaggggaagagatggaaaagtcatagaaaacctatttaacgaaatactagctgaaaactaatcttgcaaaatatatagtcttgcaaaagatacagacttccagatacagggaactcaaagatcccctaatatattcaacccaaaaggtcttctccagatcacatcatagtcaaactgtcaaaagtcaaaaatgtaaagataattacgaaaaacaacaaaagtgttcagttaacatataagggaatgtttatatgggacagtatctactgttatgaaaacacatgaaagtataaaactcactggtagagcagatacacgcaaaaaagaagggagtcaaacatcatcacaacaaaaaaaaaccaccaaatcataaatgtaaacaacaaaagaggaagaccagaacaaacgatatacaaaacaatcagaaactaataaagtggcaggaggaagtcatcacctgtcagttacaaccttgaatgtaaactgtttaaattcctccaattaaaagatatagattggctgatgggacgaagaccgtaggaccca

SEQ ID NO: 397276 - DNA, 197 bp, Homo sapiens
cttgggctgcactgaaggatgggtaggatatggatattgggaaggcaggtgggagcggactgccttaagttctcaacctggcttgtaggccagaataccctggatgcatgatcaacctacagattcctggaccccattctagatctgtgctgtccaatgcattagccactagctgcatgcaggtactgagcacttga

SEQ ID NO: 397277 - DNA, 419 bp, Homo sapiens
ggttgaggttggcagataagaagactccagctgtaggaaatatttctgttattgcccttttataaggaaatgtttagtgattccaagatgtacatttgaaatgataagtgaccttagagataatttattgcagtcactcatcctgtaactaaagaagctaaggaccagagaatttaaagtgttgaagatagaaccaagttaaggaaatgactcttgtgactcttaatccaatattgtttttatgaacaccacatcatgtatttgttctaaatagtcttggtattttaaagatactgaatttttgtaagtttggcatggtgatatgaaatggagataatatatttcaagtgcattactataacatgcaatggagtatgtaatagaaaattaactttcgtatattaaattttaaatattgt

SEQ ID NO: 397278 - DNA, 424 bp, Homo sapiens
tttgcacacacctgtccttccttcccagaggcacaaaaacagcgagaaacacacatcaacagtcccctagtacagttaccatgtcagaagctgtaaacccactttacaagaaaaatctcagcccaatttccaagtaatctttttttgggggggcgggggagggttatctccaagagaattaattagactcgtaaacaaagatggagaaaaacatccctccttgcccgacccaacctatcttgttccctttcctgcagcctctggctcttcagaagggttagcgaattacctgtgaatttaggtgattgcttcttgcaatattttaggattgtgaggagaagtgatgtctcaatacctattttttttttttttttaaacagagtctcactcggtcactcaagctggagtgcactggagtgatctc

SEQ ID NO: 397279 - DNA, 222 bp, Homo sapiens
tcagcaccctgtaggagcccccggggctgagcacaccaaccactgccaggcagcctaggacgatgcttgctttacggaatggcaagaggctctcatcagctggtagcatacagactgcaatgcagccaggggcttggggagaaggggaacaagcccttctcttcctgctttcttttttttttttttcttttgagacagagtcttgctctgtcacccaggctg

SEQ ID NO: 397280 - DNA, 225 bp, Homo sapiens
ggactcctccctgtcccctcagccctgggtcctggggcagggcagggccttccagcagcttccttccttcctttcttgggacggaagcctagctgggtggggggcgccgggctggagccttcgcaggggagcgggctcagtcatcaccctgctccccagagtgactcagcccccacgtccccacccatccccggggagccagggccgcagagggaggtagataag

SEQ ID NO: 397281 - DNA, 731 bp, Homo sapiens
agaaataaacatatcccacttcatgaaatgactatgccagccaagggagatgaaaaacaattttttttatagtacacctcatttttttaaaaacactttaatactaggaatatgtttctgtggcaaatagttacccccaaaggattatgtcaaatatctcttgtgaaaattaattttaaaattaatcttttggctgggtgcggtggctcatgcctgtaaacccaacactttgggatgccaaggtgggcagatcacctgaggtctggagttcgagagcagcctgaccaacatggagaaaccccatctctactgaaaatagaaaattagctgggcgtggtggcgcatgcctataatcccagctactcgggaggctgaggcaggagaatcgctcgaacccaggtggcagaaattgcagtgagctgagattgcgccattgtattccagcctgggcaacaagagcaaaactatgtctcaaaaaaaaaaaataaagaagttactgtagatgccactcttacttaaaccctaggccatgtgtggagtcccaggggaagacatgtatttttagagaaggaaggctctaggtaggtgtaaccttcctcttacagtttatcatgaacagttagtatgaaaaggaatggctggaagtttgcagtagtacaccgagcaaccaagagaaataaacatatcccacttcatgaaatgactatgccagccaagggagatgaaacaat

SEQ ID NO: 397282 - DNA, 216 bp, Homo sapiens
agggcaaacctctgccatggaacaggaggacccagactaagtaggcccttggcggagaggggtgatggacaagcctgatggcgtgaaggcccagggtggggaaggtttctgagagtctgagcagcatcagtggtctgcagagcaccagcagaggctctgaactcacatcatgagatgcaagcactccatggtgtagagctcccaaatcccagcccc

SEQ ID NO: 397283 - DNA, 153 bp, Homo sapiens
aaagaacaggactttatcagggtgaaagtattggagtgcaccctgtcagcaaagattatctatccactttaagagagacttaagggtggtggtttgaggtaaaaccaggagatatcctttatgatggtttgaaggaaaagtgtaaactggcag

SEQ ID NO: 397284 - DNA, 450 bp, Homo sapiens
aggccatggtagatgtgggcagggaactggagactccgggcccagtgggttcaacctcatgagggagtggagttgagatgctttggggatcagtgacacaacctcttacttggcttggggtgcaaacctagactccctgtcaccctggccttctcctctccaagagaaggagaactgtgggcatcgcagtggtgacacttcagttatcacaggctcagcagccaagtgaaaagatgatgttggaatttcctagatgattccattcatggattggccatgcagcagtccttagggatcccctcctaaaagtcacgatctacccaagaatccactgtgaatcgaccatccgccagtttctccaaacgttttaaagagcaatttgtattttcaacctgtctcacctcttggggataatgaattagacgagttgactacccactgtgtaagtta

SEQ ID NO: 397285 - DNA, 196 bp, Homo sapiens
acccattgagtaggaagcaatgatagacctgggtgtgcccagaagcaggtaaagatggagataagagttctggtaactacaagctaagaaaaataattgacacatgttgactattcagcctggagaccaagggatttgtcatggaagggatgggagtatcatcaaaaataactaaagggtggctgggtgtggtagc

SEQ ID NO: 397286 - DNA, 218 bp, Homo sapiens
ccataatggcaagtgatgcttgctagatcaaaagtacctttctgtttgttttcaaaattactttcaattccccatgaaacctagctatgtctgttcctaaattttagtgagattcttgtccttattttcatggtaaactgctgttccttaaggaaatctgaatgaattacttgtaaccaaaattgatcacagcagcctcacataccatctgtatgcta

SEQ ID NO: 397287 - DNA, 363 bp, Homo sapiens
ttgcagaaaaagaaatcaactttaagaaataagcaaaaaggaaaaaattgcaaacacattgatagaatcaacagctggttataagaccaggctcatgaatgaactggattaaaaagaaacatgagatccttggaagcaggaaatacggatttatctgttaacagaaactatcccattggcaagcagtacagtgaattatattcaactgttactttcatccttgcactactggatcaagattttatctcctgcaagtgagactctctttatgacaagtctaggtcatgcacccactcgccatatctattgacaaagggagaaagaggatctggcctctctgccacccaatgcagaaagaaggca

SEQ ID NO: 397288 - DNA, 410 bp, Homo sapiens
cctcccaaagtgctgggattacaggcatgggccaccgcgccctgcccaggagcagaattttttaaaaggatattaacaatataccctcccagaatttaagggcaagttgaacaaccaagagacaacaaggaatctgcttagtaatcatggcaagtctgaggctttcagtcaattgatgtgtctgtcttgattcatctctgatcgtctcagaagtgtacctccgctcagcctttctgaaaccaggtttcatgtcaaaggcaggaaacaatagtctacttcatgtagttcagaaattgagttggtggaccttctctctagagaagcaattaagtggatccccaagaagtgaatccaattagtgtgaccaggtcaggtattcgagggccgggccaggtctggaggtataacat

SEQ ID NO: 397289 - DNA, 1161 bp, Homo sapiens
aggctgagacaggtagatcacttgaggtcaggtgttcgagaccagcctggccaacgtggtgaaacctcgtctctactaaaaaatacaaaaaattaactgggcgtggtggcacacgcctgtaatcccagctacatatgaggctgaggcaagagaataacttgaacccaggaggcggagggtgcagtgagctgagatcctgccgctgcactccagcctgggtgacagagcacactccgtctcaaaaaaggaaagctgatgagaaattgggcatcccggaattcacacccaaaccatcagctggagctctgagactgttggggtgggaattcttccaagatgagaagcaagccagggaggctcaggtcctgggatgggcagggctttgatcaaaagaacacaggaagtgatttgctacttgaaagaaaggcaacccctccccaaggaagccctctgaaaatgcttagtcaacagtcggcttggcagacaaggtctgggaggggccacccgtatcgcagaggatgatagaagagaaaaaaatgacacccacctctgtctggggatgctgaaatcttcctggaggagtggtgaatgccaggaagatcgctgaaggattcaatgaaacaatatttctgaagtcctttacaacagggtccccaacccccggggtcatggactgctatcgggccatggtctgtctgttagaaaccatgagccctatcgggtcacagagcaggagatgagtggcaggcaagcgagcccgagctccacctcctctcagattctcgggggcgccattagattatcacaggatcgcaaaccctgttgtgaactgcacacacgagggatccaggttgcatgctgcttatgacaatctaatgcccggccgggtgcggtggctcacacctgtaatcctagcactttgggaggccgaggcgggcagatcacgaagtcaagagatagaaacgatcctggccaacgtggtgagaccccgtctctcctaaaaatacaaaaatgagctgggtgtggtggcacgtgcctgtcatcctagctactcgggaggctgaggcaggagaatcgcttgaacccgggaggcggaggttgcagtgagccaagatcacaccattgcactacagcctcggcgacagagccagactccgtctc

SEQ ID NO: 397290 - DNA, 284 bp, Homo sapiens
ggcatgtggtttagaagctgttgtttgaaggttgataaacttgcacccattttaacctccaaggagcactaatgtcttttctggaaagcagacagtcatgtggccccatgggggaacttcgcgtccggcataatctttatctgaaatcttccttgtcatgcctaaaataaagtgtcatcattcattcaaatgaatattcaataaatataaaagtttgccaactttctgggtctgagataagccccttaagccccttaagcctcaatctcatattcttgcaatgt

SEQ ID NO: 397291 - DNA, 493 bp, Homo sapiens
gccccctggtgacttctggtcaactttctgtcactgtgaattggcctattctaggtattttgcgtaagtggagtcatagaagtgtctttttgtgactgacttccttcacctggtatgtccaagttcatcagttctgtggcatgtgtgagaactttatttcttcttatggctaaatcctgttccgtctgtgggtatgccacattgtgtttgtccactcatctgcagaccaacacttaggttatttctactgtttggcttttgtgaggccgtaacgagcattgcatacaggtatctgtttgagctaatgcctgggaacgaactgctggattatgtggtgattctgtgtttagcttttaatactggtttctttcctgcagaaattcccagcctatgacatgtttctatgcaaataaatccccaatagaaaatagagttctcagatttcccaaactcacttgaccttgaaacctgtttttcctttgagaaacatctt

SEQ ID NO: 397292 - DNA, 352 bp, Homo sapiens
ttctctttctcatcttgcccttttttgaggtagcactgactggtatgttaatttcactggttcatttttcatttaataaatatgtacctaagatttacttcatgggaagtgctgtgttagatgctagtgatgcaaagattaaaaagacaggttgcagcctggagtgactcctttgggtggaattaaggaagcatcaaggaatttagcaactcagtgggaaaggattggggtggagttctagagggggaatctgcttgagctgagatagggcagacaatgagcacgaggtgctcccagcaaggggaataggtcagacaaatgtgggtgagtgagagaatatagagggagccat

SEQ ID NO: 397293 - DNA, 360 bp, Homo sapiens
attaggaaaccctgttagctctacctcctattatactgcgacatctgtccccacatctcctgcaaactccccagcccaggctgccctcctctttcacttggactttgcagtggtatcccaggcagattcctggccaccaattctttccctgtcccttatttcatgctccacacagcagtctaagtgatataatgtcttgcaattaaaagttgaatcgtgtcgcttctcagcttaaaacctggattatcgtcccaatgctgccgggatcaagtggaaaatcctcagaacagctggcatggcaatggaggatcaggctctgtctctccatcaaactccccttgcagcccctccctgcctact

SEQ ID NO: 397294 - DNA, 365 bp, Homo sapiens
gaggggaggggtgatgttggaggtataggctaagggactgctggagttccagccctattcatggactttgaatctctgtgtttggccgagtgaggtggctcatccctgtaatcccagcactttgggaggtcaaggagggtggatcacttgaggtcaggagttcaagactagcctgaccaacatggtgaaatcccgtctctactaaaaatacaaaaattaactgggcgtggtggcatgtgactgtaatcccagctacttgggaggctgaggcacgagaatcgcttgaacctggcaggcagaggctgcagtgagctgagatcacaccactgcactccagcctgggtgacacagcgagactctatctc

SEQ ID NO: 397295 - DNA, 518 bp, Homo sapiens
tggggcatgtgagtggaaagaggtcagtaaaatcagagattgagaacatcagtgaaggaattgtaaaggaaagtggcccataaaacacccacacatgcagtaatgttaggataccacttgtgtattctcttatctcagcccgagtagaatgtcttcttttacaaagcagtggcttagttttgtgagtcaagaagaatctggaggaagctggcttggaaaatcggacgtaagatggagagagttggttaggaaaaatttgtagtgatgaaacagtagagaatgacacagggctcaaacaatgacagtctcatgaagtagatgagataactagggaaatgactgtgattccaagatctgtcataccattatggtatgttgtcttacccatatacctgtgatcgtagctcattgtaagtgatgtttatggtgtagcattctaattgatgcttgttttgaagccttgcagagtctcaaacttccttccaaatcattatcaaaagattgaattgttgggcttt

SEQ ID NO: 397296 - DNA, 496 bp, Homo sapiens
cacacaatgctgatagatttgtgcatgaccaagcatacctttcaaggagctctcagcggaggtttgccctttgagacagacacagtcagtgcacagaaactgtttttttaagatatcatccaggagtcattcctagaataggaatggaatagacatgcctccctgagaagaaaggaagacagattctatactgttagaatttgaatctgtgttgcagggagatgaggaatttgaagccagactcttgggctgttaatgtatggctaagtggtgatgtggtgacaaccttgaatgctagtcctggaggtcaaatcaccagcagctggtgccatgggaggctttgcttaggggacacggctgggttctgcctggatgctgcatcccaagggaggcattgaggtgcggctgtgaggactccaaaccccatgtccagaaggatgagtaacagagatcctgtgtcattcattgatttcaataaaatatttattggatccat

SEQ ID NO: 397297 - DNA, 450 bp, Homo sapiens
acagagtagtgttgctattagtgttaaagttgtgctgatgaggcctaagagctctgctgataaggcctaagagctcttatcctgcttttctccctttactggaaattctgacaaacccaagagaaggccaaccagcttggagacctactaggtaaggcaggaaccacaagtagttcctgatctgttagtgagaacccctagtttgagtattttctcaagtccccccgccccccaccgtttgttttaactttgaaaataaccagtttacagtaatgagctatttcaacatgaggtcttttattgtccccctatttatccctgatattaaagttactcttattttgtttctgtcttgtcccacttatctttgaagtattactctgttttagaccttccaattcactgatttatcagacctttgaaatatattcttatcttccacagaattat

SEQ ID NO: 397298 - DNA, 344 bp, Homo sapiens
ttctgaatcatcccaatatcttgaagaaagggaaggggcagcaggggtccacccaccccttattatagatgctgaaagtacagaagtatgtcaggacttggtgacaaaaatgtctatagacacatcctgatgccatcctgctggtgcccctaccctaagccctgactggcagcaggttctccctcaccaggtaggctttgctacaaaaagatgaatttacttgttagatggaggatgcatattgaggccatccatgcctctgctgcaaaatcctttaggagaaagacaactggtatccaatatcttcgagtaatgaacttatcagtaaatgtaacacatgagct

SEQ ID NO: 397299 - DNA, 292 bp, Homo sapiens
caggtggaaattatattacagtgttgttatacgacaaggagatgtgtcatacagtagtgaaagttagaggcctgcagttatttgcaataggcagatgagtctaagaagtgtaatactgagcgaagtccagaagactcctatggtagaattctgtattaacaaaattcaaaaacaatcagaatgaaacagtgtttcatttggcacacatatgtatagtgaaacctttttagaggcagaattacaaaactcagggttgtggttttaatgggtactccttgtgggagaatgaggg

SEQ ID NO: 397300 - DNA, 450 bp, Homo sapiens
cgagcggccgcccgggcaggtacactgtaaattgtatataactaaagtgaaaaaatggtgctctattaatttttttaaaggcaaagactgtgccttttcattattacaaaacatagtatataaatgatacttagattattattatgctaatgaactgtcagaaaacaattaaaaatccattcacacttacattcatattttaagtcaacaaataaatattgtgctgttggcatgtatcatctacacagatgaccaacccatggccctggccttaagaaactcttagcaacagtattgtctgtatgtcactttagaatttacaaaacgtttctgcatgcatggttactataaagatgataagatcagttagttacactatcttctaaattctgaaaacaatcacaaatttataaggaaaaggaagatggggagattaagtgacttggccaa

SEQ ID NO: 397301 - DNA, 170 bp, Homo sapiens
tctgatattcaaatgatgtgaggcacatagaattattgagatgatacctcatatgatatatggcaaatctttcaagtgtctaatttatcagattttactcctttctcctcaagaattggccacttttttttttttttttttttgatacggagtcttgctctgtcaccagg

SEQ ID NO: 397302 - DNA, 198 bp, Homo sapiens
cccctcctccacatgccaacttctttcaaacttagggatcaactctgccgtccccttcaccctctctccctctggtgtcgcacaggaacctccggctgttcctctaataacagcttgatcaggcctccctctcaccttccttattcttcttttttggaaaagttcctaaatttgtcattgtctgatcctggagaccac

SEQ ID NO: 397303 - DNA, 437 bp, Homo sapiens
agtttgaaagtgtttttctacacatggtgtgcttctaagtcttacctcagtcctgtaaggcagatggagcagacagtctgtcacaaattaggaaactgaggcctgagcaggcgcctgacttggccaagcttggaaagctgtcaggtcagggcttcagccccggccggaagtgtcccagactcacgcctggctcactgttgagcctgccaggagattccttttttcttttttcctatatatttcaaaatattttcattatgaaacatactttaaaagtttatacacacgcaaacatacattttaaataataataataggccaggcatagtggcccacgcctataatcccagcactttgggaggctgaggcgggcggactgcttgagcccaggaggttgagaccagcctgggaaatgtagtgagaccctgtctctacaa

SEQ ID NO: 397304 - DNA, 176 bp, Homo sapiens
gtccacaagggtctcttggttgtctcttggacaccctcaagggaatcacattgagcataccctagctgaagtttatcgtgatcgtttctaaataagaaattgtactgaaagttttaacttactgtttggaaagcaagtgccttgtttttgactgatttgtgtgtgtgctttttttg

SEQ ID NO: 397305 - DNA, 266 bp, Homo sapiens
gtgcaaggcactatgggtataactgtgaaaagaacagaaaatatatccattattctgtacatcctcacagaggctgtaaataaatactgttgacattagttatgataattcccaaccctaattatctgggcagagtcataaacagtgagactgtaggctgaaactgacctactaaattggaatcctacttgctgcaatatgaccttgccgggctggtcatcggtggagccttgtgatctatacagaatattgaggtaaggcaaatc

SEQ ID NO: 397306 - DNA, 304 bp, Homo sapiens
gtggttatatttcctctctaatacaaaagtttcttttcctctagcacttaaaaactgtattgcgtttttacttgcttatttttctatgtatttacgactagtttatctcaatctctgcaagagaaatctaaatccctctcaatgtgtatgaatcaattaatttcttctttttctgggagacatctctcctagagtcctttaagagtcctgctccaacatgaatgacttgctttctaagcctgctacacaccaacatcctgggaattctcttcactttctcctgcgttggattccttgtttccca

SEQ ID NO: 397307 - DNA, 497 bp, Homo sapiens
tgaaggcagagaaggaagggaggagggaatgattcaaggccaaaatggccacatttagaagatacctcagatgataaccatagttatgtgtgtgcaattttatttaacagtgatgtgtatgtggtggacaagttatatgaaatatctagtctttctagatatttggaagtgcttgatgtatttaaaagtggtagtagaataacactttgtaagtagcttttaaaaactgatgggaaatgctgtttggaagtggaattgttgaaccacctgggaggtgggagggaagaaattgcaaatggtgttttgccattgcaattattagaaaatttcagcttaaaaaaaaatggtctggtctcaaggatagttgtttgcaacttagctcttttataataatgtaaaaaaagatttgtctgtctttattttcaaaagctgactttatatagattctagcttctgacctaaatcatttccttgatataataaacttttacatgaaa

SEQ ID NO: 397308 - DNA, 230 bp, Homo sapiens
ttgatctcggacccgtcagacgctgaactatgtggctgaaatgcaggtaattctgtcagaatgggagaagagaagaatcaatgcagggtaggcaaacaaaagcccctgcttcactgacaagcacctttcaaaaaaattcagaaaaagaattcaatgatgaaagcatactatcaaatgccatgcaatagttggaaggaataaatgtatagcaacatatatagatcttagaa

SEQ ID NO: 397309 - DNA, 951 bp, Homo sapiens
gagccgctgtgcctggcttttccgtgcttctttaccaatgctgcatccagcacacttggagtaggagcgaaccgagagtcctcaatatctcatttccaggttctctgaggagctcctgtgacagcgcctgcctccctccctgtgcagtatcaccacgtgggccccggaggtgagaggaggttgggcacagctggcacaggtccctgacttgcccaagtgaaatagatctgtgccctggggtctggcaggaatccgcgtggttgcaaatggagatggactcatgcaggtcatttgtggaaagcagcaccactccctttgagaactccagagagggttttgggggaacctgagatgtggggatgctgagaacaaaaatatctgagaacagatgagatgggtgagcctcaagtgggaaatggggagagctgtcatttcaaggaacagcatgaggctgggaaggaaaccggtacatccaggaactctgggccactctgctctttacgtggaaagcaggaacccaggccaaaaggcagggcttggcaaaaagaccccaggagcattcttgccctggcaccttctctgccaggcccctgaacctggtggccatcagatgatttgtttcggggagccctgcagagcaatcaggctgactgtggacaatcagggcagagacggtagtcaggaggcagtcaggagcctctcccttctctttccagaggtagtttccttctgcctcttaaattcaggtagcttctgatcagatcaatccagaatctaggattatgctgatgtcgcagactcaccatgggaaacttgccctcatgaactaggatgactttccctgtttatcctcagcagaaagaaggcaaatgccctgtatgtgaaagcggaactgcctgtccctgtggagaggcctggctctgctgctctacccagcttgcttacaggccc

SEQ ID NO: 397310 - DNA, 1132 bp, Homo sapiens
gagccgctgtgcctggcttttccgtgcttctttaccaatgctgcatccagcacacttggagtaggagcgaaccgagagtcctcaatatctcatttccaggttctctgaggagctcctgtgacagcgcctgcctccctccctgtgcagtatcaccacgtgggccccggaggtgagaggaggttgggcacagctggcacaggtccctgacttgcccaagtgaaatagatctgtgccctggggtctggcaggaatccgcgtggttgcaaatggagatggactcatgcaggtcatttgtggaaagcagcaccactccctttgagaactccagagagggttttgggggaacctgagatgtggggatgctgagaacaaaaatatctgagaacagatgagatgggtgagcctcaagtgggaaatggggagagctgtcatttcaaggaacagcatgaggctgggaaggaaaccggtacatccaggaactctgggccactctgctctttacgtggaaagcaggaacccaggccaaaaggcagggcttggcaaaaagaccccaggagcattcttgccctggcaccttctctgccaggcccctgaacctggtggccatcagatgatttgtttcggggagccctgcagagcaatcaggctgactgtggacaatcagggcagagacggtagtcaggaggcagtcaggagcctctcccttctctttccagaggtagtttccttctgcctcttaaattcaggtagcttctgatcagatcaatccagaatctaggattatgctgatgtcgcagactcaccatgggaaacttgccctcatgaactaggatgactttccctgtttatcctcagcagaaagaaggcaaatgcgccccaaagtgctgggattacaggcgtgagccaaccgcgcccggccaggaatctttttaaagggcttttggactgctgtggccctctcaaagggtggtccagaggtgtgggttatcctctctcatggtgggcggggccgatagtgggctcagtcctggtagaggaaggccgaatagagcagaggctgcctctcctccccctgtctctgatttccacccagctgctgcaggtccagcactcatccatactactcgcggcc

SEQ ID NO: 397311 - DNA, 766 bp, Homo sapiens
aatccagaggctacatagatttttctgaacttggggaggcagagctacaattacggtagtaagaataaactaagagggaacaaacaggacattaaatcagttcgtctgttcagcagtgctccaggtacttgggactcatcagtaaataaaacagttcccttcatttcatttttcatctaaccgtgtccacttgctccccaccccacctccccgttaaaagggagcaatacaggctgggcacatggctcacgtgtgtaatctcaacactttgggaggctgaggtgagaggatcacttgaggccaagagttcaagactagcctgtgcaatatagtgataccctgtctctataaaaactaaataaggaaacagtgcagtcatccctttttgtccatggggtgttggttccagaacatcccatggataccaaaatccacacatagtcaagtcccttaggtaaagtcgtgccgtatttgcatataacctatgcacatcttcccatgtactttaaataatctatagattacttttaatacctaatgcaatttaagtgctatgtaaatagctattatactgtattgggttttttatttttttcttgttttgccctttctaatattttcaatccgaggttgattgactctgcagataaagtagactggaaaagtacagtcgtccttaggtgtatgagggagattggttctaggacccctgccaaaatccacaaatattctagtcccccagtctgccctgtggaacccgtgtata

SEQ ID NO: 397312 - DNA, 595 bp, Homo sapiens
gactcctgatctaaaaacgactgctgggacccaccaacccaggagcatctgcttcgcctggcgctcagtggccaactgtctggtttttgcactgaaagccccttgtctgtccagaagcccctcagtcccagtcttgggtcttgggctctgggcccggtgtggctgggatcgcaggcatgttcatggcaggtcaggactgcgctaagcctttggggaggatacttgaaaggggagtaatctgctgtctgtgtggttggagcttaaagtacagctggggctcaagagacacccagagtgcctgtcaggcggtggcactgtcatcgcatttgataaaggccaaactgagtctgggagagaaggggctggggccacgcagaatcagggcagggctggggccaaaatgcctggagagacagagtctgagagatacagagatggccagagacagatggagagagacagataacagagagatacagagacagccagagacaaatggagagagagacaaatggagaaagagagccagagacatacagaaagacagagacactagagtctgagagatacagacagacacagagacagccagaga

SEQ ID NO: 397313 - DNA, 292 bp, Homo sapiens
ttttcttcatgtggacttaaatgtttgtatttccaaatgaaatagatcccgggtgaggcgcccaaaggagaaggaaaatcaaaaccccagaaagaaacccagtagtcactactcgcctggcgctcagtggccaactgtctggtttttgcactgaaagccccttgtctgtccagaagcccctcagtcccagtcttgggtcttgggctctgggcccggtgtggctgggatcgcaggcatgttcatggcaggtcaggactgcgctaagcctttggggaggatacttgaaagggga

SEQ ID NO: 397314 - DNA, 514 bp, Homo sapiens
taaagtcagaatggagaaatgcatggagaacagtcatttctcataaagtcagaatggagaaatgcgtggaaaacagtatttctttctgtgaatcagaaaggacggagttatgtgattacgttctgtattctgaaaacagaagctggacacttgaggggtgctgtacatctaggaccttatttgtaatggaggaaagcacagtatagaggagacattaggatttcacctaactggccaggtgtggtggctcatccaataagcctagcactttgggaggaaaaggcaagcaggtcacttgaggtaaagagttcaagaccagcctggccaatgtggcgaaaccctgtttctactaaaaatacagaaaattagccaggcatagtggcacatgctgtagtcccagctattcaggagtctgaggcaggagaatcgcttgaacctgggaggcagaggtttgcaatgagctgagactgcgccactgcactccagcctgggcaacagagtgagactctgtctc

SEQ ID NO: 397315 - DNA, 911 bp, Homo sapiens
aggggagagtggagctgggtgagtgagtgagaggtttcagggaaggaagtaggggtagtaggcggagaagagaagagggagaaagattccaagaaaggccaggcccagggatggagtttccaggacaaagttgttgctgagagttggctggtggcagttgagggcagagaacccgggtggggtgggggtggggaggtaggagcaaggattgggaagctagaaagtcgggaatcagtgactgtcttggggaaatttccattccaaacaggaaaagcccaggagcatttgatctgtcctagcaatggacaaagctggcctcttcctccctcattcatttgttcaatgaatattgactctgtgtttctgagacgagctcaggtccaggccctagtcttgggaaagaatccaaggggtttgggatgcagacaaggaaacagttcatccagtaaacaatacttattgggcacctcctatatgccaagcatcatgctgggccctcagggagcccctagtctgatggaggagacaggtaataatgaaacatatacagacctggatcattacagctggggaagagagctcagatcataaagaggacccaggcaacggaaggtatcactagggagatgatgagctcctggaatggtccatggccaagaaatgctaaataccagaggggccctgacctagttgaggggcagaaaatgtatctgagtgaggcctagagcctcagaaggcctcagaaggcattagctcagtgcagaagggctgcaacagagtctgtgactttgaccaagcaccttcactcctctgagcctctgtttccttacctgtaaaatactagaccttcctaagccaccagggataccgaggaatagaaaagttagagcagaaatttcataaagtactaa

SEQ ID NO: 397316 - DNA, 428 bp, Homo sapiens
agatggcatgtgagccagcttggccaatgggaatgctgttttgcctgtggctggaactttccagaaggagaccattcccttggctgtactgggggatggtgagtccagagctgttggggccctgtgtgaggtgggatacacttctttgacactggtgctcctaagtcagctgtgcctagagggtggccattcttggactcccctgtgcgcaccaatagccctccttttgcccagattaactggtgttcagcctctattccttgcacctaaaggcacctggagcaataccatggggagttggggcaggggtgccaggccttgaagtcatctggggtggagtgggagctcaggagtggtcaggcttgatgagaagaaagtttcgtcactagagaaatggtgaagccaggattagaactcaaggccccccc

SEQ ID NO: 397317 - DNA, 585 bp, Homo sapiens
atgcaacagcagtgaacaggggcatggccgtggaaggattttcaggagtttaggatgaggtttaccatctatgctgttgccagcacttggagcacagtgattaaagacaaatttgtgcatgcttggcacaacctctggcctgcgactgtgttcagtgatgatgaacaagatggtgactttgaagagttccatatgtcaaatgagaaaaaatgatgtctggcctgcttatatatgaaagaaaatactccttcagagtcctgaaagctagaaaatgggtactgaagtttttaacattgataatgagactccagttgttcattcattgaccagggatgaaatagctgaaatggttctgagtcaaggtgatcatgaaaatggtgacaatgaagatgaatattgttaacactgtagaaaaagtacctaaagacaacatgattgtctaggcctgtttgtgttgctataaaggagtgcctgaggctggttaatttataaagaaaagaagtttactttggcctggcgcagtggctcacacctgtaatcccagtacttcaggaggctgaggcagaaggattgcttgagcccagg

SEQ ID NO: 397318 - DNA, 463 bp, Homo sapiens
acctgccctacttaatgctgtaggaggagcaggcggaggagagcagaatgggcaggaagaaaagtggtgtgagaaagcagtgaaaagtctggtgaagtagcgtaagaaaacaggacgattagatgagcttgagaaagccatcaccactcaaaactgttatactaaatgtgttaccataccaagcacttgctctgaaatttggggactgagtacaccaaatacgatagatcagtgggatacaacaggcctttacagccatttaggtaggtacctaaatgactgtggagaaactagagctactagataaagcacttggacttcccctgttgccattgggaagccatttcagatattggagcaggtccttgagagcagaaacgtagcctcgtcttggcaccatgcatcatgtaaacatcagtaatgctttttgaatgaatgaatgcctcaaactgtagtttacagg

SEQ ID NO: 397319 - DNA, 131 bp, Homo sapiens
ttgggtgacagagcaagaccctcaaaacaaaacaaaacctctctgcaaattccttccctctagctactctgaaaacacacttgatgagaatgtcaggattccattcagaattatcccagacaaatgactcc

SEQ ID NO: 397320 - DNA, 787 bp, Homo sapiens
ctgtgccactttttattattttaataaactaaaaacgcatttgttagtgtttatttcatttgatttttgctgattcttggcagagccctacactgaggcaatgtcttttaaaagttctaaatgaaacaactgcccactggcaggaaggcctctcccctgtgtgtgccccatctgcattctgacggaagcagcaaggccttggcctccgagttgggagctggcactggcagcagtgagtcagcccagctggaccccctacataggatgctgtgggggtgggcagcccaggtagcctctcccagaaccaggcccagtgccctgaaaagactggggccctactgatgggttttcaaccagcagacatgatttgattccaaaactggcacccccttggcagtcagactcctttctgggggccgtggctgagtgatgtcaccccttgggtatttcccaagatctccaaacaacagaggagcctgggacccttttgcatggtggagagagagggtggcccagggagaacagtccacacccagacacaccacggggtgacttgagaactttttcagggacatgaaggaagctcatccaatcagatcagataatgactgaggaggtgagaggaagagagaggcaggcaacatagtgtcagaaccttgaagagtctttgggacattggcaaatcagcagtttttaaactcaaatgaccataacttttattgccttgtgaagtatgggagctagataataattatagggacagtaaaatagacagaggtgagtgtgg

SEQ ID NO: 397321 - DNA, 572 bp, Homo sapiens
cgcgcacacatcctgaggtcagtggggcaagttcaccatgccctatgacagatggagaaattggggctgagaggcaggtgataaatgcacagtcctcagaaggggctgaggcaagctgagcccacatcttccccagctctagtgcccgcccaggacccccactccatcagccatcagtggccagatccctgagagcacctgctctggggtcagccacgtgcaaaaggcctgggagccacaacagggaagaaagggccctgcccgcccgcagctggcggtcactggggagaacagacaagagaaagcgtggaggatggcatagctcagagtggggattgtaggcggcagaccacactccgtagtaacccccagtgttgtgggatattaatgtgcattacataggcaaggagttatgtgatcaaataggtttgagctaggcacggctgcgcgtgcctgtagtcccagctactcagaaagctgaggcaggaggatcacgagtctgggagtttgaggctacagtgagctatgattatgccactgcactccagcctgggtgacagagtgagactcaa

SEQ ID NO: 397322 - DNA, 418 bp, Homo sapiens
aatcagtaagtcaacattgatatattaagttctttatatcattatggatttctgatttttgcagtaggttatatttttaaagtatttttataattttgataatcagattatcctggatttggccagtcagggagtatattcagggtggtgcctatatccttttgaaatacctgtcattcttttaagcacttccatactgtctggcacagtaagattgttattttgtgctttctgggctccagccctcgagtcagctatttcttcaaggagctcttattccttttagtagagtatggtagttagaaacgagacttgagtatgcttgttgctactgaggtgtaattgcttctagcttctttcaacaggcagaactaggaaatatatttacatacatgcatacctacatacacacaccaaa

SEQ ID NO: 397323 - DNA, 341 bp, Homo sapiens
ggacaagtaggcaaaaatgatgggatccattagacaagtggtgctttagctagaagcagggaggcatcgatggtaacagggggaaaagcaagtacttggacattggaggcagagggtctgaagacttggtggtgaaaggattcagaagttctgtcctgattagttccatttcccttgagcgtcactctccacttttaagggcaaaaaataggagcacagtagtccctacttcatggagttgttgggaagattaattgagcaaatcctgtgctggtaagcacacagcacagagccaaggccacagtaagagtgatcaataaatggcagctgaccttgcatcc

SEQ ID NO: 397324 - DNA, 286 bp, Homo sapiens
ggagattgagactgcagtgagctatgatcatgccacagcacttcagcctgggcactagaacaaaccccaactctaagagcgtggtccctactcttaaactatggccttgtagcaactcatctgaataccgaagatggttggtgctccatgacctctgttatttcctttattttttatttttaatagggaagacggggagaattttagccttttttgtgtatgtgtgcagtggtgtgattgtagctcactgaagcatctacttcttgggctcaagctctcctcccac

SEQ ID NO: 397325 - DNA, 203 bp, Homo sapiens
ctgttccctggcttatgggcaggagggagctggtgaggctttggaaattctattgctaacactaacacgggagatctttctggcctttctggttttggcaatggctctttttctcctgccttctaaggtactacaggaaaaaatatttcctctacctccatcccacattgcccaggaacattttaaagattgaaggctttctc

SEQ ID NO: 397326 - DNA, 745 bp, Homo sapiens
ggtgggagtttcccagagaacttatcttcttctttcttcctctcccctgctctgtgagatgtggttcagatcagagatcgcagccgtgggacaaatggctcaacaactgctgactgtggtgccagccttgggactgggggaccttgagatggacaactgcatgcttgaattttgagtctgaagggaaaagaagaggtgcgtgggggtgtgtgtgtatttgcacatgaactcacttgcctgcacacacccaccgtctgaaaggcctctttcctctcctcagggactgtagtgttggtgatttcagctgttccctgctccttgatgatgaaaggggagcgattatgctttttgctgggtgtctgtgtttaattgcagggatataataactacaaattctccctggccgagacttttctaataaaaggtttcttccatcccagctgctttctcttccctttcacacccccacccccatcactgtcctagcacaaggtcacttagggttttaaatgagagagagacacacacatgttcaggtttcgcgtagagtgtttttttaaagctcctcctccagacccatcattatggagatcagctgcttgcccccacctctgcaccacctcccctaagctccttgctgagtttatacagaacccaatttttcagtctcttgggtgtctgctttttctctggttctgaagaaataagagacgggtagaacagggaagaccaacaaaagaggttt

SEQ ID NO: 397327 - DNA, 369 bp, Homo sapiens
ctacatccagtagaacccggaaaagggagacagggactgacacacccccaggcttgactgaaaggctgctgatgggatgtgcatccctcccctcagtcccttcacccaggggtacaatggctgagtctcagaagccaatatgcagcaaccatgcaagcgcctcaccaatgcagaactgtacacaggatgctagacccagaaagcatgttcttacagacaagaagctcatacttgggtggagagatgcattcaggaccccgaggttctgggggaggtttaaaaaggaaccatcccactcgctatagaaggagacgggtcctggtctagacacaggcgctgtgtctcctctctaagccctactgatggcag

SEQ ID NO: 397328 - DNA, 582 bp, Homo sapiens
caaccatagaatggtgttaataaaagactttatgtttgaacagaaacctatataaccacaagaggttaactgatagagacaacgggacttaaactaagtgagtagctgtggggaaagggataggggaggtggagaatgaccaaagtttatatttggacagtagaaagcaaatctaagttccccagcgcacagagatctggagagaaagccgctccagaactgagcaatgtgttttccagggacaaagtatattcactttatcttcacaggtttcctttttctccatagaatgaaggactgacttactctaggtctcccgttagagaattccctccattccattaaagaggctgttatgatgttatgttagtacatgcctgaaagtacaaatgaccatcaaatgttgcaatggaagagttttttgctttctcccatagccttgtttagaatctccactttggagcaatttccgtattcctctctcaatcgattcactattaaaattttctaagacatttaagaagtactaacaatctgtcacaaactctttcaaaaaaacagaagggaagagaacatctccta

SEQ ID NO: 397329 - DNA, 672 bp, Homo sapiens
ggttgctgctggagctcttccgttctggataatttcacagatattttcaagagttaaggagataacatttccgtcatttctatggattgtaccagctgcttcgtctgtttcccattgtataaatatttatacaaggtcaaaatgtaaatgaagtaatgcagtggttgcacagatgtagttcgtctagagcagtggttctcaagcagtgtcagcattacctggggtttggttagaaatgcaaatctttggcccaaatggattactgaatcagattctggatatggggtccaggaatctctgttcactagtcctgtaggtgattttgatgctgccaaatgtggagaaccactggttttctgtctgtacaacccttttgaatggactctttaataaataattttcactcacagacgctggcagttggtttatactactttttctaaagtcttttatgcagcgttttaaaaaaaagcctttgattttgaaaagattcctgtagtgatctaaacttcttccattttttcccctcaaactgttaataagtaggccaattccatagttaaaattcaggaacatgtcagatgtggcttaaaaattctagaaattgggcttttgtctaaatatccataacacaaagcttctagactgaagttctttttagtcttaccaaaa

SEQ ID NO: 397330 - DNA, 352 bp, Homo sapiens
ccctagaggagtgacctgtataaaggcagggtggcgaaggagtgaggatatatgtcatccgtgaggacatccagacaacagccactgcacaggccggtggtcaggagagaggtctggacgggggacagccttgggcatccgtccaggaggggggctgggaactgaacctgggccctccagcctggacgagagagcaagatccatctctcaaaataaaataaaatgctcccaggtaatgataatgtcccaggcttgggccccaaaaggaatgtttttgttcctaagacagtctcaaaagtgggcactgtttcccctgctctgcctaacaaatggaaagttcaataaattattg

SEQ ID NO: 397331 - DNA, 506 bp, Homo sapiens
ctgtgttgttgctgttgtttcagagacagggtctcactctgttgcccatgctggagtgccgtggtatgactggagctcactgagcctcaaactcctggaatcaagagagcttcccatctcagcctcctaagtagctgggattaccagcacatgccaccatgaccagctaattttcaaattttttgtagaaatgaggtctatgttgcccaggctggtctcaaactcctggcctcaagcaatcctcctgcctcagctttccaaagtgctgggagtagagtgcatttcttttaaaatttacttactaattttttttttccttttagagacaggatctcgctctgttgcccaggctagagtgcagtggcaccaccgtggctcactgcagcctcaacccccctgggctcaagcaaaccgcctgcttcagtccaccaaattgttgggattacaggcatgcaccaccacacctggcctggatttcattttattcctttaaggataccagactt

SEQ ID NO: 397332 - DNA, 492 bp, Homo sapiens
ataaaaatgtgagaatccagaatggacacaatatccacattttaaataattttaaatattgcactaaaatatttatactactgagtttattggcacctgttaaattttgtacctgagccgagtgcgtcactcatctcaccctagtcctgatcctgttgggaagtctggaaagtcaaggatttcatggagttagggatccttgactaattggtgcttcatatgttctcattacttgctttgggtaagtcttgtacaggcaggagccaccatgcccagcccccaaatatattaaatagggtctgttaccatctcagtgactgtcttaaaacaacctacaaacttccagcaccatttcctagcatgctggctcagcagactgttactccgtgtaaatcaccagactgcaattctcaagggcgaccaatgcttgtctcctttccattacagcaactcttttggagcaagggtaataaaagactttgtcaaacaaaa

SEQ ID NO: 397333 - DNA, 475 bp, Homo sapiens
aacccagctacttgggaggctgaggtaggagaattgcttgaactgggacctgcaaggcagaggttgcagtgagtcgagatcgcaccactacactcctgcttgggctacacagtgagactccgtctcaaaagaaaaaaaaaaaatccttccacacagactagactgaaatgcactctaaaggtaagtgaggcagccaggtgcggtagctcacacctgtaatcctagcagtttgggaggccgaggtgggtggattgcctgagctcaggagttctacaccagcctggacaatacagcgaaaccccatctctattaaaatataaaaaattagccgggcctggctgtgtgcgcttgtagtcccagctactcaggaggctgaggcaggagaattgcttgaacctaggaggcagaggttgcagtgagccgagatcgcgccactgcactccagcctgggcgacagagcgagactccatctcca

SEQ ID NO: 397334 - DNA, 336 bp, Homo sapiens
cccattttagccccgtgtgggactccccaccctctggctccaggaggtggtccagggggacaaggagatgcccaggctaatgggagacaaaacatccttgacacccagacagactaatggccagaactatggatcctggacagctgttgacttgagggctgtacaatggaatggtcatagatgggaagatcaactagagagaagagtggttttcagaaaatgtcctcgaggagggagtatggggcagggcttaagaaagggggtgcagcaaggggggaaaccaagaggcggaagtaggcttctaaaaggccacacactatacctctcttctgcagt

SEQ ID NO: 397335 - DNA, 268 bp, Homo sapiens
ccccaaaagccacactacctgagttcagaaccctgggctatgccactcaaaagccctgtgacctttgacaagttagttattctttctgggccttgtctcctcacctgtcaaatggagagaaccttaccccttagggttgttgtgaaactctactgcttgtggagatggtaaaagctcagtaaatatcattttctagattttctaaagatctattattttcaagaatactattattcttctttctgaaataaatgataattttttcccc

SEQ ID NO: 397336 - DNA, 231 bp, Homo sapiens
gggctggagtaggaacaggagtaggaggaacgctctggtcatgggactgtgtgaagagagaaggatcaggaagaaaacatgagctatcatgtctgggttatacctcagcagagccgctggtggcctcccaggcatctgaatttactaatcacaaagctcaccaggtgtgcaaataaacaaatgctgttcaggaggcacagccagggttctgctggagagggatcatcttgg

SEQ ID NO: 397337 - DNA, 135 bp, Homo sapiens
ccaagatcgcaccactgcactcaagcctgggtgatagagtgagactccgtctcaaatatatatttaaaatttaaaaaatgtatatctatatttaaaatgtgttttgattgatccactagggacagtcctttaatt

SEQ ID NO: 397338 - DNA, 191 bp, Homo sapiens
ttaagatatacaaagaggcattaagaataataaagcatgtcttggatacccaccaaacagctggagaaattaaacatttatacagttgaaactccttgtcatccttccccacttgcatccctctttttctgcaactcctgaagggaaacactgtcttgaaattggggtttataattacccttcatgtcttt

SEQ ID NO: 397339 - DNA, 2850 bp, Homo sapiens
ggagaaatcacataaccttaaaaaggactatattaatcaccttctttgtaatcccttcacagtcccaggtttagtgaaaaactgctgtaaacacaggggacacagcttaacaatgcaacttttaattactgttttcttttttcttaacctactaatagtttgttgatctgataagcaagagtgggcgggtgagaaaaaccgaattgggtttagtcaatcactgcactgcatgcaaacaagaaacgtgtcacacttgtgacgtcgggcattcatataggaagaacgcggtgtgtaacactgtgtacacctcaaataccaccccaacccactccctgtagtgaatcctctgtttagaacaccaaagataaggactagatactactttctctttttcgtataatcttgtagacacttacttgatgatttttaactttttatttctaaatgagacgaaatgctgatgtatcctttcattcagctaacaaactagaaaaggttatgttcatttttcaaaaagggaagtaagcaaacaaatattgccaactcttctatttatggatatcacacatatcagcaggagtaataaatttactcacagcacttgttttcaggacaacacttcattttcaggaaatctacttcctacagagccaaaatgccatttagcaataaataacacttgtcagcctcagagcatttaaggaaactagacaagtaaaattatcctctttgtaatttaatgaaaaggtacaacagaataatgcatgatgaactcacctaattatgaggtgggaggagcgaaatctaaatttcttttgctatagttatacatcaatttaaaaagcaaaaaaaaaaaaggggggggcaatctctctctgtgtctttctctctctctcttcctctccctctctcttttcattgtgtatcagtttccatgaaagacctgaataccacttacctcaaattaagcatatgtgttacttcaagtaatacgttttgacataagatggttgaccaaggtgcttttcttcggcttgagttcaccatctcttcattcaaactgcacttttagccagagatgcaatatatccccactactcaatactacctctgaatgttacaacgaatttacagtctagtacttattacatgctgctatacacaagcaatgcaagaaaaaaacttactgggtaggtgattctaatcatctgcagttctttttgtacacttaattacagttaaagaagcaatctccttactgtgtttcagcatgactatgtatttttctatgtttttttaattaaaaatttttaaaatacttgtttcagcttctctgctagatttctacattaacttgaaaattttttaaccaagtcgctcctaggttcttaaggataattttcctcaatcacactacacatcacacaagatttgactgtaatatttaaatattaccctccaagtctgtacctcaaatgaattctttaaggagatggactaattgacttgcaaagacctacctccagacttcaaaaggaatgaacttgttacttgcagcattcatttgttttttcaatgtttgaaatagttcaaactgcagctaaccctagtcaaaactatttttgtaaaagacatttgatagaaaggaacacgtttttacatacttttgcaaaataagtaaataataaataaaataaaagccaaccttcaaagaaacttgaagctttgtaggtgagatgcaacaagccctgcttttgcataatgcaatcaaaaatatgtgtttttaagattagttgaatataagaaaatgcttgacaaatattttcatgtattttacacaaatgtgatttttgtaatatgtctcaaccagatttattttaaacgcttcttatgtagagtttttatgcctttctctcctagtgagtgtgctgactttttaacatggtattatcaactgggccaggaggtagtttctcatgacggcttttgtcagtatggcttttagtactgaagccaaatgaaactcaaaaccatctctcttccagctgcttcagggaggtagtttcaaaggccacatacctctctgagactggcagatcgctcactgttgtgaatcaccaaaggagctatggagagaattaaaactcaacattactgttaactgtgcgttaaataagcaaataaacagtggctcataaaaataaaagtcgcattccatatctttggatgggccttttagaaacctcattggccagctcataaaatggaagcaattgctcatgttggccaaacatggtgcaccgagtgatttccatctctggtaaagttacacttttatttcctgtatgttgtacaatcaaaacacactactacctcttaagtcccagtatacctcatttttcatactgaaaaaaaaagcttgtggccaatggaacagtaagaacatcataaaatttttatatatatagtttatttttgtgggagataaattttataggactgttctttgctgttgttggtcgcagctacataagactggacatttaacttttctaccatttctgcaagttaggtatgtttgcaggagaaaagtatcaagacgtttaactgcagttgactttctccctgttcctttgagtgtcttctaactttattctttgttctttatgtagaattgctgtctatgattgtactttgaatcgcttgcttgttgaaaatatttctctagtgtattatcactgtctgttctgcacaataaacataacagcctctgtgatccccatgtgttttgattcctgctctttgttacagttccattaaatgagtaataaagtttggtcaaaacagatc

SEQ ID NO: 397340 - DNA, 310 bp, Homo sapiens
gctttgttctttaagtacaatcatagacagcaattctacataaagaacaaagaataaagttagaagacactcaaaggaacagggagaaagtcaactgcagttaaacgtctttattctttgttctttatgtagaattgctgtctatgattgtactttgaatcgcttgcttgttgaaaatatttctctagtgtattatcactgtctgttctgcacaataaacataacagcctctgtgatccccatgtgttttgattcctgctctttgttacagttccattaaatgagtaataaagtttggtcaaaacagatc

SEQ ID NO: 397341 - DNA, 2766 bp, Homo sapiens
  misc_feature (2757)..(2757): n is a, c, g, or t
ggagaaatcacataaccttaaaaaggactatattaatcaccttctttgtaatcccttcacagtcccaggtttagtgaaaaactgctgtaaacacaggggacacagcttaacaatgcaacttttaattactgttttcttttttcttaacctactaatagtttgttgatctgataagcaagagtgggcgggtgagaaaaaccgaattgggtttagtcaatcactgcactgcatgcaaacaagaaacgtgtcacacttgtgacgtcgggcattcatataggaagaacgcggtgtgtaacactgtgtacacctcaaataccaccccaacccactccctgtagtgaatcctctgtttagaacaccaaagataaggactagatactactttctctttttcgtataatcttgtagacacttacttgatgatttttaactttttatttctaaatgagacgaaatgctgatgtatcctttcattcagctaacaaactagaaaaggttatgttcatttttcaaaaagggaagtaagcaaacaaatattgccaactcttctatttatggatatcacacatatcagcaggagtaataaatttactcacagcacttgttttcaggacaacacttcattttcaggaaatctacttcctacagagccaaaatgccatttagcaataaataacacttgtcagcctcagagcatttaaggaaactagacaagtaaaattatcctctttgtaatttaatgaaaaggtacaacagaataatgcatgatgaactcacctaattatgaggtgggaggagcgaaatctaaatttcttttgctatagttatacatcaatttaaaaagcaaaaaaaaaaaaggggggggcaatctctctctgtgtctttctctctctctcttcctctccctctctcttttcattgtgtatcagtttccatgaaagacctgaataccacttacctcaaattaagcatatgtgttacttcaagtaatacgttttgacataagatggttgaccaaggtgcttttcttcggcttgagttcaccatctcttcattcaaactgcacttttagccagagatgcaatatatccccactactcaatactacctctgaatgttacaacgaatttacagtctagtacttattacatgctgctatacacaagcaatgcaagaaaaaaacttactgggtaggtgattctaatcatctgcagttctttttgtacacttaattacagttaaagaagcaatctccttactgtgtttcagcatgactatgtatttttctatgtttttttaattaaaaatttttaaaatacttgtttcagcttctctgctagatttctacattaacttgaaaattttttaaccaagtcgctcctaggttcttaaggataattttcctcaatcacactacacatcacacaagatttgactgtaatatttaaatattaccctccaagtctgtacctcaaatgaattctttaaggagatggactaattgacttgcaaagacctacctccagacttcaaaaggaatgaacttgttacttgcagcattcatttgttttttcaatgtttgaaatagttcaaactgcagctaaccctagtcaaaactatttttgtaaaagacatttgatagaaaggaacacgtttttacatacttttgcaaaataagtaaataataaataaaataaaagccaaccttcaaagaaacttgaagctttgtaggtgagatgcaacaagccctgcttttgcataatgcaatcaaaaatatgtgtttttaagattagttgaatataagaaaatgcttgacaaatattttcatgtattttacacaaatgtgatttttgtaatatgtctcaaccagatttattttaaacgcttcttatgtagagtttttatgcctttctctcctagtgagtgtgctgactttttaacatggtattatcaactgggccaggaggtagtttctcatgacggcttttgtcagtatggcttttagtactgaagccaaatgaaactcaaaaccatctctcttccagctgcttcagggaggtagtttcaaaggccacatacctctctgagactggcagatcgctcactgttgtgaatcaccaaaggagctatggagagaattaaaactcaacattactgttaactgtgcgttaaataagcaaataaacagtggctcataaaaataaaagtcgcattccatatctttggatgggccttttagaaacctcattggccagctcataaaatggaagcaattgctcatgttggccaaacatggtgcaccgagtgatttccatctctggtaaagttacacttttatttcctgtatgttgtacaatcaaaacacactactacctcttaagtcccagtatacctcatttttcatactgaaaaaaaaagcttgtggccaatggaacagtaagaacatcataaaatttttatatatatagtttatttttgtgggagataaattttataggactgttctttgctgttgttggtcgcagctacataagactggacatttaacttttctaccatttctgcaagttaggtatgtttgcaggagaaaagtatcaagacgtttaactgcagttgactttctccctgttcctttgagtgtcttctaactttattctttgttctttatgtagaattgctgtctatgattgtactttgaatcgcttgcttgttgaaaatatttctctagtgtattaatttaaaacatgctcgcgtggntttcatgca

SEQ ID NO: 397342 - DNA, 2830 bp, Homo sapiens
cggcacgagcggcacgagcggcacgagcggcacgagtcacagtcccaggtttagtgaaaaactgctgtaaacacaggggacacagcttaacaatgcaacttttaattactgttttcttttttcttaacctactaatagtttgttgatctgataagcaagagtgggcgggtgagaaaaaccgaattgggtttagtcaatcactgcactgcatgcaaacaagaaacgtgtcacacttgtgacgtcgggcattcatataggaagaacgcggtgtgtaacactgtgtacacctcaaataccaccccaacccactccctgtagtgaatcctctgtttagaacaccaaagataaggactagatactactttctctttttcgtataatcttgtagacacttacttgatgatttttaactttttatttctaaatgagacgaaatgctgatgtatcctttcattcagctaacaaactagaaaaggttatgttcatttttcaaaaagggaagtaagcaaacaaatattgccaactcttctatttatggatatcacacatatcagcaggagtaataaatttactcacagcacttgttttcaggacaacacttcattttcaggaaatctacttcctacagagccaaaatgccatttagcaataaataacacttgtcagcctcagagcatttaaggaaactagacaagtaaaattatcctctttgtaatttaatgaaaaggtacaacagaataatgcatgatgaactcacctaattatgaggtgggaggagcgaaatctaaatttcttttgctatagttatacatcaatttaaaaagcaaaaaaaaaaaaggggggggcaatctctctctgtgtctttctctctctctcttcctctccctctctcttttcattgtgtatcagtttccatgaaagacctgaataccacttacctcaaattaagcatatgtgttacttcaagtaatacgttttgacataagatggttgaccaaggtgcttttcttcggcttgagttcaccatctcttcattcaaactgcacttttagccagagatgcaatatatccccactactcaatactacctctgaatgttacaacgaatttacagtctagtacttattacatgctgctatacacaagcaatgcaagaaaaaaacttactgggtaggtgattctaatcatctgcagttctttttgtacacttaattacagttaaagaagcaatctccttactgtgtttcagcatgactatgtatttttctatgtttttttaattaaaaatttttaaaatacttgtttcagcttctctgctagatttctacattaacttgaaaattttttaaccaagtcgctcctaggttcttaaggataattttcctcaatcacactacacatcacacaagatttgactgtaatatttaaatattaccctccaagtctgtacctcaaatgaattctttaaggagatggactaattgacttgcaaagacctacctccagacttcaaaaggaatgaacttgttacttgcagcattcatttgttttttcaatgtttgaaatagttcaaactgcagctaaccctagtcaaaactatttttgtaaaagacatttgatagaaaggaacacgtttttacatacttttgcaaaataagtaaataataaataaaataaaagccaaccttcaaagaaacttgaagctttgtaggtgagatgcaacaagccctgcttttgcataatgcaatcaaaaatatgtgtttttaagattagttgaatataagaaaatgcttgacaaatattttcatgtattttacacaaatgtgatttttgtaatatgtctcaaccagatttattttaaacgcttcttatgtagagtttttatgcctttctctcctagtgagtgtgctgactttttaacatggtattatcaactgggccaggaggtagtttctcatgacggcttttgtcagtatggcttttagtactgaagccaaatgaaactcaaaaccatctctcttccagctgcttcagggaggtagtttcaaaggccacatacctctctgagactggcagatcgctcactgttgtgaatcaccaaaggagctatggagagaattaaaactcaacattactgttaactgtgcgttaaataagcaaataaacagtggctcataaaaataaaagtcgcattccatatctttggatgggccttttagaaacctcattggccagctcataaaatggaagcaattgctcatgttggccaaacatggtgcaccgagtgatttccatctctggtaaagttacacttttatttcctgtatgttgtacaatcaaaacacactactacctcttaagtcccagtatacctcatttttcatactgaaaaaaaaagcttgtggccaatggaacagtaagaacatcataaaatttttatatatatagtttatttttgtgggagataaattttataggactgttctttgctgttgttggtcgcagctacataagactggacatttaacttttctaccatttctgcaagttaggtatgtttgcaggagaaaagtatcaagacgtttaactgcagttgactttctccctgttcctttgagtgtcttctaactttattctttgttctttatgtagaattgctgtctatgattgtactttgaatcgcttgcttgttgaaaatatttctctagtgtattatcactgtctgttctgcacaataaacataacagcctctgtgatccccatgtgttttgattcctgctctttgttacagttccattaaatgagtaataaagtttggtcaaaacagatc

SEQ ID NO: 397343 - DNA, 1774 bp, Homo sapiens
cattggatggagtgaaaaacattcttagctgagaaaaacagcaagtgcgatgtgtccgaagtgagaggaacgtggcatatggagtcatgaaggaaggcagggatagccaaagagaaataaggaaaccaatgggtatgagagcagagtggagcataggcagggcttggatctattactggtttctgtgacatgtgttatgaagagtatcatttcactgactggctctgcccaaatatgtttgaccatatttacatcccatctctctcactctggactgctgaagaagcttacactatcaacgtactcctttttttttttttttttttttttgagacggagttttgttcttgtcgcccaggctggaatgcaatggtgcgatctcagctcactgcaatcgatgtacttctctcatgtgtactcaactattccctctcaaatgaatcctttccattgactttcatgacttgaatacagctctcccatctcacctgtaaacaaacagctcctccctgactcctttagctccctgcaggtattgctttctttcctactctttatagcgagatgtgctgaaagcacttccctgtcttcactttcttgccttccatgcacccttctctaatttagcttccagcttcatcaaaacaacttttacttgcaatgactgactgttgtccatcccatagtcctcttcttagtaaacttaacagcattaaataaaaactgtcttcttctggagcaccaacttcccttggcttccaggatagcccagcctcctcctccttcaggtctggtgatatactctcagtcttgtctgccaggaatcagttactaatactggcaacgtcaaaatccctcttcttttttaccccctaccgtctccaaagttggtttcaacgcccttccttggcttgctatgagaatgacataggctagttataggatctgctcatttaataattgtgaggatataatgagttcatatatggaaagtacttaaagtaatgccaggcaaatgatagttgccccttgagtcgatagctgtagttacaatttgtggatgaaacctgaatgacatcagtccatacctatgtattcagtggcctataactatctccatattcactctaaaggcacatcaaactcagtgtatccaagaccacatgtatgtcattcttgtgcttcatcctgacaaaaataaacctggtctctcctagtgtgtcctgcttcaatgagtggtccaaccattctgtcatttgcacaagccagcaaagtaatttggcccactaaatttctatgaaaagcttccatttctcaacattccctctgccagcacaatagccagagataccatcatctctcttctgagttctataaaaagagattgccttgttttcattctgtcgactcatcaccccctataagttctccccccaacccccattgccagaatgcttatttcagaagaccaccctgagcccccctttgcttccagcctttccatggcttcccgtgactctcaggataatgaccaaaatccttcacatggtttgccaagcccagcctctgaggactgtcccacacatctcccatcccacctcctgctgttctctccactccagctgtgcatgtcactttcagctgctcacacacactttactctccctgaccagaggatttgtacatgcaattcatcatgctggaaagctctctccacctttataagcaatgtcttatgcatccattatcacagctcaaacacatttcattttcg

SEQ ID NO: 397344 - DNA, 270 bp, Homo sapiens
ttctacatatcatttctaggccttgaatttgaatggagcatctgctgagtataatggacctatttggccttttatctcattttttgtgaagctagtcaaatatgtatccttccactagggtcagcatcgactagatggactaggaagaatttcattagaaaatgagatctcatgggagacgataaagaccaggcttccaagacagagatgtgagttcaagtctctggtatttactagctgaagggctgtgggcaatcatgttaccttctt

SEQ ID NO: 397345 - DNA, 182 bp, Homo sapiens
gggggatcacttgaagccagaagccaggatttcgagacgagcacaggcaacaaaatgagaccccgtctctccaaaaaacaaaaaatctgatacagtgttgtgagcctgtaaacccagctacacaagtgagaggatcacttgagcagtgagctgcagtgagctatgatcacaccattgcattt

SEQ ID NO: 397346 - DNA, 190 bp, Homo sapiens
gtgacatgtgcctaagtcccagctactctggaggctgggacttaggcacatgtcaccaggccaggctactctggaggctgaggtgagaggattgcttgagcccaggagttcaaggctgcagtgagccatgattgtgccatcgttgtgccattgcattccagctttagtgacaggacaaggtgcggtctca

SEQ ID NO: 397347 - DNA, 327 bp, Homo sapiens
acagattcaaagtacatttttagtacttttgaaggttcttatatacagttaactttttagtctcagctacctttggtgacaacatattttactgtttactcttctgtgtttttcaggttaacgcttcatgtgagctttccttgtttagcttaattatgtgtgtttgtccatctatgtatttttgtaataatttgctagccaaatatactttgccactatacttaggtgcctccagatggtgtttaataaatctgggaatagctagtggttcagaggtgagaactggattgaaatcttaggtctgctactagaaacggtgatcttctg

SEQ ID NO: 397348 - DNA, 605 bp, Homo sapiens
actctgagcccatgttccgcgggcagcccccgacatctgtgcagatggaggactggggtcaccctgcagctataccagccagcctgctgagaagattctgcatctcctaagatgtcgcttgctattctgacatcatatcttggtctcttttgtttaattatgacaaagcattctctgcaaaatgccgctgttctcatcatcctggtccaagccaagttctgaatctgagagcgggacaccagcccgaagccaaaggtgagctcttcacatgggaaaaccagcctgggttcctggattcttctcagaagagaactaagactattagaaaatagaattctgcaatactttgttttcacaggtgtagaaaaattgtattcgatttttacccttggcctattttattataatgacctctctttttcctgcctttcaatccagctgagacaatgtatgcatgtttacatcatgtgtgtatatacatctacttgcacatagatgtatatagttatatatgtttaatgtatatatgaataaaatgtgcatacagcagacttagggacttctctggagggaggaataaaggttgtaaagtagaagaatatcta

SEQ ID NO: 397349 - DNA, 743 bp, Homo sapiens
caacccaaatggttggatttcaggcccgagcccccgcggcccattggacttttgactttttttcagcatctgttggaaggcaatattttgaaggttaccattaaaaatttccttccttttttttttgggaaaagatgtctcgctctgcactccagcctgggccacagagtgagactccatctcaaaaaaaaaaaaaaaaaaaaaaagaaacatcagcctgtatattccagtagttctcacagaagaatgaaaatccgtgctgtgcaaatagatcagtagtgagtgagtgttaagtgaaagatgagctaggttgaagaaaatatacattttattgatgagccactttgctatctctccttccttcctccttccttccttccttccttccttccttccttccttcccttcttttcttttttcttttcttttcttttctccctcctttcttccttcccttcccttcccctcccctcccccaggctggagtgcagaggcacgatcctggctgactgcaaactctgcctaccaggttcaagcgattctcctgcctcatcctccctagtggctgggattgcaggcatctgccaccacgcccagctaatttttgtatttttacaaaatacaaagagacggggtttcaccatgttggccaggctggtctctaactcctgacctcaggtgatccgtccaccttggcctcccaaagtgctgggattacaggcgtgtgttactgccccagcctc

SEQ ID NO: 397350 - DNA, 378 bp, Homo sapiens
tctctggagtagccttggaggggttagatttaggtagctacatggagtctccttacattctacaaagcaaagcagaatgagtaaggatgtaggtaaagtgatagatttaaaagcaagagaaggagggagtactctaattataacttctattaatggaatgaatatgaggcaaggtcattagctgagtgagtggaaggaaggcagcaataaaggattgaatgagcaaaaggtatgaactcatctcagaaagatagcacaagtttattaaagaagtgtaataggtttatctggtagttttgagtgcctgtttaagttttgtggccatagatttaaagtgagaccagtttttgagggtttctttcattagttctgttgctt

SEQ ID NO: 397351 - DNA, 432 bp, Homo sapiens
catctggatgtatatgtgcaggtcacagggcatatgatggcttagcttgggctcagaggcctgacactttcacttctagatgaaggactctcaaacatttcttgtaggactggtctagtggtgatgaattccctcagtttaaagtatttcttttaaacaaatgaacacttttctctagatagtgaatctaaatctcctccagcttgttccattgcagattgacttatataatttggtctgaagataattcatcttagagaagatgatgcactcaaaacagagaagatgttaagaggcttttgaaactataaagcagtcccactgctgttgtccgagtttatcaactcttttgcaaattatgtatgagtcaacactactgcttacctggcttctactttatgagtaacagctaaataaatgagtctaacttgg

SEQ ID NO: 397352 - DNA, 866 bp, Homo sapiens
ccccccgctcccccacacctatcggctagtacgaggccgggtggactcggccgaggaaactacattagaaaaatagtccatgtttaaaatttgttcaaaattgtgtagccacaatctaagtggttcttgagtagaatatctgatatctatgaggatctttaagagggaaaaaaaatagtaatcagcatatattgaatttttgttttgttttgtttgttttcttgagacagagtcttgctctgtcacccaggctggagtgcagtggtgcgatcctggcttactgcaacctctgcctcctgggctcaagcaattctcctgcctcagcctcccgagtagctgggattacaggtgtgtgccaccacacctggctaatttttgtatttctagtagatatggggtttcaccatgttggtcaggctggcctcgaactcctgacctcatgatctgcccacctcagcctcccaaagtgctaggattacaggcgtgagccaccacgcctggctgaaatgcttattattaccaagaactcactttatgtgagttttattaaatcttcgcaataactgtatcaaggaaccatgagctttgtcttatagatggcaactgaggcttaaatgaggtcacctgattcgaggcaattgtgtgatctttcagaattagtccacatctggagtgggttcctagccaacgatacttgaggactggcctatcacactgaaatgagcacaagcagcaggaaacagaaacaccagactagaaggaattctttttgacatgcttttgtaatgaagcattttggtggacattatgttccgttatgggctaaactgtttccccttaaaattcatatgctgaagtcctaactc

SEQ ID NO: 397353 - DNA, 610 bp, Homo sapiens
tctcgatgacggggttcttaatagatgttaggatttataacataggcagtcaggtcatccgcaaacagttctattcctatttataaataatagaactttatttctcacagttctggggattgggaagtccaagatcaaggcactcccagatttagcatctagtgaaggctagctttctgtctccaagattgctgcatctttatgtgacaaaaagcagtagggcaaagggatgaatagctttctcagacctcttttaggttattaatcccattcatgagggctttgctttcataagttaatcacctcataaaggccttacctcttaatgctatcacattggcgattaagtttcaatatattaatcttgtagggacacattaagatcattgcacctgagaattacttttactggtactcttgttttttcttgtgaattttagttattgtctagcaccctttcaacctggatgactgccttttgtattttcctagtgacaaattcagtttttgtttatatagtaatgtcttaatttcccctttgtaattaaggatagttttgctgaatctagaattcttggttgactgttttttcctttcaacacttttacca

SEQ ID NO: 397354 - DNA, 327 bp, Homo sapiens
aattaagagctataatttaggctctctgactcctggttaaagctctttccatcacctacagaaattttattaaatgttaaaggttattaaacccaaaatttttatcttttaaaagatcttctaatcaacaaattcaactgttacattgcttacccagtcttataatcaaatggacaataaaaatgcccaaaataaagtgagaagtgaacatacaaaattaaactagataatcccctccaaataactgacaggaaaattaaaaactaaaccccccgccccttgaatgagatatgtttacattacagcagttagctttttacttcatca

SEQ ID NO: 397355 - DNA, 317 bp, Homo sapiens
catacaagtgaaaaatgagggacgatgtactgctgactaaattagaaattaagggagaaaagcgcccagtgttaacaaagaagcaataacctgatgctcacactgcggacggtgttatgaatcggcctgacactttggaaagcaacttggcagaatttgtcaagagctgtaaaagtgttcatactgtggcacggtaacgttactcctgggaatccaaacacagaaaccacttcagaaggaccagtcactgtgacatcgcttataaggaaaaaaaagaaaaacaacaacaactggaaaaaacctaaagggcaacatca

SEQ ID NO: 397356 - DNA, 255 bp, Homo sapiens
gtacgaattctttgttgtggactgtcccgtgcattgcaggatgtagagcaacagccctaccctgcactcactggctgcaagtagcaactcccacaagcagtgtcaagcagaaatgtccccagatactaccaatgtcctattgtcgggggaggatatgcaagtgtgggcaaaactgtctccgcttgagaactactcacctagaataagagtcctaaattaaactaaaacaacatagtgttgtgggtagcaactatc

SEQ ID NO: 397357 - DNA, 561 bp, Homo sapiens
agatggtgccattgcactccagcccgggcaacagagtgagactccatctcaaaaagaataaataaataatcaatcaggctaagaaagcctaaaaccagactttttcaggatttaggcagtctgctagtcagaagaaaactctggaagaagataacgttccgagtctccacatgtactatttttagtacccattactcagcatctactcaatagttaccagccttgctagaaaggacttaatttgctgaaaaccaagagggaaacaaaatagacaatagaaagagacccaggcaggggtgattcagatgttggagttatcataactatgatatattcacaaaataaggaaaagatggagaatgttgagatatctggaatctagctacttgagaggcagaggtaggaggattctttaagccaaggagtttgagattcagtgagctatgatcacaccactgcactccagcctgggtgacaggaagaccctgcctcaaaaaaaaaaaaaaaatctggaatctaacaaaaagttaaatggcaattctagaactagaaaacacaagt

SEQ ID NO: 397358 - DNA, 653 bp, Homo sapiens
cagagtctgacgccaggaggtgtgggggccattagggctgcattctggttctcctctccttcaggcacaggacggaattgtgctttccagctccatttgcagtaggtcttggccatgagacttgtttcggccaatgaagcttaaagagccagtgagagactcaccacacacccttccctctactgtggtggtcatggtagcatgcaagataaagcctccatcattcagggtcactgtgtgaccacgatcagaagaatgccccaacagaccctcatggaacattacagcccgaacaagaaaatcaatgttctatgcggctactgagctgtgaggggttctggtcactgcagcatcacctatcccctgctgaccgagagactaagtacccagtgaagtctagataatgtgaattttgtttttgttatttcaaaatatcaccttttgaaaagaacgtgggaatgcctgagaagtcagattccgactgaacggatcccaaggttgatcccaaggcaattcaccagtcgaggatcctgacacattagttatttagacttaaaaggagaaaaaataaataatctcagctcctggatctaaatgatgcctccatgaattaaggatttaaaaagtcacattgagccaagtagataaataca

SEQ ID NO: 397359 - DNA, 362 bp, Homo sapiens
ccgcctcagcttcccaaagtgctgggattacaggcgtgagccatcgtacctgccctcgcatttgggtttgactgatgtttcctcttagggagacaggctctgcaggtttggcctgatactgcataagtgatcctctgtccttccgagtggatcttgccaggagacatatgatgtcagtgtgccctttgctgaggatgttcactttgattacttgttttttctgtactgtaaggatttttttccctttgtcatcaataaaccatttgtgagatttgagtctgtaaatatcctgttcccaaaaacccttccccaaatgatttgagcatctattgatgattcttgcctgtagcgattattactag

SEQ ID NO: 397360 - DNA, 380 bp, Homo sapiens
cttcatattaatctttttctccaaagcagaatcattgcttgggttcatttttatgagtagtagacctaatttgattttactgtcagcccaaggaacatctcttccatttaatttggagttgttggaagtgtcgtgggattttttttaaccaaggtggagcacttctttttcttttcttttttttttttgagacagagtctcactctgttgcccaagctggagtgcagtggcacgttcttggctcactgaaacctctgcctcccaggttcaagcaattcttctgcttcagcctcccaagtagctgggactataggcatgcaccaccatgcccggctaatttttttgtatttttagtagagacggggtttcaccacgttgat

SEQ ID NO: 397361 - DNA, 469 bp, Homo sapiens
ataagatgtacatctgactaatagagatgttattagtaatactcaataggataaagagagttctggatgggaagatagaagctacactgctaagtgctaattttctttactatggatgcctccatgagcaaatcacttcaattgaacggccttcaagtttttcacctccaaaactgaatactgtactcacaatagttaaatatttcctgagcagttttatttatctcattaatttactttaaaaggcctttcttcgtatcacaaactccaactggattgtggtttctgagcaaattataacaaattttgtgtttgtggaatccaaattaatgagatttaactgcatgctaattaaaacgccttagaattctgcaaagactttcccttcaagagttcaaatttgttgatgaaattttctcgttagacttcacaatgagtgtggaaaacaaatgatcagtctgtaagccct

SEQ ID NO: 397362 - DNA, 222 bp, Homo sapiens
tgacaattagaaaacaaaacataaaaaaaaatctctatgcttcaaataatttaaatctttactacaactatagataaacatcttaaccgggcgtggtggctcatgcctataatcccaccactttgggaggccaaggcaggaggatcacttgaggtctggagtttgagaccagcctggccaacatggtaaaaccccatctctactaaaaatacaaaaattaac

SEQ ID NO: 397363 - DNA, 376 bp, Homo sapiens
cctggaccctgctcagaggactctttacagggatgtgatgctggagaattataggaacctggtctccctggattttcggtctgtcacccaggctaaagtgcagtggtgtcacctcggctcactgcaacctccacttcccaggttcaagcaattctcctgcctcagccttccaagtagctgggactacagggcaaggcaatacagaagcgttccacacagggacattgcaaagacaagcaagtcatcacattggagatttttgcttccagaaaattgagaaagacattcatggcttccagtttcagtggaaagaagatgaaacaaatgaccatgcagcacccatgacagaaatcaaagagttgactggtagtacagg

SEQ ID NO: 397364 - DNA, 416 bp, Homo sapiens
ggctcggacgctctcgtgagactgctacaccatagctcacggcaacaccagatccttaacccactgaacaaggccaaggattgaactccgtgtcttatggatactagttgggttcattaaccactgagccaggaagagaactccctaaatcaactaactgttaataagcatatatgaaataggaaacagccaagatgcaaatttgtgtgcataaacaggttggctaaatgctataaggaacaaataaagaaaatataagttactggccttccaatttctcctacacttaactgtaactccgtaactattgttaggagaaattctttctgttttttttttttttgtttttttttttggtgggtttccccggaaaagggggatccctttaggttcaccctgagggtttgcagcttggg

SEQ ID NO: 397365 - DNA, 140 bp, Homo sapiens
aaaatggtaaaagaaagtatttccccagggacactgtagaggcagaaggaagtaataggaaatcagccttgagacagtggacactgttaatacctgtctcttttttaagatatgcacataagaaaggcaaatttttggag

SEQ ID NO: 397366 - DNA, 751 bp, Homo sapiens
agctgggattacaggtgcaaaccaccatgcccagctaatttttttgtgtttttagtagagagggggatttcaccttgttggccaggctggtcttgaactcctgacctcaaatgatccacccaccttggaagcctttatcttttagctaacgaatggttaacttggttgaagtttggggaagggagagttagaactttctctgtctttgatggctggctgagaatacagggtaaagaactgtccagtgttgtgagtggtgccttagagttgctcatagcaagaaaatcacttgggagggtggaagtggctctcagatggtcattggttacctataacttatttaaagaagaccttgagaagttgggacatatcttgtcactgaggaaattgtgccaaagaactgctgctttattaacgcatttgatcagatttgaaaagagagctctgtatacactctttttctaactccaaagaaattttgtttctagaaagattcaattaccgtaatgatgttctttggaaatgtgcctttttgcgtgtatatcttaatatggataaagttccaaggtagttcaaaggttttaataaaattttacttaccagagtgatgtgaaattgggaataccctgtgtgaatggttaactctactttaaattggaaggtcagtgggagtggggatcttcccagtaaatcttaaatctctgtgtacgtgtatctctgacagcgaaatcttactggagattgcaggggt

SEQ ID NO: 397367 - DNA, 545 bp, Homo sapiens
ctcatttctatatctccctcagctggtgattttggggcagggacctgtttgattctccctgggtcctcagtccccaggcttgccacgcactaggagctcagatagtgtttgttgatcacatactacttttgtgtcccctactgttgcctagcaaagtagggcccctggtagacactcagtttataatgatcaatgcattaaactgaccacaaatctcagttcttcaggtcctaggaaaaccgtgagccacctgcaaatataggctgcttatgcccttgacaggttcagggaatccgtccttttagcactggggcggtttcactttggacttgatcagggcttagaggcctttagctttccgatcctgaggagcctccctttatccaggaagcaggggactggaccactgggaccttcatcacgggtgggcacggattccccatcccaatcagaagaatagctgtatctgtagcagtaggttattctaggccagttctttccattaaaaaaaaactaaagcccctaggttgaattaaaaaaattaa

SEQ ID NO: 397368 - DNA, 681 bp, Homo sapiens
ttctatctaatatctctcctctggttcactctttgttttttaagacagaatcttgatctgttgccttggctggaatgcagtgacactatcacagtttattgcagtcttgagtcccccaggttcaagttatcctctcacctcagcctcccaagcagcagggactacaggcctgtgccactatgcctggctttttttttttaattttgtagagatgggttctcgctatgtgcccaggctggtctcaaactcctgggctcagctgatcctcgcactacagcctccgaagtctgggattacaggtgtgagacaccacacttggccctgattcactcttgaactcactatagattttcacctccacagcttctccaaaagtgctcttattgtgaccacaaacagcattcagatttctcactccagtgatcagtgcctatgtcatctgacctattacatttgatagaactgaacgctctctcctctttgaaacattgattttcacttgacttctaagataccatactctcctggttttctttccagtctttgcttcttctcaaatcttcatcgatttctccccaccttcctgatctgtaaacatgggagtgctttttttgcctcgaggttatcatttgtaaaatgggatagtatctgctttgtgggaatttgtgaagatcaaataag

SEQ ID NO: 397369 - DNA, 751 bp, Homo sapiens
cttgcagagtcggccaggtgtggtggctcacacctgtaatcccagcactttgggcagccgaggtgggtggatcacgaggtcaagatttcgagaccagcctggccaacatggtgaaaccccgtctgtactaaaaatacaaaaattaactggtatagctgtgcgtgcctgtaatcccagctactcaggaggctgaggcaggggatttgcttgaacctgggaggtggaggttgcagtgagccaagattatcccattgcactccagcctgggcagcagagcgagactctgtctcaaaaaacaaaaaacccaaaaacttgcagagtgaatttaggaaaccatgtagtctacagtttgatgcaatgtcttccttttcctctttctcaaatattttgagccaggtactatcctagattgtcttgtgatatttacaatctaggagaaggcaggagagagaactaagaacagagagcatgttctgagatgtctgctgtgtttgcaggtaccttccctcaatttccctactcactggccatgctggaaagcaggtcttggagccatatttgtaccatggtacttcccctccctatactcaattggttggccagaagcccaattgtcattctctctctctctctccctctccctctcttcctccctccctccctccctctccaagatatccagtaactgattgatcagctggcggtgggctcggctggctgccagggtgggccaccagcaaaaagggaaaat

SEQ ID NO: 397370 - DNA, 359 bp, Homo sapiens
gcggcagcctcagcctctttgagcccctggaccactcgcccttcctatgtcctctctcttgccttgcagtgtttcttctatggttttcctgtcctgcccccacagggtgaatttcagctttctcttagaggcccagctcaaacatcacctcttccacaaggcaccccccgattcctggccctctccaggggcagtttcctgctgccaagggtggacgaaagcgatgatagccccagggcaggacaggctggctcacaagctcactatcaatgcgtctgaccggtgtctgcattctttgtgtgcctagaggatatcagagtgcaggcatcaaaacccagatctggccacccgatggctga

SEQ ID NO: 397371 - DNA, 618 bp, Homo sapiens
aggctccacaaaagggcaaattaggactcaaacacccctccggctttgtggccggttgcatagagtacaatcgggtgcgtggtgctgaagtgcgcccccgtccgcccgcctacagacaaaatggactttctgtggctaactgaggtgtgcaaagttaaaacagaaccaggtgaccacagctggatgagggagtggccacatactgtgtgttatcggaaagatattgtaaaagcatcacaggatctccttttgtacgatgcagccaaaccagttgctgctgtcagtgccaagataaactgcagcaagaaatccagctacccctacccccactggccattttaaagaaacatctcacagagacttcctatttttgtcttagaaaccaaccaatcagagctcacctgaaccaaccaattaagatacctgccctggccaatcacggctcagttttatcaacccatcaaggctcagttatactgaccaatcagaactcagttgcatcaaccagtccttccattgcatagacagacctgattgagagtctcagaagtattgtggaagaacagggaggcgagagtttcaagaaggaaaggatggaaattgagactccgtctcaaa

SEQ ID NO: 397372 - DNA, 357 bp, Homo sapiens
gttgaggactagaggacattctaggaagaagaaatagcattgccaaacgtatagaagtgtgaaatggtattatgctttgaagataaaagtgaaatttttttgtaagtagactgcaagatatgtttggattttggttgagggtgttaaagagaagggatggactttgtgaaacttattagaatttttcatcatagaaaacggggaaccagtaaaaatatttgagtagaagagacatataatggtggttctgttttgttttgttttaagttttcccagggagcatttttaagaactgatcagactgagggcagaaactgcaatgatgagatggctgccaaattccactgaagggtgagg

SEQ ID NO: 397373 - DNA, 241 bp, Homo sapiens
tgagccaccacacccagccaatagttgatttttaattttaaaaacaatttaaaaacttattttagagacagagtctcactctgccacccagcctgtagtgcagtagtgtgttgatagctcaccacagcctcaatttcctgggctcaagcagtcctcctgcctcagccttctaagtagctgggactgtaggcgcacaagtagttgattagtagttgattttattccctatttgtgtttcatt

SEQ ID NO: 397374 - DNA, 756 bp, Homo sapiens
gatataagtgtatagccatcacttcctttagcaatcaaataatgagctgggcgcagtggctcacacttgtaattccaacactttgggaggccaaggtgggtggatcagttgaggtcgggagttcaagaccagcccggtcaacatggtgaaaccccgactctactaaaaacacaaatggtgtttttagtgttttgtttttagtttagtggttttagattttagtggtggcaaatgcctataatcacagctacttgggaggctgaagcaggagaatcgcttgaacccaggaggtggaggttgcagtgagccgagaccgtgtcactgccctccagtctaggtgacagagtgagactctgtcaaaaaaagaaagaaagaaaaagaaagaaagaaagggaaagaaaggaagaaagaatcaaataacaaaaagcacagtcagcattataagatatcagacatacccagcccagaggcagggtggagttggagatcatctagtccatcaaccaaatcaatttaggttgatttttttttaacaatttttttttttagccaagtcaaaaaaagtatttttagccttacttatatataactgtatcttttttggctcacttagaccattttatcaaaggagatcaaccacaaattcctgccggtttttagttgtaagaagctttttttattggcaggaaaactgggagaatgtgtaagttgttaagcagccaggccactctgtgcccagtattctggtaactattg

SEQ ID NO: 397375 - DNA, 451 bp, Homo sapiens
ctagttggttgtcgatttgttgactaaaaagagaagagttgtgatatatttgagtaggttaacaaagttgttgtctctccctatgtttacatcctgaaaagttgtgtttgtgtgtgtgagagaaaaagagagagtgagatcaagagatgaactgcaagtgttgtttgaaacagtttaggtgcagtcctgcttggcaagtagagatgcttcctgcaggtgaggttagaattttacattgcttctgattgaaggctgcatgctttgggttctaggtgtttacttttaggcctcagagctttggaaaaaaggtgctttttttcttttgaacaggttttcttatgatcagttattttgatttagaaaaattctcagcctagaatttaaacaagaacaggaggatcctaatttcttatttgtcgacataccccaaaagccctcctcgtccacccaa

SEQ ID NO: 397376 - DNA, 105 bp, Homo sapiens
tcacactactgggtatacagccaaaggatatgaagtcagtacattaaagaggtatctgcattcccgtgttcactgcaactattcacaatatccaagatagagaca

SEQ ID NO: 397377 - DNA, 258 bp, Homo sapiens
ataatttgctataatgactcataaaatcaggaaggtgctttactattactggcttattatacaggatatgactcaagaacagccaaatgggagagaggtagaacacagggcgaggtatagggaaggggtgtggagcttctgtgccctattggagtgtaccacccttccagcgcctctgtgtggtcaccacctccagctctccaaaccccatcacttcagggtttttatggatgccttgtcacttaagcatgattgatt

SEQ ID NO: 397378 - DNA, 369 bp, Homo sapiens
gaggctgaccagaggacccagcggtctacatcattcatccattaaacaagtatctaatgagcaactactatatagtaggcacttgccatatcatcttgcaattatttatttacgaatctgttttgaggaaaaagcctttctatatctttgtattttgaggacctaatacaattctggaatataataaatgcaaagtaaatgtttattgaataaataattgaagtaaatgaaactattctagctaatagactagattttctcttatttgaaaattatcaataatataccataagtttacaaaaatatcagctctgcttcactaaaaacttgcactgaacattttagagatgtgaaagatggaaaacctga

SEQ ID NO: 397379 - DNA, 305 bp, Homo sapiens
aacaggtaatctgacggggccccaaaactttgggaggccaaggcgggaggatagctcgaggccaggagttcaagaccaggctgggcaacataacaagaccccattttacaaaaaatttttaaaaattagctggaggggtggtggcataaacctgtggtcctgacaacttgggaggctgaggtggaagaattgcttgagcccaggagtttgagaccagcccgggcaatatagcaagacctcgtctctatatactttttaaaaattttttaaaaaagtttagatgagaaaactcagctaacgtactt

SEQ ID NO: 397380 - DNA, 574 bp, Homo sapiens
ttctatataagggctctcacaacaggttttaattctaagtaatccaaatcaactttttgtctctaatgaacaaggaaaataagttggagaatatttagtcccctgggtatgaatttatcttaaaaaatgtaaggatctatgttaaaataatattcatttattttaatttctgttaatctggcattaattaactatatctttcttaaatatatttagattttgagtcgcatactatcctttgaagtggcgatttgaaaaatattcccctttgtctcccagtaatctgaattcatttctcctcatgtcttcaataacacggaggacctaccattgaatagagtaaagaagttgtatccccttctagaaggcttgtcttctagagaaaaataaattacccagttagctataagcaatgggataatcgcaattgaaaggagtgaacaaagggaggaggcaaggtaagttctgcctgaaggggtaaggacagttttaatatttagcgctccaggcaacagagtcaatatcacaataaagtgtaaatatgggaatgtatagcatcttcaagaaagagaca

SEQ ID NO: 397381 - DNA, 618 bp, Homo sapiens
tcctacgagcgccggctggaggtgagagggacaatctgccacatggacctgctgtcgggccagctgctcctggactacgagcgccaacaccatctagcttcttaaacaattacatccattcatcaaagcagcacaaattccattaaatgctactttagtatccttggcaacgaagccaccagcactgtagctatccttcccacacctcagccctactggaatcgtgccatggcaagatctggctcagcaccgtccagtaacagagtccccatggacatgaagtgggttgaggctgggaaaggtggcagaggccacgcaaaagcctgggcaaagaacctaaatatgggattgctcctcccttatactggaaagtgcttctaacttcccaatatttcttattacatcgtcagcagggaaagaatacacctggagtgaggcaaacacagatggagtggctgatttaaacagtggcatggtcaaatgggctcccacaacaaaagagaaaccgtggatgagagatgtgtatatactaatatacggatatgtgcgggtgtactcacacatgtaagcatatagtgtagaaagattaacaggcctcgccctgcatcctcagcctta

SEQ ID NO: 397382 - DNA, 676 bp, Homo sapiens
aacctcccaggttcaagcaattctcctgcctcagcctcccgagtagctgggattacaggcatgcgccaccacacccggctaatttttgtatttttagtagagatggggtttctccatgttggccaggctggtctcgaactcctgacctcagatgatccacccgcctcggcctcccaaaatgctgggattacaggcatgagccactgcgccctgtattttcttcttaaagtttttcttttttatatctaagaatttaatccacctagaatgctttagaggcttgttctgggttcctccgaggaaaagcagcagtcatttccactggaattctggaaagtgcgctaacgccaggctcttcacgtgggccttgagcaatcagtgccattccccctcctggaggtttgcatacccttttctctgagcccttggccttttcaacaaagcagacactaggatagtaagaatttctatctctagaaatccagaaaggtccaaaatgccctgcactttgctggctacagttgaatgacctgcgtggtgcaggcctttgactagctgcatgaaattgctctgaccttagtgtaattccttaccacacctaaattattccacataaaacactgacgtcttccccatgtttctaccattgttaaaattacaattgccataaccctta

SEQ ID NO: 397383 - DNA, 578 bp, Homo sapiens
gcgctctagagatcccgtgctatcggccgctggtctcgaactcctgacctcagatgatccacccgcctcggcctcccaaaatgctgggattacaggcatgagccactgcgccctgtattttcttcttaaagtttttcttttttatatctaagaatttaatccacctagaatgctttagaggcttgttctgggttcctccgaggaaaagcagcagtcatttccactggaattctggaaagtgcgctaacgccaggctcttcacgtgggccttgagcaatcagtgccattccccctcctggaggtttgcatacccttttctctgagcccttggccttttcaacaaagcagacactaggatagtaagaatttctatctctagaaatccagaaaggtccaaaatgccctgcactttgctggctacagttgaatgacctgcgtggtgcaggcctttgactagctgcatgaaattgctctgaccttagtgtaattccttaccacacctaaattattccacataaaacactgacgtcttccccatgtttctaccattgttaaaattacaattgccataaccctta

SEQ ID NO: 397384 - DNA, 394 bp, Homo sapiens
ctgatttccccactcattttttttccttctctgttagtttcaatgtttccatagaatatagcttttctgagctagaaaggacctgagagacatttgatttgacaaatgaggaaatgaatgcccagagagaggatggatttacctcaggcctcctcacctcatgattggcagaaaaaggattagaattcaggtctcttgactacaggacaatgtgcttctctcacacacatttcccaggttcagcacccggcaaacagactagtctcctcctacccaatttacttccttcctgtttccatttaaatttcttcagtcttgtctatgatgatagctacttccacttcctcaacttctgttctctctttgacctctccaatcttacttcctcactgca

SEQ ID NO: 397385 - DNA, 785 bp, Homo sapiens
acagaattatgattcaactacagaggtccatcttctcaaaaggatcttgtagacaagaccattgtctgtacctgcccacagccatcagtttccctagcctgaaacattccttccataacatcttcaaacacttttagagcaagattgtctggaggcaatgtgaagattattctggattggaaaatgagaataatgaataaggaagactgtggaactatttctgtaattcgaagaagctacaatagaaccttgaaacaagatggtggcagtaaagctgaagaaaataaacagagatgagaaatggagagatatttaagaggtaaaatgtatgaaatttgatgattaatagaaaatgcaggtgtgagaggatggtttcaaaacctcccatatttgtgggttttgaattttggcactgtggtaccatttattgataaatagtgcagatggaacaatttgggaagtaatcactgataaacttgagcaagttaatgataggtgaacatgttatattttaacaaagtggatggagcacaatcaccctgctttgatagacccaggcactgaccaacatgtttcacatatttctccttttatggataaagtaactgagtacagcatagtctataaagtaaagatagctttctgttttataaagaaatattttcctactctacttccttcaccattcactcattcatttctcgataattcatcacatacatattggacaacttatgtgttactgatttatcctgggtgcttgagatatgggaatgatcaaggca

SEQ ID NO: 397386 - DNA, 698 bp, Homo sapiens
ccactcccctcattcccgataattattgcgtttctatcatgatccgctttttcaagattgtctggaggcaatgtgaagattattctggattggaaaatgagaataatgaataaggaagactgtggaactatttctgtaattcgaagaagctacaatagaaccttgaaacaagatggtggcagtaaagctgaagaaaataaacagagatgagaaatggagagatatttaagaggtaaaatgtatgaaatttgatgattaatagaaaatgcaggtgtgagaggatggtttcaaaacctcccatatttgtgggttttgaattttggcactgtggtaccatttattgataaatagtgcagatggaacaatttgggaagtaatcactgataaacttgagcaagttaatgataggtgaacatgttatattttaacaaagtggatggagcacaatcaccctgctttgatagacccaggcactgaccaacatgtttcacatatttctccttttatggataaagtaactgagtacagcatagtctataaagtaaagatagctttctgttttataaagaaatattttcctactctacttccttcaccattcactcattcatttctcgataattcatcacatacatattggacaacttatgtgttactgatttatcctgggtgcttgagatatgggaatgatcaaggca

SEQ ID NO: 397387 - DNA, 951 bp, Homo sapiens
aacagattcctaaaggatgaagatgcatgaataaaaaaggaagtagaaattactgaaaaaagttctgtgggtatagaaagtaggatgtacaaatacaagacaactgaagcagatgtcttgaagaaagccagagtcttaggagattgggattaatagagataatggaatatgataggctggtaagaaagtccctgctatgctgtgttttctattaatatgctaagatcacggtctttatcttaagaacaatgggaggacattatagggttttaaacaaagattgacatagccatttttcattttagcaagattgtctggaggcaatgtgaagattattctggattggaaaatgagaataatgaataaggaagactgtggaactatttctgtaattcgaagaagctacaatagaaccttgaaacaagatggtggcagtaaagctgaagaaaataaacagagatgagaaatggagagatatttaagaggtaaaatgtatgaaatttgatgattaatagaaaatgcaggtgtgagaggatggtttcaaaacctcccatatttgtgggttttgaattttggcactgtggtaccatttattgataaatagtgcagatggaacaatttgggaagtaatcactgataaacttgagcaagttaatgataggtgaacatgttatattttaacaaagtggatggagcacaatcaccctgctttgatagacccaggcactgaccaacatgtttcacatatttctccttttatggataaagtaactgagtacagcatagtctataaagtaaagatagctttctgttttataaagaaatattttcctactctacttccttcaccattcactcattcatttctcgataattcatcacatacatattggacaacttatgtgttactgatttatcctgggtgcttgagatatgggaatgatcaaggca

SEQ ID NO: 397388 - DNA, 1020 bp, Homo sapiens
atttgggcagtggtaaaggtgatatgcaattctgtagataatgctgtcagtaacgtgtaatatgtagcaccaggttataaaacacttaataaaaacacattaatatattcagaaaggttctaaaaatagaatgtataaatatgccaaaagtcttgcagttgtacagttggaacagcctttcattttctaagtattcttaatgtgctatgtattacacatttcataattaagattcaggggcatctgttgaattgttacattctattcagtgtaacaaaacaatttaaccaccaattaactatattacttattagtttgttaacatctctgtgacctgtttcctcattgcattaaatgaactctgtagcctctctcctctcctatatttgggggggatataaaagttgttttaagacctaaatattgttaaaagtttctttcaaaatgagattttcaaattgaagataccctcataatattatctttaatattattttctgctgattttcctgatgattacaactgatatatgttatatgtttttgttataattgtggaggatgttattatttgttctatatgtatgtagtattgctttgaacaaaattttaaagaaacgcattgttttcatgatcacatgacttttagtggcaagtagtaatgatgcctaccatatgccatgcacaaaaattaactcaaaatggattagagccctaaatgtaagagctaaaactataaaactgttaggataaaatagaggactaaatgtttgttaccttagataagcagcagtttcttagatatggcaccaaaagcacaagcaaccaaaaaaaaaaaatagattggacgtgatcagacttctgtgcttggctggggtggtggctcatgcctgaaaattagccgggcatgatggcatgtgcatgtagtcatagctactcaggaggctgagatgggaggatcacctgtacctgggaggtcaagtctgcggtgagccgtgacttgtgccactgtactccagcc

SEQ ID NO: 397389 - DNA, 164 bp, Homo sapiens
ctcagtctctcaaagcactgggaccacaggcgttagccagtacgctcagccttagcacattttaaaatgaccaaaatccattaaaaaacattctcttaacagccaagatttttacatctttcatttcttgaatgttttcattttatgtgctccaattttatcct

SEQ ID NO: 397390 - DNA, 451 bp, Homo sapiens
caaacttctgcaaactgtgaaactattgtgaacttgtgtgaatgtatggaagttggcactgattagacgtttgaacttctttccttgtcctgtgttatgcatggtaatctgccatttgctgttcctagctgtatggtcacccttagaggtatgagttgtgcttatatgtatatgttcatgcctagatctgttgctcacagaatcatctgacatccccatttcgttgaatctaggcagcagggttgatggcagccagaaaagtgtgccctgggggcaagaatgtctttagggaaaaatatgttattgtctttcagatagtagttctccaaacagttgctccaacagttcctatgaaaagattgcttgagcccaggagttcaaggcagcagtgagccatggtcatgccattgcactccagcctggacaacaaagtgagaccctgtctcaagag

SEQ ID NO: 397391 - DNA, 329 bp, Homo sapiens
gcattgtaaggtctattctgaattcatttgggaagaatggtgaaataaatccctaaaggcctctttcctatgcattaaaatagaaaatcctatgggattacattcatgtttgctttctaaattatgccaaaagctcaattttattaagtataatctgcctagccatgcataaaataaactactttggtttagatgtgagtatatgtattatttatgttgatttttaatgaaaatatgtttacatgtaccaatatgttctgcctaatattggttaatgtcataaaagataatatagtaacattactttcctaaatgtttttctgtggtca

SEQ ID NO: 397392 - DNA, 302 bp, Homo sapiens
agaactgatacggaagctactaaggccaaaggacaaaagctaggccattttggaccagggctcagggctctgtcgatgtgtttgggaagaaagcacctgtgaaacatctctcaatgtgacaaagccatgaaccaggttgccccatccatgatcaatgagacaaagcagacaggaggggagcacatgtgttcagaagtgaggtggaccagggttccaatttcagcccagccacatattagctatgtgaccttgagcaaatcccttctccttaagtgaagcttaagtgtttccatctgtaaaat

SEQ ID NO: 397393 - DNA, 265 bp, Homo sapiens
aactatcatataatccagcaatcctactactaggtatatatcccaaaaaattgaattagtatgttaaagagatatccacagacttttctgtaccagcttcctccacagtttcaatagagtgaataaatgtgtctacctctgaagtttccctgcaagctctgacttgctcaccagcactggggctggtgagtgcagaccagttttctaaggtctaattcctatgaagctctgatcccataattctcatggaggatcttcttcccta

SEQ ID NO: 397394 - DNA, 475 bp, Homo sapiens
gggaaagaacatttgtggaggcattcttttcagaccagaatgaagcaatttcgttagatcatttctgtattgtttccctcatattaaaaaaatttgaattcatcaatttgatgtgatcttttcacagtgaataaatataggcagcacatgaaattattttgagttattatataccgaatactgcattcaggacacaatcagatgtctagcttcacaattcaagttgtagtcatatttcaagcattcaacttgattctgcatttgctattcatgagatcctgggccactgaaagttattcagatatagaagcaatcctgatgactgggtcgctgcatctggacaaactgtaatcacgctttgtaatcgctcagtgggaaatatgaaattactggcattatataaaaagggcatcacaacggaaatgggtttgcatatacacagcgtcatttgtgaattctttgaaatctggcatac

SEQ ID NO: 397395 - DNA, 321 bp, Homo sapiens
ctattctctatactgcaattagaatgttctttccaaaatacatattggatcaagtcacccctacttaaaacacttctgatgctttcctcactctttggataaagatccaaatccttaacttggtctatcagcccagaaatgcatgtatggtcacttcttatttttctagcttcacctggcacattcccagtccctttccccaactctcacttttcacgtttcaaacacatggccttcaatagtttatgctgtcagcataaactattcagcttcctacactattaaagtttaccacaaccaccaccccatcatactctttca

SEQ ID NO: 397396 - DNA, 291 bp, Homo sapiens
agttctacaatcttggttgactgagattacagtagtgtgattccttgaagagttgagaaggccagttgttttaaccctaacactgaagcagttattagtaggactgtatatcagtcattacagcaagagatagcagtaacagaagccacagcaggaacccaaaagcttaccatcagagaggactttatcatcgctaaggccccagtgacacttcatgattcttattttcctcttttccaaatgagagcttttattctgtttatcctgttccagctgcaccgtgataggttg

SEQ ID NO: 397397 - DNA, 283 bp, Homo sapiens
gcctggataatggagctgtgcgagcattagattccacacagaaggctccataagacagatcggtatgaaaagtcagtttggagagctgctgccatgttcgcagtgggtttaagacgtgtccctggtctggatccagaggaagttcagcaggcctgttctcaaaagtggtgatggtgaaggtaggggtggatgcatggagagggcacacacatcttgcctccagcaggcacactggctactccagcaggcacaatggctattgctatggccagaaagtaggaga

SEQ ID NO: 397398 - DNA, 452 bp, Homo sapiens
atatgtgatattcagtggaagccagagattacaaacaaaggccataatagggtggggatgggggcatctgctgcttttattccattcgtcatttgtcatttgtagccatggcatccttccttagtcaacgaagcctgtactgtggaggtcagtagagcttggagaggcaggctgtctaagtgccaagctttaaggggtgtatcagcagggccctgacaccagagggcttctttctgccctccccaccagtgccctgccttgcctctagatagagagtatgcagatacttatatgatgtcattttgccagaaggccaaattattagcctgccttacacccccatgtgtggaaagtgattcacaagcttttccttcaacgaacctttgtaggcataaggacgtgtgttatctgcaaaggtctctgcagacaggacctttgggtgttatatctta

SEQ ID NO: 397399 - DNA, 425 bp, Homo sapiens
ccataaagttgaaaagttatcaatcaaaccattgtaagtcgaggactgtctgtgtatctgtaaactccactgtgtttcattcacagccatcctccttgaaagagaagtcctccccattccttcttcagccccctcaaagccagtgttttcttttaccatctgggcccttgcaccatatcctcaccaccaccactgccactttgccatctgcccctcagcaaggccaccagtgacctccatttggctaattgccctcaatacatttattatttggcttggtcccttaaggttatttaatattttgtgataacctttcattctccctctcctccctctgggacatttagaactttgtaacatacattcactcgccctctctctctctctctaacctcttatttctttggcttctgtgccactacttt

SEQ ID NO: 397400 - DNA, 758 bp, Homo sapiens
aggctgcgggagtcgctgccgctcgagggaccgcggacccgggaggtccggctcccggcgccgggcctcagtttcccccacgggagccgcatcccacccccagagccccagcgcgtccgcggggtccgagtcgcggccggcgcggggcggggaggggcgggaagtttgcgccctacacgcggcctcgcagacttggcggctccgctcccggccgggagcaggtggccatggtgcccggccctgcctcatagcaggctgccatgtcgcgggaggcgggctcatgccgcgtgggcacaggggcgagggcgcggtctcggaagcccaagaagccacactacatcccgcggccctggggcaaaccctacaactacaaatgcttccagtgccccttcacctgcctggagaagtcacacctctacaaccacatgaagtacagcctctgcaaggactccctgtccctgctgctagactccccagactgggcgtgcgccgtggctccaccacgcctaggccccacgcacccaccccagaccgccctggggagtccgaccccggcaggcaaccccagggagcacggccacaggtgctgccccgcgcctgacctcgtggtcgccgacatccactccctgcactgtggcggaggccccaagtccagggccaaggggtccccagggccaccaccccctgtggctagggccacccggaagggtcccggccccagtgggctcctgcctgagtcgtggaagccggggatggga

SEQ ID NO: 397401 - DNA, 141 bp, Homo sapiens
gcagcatggcctccaggggataggaggtggttggttggctgacggcagtgaagggaggaatagagcctggagtagcccaagcaaaggggccttgatgctagatagtgtgttacttgaggacctcataaggacctcctgtgg

SEQ ID NO: 397402 - DNA, 543 bp, Homo sapiens
gaagaaaataggctgtgatcaatgcattttattctgttctctgagttggtgctctttcaatgtgttcacttatttatcaatttaacaaatatttgcaaagtttctacttgtggttaggctttatgcaaagcactgaacatgtaactgtgaatcagatgagtaatattccttacctcctgcagtttgcagcctgatcctatttcccgctaaagaagggtaaatgtattgtttagcccctacactatgctgaatttttaaaagcatttaaaggtcttattagatacctcctgcggaaagtcactaaccgtgcaattcccctggttgaatgcccagttatttgcagcccattgccatacatggagatagatttttttgctttgtccattgcggtaggctcaatgcctactacattagcttttctttcctggaatatagtaggtgcttatatgaataaaggaaaaatatgagaagagaacaaaatgtgttaaggatcaactatactaaactctttgtagacataatcttactatagacataacccca

SEQ ID NO: 397403 - DNA, 331 bp, Homo sapiens
tccagttgacgcagggcatattccatgtcttcttttctgagacacccaaccatccccactccatccttctgcacatccgtgtaacaggcatccccagcttctcgcgtgtgatccttcaggtcctgccagctgcctgatggaagaagtccatttcttccataaatagcatcctctgcatctcgagggtcctcgaagcgcacggaggcgaagggcacaaggccgtaccggctcttgagctcgatctcgcggatgcggctgtacttgtagaacaggtcctgcggctccttctcgcgcacgtgggtcggaaggtttccccacgtagatgcacccg

SEQ ID NO: 397404 - DNA, 381 bp, Homo sapiens
ctcccaaagcactgggattacaggcttgagccactgtgcccggccatctttctttttcttcctctccttctaccttgcccaccatggcttaatttcaccagaatatcatcattatcaacatcattatttctagttcagatcattctaaaaatagagcagtcattttcttctatataagtcccaggtccagcctgctattttttgagcctacctttcctaatatctagtttatattttgttttgttctttcttgggattgggagtcagaatatcaactttttcagaaaagagctttggaaattctacatacataatatatataaattttccattcatagtgtgttagcagctttttctacaaatctcttggcgggtgggggg

SEQ ID NO: 397405 - DNA, 463 bp, Homo sapiens
taggcaagtctcaacttgtctctgagcctcagtttctccaaatgtgaaatgagatgttggattagaagttctctgaaagaagaagctgcagctctttcctgcatagaatccattccccccttcttctaacaacagttctccaattttcctttgggaattactccgcccctagtctcagtttatggattgggatagagttgactccaacccctggctgtagaggtggatctgtgaccaaatcaagccaatgagagttgcagtaatagaagcagagatgggtggatgggcgcggtggctcatgcctgtaatcccagcactttgggaggcagaggcaggtggatcaccagaggtcaggagtttgtccaacatggtgaaaccccatctctattaaaaatacaaaaaattagccgggcttggtggcaggcatctgtaatcccagctacttgggaggctgaggctggag

SEQ ID NO: 397406 - DNA, 678 bp, Homo sapiens
aatttcttcagtgtacagttccctgtagatacaaagcatcacaaagactgatctctcaagatatccatagtaacacatacaattacaaaagcactttttctgtggaaattgttccaatatgcaaggataaagttgtctgtctccaaaactggtacaaagcctgggaaatatgaaccagatttgtgtgtgtatctgagtaaccagtgccattcacctcactgatccaaacaccctacaagtggcagatattgatgggagcactttctggagtcaccctttcaatagtttatgtcatcccaaacagctagaggagtttattgtgatggaatgcagcatagtccaagatataaaacgtgctgcaggtgctggaatgatatcaaaaaagcataccctcggggaagtctgggtacagaagacatctgaaatgaatacagataaacagtatttttgtcgtactcatttgggacatcttctaaatcccggagacctggtgttagggtttgatttggccaactgtaacttaaatgatgagcatgtcaacaaaatgaactcagatagagttccagatgtggtattaatcaagaagagctatgaccggaccaaacgtcagcgtcgtagaaactggaaattgaaagagcttgcaagagagagagaaaacatggatacagatgatgaaag

SEQ ID NO: 397407 - DNA, 728 bp, Homo sapiens
gtaggctgactctgaggatccctcgaatcgacggtttctctttaattctcaaacacaaaatgcaaatctcagaggtaatctgtcaaaattggaaacgaagaacacttcttggctgtaaaggtaaaatgatcaccaacaaacaattaaaaattaaaccagcagagttaagactttcaagattactataattcagacattcatataacagtgccaacacactgcacagaacttagagaacagcctcgccttggacccaggaagtcattcaatatcatcattagtgtctaaataaaagaaatgctgtgtcaggcaccagtcatttgactggaacaggtcagatcatattgggagttgtaaattttaaaggactgcttacccagagaaaggggagcaggggagagactctgtggaggtaagcattattttcaaatagctaaacggttaacacatggaaaaggaaagcaccgatgctccccgacttaggatggggttacgtctggataaacccatcataaggggaaaacatcataggccaaaagtgcatttttgacttcccacactttcaccgtatggtgggtttatctgaatataaccccagcgtaggctgagggctcgctaagtgcatatggctttggcaccacggtaaagtcgaaaaatcgttaagttggaccactgtaaggtgggagccattggtatatttacttctgggtgatgctcaaagatctttg

SEQ ID NO: 397408 - DNA, 338 bp, Homo sapiens
ggtatagccggcgtctcctgtaatctcaactactccagaggctgagatgacaggatggcttgagcccaggagtttgagcttcagtgagctatgatttctccactgtactctagcctgagcaacagcgaggagacctggtctcttaaaaaaaaaaaagacaaaaagaaatatagatgtattgactgaatgataagattctttattacttagggttatgttcagctttaggttgtcctttttctggaatagtttaggaaaggttcagagagaacacttttattccttggttggttgtagcatagccctatatttaatggcctgggtagtctcaagaaatt

SEQ ID NO: 397409 - DNA, 403 bp, Homo sapiens
gttctgttttgcaacaattcaactctgctgttatagtgtgaaaaccacgatacagaaatgaatgatgggtttccaatcaaagttgattatagcagatgttgagctggccatagtttgccaactcctgctctcaaacaataccccctgccctttccttgaagaatccagttgtctcatagcatgtttcacattctgggtttgtctggttgtttcttcatgattagtgtcagggtaagcatttttatcaagagatctacaaagcagatgttatacattttccatcgtatcccactgggaggctcatgtcagtggtcccagaatttgaccacttggtttagctgacattcactaggtccctccattgtgaagatgcatttctatttttgtaataagcaatccatgg

SEQ ID NO: 397410 - DNA, 548 bp, Homo sapiens
tgcagaaaacaagctgcatgtcatcagacacaattccagagaggataagaacagatgattttgaaaggataaaaagaaaggcacacctaacaatgctacaaggacagagaggattctgagtcacaatagttgacagaacaaaagcaggttgctacaactccaactgacgcatgaagattctaggctcagtgactcatttgggaatctcgggtgagacatttagattcccatttactgggccaatgccttctggtctgtaaaatggaagacacgagcagcattaaggtatctagacactttcaaatcctctcaagaaataaaatgttaagtataaaaaagcacgtttgaacacccaccggagtggctaaaataaagaagtctgacaataccaggagctgacaaggaggcagagaaactaaaaaccttaaacactgctggtggaaatgtaaaatggtacaggtactttggaaaacagtctagcaacttcttaaaaagttaaacatatacctgccatatagccaagccattcaatgcctaggtacccaccc

SEQ ID NO: 397411 - DNA, 641 bp, Homo sapiens
tgagacagggatttcccagagctataatgataggcagctcttgtttaaactctgttaccacttgcttaagatgtgttaccatatcgcttttaggtaaacctataaataacaatgggtcagtaggcttataatatgttcattatattttttaaccaaaaaaattgagaaaataagatttttttctttaaaatttgttaaaaactactttatcaattattaaactacattaaaataacatgaagcagtgagctttattaacattacccttccatgagaatcaactatacattaaaataagagaaatagttataaggacaggtgactaaagcccaactatcacaaccaaatcatcttagaaaatttgataccaggagtggccagctaccacaggtttcccagattttcactgacatgataaatatacagacaaatgggtacatgcgcatgtgcacacacacacacacacacacacacaccacaaacattcagaagactgtcacagattctgggtatttatttatttaattaacatcttaacatagcaagatgaggtcttgctatgttgcccaggctggtctcaaactcctggcctcgaatgatccgcccacctcagcctccccaagtgctgtgattacaggcat

SEQ ID NO: 397412 - DNA, 357 bp, Homo sapiens
cacctgcctggtgggacagtgacatctctcctgcagcactgctgtcagggtgagggaggtagggcgcagtttcagaaaaccattgggctgcacctgcgtgagcacagctgcaggagcaaaagtcagaaaggtcagcaaaggatttcaggagcaaaggtcagaagaaaccctcaaggtggttgtgtctgcaggaaagtgctgtcgtctcctgcaatgctttcaagactattcagaagcacagtgtgaagggagagccggagcccatggggaaatgactccagagtgttccacgtgttggaaggcatctgttggaaaacggacattcaagcaaatagttgcctgcatagacaacgcaga

SEQ ID NO: 397413 - DNA, 520 bp, Homo sapiens
tatggcattctatccactgaccttgtacgtcctttgctataaaactattaccatagtgtttttaaaaatcttatgaactcttaaatttgtaacttgactgaagaaaaacagttaatccaaatttcagatgtcaagaacaattaagcatcaaacatgctgtataaaatagtaaaagttaaacttttaaacaaggaggtctcttctgagtcaaatcccacatgtctggtcctaaagtatgatgactttctctggagactgtctgaaaagtataaaaagtatgacagcaatgggagcagcaaagacagagctcaaaaagtgctgagaaagagaaaaagagaagtagaaagaaaaacgactaggtcttaaataggttttaaattttgaacatttaatcagctaccctgattaaaatgaggataaggaatccataatgctattgctcatcaggagacttctaagacacttgctagaatccacaggtctccaaaaagctcagggatcttatctaagtgtgattctt

SEQ ID NO: 397414 - DNA, 574 bp, Homo sapiens
  misc_feature (8)..(8): n is a, c, g, or t
cttagtgnttcctttgtctcccacgctgagtgtgtggtgcaatcaaagctcactgaaacctcaaattccggggttcaagcgattctcctgcctctgcctctcaattagctgggattacaggcatgcaccactacgcccggctaatttttgtatttttagtagagatggggtttcacagtgttggccaggctgatctcaaactcctgacctcaagtgatccgcccacctcagcttcccaaagtgctgggattacaggcatgagccaccacacctagccaacaaactttctgcgcgttgaatatgtcactcactgccttttggtctccattgttgtttatttgaagttgttaatcattttcaggatttgttgtataatcacttttctttaacattttcaaaatcctttgtccttgtctttcaacagtttgattatgaaatgtctaggtaaggatatctgagtttatcctctttggcgctcattgaacttcttggatgtgcaaattaatttttgtttcaatattaatagactatttttagagcagttttctgtttacagacaaattacacagaaagt

SEQ ID NO: 397415 - DNA, 272 bp, Homo sapiens
taaataaggtagtattgatttaacccaagtgtaaaataaatatccatgggtccatgtggatataaataaatgatagactaaataaatgaaagacaagaggcaactctcttttgcagaagaatttattttttctttttttgagaccgagtcttgctctgtcgcccaggctggagtgcagtggtatgatcttggcgcactgcaacctctgcctcctgggttcaagcaagtctcctgcctcagcctgctgagcagttgggtactacgctttggca

SEQ ID NO: 397416 - DNA, 274 bp, Homo sapiens
gttattccccctaggcaggataagagacagactgctgagcttccctggggttacttacctgagatccatatctccatcaacccagaaggtgaaaatgttagagatggtgccccccgggcagcagcccatgatgagaacagcaatagcttggactggcttcagagaaaagctaatggccaggagataagctgtaaaaggcatgagcccaaactggcagagcagtcccacagcaatgccccagggtctcctgatgtgcgaccacagcttccggatc

SEQ ID NO: 397417 - DNA, 358 bp, Homo sapiens
agctgccttgctctttccaccatataaggacactgcgacaggcatcatttatgaaccagaaagcaagccttcaccaaataccaaatttgccagtgccctgatctcaggcttcccagtcttcagccctgtgagaaatacatttctgttgtttataagccagccagcccaaggtgctttgttacagcagttcaaatgaatgaagacacccctttatttcctataaactgtgtaaggcttgctaagattcaggctaaatgttcttgaaaagaagatttcactggtgacactgtgtacagttgacacttgaacaatgtaggtgttaggggcgctgacttcctgagcagccacaaattcatgt

SEQ ID NO: 397418 - DNA, 568 bp, Homo sapiens
ctttcccaccattattcattatctcagtatcttccttgtcagcatagttactctgttaactttgccccttttgcgctagattgtaaattccaagtttgtcttgttcatagttggatccaggtttagcacagtgcctgacgaacagtaggtctttaattaacatttattgaaagattgattagatatatgcagaaataatatattacttgatcttaagttttaagtttaaccgagtcttaaattttgtgagcgcaggtacatactgtattagaaattatggctgggcgtggtggttcacacttctaatcccagcactttgggaggctgaggcaggcagatcgcctgagctcaggaattgaagaccagcctagacaacatggtgaaaccccatctctacaaaaaaatacaaaaattatctgggtgtgatgccacaaacctgtagtcccagctacttgggggggctgaggcaagagaatctcttgagcccagggggtggaggcggcagtgaaccatgttcatgccactgcactccagtctgtgtgacaaagcgagaccccgtctcagaaaa

SEQ ID NO: 397419 - DNA, 853 bp, Homo sapiens
gaccccgccactctctgtggtggagcaggccaggccctgtagccccagaagggacactcagccaaaaagatgtgagccatcctcttcctgagagtctgcatattgcagggcccaccccaagcgttggaatcttcgtgggagactctcagacacccccttggtggctccaagagaccttccagtgaggctgtggcaggagggggcagggtgggctgggagaggctttggcccctcctctgagattttggggcaggaaggcaggacctgcatgaggctccaggcttagtcctggagtcacctaagaccggggaagatgcatcttgctttgccctggagtgtggccgtggggctcagacatcactctcccagaccttgctatgagccacgcactgagctcgttcactttgcaatgccccaagggagcaggtaccgtcacctccccaggcttcaaggtgaggaaattgaggctcagagaagggaagtggcttgccaagaccacagagccagggtggggcccatttcaagtccagggcgtgtgaccccaggggctctacctcctccccggatgtcggggtgggggcggcaggagatccgaactgtggagcagatggtggcacagtgagggtcccacctctgcttctttccgtggctgtgcccagtgccccctgccacccacttacagactggaggcctgaggagggtgcccgggactgctcccactccaccctgtgcgtggatgtcgctggcctgaagataacctccgcatggccttcctcagccagctctgcccgaactttggcttcaccacttatctggccatgacctcgggcaggcagtttgcccagccttggcc

SEQ ID NO: 397420 - DNA, 180 bp, Homo sapiens
aagctcttacacaatgtatttcctttaaccttctcatcaaccctgcaaggtgacgactatatccccattttacaggtggatcacctgaggtcaagagttcaagagttaactatttttcgccttctttctcccgcagtgagaaccctggttctaccctgtttctccttgtgtaaactgatt

SEQ ID NO: 397421 - DNA, 604 bp, Homo sapiens
ccaccaaattccatattgcacagaagtaaatgttagatgtagtttctattgtatggtaagacatgtacattttcactcttttcttatgtctgcctctaggttctatttcgttgtatctcacaagatacaatgactagctcaagagtttttcttcccaaggtaccctgttggttttcctccagaagcttacgttgtttgggcagggctgaggattctggcttgtgggagatagaccaagaacacccaaacaagccaataaaacatgaaaataaataaacagaatttctaatggaagtgaagaaaataacagagcaataggatgggagggcagagtgggaagtgagttgagggagttatctttgaggaggtgacttttaagctgagatcggatagtgaagaggagccagtgctttgaggacttggcagaagtccttctaggaataggggcagcttgtacagtggccctgagatgcacacacatttggcaagtttgaggaaacatcagagaccagtgctagtgagaaacagagcaagacatgaagttagaggggtggcaggagcgccgaaaagagtttagactttaattgcagtgagaagcagttgt

SEQ ID NO: 397422 - DNA, 272 bp, Homo sapiens
aaattgaaggtggtcttttctaggaaatcctcattgaaatactgcccattttgaataagtctaatagtacgatgaaccacacccttagtggaaacgttataggatgcaaataggaagatttgtgggtgtttttccttcatgaatttgttgttatctttgcagaagtgaagaatatcaatattttatggcctttctttgggattcgtgtttattaccagtgatgcagagcgtggccctggtcctcagcgcctctgcctttgtggtggcggggg

SEQ ID NO: 397423 - DNA, 760 bp, Homo sapiens
tgtatttgtaacagtctcattctggaagaattcaggaccttcattccaaaggtccactttcaaatggggagaatttatgtctgtagagtctgtgatactcagggtacttcaaaaccctccggaaagatgaagaacaagctggactccatcaggcagctggactggtaacagcagccttcccttcaacctgcagctttataaactataaacacacactgagtgcctagcaacaggccctcccggtaactgaggttgcaggaagatccctgctggctctgtaggagacaggtaatgagatgcattaggagcagggagaacactgtcacagaagccccttgtgcaagagggcagatggggttgcggcaatcaactccctgcaggggtggggaatcagagaagattcatccaggcagcaaacttgtggctggagcctcaggcaggacaaggagctgcctaacaagaggtggaaggggttacgtacgttgcgaaagactccaaccctcctggtgagtcagatctgtcatctcgggctccagtatctcacactggttctccagcctaggtgtgcatcagagccacctgctgagctaatgaagcccactcaggactaggctcctggaagcgggatggggcttaggccttggcatttttgccattttccccagatgattttgataccaaacagtttgagaatcactgtttcataccaggctaatcagaagaacaggcagcaaagtagcagctggccctgggcatttca

SEQ ID NO: 397424 - DNA, 417 bp, Homo sapiens
agaaaaacaaatttaaaaagtaatatcctaccagaacaagcagcagtagaaaatagaggtattttaaaaagaaaaaaaatttttaaagtaatattctatgatggcaaggggatttggatttgaatcttagctttgccatatggagaacttagggttaatgaggcttaaagaggtagcatatataaagcacccaagaagaaaggttaacttcctttggcagaaacataaatacaaaaggatgttaaaatcattatggagttagggcacaaaattagaggggcaagtatcatgagaaatcgagaaggaatgagaacaaaagcatatgtcaagacttatgtacttaatacactgataaaaaatattaaattgggggaactatgttttcccttaataagtaaatctctaggctgggggtgg

SEQ ID NO: 397425 - DNA, 401 bp, Homo sapiens
tcattcagccttacaaaaggagatgctgctatatttgcaataacatgggtgaacctggaggacgttacgctaagtaaaataacaatattgaaggaaagaaataatactgaaagaaaaatattgcttgatctcacttatatatggaacttaaaaactacacatagaaacagggtagaatggtagttatccaggctgggaggaagagaaaacagggaggtgtaggtcaaagggtacaaacttgcagttctattggatgaatgtctagagagctaatgtacagcatgagaactatagttaatattgtatatggaaaatttgctgagagactagattttaggtattctacctcaattaaaaaggtaattgtggccaggcacggtggcttacgcctgtaatgccag

SEQ ID NO: 397426 - DNA, 1205 bp, Homo sapiens
atactgagagaccctaccttaaaaaaaaaaaaaaaaaaaaggacatagggttgtgcattaaaggtcctcaagcaaacaactgccaggacaggagaaactccttgcaggcagaggatagctgcattaaatggcccttgagtaccaccattcccttggaatttttgggtcacaattactgctactgtcaagaaatacaccttatgcgcttctcccctttgttctcaaagaacaatctagaggagtctaggcaaaccaggtggtacagttcagactgtacagtataatctatgagttctgccctatgactcccatgatccctcttcatcttcaatagagtattggtaggaaaaagttctttatgagagatgtatcaagatcatgagcagttcttccttactccaggatgcagcctaaaccccatagctgcattgtgtggaatcgtttgagatcctctctcctgtctccattccaaccagatcttgacaattccttttctccacaccacctcctgccctgctgactctggctgtttccacacatgctatgcttccaggcctttgtgcattttcctgggcttctacttgtccctttttgcactctcttctgcttagatgtctttcaagatgcagatcagccatcagtttccttagggaaattttgctctctcctcttacctacactgttccctgtatatttattctttcacatgttggcattaaacacgaccctgattcctgtggatcattacagtctctatgatgacctacaagtatcattgcacttattatcctttgcttctccatgtcccacactagattcagagcactttatgggcaggcacagggggctactcaaatcatgccacttgaattaagtttataggacctgataatgaggtagtagcagcttcagttagcctgcaaacaaacaaacacaactagtagaacctcactgacagagtataaaatgtactctttgatttaggatttagagacacatagggaggaggtatgtgtagccagaggaatgccagtatttgtgccaattcaccactttgatgaggggatgtggagtaatgccagggacaaaagaggagtttatagaatgattgaaggtctaaaggcagcgtgctgagaggcaggtggaggatatgcattgggcaaagttctagggaggtctctgggtttaccctagggtgaacatgc

SEQ ID NO: 397427 - DNA, 225 bp, Homo sapiens
ttatcgaatgcttctctgcgttcagtgaccagttgtatttagtcaccactaaccagccttgtacgttcttctcctccatgagagggggtgtgaaatcgtgaatcaaaaaacaaaatggaagagacgggaaactctttaaactgtaagacgtacatctttaagtgctgtgtctaccagacgaagttacttattagctcctactccagtggcctgaaatcactgaaa

SEQ ID NO: 397428 - DNA, 495 bp, Homo sapiens
cgccctctgcagccacacctggaccggcaggcatgcacgctgcaggcaggctgcctccgctgtttgggtcccatgaacgacggaagcctcccagtgagatctccaggtctctcatcaggcacaggctctgagggagggtcctggggccacatgactgcagccagcgagggccgagcccccagaatccaggtcagctcctggtggcaggggacctgcccgtcaaagccgtccaagggtttccgcggccctgtcagaacaggcttgatagatgcccggaggttccctctgacagccgcagcagcagggctcaaaccggcggggccgtgtaccgctccaaggacaagctctgccgaggccgacatgaaaagccagcacgcgggtcgcctagagccgctctgcctccaagctgcagcgccgttcgtgaaaatacagagggagagggaaggcacaaagaaatacaaaactattttccaaataaaaagaaatgtcgaaaca

SEQ ID NO: 397429 - DNA, 249 bp, Homo sapiens
agaatacttccgatactcagaactaaaggtaaaggggcttttccagaagccccacccacactgagtgaagagcagcaccccagtctttctaaggagtccccccaccctccagggctccctgtttgctgtttctacaatgaatgctacctgtataggattcttacctcacgcatccttttcccaatagacacatgttcccttgcttccctccacctaggcagagctggaaacattccccaggaactccat

SEQ ID NO: 397430 - DNA, 328 bp, Homo sapiens
tatgactcttagtaatataatattataagaaaaatatcagaacaaaagaatgtaccctccatgatttcatttacatatgtacatatacacacctacatttatattatttatatattctatatattatttatatataaaaaataaacagacaacattcatctctgatgataaaagtagcaatagtggttacctctgggaggcgttggctgggtaggggcagaaagggacctaatgggaatgtccaacactctcatctggatgtatttacggaggtaaccatcatatataaaactgatagagctctacaatgaaaacgtgtgcatcttac

SEQ ID NO: 397431 - DNA, 408 bp, Homo sapiens
tatatactatatactatatataggtatatgtaggtacatatatgtgtatgtgtataggtatatattgtatatggagcttgtgccagaaggcaaatcaactatatcactaatcatctttagttccattgactcactgattgtaggaagagttcctcagtaaaggcagcagtgcatttaattatactttggtgcaagcttatcttaccataccatatccatatggaatatcatgcagctcttacaggtttttagaagaaaccggcatttaataatacagagaaagttcatgaactaccattgagtgaacaaagcagaggacaaaactttatgaatgatcacaatttcattctcagtgtatttgcagagcaaaatcttagaaggaaataaatcagcatactgatgaaaaaa

SEQ ID NO: 397432 - DNA, 416 bp, Homo sapiens
cttgttttgttacttcttgctttttcagttttgaggactattaactttctactacagaaaaagatttagttctctttcctccccgttacccccaccacatacttatacccagctttccaatataattacatcataacttcatttagatcaatatgagattttatattatgaatttgtaagtgcaatttaaagctaagccaagtagtgaggtatcactggttttctcttcctgtactatttttgttttttctggaattactgtcttattttttccctttgttcggttttcaacgtacttattgatccaaccttaaatcaattgcctaaatttcctctcaaagaggtcaggtatactatcaattttatcttctggaagaattctctctcagagccttgtgtggacttccttcatctgg

SEQ ID NO: 397433 - DNA, 513 bp, Homo sapiens
aaatgcgtgaacctgggaggtgaagcttgcagtgagccgagatcgtgccactgcactccagcctgggcgacagagagagactccataaaaaaaaaaaaattaataaagtggtacaatttttaaagttgcaaatatgaaaaatgaatgatttctgcatgaaataagaaaaatttggtttttatttgagcaattataagggtttgtcatttttacatgctgcctcattgtaggttattttcattatttaaaatgttatttgcatttaaaattacattgttgagaaagctataataacatgttgtaatccttgatatgttgtcatctctgttggtagacatcatctctgggtgagtgatttgcttgtaaaaaaattgttttgatttatttacattttatatagcattgagattatatcacatacaagaaaactatcctttttcagtgataaagattcaataatgataatgttagcaatggtatagctgtgaaataaaataataaaatttgtaattg

SEQ ID NO: 397434 - DNA, 217 bp, Homo sapiens
ttcttaacaacaagcgtctcaggtcagggtaggcttattgtggtttgcttttgcctacaaaggacgtatgttgagtaagaatcttggcctattacacagtaagttaataattgtgtccttgcaaataagcattgtgttctaaaatggaatcagcatatttccctataaagacacttccactcattcattaattgagcagccccagttgataaagaat

SEQ ID NO: 397435 - DNA, 623 bp, Homo sapiens
agaaattttcctttaaatacaggttttctgcatcccataggccttaataggaagatgtatggttaccctcttgacacaaggatgatttagaatgtgagttccatgaggaagagggcagggatcttgattttgttccctgctgtattcccaaggtgtagaatgaagactgacacataaccatgcctgctttctcttcaccttccaccatgattggtagtttcctgaggcctccccagccatgtcccctgtacagcctgtggaactgggagcagctgcaaaggaacaccacaatgatattccactggaaaaagggccaaaccacctgatcataagaacatcttatcaatatcctcctgggcagcaagccatactgcccagctccctcccacccatacctcagctgcaaccaggatcacccccattgctggacatcacatccaacactgggcttcaattcgtgggctaaactcccctgtccaggcggccacccagcaacacattgataccatccttctcctctgccaagtccagtaccagtgcctccaggaaaacaactctgaagtccaacacccactgcttcaaaacccaaaccctgattacagctcccctattcggcaggaagc

SEQ ID NO: 397436 - DNA, 529 bp, Homo sapiens
gaggccaatggttgaatgcgtggcagtaagcattcttacaagcaagtaatgactcactagtaggtggagaattgaatgagtttcttcttaaagtcaatttcctgaaactccaagtgtggcagacatctgtttttattctctaccattcttctttcatctggtaatagcactcctccctccctttacagatacgcttctaccctattccttgtgggtctgccagtcacaatcctcttgcccttggttgcagggtgagcatgtgatccaggactagtcaactggtatatggcttcagcaaattatccaaggataagtatataatccaggtcaggccaggccaagcagggcctttccctgggacttttcgtactgaagatggaagggaaatgtgtctagaagcatagaatcacctagagttcctggccatcatggaagggtctacaaaaaggaagccagtacataaaaagcagccaattccttatataaaagaaaaagggagagacgcagttaaaattggaatactatttta

SEQ ID NO: 397437 - DNA, 392 bp, Homo sapiens
aaatccacttttagcaagaagcctggctaagtcagtttagccagacccttcccacccgcttgctatcggatcaccgtggagatcggagccggctgctcacctgcgccatcgccggcgacgcccgatcaccctgcctgcctgaaaccagaagcgcctcatccctggggtttcctctcagagactgtccatgcagggaccgcaccctgctccgggctatcaattcccactcgcccttgctgtattcagcggagcccaatgtctccccagcggcgccccaggcgcggccccccgctgctcactcgcgcgcagcgcccgagcggagggaggcctctcacggccacagcccgggccagcccaggggtgcgcagcggggccaaagcggcttctttcgc

SEQ ID NO: 397438 - DNA, 469 bp, Homo sapiens
ttggggagaagggaaagaatgtagaaggtggcccagggttgctctcttcactttcagaaggaagtgcagccacaaactttaagtgggtcagctctggctttatttcactgcctcatcacctcgctgtgtttttaatcagtgcttttcagcagctctccttggaaaattggttcacacatttccattacaaacatttctttgtcttcaagtgaaaagggcacttcttcccatcgagagaattcttgttataatccaggaaacctctgactagagatttcttttgtaggctcagctatttatgcagagtgaattaaagagctttgctgcagtgttttacttcttgcagatctcaaacttgctcttttgtacaccaactatatttctggattttaccccaagctgtttatcccatggaaccttaaaatggttaaagcactttaaaaaatattcgatcctttaaccatcggta

SEQ ID NO: 397439 - DNA, 468 bp, Homo sapiens
gcctgtaaatccctgcctctggaaattgctggtacagagctcttcccttcacatcccccctttagaagggtgaaacgcacctaaaaaaatatgtctgaagtgtgaagactaggtggaaaatggtagataacttttccacaaaggaggaatgctctcttgtaaagtagagaaaacctcttcaagttacttgtttttttaaaacaagagtacatggttaactttggctttctaactgacagatgtcatggaactcaatctgtcagcatctcagtcttacccaactatctgggcttcgtcagagatctcctataagaaagagaaatatggagaaaccaaggtgatgttcctatggaatgagaagaatgcagactatatttagtctggagttagacctgaaatttgagacaggagaggcatgagcttctgagtaaagcattcagactgaaatccagagacccgtcttctcct

SEQ ID NO: 397440 - DNA, 532 bp, Homo sapiens
agagccacacagggagggtcccaagcacagagctcacatgtctgcacctggtgggatcaggtgcctagtcctccctgcatgtgacctgtgcacctgccaggaggctccgtggagctttggtgtctgccgtgtttactgggctcattacgaatgcatgaccgattgactctttggccatgtgatcgaactccatccccagcacccctttcccctcccccaccctggaggtcaggccggtatcgcccagctcacagccccagccgtctagtcacatgcttggtctttctggtgtcggagcccatcctgagccatcacttagcacaaactcaagtgggatccaaggccttatggtaacaaagacagaaattccaggagttttacaagcttcctcctaggaatctgggacagagaccagacaaatcctttatgacaatacgggctagggccaagccctctgccaggtgctgggggtcactggcccatggtccatcctcggggagcccagttgtgcccaccattctctgtaaggtgg

SEQ ID NO: 397441 - DNA, 572 bp, Homo sapiens
tcatgagtcttagttcctattgaagaaataaaagtatattctatccagacttgagtgaagacccctttaatgtcagaaattttgagaacttctatgtgatattatttctggttttagtaccttttgactaaagaaaacacgtgatgaacaaaagccattttgaattcagtaatgttaagtgagttttgcatcctcatccttttaaaaaataatacatatttgtccaaaacatgcatacctgtctatagactgcttgggtatctatggattcacagtccccctgcaaccgtgctgcagctgcccagggatctttgtcctgggcctgtcttggcttaaacaggaccatcttgttaagattctttcatggtgtgggctttgtgtctggacagtgggaaggcagctggcgatgtggtgtgaatccagccttgggtgttttggtgtgggagaggctgagctggatgtgccctccattgcctgctactgattctctttattcattgaagatcccctcagagacgtgagaaagctaatggtttaagtaccccatcagaatctccacatttccacttggg

SEQ ID NO: 397442 - DNA, 399 bp, Homo sapiens
acagaactgctgcatttcatttccattttcactctttatggttgtaatggtggacagtttgctttacttcctgagccttatttgaggttacctaaattctgatctctgtttctggaagaagtaagaggtagttttctgggaagtgaggccatgtaatagcctaagtcttacatgtttgcttctgtccattcatgctttctgagtattcacatgttctattcagactgctggaatcctgatccccactcacgaccatctttcacgaatatcctggaccagctaaccaccatagaggagtctggtttctttgaaatgcccaaggactccttccactgcctgcaggacaactggaaacacgagattcaggagatgtttgaccaactcagggccaaagaaaag

SEQ ID NO: 397443 - DNA, 299 bp, Homo sapiens
tcatatttcttatatgaatttaattatgggaaatgttaatgcatacacgtgtttgtctttccccaagcagatttccagcacaagttcacggtgcaggcctcccctaccatggataaaaggaagagtcttatcaacagccgctccagtcctcctgcaagccccaccatcattcctcgccttcgagccatccagtgtgagactgtttcccaaattagctggggccagaacacacaggggcacctgtcccctgctctgtccagccaccgactggtccaggcttgctccatccataacttctg

SEQ ID NO: 397444 - DNA, 5457 bp, Homo sapiens
  misc_feature (1666)..(1666): n is a, c, g, or t
gccgctgccctactggacggccgtgttcgagtacgaggcggcgggcgaggacgagctgaccctgcggctgggcgacgtggtggaggtgctgtccaaggactcgcaggtgtccggcgacgagggctggtggaccgggcagctgaaccagcgggtgggcatcttccccagcaactacgtgaccccgcgcagcgccttctccagccgctgccagcccggcggcgaggaccccagttgctacccgcccattcagttgttagaaattgattttgcggagctcaccttggaagagattattggcatcgggggctttgggaaggtctatcgtgctttctggataggggatgaggttgctgtgaaagcagctcgccacgaccctgatgaggacatcagccagaccatagagaatgttcgccaagaggccaagctcttcgccatgctgaagcaccccaacatcattgccctaagaggggtatgtctgaaggagcccaacctctgcttggtcatggagtttgctcgtggaggacctttgaatagagtgttatctgggaaaaggattcccccagacatcctggtgaattgggctgtgcagattgccagagggatgaactacttacatgatgaggcaattgttcccatcatccaccgcgaccttaagtccagcaacatattgatcctccagaaggtggagaatggagacctgagcaacaagattctgaagatcactgattttggcctggctcgggaatggcaccgaaccaccaagatgagtgcggcagggacgtatgcttggatggcacccgaagtcatccgggcctccatgttttccaaaggcagtgatgtgtggagctatggggtgctactttgggagttgctgactggtgaggtgccctttcgaggcattgatggcttagcagtcgcttatggagtggccatgaacaaactcgcccttcctattccttctacgtgcccagaaccttttgccaaactcatggaagactgctggaatcctgatccccactcacgaccatctttcacgaatatcctggaccagctaaccaccatagaggagtctggtttctttgaaatgcccaaggactccttccactgcctgcaggacaactggaaacacgagattcaggagatgtttgaccaactcagggccaaagaaaaggaacttcgcacctgggaggaggagctgacgcgggctgcactgcagcagaagaaccaggaggaactgctgcggcgtcgggagcaggagctggccgagcgggagattgacatcctggaacgggagctcaacatcatcatccaccagctgtgccaggagaagccccgggtgaagaaacgcaagggcaagttcaggaagagccggctgaagctcaaggatggcaaccgcatcagcctcccttctgatttccagcacaagttcacggtgcaggcctcccctaccatggataaaaggaagagtcttatcaacagccgctccagtcctcctgcaagccccaccatcattcctcgccttcgagccatccagttgacaccaggtgaaagcagcaaaacctggggcaggagctcagtcgtcccaaaggaggaaggggaggaggaggagaagagggccccaaagaagaagggacggacgtgggggccagggacgcttggtcagaangagcttgcctcgggagatgaaggatcccctcagagacgtgagaaagctaatggtttaagtaccccatcagaatctccacatttccacttgggcctcaagtccctggtagatggatataagcagtggtcgtccagtgcccccaacctggtgaagggcccaaggagtagcccggccctgccagggttcaccagccttatggagatggccttgctggcagccagttgggtggtgcccatcgacattgaagaggatgaggacagtgaaggcccagggagtggagagagtcgcctacagcattcacccagccagtcctacctctgtatcccattccctcgtggagaggatggcgatggcccctccagtgatggaatccatgaggagcccaccccagtcaactcggccacgagtacccctcagctgacgccaaccaacagcctcaagcggggcggtgcccaccaccgccgctgcgaggtggctctgctcggctgtggggctgttctggcagccacaggcctagggtttgacttgctggaagctggcaagtgccagctgcttcccctggaggagcctgagccaccagcccgggaggagaagaaaagacgggagggtctttttcagaggtccagccgtcctcgtcggagcaccagccccccatcccgaaagcttttcaagaaggaggagcccatgctgttgctaggagacccctctgcctccctgacgctgctctccctctcctccatctccgagtgcaactccacacgctccctgctgcgctccgacagcgatgaaattgtcgtgtatgagatgccagtcagcccagtcgaggcccctcccctgagtccatgtacccacaaccccctggtcaatgtccgagtagagcgcttcaaacgagatcctaaccaatctctgactcccacccatgtcaccctcaccaccccctcgcagcccagcagtcaccggcggactccttctgatggggcccttaagccagagactctcctagccagcaggagcccctccagcaatgggttgagccccagtcctggagcaggaatgttgaaaacccccagtcccagccgagacccaggtgaattcccccgtctccctgaccccaatgtggtcttccccccaaccccaaggcgctggaacactcagcaggactctaccttggagagacccaagactctggagtttctgcctcggccgcgtccttctgccaaccggcaacggctggacccttggtggtttgtgtcccccagccatgcccgcagcacctccccagccaacagctccagcacagagacgcccagcaacctggactcctgctttgctagcagtagcagcactgtagaggagcggcctggacttccagccctgctcccgttccaggcagggccgctgcccccgactgagcggacgctcctggacctggatgcagaggggcagagtcaggacagcaccgtgccgctgtgcagagcggaactgaacacacacaggcctgccccttatgagatccagcaggagttctggtcttagcacgaaaaggattggggcgggcaagggggacagccagcggagatgaggggagctggcgggcacagccctttctcagggttggaccccctgagatccagccctacttcttgcactgataatgcactttgaagatggaagggatggaaacagggccacttcagagggtctcctgccctgcagggcctttctacccgtgtccactggaggggctgtggccatcagctctggctgtgtaggggaggaaggggtgcatgcatgtcccccaccctccacagtcttccttgcctttagagtgaccctgcagagtcactcagccaaatctgtctgctgctccctctcctcagccagttgggtgtgcgcagagctgtcatagggtccctttgtcagccccgagttcagcttcccaaacaccagtgttggatattctgtgattgattttggtcctcctccgctgtcccccaacacccaggaatgggaatctggcttggttcgagataggagcttttctgtgtcctaagccctttcatgctagcaggaagactgaaagcaaggtggcccagtgtggggtcatagggcttgatagacctggcactgcctatctgcacttccaggtgccccacctatttatctgagcccacaggtggaaaggggaactgcctcagtgagaacggggggacggggatgttaggaaaaatacagtaaagttgcaatgaagaggttcatgaagtatgtccttgttctttttggaaactctcggcaaagggcaaaccagcaagtattgagggtacccatctagctacttggggtcaggacctcgtcagaccaggttcggatacaatcatctgctcatcccaggaatagtttcttgggggactcactcactggtgccagttctaagtcagagacaaaattccactgtctgttccttttgctgtctgaactttatgtgttactcccttcctttggtcttcactctaatccctggagtttgtgggcttttggttatgtttggttagtagatatcaccgcaatgccctagaacagctatgaagcagaataccatatggccacctggacattgggacttgggaattcactctcaactgggccatccatgttgtgatgcccttgaagtaaaatggagccagcaggagtaccttctgtaaatgcatgtggcaaagtgctatttatagggtgcccagggagccgctgatgtacaataaccttgaggtcccccatactgaaaactgaccaaggcctgtgcacaggtagcccctcatgctgggctctggaccatgagctgagtaggaaggatagcagaggccaaccctgaccttcctggaagttgtttccttaacttgaatgttgagcttcctctaaagctttctcgtgtatgtcttctccatgccactactctgaggcctcctgtgttatgtgtgaacagttgtctttatgtgggaatgacgacttgattgggagtagagtctcaaggtcattcccctcttccctcgaagactctctgaatgctgctccactgtcttttgtcttggaggtcactcagcaggttccttgcatttgctgcctggatgtgcagctggcaacagtgatgaattggtcactgctctttctctataactgggatagatgtcctgccttggggtcactaaaggggtgaccttgttccttgctttatgagcccattagcactttggttcaaggggcccaccaagtcttggacgggaaggcgctactggttttattgcccaaggttttgttattgcttctcttcatgtgtccttctctttgttcagtgaagccaatatgtaagatactgttttttgtccccattcccctactcctgagctaggaggaaaaaatgtgaatcttaccagcagttccagccaaccaagtgattcttcttcattcttgatggggagaagtacatacaaagtttgttctgacagggcgcggtggctcacgcctgtaatcccagcgctttgggaggcagaggcaggtggatcacctgaggtcgggagttcgagaccagcctgaccaacatggagatatcctgtctctactaaaaatacaaaaaaattagccaggcatggtggcacgtgcctgtaatcccagctactcgcaaggctgaggcaggagaatcgcttgaacctgggaggcggaggttgcagtgagccaagattgcgccattgcactccagcctgggcaacaagagagaaactctgtctcaaaaaaaaaaa

SEQ ID NO: 397445 - DNA, 534 bp, Homo sapiens
atttaattatgggaaatgttaatgcatacacgtgtttgtctttccccaagcagatttccagcacaagttcacggtgcaggcctcccctaccatggataaaaggaagagtcttatcaacagccgctccagtcctcctgcaagccccaccatcattcctcgccttcgagccatccagtgtgagactgtttcccaaattagctggggccagaacacacaggggcacctgtcccctgctctgtccagccaccgactggtccaggcttgctccatccataacttctgccacctctcctcgacaatgtgtatatacatgcacatatgtacgcaaacccttagccctctcccttgtctctctccattaactttactactgccccctctaccttttagtcacatatcagcaaagggatttgtgggtactaatgggatctttagtggtttgcaaagcaatttagaaactggtgtgtgatgtggatacaggttgctacctggcctgagaacctaacacactctttgccatatttggggcatcat

SEQ ID NO: 397446 - DNA, 182 bp, Homo sapiens
gtgttctttaacctcctctttttataacccctacttaactaacactgttatcttggctacctgttcctcacagatttaacttactctttttttttactatgctgaaacacacataacattaaacttatcatcctaaccacttttaagtgtacagttcagtagtgttaagtatattcatattg

SEQ ID NO: 397447 - DNA, 314 bp, Homo sapiens
taaatcagaagaatcacagttccctgctcttctggtttttgtgactgtccgcctctctcctctgccttggattggagggtggggtgtgtcatgggttcgtggaatcctctctctgttcttgtgtagccaccagggactgttatccaggctgattccacaggaggagtttggggtgagttcctgagcgagagttgggaagactgacgtctgcgtaaatcttgcttgttcgtggttattcctctcagtcttcttaaattctgaaaaattgggggccaattagaaataaggatttaggtatggatcggtgaggacag

SEQ ID NO: 397448 - DNA, 387 bp, Homo sapiens
aatctactttcttgttatttcctgttgtccacgtcttgatttcactttaaattttcatcattttctaacacgtgcaaaaattccttccttttttttccaatctattattttattcagttataacatttgttattgtctgcagatatttcttgtctttgaatgtcaaaatcctgtacatggatacaaaatttctgttatctctctgagattagtaataactttgggaaggtttttttgatttactccattatatctattttctttaagtttttgtcatgcatgtaagtatgtatttttttgttgttttttttttgtattggaggcttttacaactatccagtgaaacacaaaacaataatataaatgtaaatttctgcttttttttta

SEQ ID NO: 397449 - DNA, 478 bp, Homo sapiens
tgagacagagtctccctctgtcgcccaggctggagtgcaatggtgcgatctcggctcaccccaacctccacctcccaggttcaagctattctcctgcctcagcctcccaagtaggtgggattacaggtgtgcaccaccacacctggctaatttttgtattttttagtgggatagctggccatgttggccaggctggtctcgaactcctgacttcaggtgatccgcccacctcagcctcccaaagtgctgggattacaggtgtgagccaccacacctgtccttggacttccacaatctaacacactccacaacattcactgtctgtacccaagactgtcatgcctaccaactctaagttttatatgacagcagggatttttggagtcactaggatttagtactatgcctgaaaaactgtagatattcatgtgtcacatgaataaaccacattatctgttttacaaatctgtcttctgtt

SEQ ID NO: 397450 - DNA, 607 bp, Homo sapiens
tataaaggggcttttctgtgatcatctctttcagatagcacgttcccttccctggggcactgtgaacctcaaagaagaaggtttcttttaaaaatctcctctgccaggcgtggtggctcacgcctgtaatcccaacattatgggaggccaaggcaggtgggtcacctgaggtcaggagttccagaccagtctggccaacatggtgaaaccctgtctctcccaaaaagtacaaaaattagccaggcatggcggcaaatgtatgtaatcccagctacttgggaggctgaggcagggagaattgctggaacccaagaggcggaggttgcaatcagctgagatctcgccactgcactccagcctgggcaatagagcaagactctgtctcaaaaatacaatacaatacaatataataaaatgtcctcaatggggacataagataagtctgtctgccaaaggtaaagaagatgagatagagaaatggaaaagtggcatttccttcccaagagccaggagtgactttcatgatgggtccaagtgcagccaagctggaggctaagatgcaaggggtttacgcctctccttgctgtgggaatactgggcctgggct

SEQ ID NO: 397451 - DNA, 470 bp, Homo sapiens
tggggagttacaatggtggtgacagggaagatttaccatctgggactgtgctaggtgccaagcgaagcagagcttgtcaggttcctggaaccgagtattaacgattccaatcaagcaggaaatgtctgtgcctgttctttgctaagctggattcctcgctcactaggcatcaaggtgcctgcggagtacgctaggcatgagaaaggtctcgggaggccgagagtgcctggcctgccctctggccccaccccaggtcacgcttggggtccctgtaggctgctcactggtaatggaggaagccttcatggacttgggtcccatcaggctggctctcggagaagccctgcagaactgtggtttggttttaatgaggggagaagattccaaaagtttatcatgaaaagccccatgaccacctgtgttttagagactttgatgacttcagaggccttgaaatacaatcccagaga

SEQ ID NO: 397452 - DNA, 575 bp, Homo sapiens
gcaaggttactgtattttgaatcaaaaccaagacatgcatgtcagttcttttatatataaagcatcaagcaccatcaaatccgcagataatttaaacataatgcttaattttaaaaaagattacatttacaatagcatataaaaataagacagctaggaataaataaaaccaaaaatgtacaagcctttcctggggggaaactgtaacactttactgaaggacattggagaagacttccataaatggggagttatgccatgtttatacataggtagactcaataatgcaaagatatcagttttcctcaaattgatttatagattcaattcaatgccaatcaaaagcttaacacattttgggttttgggggtcagtggctcaataagttgtgtctaaaatttttacagaacaaagggtcaagaatagtttggatacgactaaagaaaaagaataaagtggggttcttactctattagatatcaaagcttataactaagctatattcataagcctgcattgcacttgtacagaaacagatgaaaacagactaataaatagatcagaatggagaactc

SEQ ID NO: 397453 - DNA, 570 bp, Homo sapiens
tattcaattttggatttagatgtttttgagataccttggaatatgaaggaagagagatgcaacttttaaatgagctttgtttatcctcaacattaaggtagggtatcacagaagggttttaaggaatggaccagttaggaaaagataagggctgaagataaagtttcagtagctgtcaactaaaaaccatgagagtacgtaagtctcctatgtagaatataaagggaagatttcagaaccaaacccttggagcatcagaatttaaatagtgaacagaagcagcatatcaaaggagactcagaaacaagagtcagtgtgagatgaaaagcagaagtgtgtaatttgacaagtcaaagaggagatggtttaagttaaaacagcagtcagaggtaccacatgcagcagggaaatcaaaaaaagctaacttctgccacaccatactagtctcagtggtacaatgaggacagaaactagatttcagcaggctgaggactaaatagaaggtgaaaacattgagattacaagtataaactactgtgaaatttgataagtgaaagtagacagaaaagg

SEQ ID NO: 397454 - DNA, 490 bp, Homo sapiens
ctgaatgtgatagtcgtgggttacatgtggctgttgactgagcataagaaacgaggctagctcaagggagaaactggatttttaacattatcttctttaagtcggctaccatattgatcatcttcagtacagattattccataccctgcctctctatttgtcccaatcctccataacttcaccaaaaaacaccatcttccaatgagttggaatcattttttcaatggcgatagccctttatctataaactgcttatgacatacacttttctacatttaattccagttacattgcttatctccaattctagactatatggaatcagaggggagagactctattttctatatttctgtacctactcagtgcacagtacggagttctccaaagtttgagataataatatcaatagactaattgactattttattgattgattaaataaaatattttgttattaatgtattcagtgaaagaaaatttaacccct

SEQ ID NO: 397455 - DNA, 683 bp, Homo sapiens
aaaggggtttctgaggcctgatatgatctggaacagatcttaggctcagtgtcaggaatgcctgttttaagtcatctaagagctgtgaaaaagtgtaaatcatctaattacccagatttcagagagctgtgagaatccttccaagccaggtcccaaatgagcggcaaggtcagctgggtacccggatacatcagaatctaccgtgcttatctcctgctcaatctcaatttgcttccattgcctctctctttctttgtaattggagacaaaaaatgatcttagctcatctagtttccatttcctgttctaaagataagtaaatagacccaaaaagctaaagtgaagtaaaaaccatgatggggtagacgttcagactaacaccagctaacttgcactgtgtgcttactctgtgcaaggcacttttctaagtgctttatgtaattatcatctcaacctgttacaggttcaattgtatccctcctccctccttcaaaaaatacactctgctactccagtcggctctcttgtcctcttctccttgaaactgtaacctgactgtgatgaggcaatgaaggctctgcaatgaactaatgacaatttaattcattcttgatttataatttagaagatcctccctccaatcaaacagctccccaaaaaacctacctaaattgcttttccat

SEQ ID NO: 397456 - DNA, 1283 bp, Homo sapiens
caaagtctcaagaatgaagaggttgagaaaacagcacttctaaaatctctgctcactacccccaaggagaacccagctcagtgagcattttctcctggatgtttcattccccaaaatttagtcaaaagtggagcaagggaaagagtgagagtgatcctagtgtccctacttaccccaatccctccataactcctgctttcccctgtctcccagtctacactgggtcacaggacccctgagaacaaatcctatcaccccagatacactgtgccttgcacagaggaggtacagaatatagtgtttttgcttaattacagagccacctttgtgctgtgtatgatctctttttcagaatcactactcttcctttttgtacaggacatcttatggagaatgacaatctattttttttttttatgggttaaggggttgcattagtccgttctcatgctgctaataaagacattcccgagactgagtaatttataaagaaaagaggtttaattgactcacagttccacagggcttgggaggcctcaggaaacttacaatcatggcagaaggggaagcaaacgtgctcttcttcacagcagcatcagggataagtgctgagcacgtggctacacttgcttgtccactggatctcatagaaccttttccacttgcccgagaacagcctgggtgaaccccgccacctgactaacctaccttccacgcgggccccttctgctcgatctcgggcattctggagcctcaattcaagctcggcattgcgtccgcacacgcccaacacctttcgccgggcctcttttcctccctccttaatttgcccccccgggcgcatctcttggacctcgctatcggccgtctcatccccctctctatccacatcctctcaccctcttgcacgtgcgcaacgcgctcttcattccctctggttcccctcttcgtttccttcctaatctcgtctccgcttcagctctcctcgctcttcgaccaacgcgctcttcactctggcgtcatgcctgctcccttctcgtatgctctctactatgtcctcgctcctctgtgttcctacgacgcgtttccgcggctctctctccgcgttgcactgcctctcctctctaccctcacagccccgctccctcccatcgcgctcccgcgctcttcgtcatgccgctcttcagcctccgctactcatcactgcgctgcctctatccgtccagctcgacctcccgtctcctcgcatctccgctctctcctctgtctgctgctctctcccc

SEQ ID NO: 397457 - DNA, 382 bp, Homo sapiens
actctagtattctctccattaaatattgctttttgcaaatgggaggatcaagtagtgagatacgacttttttggaatgagggttacttgttcccttggaagcaaaggaggacagtgcagaactgataaaacaaggtttgtttggaagcagtcaaattggagaccaaatgatgtagattttgttatatatgcaagaagatctcagagggaaagctgcagagatttcttggtcagtagattgggaggaagcttgagtacttgaatcatttaagggctcaatcaagaaaacagagctactatgatattatggaataagggatttaggaaaggaataggacttcatacagctgtgggagaaactccagaagtcagagtctgtaggg

SEQ ID NO: 397458 - DNA, 568 bp, Homo sapiens
tgaagtactgctgcgcacggccactgccaacgtgcttgtttgtgtattgtctctcctctttggaacttaagctttatgagcttttctgttttattcacaggcctagaaccatggctctcatagagtagggacacagtaaatatttgttgattaaatgggtggatggatgaataagatcaaggctgaaccttgggaaagaagagggaaatttcacactctgagacaggaggagatgagtgaatctgtatggatatagataagtttgtagtggggaagccttgggggtagggtgggaattgaaggcaatcataacagataccctcaattttctggagtaaggaggcaaggttgtctgccgaggatagtggtaagtatggggctgaggatactcctgagagttgggttagtcatcgaggggaatgagagagggagctaaccaaggacaaggaaaggacccaagccaggatggacaccatgaggcagtcttgtaaggctgtgtgatttgaggtcacaggcaagagcaagaagagcctcgatccggccgcgaatttagtagtagtagtagacc

SEQ ID NO: 397459 - DNA, 471 bp, Homo sapiens
attaagtgacatgttcataatctgcttgattgcatggaaaagaacatggagagaaaaaatttccagaaataccatagatagatttagtagcgtaaaagggatctgaaaacattctaaatgcacaggtaggaattagcacaaataaataagctgaccaagagttaagttctcagccgctcttatcttgactcttaaccaggatctgttttgatatttaatctatgtatgtatgtatgtacctagtaattcatactctgtatccagcaaggtgttcagaggacctatgatgagaagggtctaaacactaactctgttatagaaagccagatggaggaaatagcagatagtctgaccaacaacattgtttgctgtcctggcgaagttgaattctgagagtcttagctgccaggaaagccaggaaagatcttgagagaaccagtgtatctgcaatacagtctttttctgattaaa

SEQ ID NO: 397460 - DNA, 502 bp, Homo sapiens
cttgaactcctgacctcaggtaatccacctgccttggcctcccaaagtgctgggattacaggcatgagccaccatgcccagccaagccttgttattcttaatgtttgagtggtttaaaggtgaaatatattgaaagtaatgctgtgcttcactgaacctgcgatatcatgaaaacccatcttacctcacagctgtgtttctcctcagagccacagtctgtatgagggatttttcagagacagttctcttcctatttttctctgagaccaaatggctttgttcatgtacttttttagtacttgaaataaattaatgcagagttttgatacccccatggagcaaaaggcttcaaaaaaaaggtaagggggccttatttaattaacccagcagtttaaattaaaagctaacaaagatgggaaattttatgcgtttaaaaccaaagaaagcctctgccctggcaaggtgtatgctctggttctaaatgattatgctcccaataaca

SEQ ID NO: 397461 - DNA, 296 bp, Homo sapiens
agggagagtgggtaaaagcaagagttagaagcatttcttaagagaagcatttctttagaagcattcactccacaccaacatactgaccgtgaaaaacgtttttatgaagaatgttaattacctctctcagaacacctaattttctgcagagcatagtttaggaaattctgaaaccagtgaattctatctaaattttgaaagacaggagggaaaccaacaattcagtgacccctaagtgaaaaacattatgttagtttaggtatgttcccgtaactcatttcatcctcaaaaaaaaa

SEQ ID NO: 397462 - DNA, 443 bp, Homo sapiens
ggtaactcatttctggagtttcagctagtttccgatagggaaggcaagaaccttatgtctgttcctgtgcacctttccaggtatttttcctgcttctaagatggtaaagagcaatcttgtgccagggctctattcctaggtaagtagcaagaattgggatttttttgtcttggaaattctccttaatgactacaagttgaaattgacaagcagctggttttaatttctccttaccgttagagcactcagtaatcatattgttggggtttttgttgttctgatctttctcccataggatttgatcaactataacagacttggtcaaattccaatgagaattccaaattaggggaaacaaggcctctgaattggctaaaattcctggcagctgcacaaacaaaaacaaaaacatgtgcttggtttctgtgttcacttcctttctt

SEQ ID NO: 397463 - DNA, 435 bp, Homo sapiens
gcaaaatagtacagccactttgtaagacagtttggcagtttctagaaaactaaacattctcttactatatgatcacgcagttctgtctttggtatttagccaaatgagctgaaaacatatatccacacaaaacctgcagacagatgtttatagcagctttattcatagttgaaaaaagttgaaagcaaccaacaagttccttaataggtgaatgggtaaataaacagtggaaatccagacaatggaatattagtgctaaaaacaatgagctatcaaaccatgaaaaaacttggaggaaacctaaatgcactttactaagtgaaaaaaagtcaatctgaaaaggctacatgcaataatgccattctggtaacatcaaaactatggagacagtaaaaagatcagtgattggccaggcgaggtggctcatgcctgtaa

SEQ ID NO: 397464 - DNA, 532 bp, Homo sapiens
ctgtgatggactgactggggcagagctgaaaatggttaacatctgtcatccagcttttcaattctccatccccgtctttcaggccaatgtaagttagtcacacaaagtcaagcttccctctcctttgccaaatgttttgactctcacctcccgctggtaggaggaataaataatgttttaaaaggactcctcctcctgcggcttttgtggaactatagggtaggtcactggtacgagaaaggagaaacagcgtgggtgcggtgactcacgcctgtaatcccagcactttgggaggcctaggaaggtggatcacttgaggtcaggagttcaagactagcctgaccaacatggtgaaaccccgtctctactaaaaatacaaaaattagccaggcatagtggcatacacctgtaatcccagctacttgggaggctgaggcatgagaatcgcttgaacctaggaggtggaggttgtagtgagccaagttcacgccattgcactccagcctgggcaacagaatgagactcagtctca

SEQ ID NO: 397465 - DNA, 546 bp, Homo sapiens
ggtgggggcaatcactggagtcttgtattctgccatatgctccacctctgtcccagccaataattttatatccagccaaactaagtttcataaatgaaggagaataaagtctttttcagacaagtacatgctgagctaatttgtcactaccagaccagtcctacaagaaatgctaaaacgagttctaaagcttaaaacacaagtacaacatgcactagaatagaacctcttgacatcctaaaactcacagggcctataacaaaataacataatgaagaaaacaacatcatggctggatcactacctcacacctcattattaacattgaatgtaaacgctgtaaatgttctacttaaaagatacagattggcagaatggataaaaaaaatcacaaaccatctatttgcgtcttcaacagactcacttaacacataaggattctcttaaactcagggtaaagaggtggcaaaagatatttaatacaaatagaaaccaaaagggagcatgagtagctgcacttacagcaggtaaaactgaatttaaagc

SEQ ID NO: 397466 - DNA, 381 bp, Homo sapiens
ctgcaacctctgcctcctgggttcaagtgattctcttgcctcaacctcccaagtagctgggactacaggcacccgccaccatgcctagctaattttttgtatttttagtagagatggggtttcaccgtgttagccaggatggtctcgatctcctgacctcatgatccacccacctcagcctctcaaaatgcttacaggcgtgagccactgcacctggctgataatagttttaaaatgatgagccagcatatatatagttgaatacatgtaaaaatgagagttcagcataggctgctcttcaatgaacattcatttcctttaaactgctggtaacataaatgctcttttgcaagtggttaagttttagatggctgatttcta

SEQ ID NO: 397467 - DNA, 469 bp, Homo sapiens
agctgtgaagctagaagttcattagaaatcaacaacaatgagatacccagcaaaaccccaaatatttagaaattaaacaacatatttctaaaaaatccatgggtcaaagaggaaatcacaagagagattagatactattttaaactaaatgaaaatgaaaatgcaacacatcaaaatctgtggcatgcagccaaagcaattcctcagagaggaatggttgtgttagattacattaatagaggaatgcttgtattagaatagaggaaaggtctaaaataaatcaaaattccaccatgaggaggtaggaaccgaagaacacagataaacccaatgtgagaaggaaggaaataataaagaaaatagcagaaattattgaatagaaaacaacagtagagaaaccaaagccaaaacatggttctttgaaaagattaacaaaattgagaaacctgtagctagaatgaacgagaaa

SEQ ID NO: 397468 - DNA, 1001 bp, Homo sapiens
ctgattttgatgaaaaagattatttcagattataaatttcaaattccatatatggttttaccccaaatttacctaggtctctaggtttcaaaacaactttgcacatgtaaaatgattatgcactgtaatacagtaattgtcaattaagagaaagggttgtgaatcacagaggcaagaccttaggagaaaaaaaatcctgatctatgtttctcccctatgaggaaagagacaaagctatggactagcagagcctgaagaccccaagatttttggtctaagaaactgtagtattgcaactgataaagggaagatatgtctagggcaggtttggggtaagtttgagttgtctctcagacgtccaagtggagatactgagtaaggtattagatatatgggactggatttcagaagagtgatctgggaactccaaaattaagaggttaggaataaaaggaagagccatccaaggaaactgatgaagaagctttgagagtaaaggagaataaccaaggtaatgtggtgttctagcagccatgtgaatgcaaaacctgaaagagaagggaaaaatcaattgtgacagatgctgctgaagagtgacacaaataacgacagagaattaaccattagacttagcaaactggctgccactggtgattttgacagtttctatgcagtaagaagagcaaaaggcaagagttacactttagccacaaatgccagccgacaaggcagaaattagatgggtcgttgtcctggaaactagaggatttatgagacatagcatctaacatcttaggactctgattcatctatgttcataatgccctgaaagccccaccccttccctcagacacaaggacactacctgagggagataactcggggggttggagggctgtgtaataactaagcgttgtttgtgttttactttttgccaaggcagactattgataaagcttctgcctaagttaacagatcaaactaagctttgaatagagtta

SEQ ID NO: 397469 - DNA, 463 bp, Homo sapiens
ctgagatcttattgggaagctgctgatcaccagtttgaggttttcctatctactgagagactgccgttctctggcgccagctgtgacctatcattattttagagaggcagtttagcaaccgcctgaccatcacctgatggttgctgacattcctggtgggcgttggggtggaggggggcttctccttccctgctcatttctgactgcctacctatctactgtaacagtggtgctaatttttctgacaagaaaaaagttacatgataaatgaaaattctgtggttgagaaggtgcttctggtggtagaaaattaagaaaatgtgatatgtattgaagtcattcaaattttagacagaatggtgaatttgtgacaaaactgaattaaaaaaattacagctcactgaaacaggttgaaggatagggaatacatgtgaaattcattattaaatatatttttataact

SEQ ID NO: 397470 - DNA, 163 bp, Homo sapiens
gggggtaagtatgcacaataaagctgatgtctaaagtactgtttccagatattcagcaattttaatcatggttataatcgccattgctcttgtcagatattgaaagtttgctgccactgcctgtaaatggagagagagcgcgcgcaaagaactttaaccattc

SEQ ID NO: 397471 - DNA, 581 bp, Homo sapiens
cacatgccaaagccaagaccaaaaccacaggtctagaggtgtttgaataagtagcccgatagctcccctgcatgttgagcactaaaatgttaggggaacatgttctgggctgctctcttcatcaaaattgcccagtgtgtgtcttataacatgcagcctttctcacttccttatcctacttatccttgaagactgtgctgagatgtcctgaagtccttccttaatttcctaggtagaaattatatttctctcccttgtgtcctcaccgttcttcttacataatcctgtcgtgaagctcatcaaccacgttggcagttgtttgcaggttctattctcagaccctagcctcaaggagctcatctagacaaattactcatctttgtatctcttatgtcagtgccttataaatgtttgtgggatgaaactgcttctccagctttacatcacatgtcccagaaagccactgccttcatctcctagattcttagaaaatgcagtatttgaaagaatctgtgccaaaatggaatctcagctttggcaataggacttctaatatcttactgactgagaaggtcggtcta

SEQ ID NO: 397472 - DNA, 423 bp, Homo sapiens
cagcatagaagaaagaaaaccaaatcaagagtaagaaaacctggttttagcattagctgtctgactttaacaagttgcttcagacccagcagattatatttgggttaattaggaatttaaccagctaaaagacagcttttgttttgattttctgccacagatctttgtaaagcctacaaattgaatttgagaatataaatggtctccttttccaactttgtatccctgatcattgttaacaaatgcatgttaagtcatattatagaaacttggaacactttgtattgttttcttgagtatagctctgctgtaatgactaggtagctgataaaagtgtgttctgtaagaactgaaaataaagccattgaaactagtatattgacttactaacatgttgaatttgaggggaatgcataagtgaaa

SEQ ID NO: 397473 - DNA, 294 bp, Homo sapiens
tcgtggcgtatgttccatgtgcagatgagaaaaatgtacactctgtgattgatgggtggaatattctgtagagatgtctattaggtccaattagtcaaatgtaaaatttaagcccaaaacttatttgttttctcccttgatgatctgcctaatgctgtcagtgaggtattgacgtcctctactattattgtgtggctaagtcttttcatagatccagaagtacttgtttatgaatctgggctccagtgtggatggagtgtgtatatatttaagacagttaagtgctgttgttga

SEQ ID NO: 397474 - DNA, 932 bp, Homo sapiens
agtccccggagaactctagctccccgacacgctacctcttggcaaacgagcgagaattggggcgcagagccttgggagggccgttccctcggcgggagcggcccgagcacagcttcacagcagatgcgggcgcggcgggcgctttggtgacgaagtagcgggacctgcaggaggcagaggcctggtggggccgtggacgccacgccgagctgcccagacccttccagaagacagtggggactattcaacggtttccagcagaaactaagccaggtgttcgttttacggagattgctcggctgcagggtggaggctggatgagaacaggcgtcctctcaggtaggcgctcgtggtggtaacgctgcccaggaggagggcacgggttccgggaagacttgcgaggttaaaccggcagctccggagaactgagcgcaagaggtcggtgacacagagaggagtccgggaggccgcatgtttcaggctgaagtcacttggcggggacgtttattgagatgcgaaacacaggaagggatagaggctgcgcagagggaaaaggcgatggactcggttttggaaacgctgatgtgaagtccctacgatgaaaaaagaaatcttccgatttctccctttgaagtctttgcttcttccgttgcaaagaacacagcctatgacatcaggttgaaaccaagaatgtagttctctgaaaatactgtgtgtgggggagggagtttatcttgtctcattccttacaaggatactttgctctccgacaccttagctccctgaaagtttcctagatcgtccatcttttcctcattttttcgactgcaagcaatgaactgttaataattttttacagtttggttttacagccacacactttattcttctttgtcaagtttaaagtattctagggcttgtgccttcccaca

SEQ ID NO: 397475 - DNA, 495 bp, Homo sapiens
gctggagtgcaaatggcacgatcttggctcactgcaaccttggtctcccgggttcaagcaattctacctcggcctccggagtagctgggactacaggcatgcgccaccatgcccagctaatctttgtatttttagtagcgatggggtttctccatgttggtcaggctggtctcaaactcccgacctcaggtgatccgcttgcctcaaactcccgatctcaggtgatccgcttgcctcggcctcctgaaatgctaggattacaggcgtgagccaccatacccggccgtgattccatttctgtaacattctctgaatgacaaaattatagacagggaggacagattgttgattgctagggccttggcgttggggtagggagtgagggggtctgtgaagggcagggctttggggttggggtagggagtgggtgtgtctgaagggcagcaggaggaagatgggattgttggttttggtggtgattgattaaatggcgta

SEQ ID NO: 397476 - DNA, 226 bp, Homo sapiens
gccaacaatctacctacgtgctccgtagttaacaggagccctcgacaatactagagacggcctgccattgatcttgcttcagtcgcaggtctgcataagccctctggaagccctggccatgtttgcttcacataaaacctggacactgcgctatatgggagacacggtcatgctcctccaggtgacatctgaccccagtgtggagtccttaaaacagttgggcaaa

SEQ ID NO: 397477 - DNA, 440 bp, Homo sapiens
acaggcgcattggcagctacactcggctaatttttttttttgtatttttagtagagatggggtttcaccatgttagccaggatggtctcgatctcctgacctcgtgatccacccacctgggcatcccaccgtgctgggattacaggcgtgagccactgtgcctggccgaagattgttatttcactgagtatttgagagtccacagcttgctgtgtgaatagtaaggcaaagtaactgcactcaccttatgttctaatgaaagtagcaatcagtgagtaaatacctatgatgtaatttcttgggggttaataagtgctatagggagaaacaaagcagaataatgggtttcagagggatgaggagaatattgtagaaaggacatttagggaaggcttctctgatttgagtgaagagtgtgctgccattgcggtccgctaagg

SEQ ID NO: 397478 - DNA, 393 bp, Homo sapiens
cccaccagagttgtaaacatacatgtgtgtacgtgcacacagaggcacacaccgtatggtgtgtgatttcagagcaagtgtttggaaccagacctggatataaatcctgctttcaccaactttggctgcatcaatgcctgcccagggcctagtctgcaaaggccctccaaagggattctcctttccatcttctccccactgtctcactatgtgaccttgtccagctgaaaagcagatggagcaaaacgctgccgcgctgcctcctgaatgcctgctcagtgtcagatccacgccaagcacctcacctacatcgctgcatttaataacagccacctatgagatgggcgctagtggcactcccactgctatcaggacacagaatccattcacatg

SEQ ID NO: 397479 - DNA, 946 bp, Homo sapiens
cccttttctcaacaaacaccatttccgtacataattcagttcatattagattcctaaaatcgtagaggtgatggaaggtgatttagagagattatcgaatgggtttcatcctctataaaactttattgcccttatcactggaacttttgtgtgtgtgtgtgtgtgtgtgtgtgtgtgcgtgccattttgaacatctaaccacctcttacccccaaagaacaagttccctgatggcaggaatgtgccacccctgattggggcaggaggaacagagtggagctggaagaggatcaacatttagtaggtgctcatgctacgctgggaaattgacatgttcaatccccatgaaaactttgcttagagatactagtatccattttatagacggggccataatggcctggaagggttggataatgtgcccaggatgatctggaaaggggtgggcccattggtcatccaccctaggcctgctgactaagagtggaccacagtgatggtaaaaatgtaaacaagaaaacagagcactccaaaacaactttaaaaagtggaaaaggtccagaataaatgtccaggtagctacagaatctggccaccactgtcatcagggtgaggttctgccacgagtgactcatctcaaaccttttgtgccaaagcactcatttgatcattgaataaacccacattgagcactgactgtgtgccaggcaccgagggggctgagtgtggtggtagatgagatccagtccctgccttggggcactcaatgtctaatgggggaggcaggcttggaaacaacacgggcagtccccagatagacatcggcacacacaggtagctgccatctaaccctggctgggactcccagcgagggcttccaagaggagatggtgtttgagcagagtcacaaaggcctggtatcgagggagggcagagggtgcttgag

SEQ ID NO: 397480 - DNA, 929 bp, Homo sapiens
cccttttctcaacaaacaccatttccgtacataattcagttcatattagattcctaaaatcgtagaggtgatggaaggtgatttagagagattatcgaatgggtttcatcctctataaaactttattgcccttatcactggaactttgtgtgtgtgtgtgcgtgccattttgaacatctaaccacctcttacccccaaagaacaagttccctgatggcaggaatgtgccacccctgattggggcaggaggaacagagtggagctggaagaggatcaacatttagtaggtgctcatgctacgctgggaaattgacatgttcaatccccatgaaaactttgcttagagatactagtatccattttatagacggggccataatggcctggaagggttggataatgtgcccaggatgatctggaaaggggtgggcccattggtcatccaccctaggcctgctgactaagagtggaccacagtgatggtaaaaatgtaaacaagaaaacagagcactccaaaacaactttaaaaagtggaaaaggtccagaataaatgtccaggtagctacagaatctggccaccactgtcatcagggtgaggttctgccacgagtgactcatctcaaaccttttgtgccaaagcactcatttgatcattgaataaacccacattgagcactgactgtgtgccaggcaccgagggggctgagtgtggtggtagatgagatccagtccctgccttggggcactcaatgtctaatgggggaggcaggcttggaaacaacacgggcagtccccagatagacatcggcacacacaggtagctgccatctaaccctggctgggactcccagcgagggcttccaagaggagatggtgtttgagcagagtcacaaaggcctggtatcgagggagggcagagggtgcttgag

SEQ ID NO: 397481 - DNA, 555 bp, Homo sapiens
gaacaattactttttggctatggggtttccttttagggtgatgaaaatattttcgaatgacatagaggtggtggttgtactacattataaatgccagcctgggcaacatggcaaaacactgtctctacaaaaaatacaaaaaaggccaggcatggtggctcacgcctgtaatcccaccacattgggaggccgaggcaggcagatcacttgaggtcaggagttcaagaccagcctggtcaacatggtgaaatctgtctctacaaaaaatacaaaaattagctgggcatggtggcgggtgcctgtaatcccagctactcgagaggctgaggcaagagaatctcttgaacctgaaggtggaggctgcagtgagcagagattgcaccactgcactccagcctgggcaacagagcgagactccacctcaaaaataaaaacaaaaacacgagccaggcatgttagcatatgcctgtagtctcggctactcaggagggtgatatgggataactgcttgagcctgataggtcaagggtgcagtgagccttgagcacaccactg

SEQ ID NO: 397482 - DNA, 198 bp, Homo sapiens
ttggaaaactatgtaaattttaaaaagacaatgattatcattaggaaatattcaaaggaaagcattattctgatagactatttggctctgatgtaaacaatatttaaatgtcattaacagtacaatcactgactttggattaacaaagttttgtaattaagtattttgggaggataataggagtgtaagaaagccaaa

SEQ ID NO: 397483 - DNA, 301 bp, Homo sapiens
atggcatcataatcttcattatctttatctctgaagtaacccttacatcttaacaaggatgttcacattacagtcgcccagagaatttttccaaaggattcatgcccctgcagactttgactcactggggttcagatgcaccctggtcaccccactgcgaagatgccataaactcctgctttcaacagtgaaggagaaaataaatctttgaaattttccctggggttgttattttctctgagtctcagcttgaggaaatgcaagaaaaaacttcccttgaccagtggggcttgtgatagaa

SEQ ID NO: 397484 - DNA, 516 bp, Homo sapiens
gatgaatgagggaaactgcatgagtcatggtaaagcttcaacattaagaactcaatccttttttcacatttggtgtcagaattaaagaatgagcaaaaatccttttaaatgcagtctactcatctccaatacaaatatgctgttgtatggttgcaactacatttaatttttcatttattttctagagtaagaaaaaaaacaactaatgaggcagaattgattacaatacatttatcaagagttttactgactggcaaattttgccctagagcagaggactacagtgtttgatataatcaaaaaccacctttttgtgatatgaaaggtcttttatttttgagatggagtcttgctctgtcgcccacgctactcgcccatgctggagtgtagtggcacaatctcagctcaatgcaacctacacctcctgggttcaagtgattctcacgcctcagcctcctaagtaactgggattacaggggcgcaccaccacacctggctaattttttgtatttttag

SEQ ID NO: 397485 - DNA, 157 bp, Homo sapiens
gtggacaagtacaaccatctatgctacactgcatattttttcctcccccagactggaccagggaatctctcaactttctagagtatcctgtctccattgacaaagctgaacagtattaaagatcctgctgcctttgttaggcagatttggaaggaag

SEQ ID NO: 397486 - DNA, 472 bp, Homo sapiens
ccagaatatccagtcagcttctgaatgggcttccttaacaggagttgctttgaactcagaatgaggcctgttgcaattgcttccaggatattgcaactttgggggcaaccaatcagagacacatcacaacagtttaactgcagagaactaaatgcatctacctagaatactttttaaacagctctcccctgtggccagactgaggaatgttgattaaactgtggattttggcttttcttgagtaagttttcatacaggataggtttttttcttgctataagaaggtcctatcaatatactgtgttacagaaagaattactccagaattaagagaaaaaagaagtatcaagggaaaatgtattatatgtattttactacatatatatattttatatacatgcccacacatggatataatatataagtatgtgaactcatagtaatctttcaaacagtgacatttcattatatt

SEQ ID NO: 397487 - DNA, 657 bp, Homo sapiens
gaggttttcattatcaaagacaagttggtcctgctttcttgagtttaataaaaacagatattgctgtttctggtgccctctagagtgtttttgatgatagtggttataataagagatttgaattatagtttcattgcatttgatgctaagtttctgttcattaacagtgattagttaactcttcatatttgcccatataaaggggaagacagatatgaataatccaaaatataattttttggtttttttttttcctcttgatccaggggaaaggcagttcagatttaactaacagtaaatctgtaggggtctgcagcaagctctatccttgcctcttcagaggaaaggattcggctgaggggcagaagtaggtttaaggcagagggagagaccaagggaagttttagggcaggagtgagtttattaaaaagtgttagagcaggaacgaaaggaagcaaagtacacttggaagaaggccaagtgggcggcttgagagatcccagtaccctgttcagcccttggcttgggatttttatgcactggcttggttttggggtttgcatttctcctcccttgattcttctcttgggggcaggctatctgcatgcatagtggcctgtcagcacttaggaggggccacatgtgtagtgcctttac

SEQ ID NO: 397488 - DNA, 578 bp, Homo sapiens
cgtggacttcattcattgtgttgctcacatgcaggaaaaaaaaaaaccagaatgcaataaggataattcattgatttgtggggaaagagaaaattcattgttttggggggaaagagagaatgtattgatttgtggggaaagagtcaataagtgaatgtttcctgttctaggactggctttgccttgtcaataattgattttgttgttcagaatacatttcaaaacctttaaagcagtgtgcagttaaggatgatatttttgcctgaaatgactactttgcatcatgtagaaggaatagtgtcttttaaaggcaacagatgcaagtctaggaccccagagctttagaaggctctgggcttcgggtatgtgtctgatgtgttgagagttgcaggggacgggagggatgtccactgtgggccagtttctaccagccaccgagaagctggaatttgtttattcatttatagagcaacaggaactggaatcgaaatctgtcagtccctatgtgcagggtgtaattgaattgacttctctgctctcaattggaacttcctttgacctgtagtgagaacatttta

SEQ ID NO: 397489 - DNA, 571 bp, Homo sapiens
tagatttttaagcctaaaattattctattaataaaaaggaaggtcatatgaagtaattgtttagcagttgattctattttaaataaaaggaacaaacctttgtataatactctctatgttccaagcccattataagcactttacacaaatattagttcatttaatctttactccagtcctgtaagatagggacattattattcctatagtgtggaaaaggaaattgagacacagagagactatgtaacttgtccatggtcacccagctggtacatgacagaaattcagggaaaaaataccatcacaccaattgttgcaattattttaatttaacattcgagtcctgccactgctgtttgtctcagaataaattgttccgtctttctaaatcttagaaacctcatttataaattaaaggtggggggattctatcatctataaggccctttcaaatactcttatttattgtgtacaaaaacccctgaaaagtcacttacaaaaaaacttgttcatgcccgtctgaagatttacgaactccagctttttatctgactgtgcattctgacaattt

SEQ ID NO: 397490 - DNA, 289 bp, Homo sapiens
tcccccaggctggattagtgcctccgttaggcctcttcagtgccctgggctacctctaatttagcacatcttcctgtattttaagtatctgtgactgtgtccctaccttggagagttgcttgagggtcagattcatctctggatcctggattattcagcaagcacaagacaggcctagcacaaatgtgtgctcaactcatgtgtggggaattgaagacagaagtcagaggaggaataagaaatcagagaagtaggcaaaaactgcctccattcaacgccctggttctac

SEQ ID NO: 397491 - DNA, 420 bp, Homo sapiens
tcagtgctttatatcttcccaattttatataacactttttctccccaccaaatttgcacacacccacctctccctcctccctcccagaggcctagtccagggctaagtaaacaggctacctgcttttatggaacatagataccttatagataccttttgtaggcggcatctgtgattccgtgattgcgtctcgcgattgccaataagaacacagcacacaagcaccatcacacccacacgacaaaacgccggctgcacgggactgcagccttattgtcacaacattttgagctttctgacaacataagctgcacttacaaagaagtcagagcaaggaaagaaaagtctcaaactgtgctagttagttggtctagcaaggtactgtgatagcaacttaagtgggggagaatcaggaaggca

SEQ ID NO: 397492 - DNA, 401 bp, Homo sapiens
cttttcacacagtctctttctgtagtgccaagcctagcattaattcccattgatattggtataattatatgattttttattctatgagttgcttcttatttaggttgtatgagtgtcaagtttgggccataccttttgtttcataccttactctcatcagcacctttcacccggaaaagaaatgcagtcaagtgagacgggctctaccacaaatgagctattttatatatggcatatgaaactaatagctcgagtgtatttgaagcttcttgcgataactaactacatggccaatcaaaacaaaggtgcagaaaacagtattattatcctctgtgtgctctgacccttagaaagtagatagttattgccaaaccacccttccaggtaaagaggatgctcct

SEQ ID NO: 397493 - DNA, 203 bp, Homo sapiens
aaaattctgaaatctcctagagttacaaaatatgtagaatcaccattttcagactatcaaagggtaatacaaccctgccctcaaaagttaactcttttggcttagtggggtggctcacattcccagcactttgggaggtaggaggattgcttgagcccaggagtttaagaccagcctgagcaatatggtgaaaccctgtctct

SEQ ID NO: 397494 - DNA, 275 bp, Homo sapiens
cccgtgttcccacaagtggtcctgattaggaggagtgataaaggaaggctcagtgtgtgttagagtagtgagaaagcttggtagagaagtaggacctgagctgaaactcagctaatggtagaatttgagtaagcggaggattttgagcaggatgtttccagcagggggaagcatagcatatgcggcagtaattggagagctgcctgattaaatcaggctgtgtgtgtagcagaaggaaaataaagttggctaaatgaagtgggcctaaattatag

SEQ ID NO: 397495 - DNA, 549 bp, Homo sapiens
ttgggtgggttccataaaattatccatccttgagatatgtctaaatacatattgatttttatattatttgttcacaattatttataagcttatatcccagtacctttttaaaacaattttattttaagttccgggctacatgtgcatgactcgggaggtttgttacataggtaaacatgtgccatgtttgtttgctgcacctatcaatccatcaacccaggtattaagcccagcaatgcatcagctatttatcctgatgctttcccacctcccacctcaccccacaacaggccccagtgtgtgttgtttccctccctgcatccacatgttctcattgttcagctcccccttataagtgagaacatgcagtgtttggttttctgttcctgtgttagtttgctgaggataatggcttccagctccatccatgtccctgcaaaagaccctttctaagtgtgcaaatatctccctctggaatttatatgaatgttctacaattgttcccagtgaaacttttaaatatcctctccacaaaatggtaaattattc

SEQ ID NO: 397496 - DNA, 275 bp, Homo sapiens
actcctgacctcaggtaatccgcccaccttggcctcccaaagtgttgggattacaggcgtgagccaccgcatccggtgaaaagtttctaattttttcatgaagtttactctatcaacttcttttgtgaattgtgtttttttggtcagatctaagaactcttccccaagctctagatgtgagaaattctgttttcttctaaaagttgtatattttacgcctcagtctgatcattttgtgttagaatttgcatttgcagataacatgatggcccatg

SEQ ID NO: 397497 - DNA, 459 bp, Homo sapiens
tgcattttagttgaccagtgtttaatatttaggaatagttagtacctaattcatgatgacctcttgttctagcatattgaaggccagctatcattaaagcagtgcttttcacagaatggttttgctgacctcctaaatagaagtgtggatggcagaagcatcaaagaggatgatcacaagtggggaaggcagaaattttaaaagaactgactgaagtaactcctctactaatgtgacaccatctctatcccccacaaacccttggaaatactagttttgggagaagagaggagtatggtgactagaaagtagctataacctgttgatcattgtatactttataaggcagtgagtcagaagatatgtttaagaaatggaaggttgttggagtagctctgatgacagatgcttatcataaggcaaacttaatatatgttccacagtgttcagaataccact

SEQ ID NO: 397498 - DNA, 196 bp, Homo sapiens
gaaaacatctctaagccaagtgactaaaaaattaatttaaggaataaagaagcaatttttttccttaaagaaatatcagattattttagtatttcccaaatgcacattttatatttctctaaatagttaattagggcattacatgtaatttgaaatcaaaaatatcagcattaaaagtaaacatagaaatcaactg

SEQ ID NO: 397499 - DNA, 1591 bp, Homo sapiens
agcaggagaggggccagttgggggaggttgcctgctggaaggggaagctgaggagcgggaggagggcttgccaagactggcattgcaggagacttgtctcaggtgtgttcccagaactcttgcccctggagatgctgcaggaaggaaggggttatggtcacttgggtttagacgacattctgtgaacctcatgaagaaattagcatattaaagactctgaaagtagagcagagaactcagctttaacctgctcacctgctagttttcgaggtctcgctctgttgcccaggctggagtgcagtggcacagtcatagctcacttggagcctgaagctcctgggctcaggcagtcctcctgcctcagcctcccaagtagctaatattacaggttcgtgccaccgcacctgggtcttgctgtgttgcccaggctggtctagaactcctaggctcaagcagtcctgtctcagcctcccaaagtgctgggattacaggctggagccaccatgcctgtccaagggtcttttttatactatatgaagtattccttctccagctattcttgttcgtttaccagccagtgaagattctcttgagggctgaacaatacagatgagtatgggggcccttgcaccaaggaaaacagcgttacatttaattaagtgccctgtctcaaaccccaaggccccacagcttcttcatttggcccctagttcatcctgctttcctttgagccacaggattttaaaatatttcaatcttattttcatatcaatttttctttgtttcactacaagtacagtcattgtttaaccctatcaggactaacacaatatttcacgtaactaagagttaatttgcccttgtgagtccttggaatttaagccccacacacacacacttagagcactgttgctatgggaacatagagtcctccaaacaaaagtgaactttttcaacatgctgtttgtaaatggaagccttcccaagcagacactgtgttcctcttttattttgtattttgcacattatatattttgattagattaaaatggaggaatttgcaggatgtgttgtcatatctagccctgaaagttaactggttacagttaccaaatgttcacagctagcgccattgaaagcattgactgtaaaccgctgtactgtgctaagcctttttgtttgcactgtttggcttaatcctcacaacaacactgagaggttttcatttgatgagtcatatttaaagaaaaggaacccaagacggggagtcaggggcacaaggtcacagctggtaatgatgaccctggaatgtcctcacagctgcacacctgcaccgctcacaaacacagctgaccgtctcacagctgcacacctgcaccgctcacgagcacagctgaccgtctcacagctgcacacctgcactgctcacgaacacagctgatcgtctgcctcttcgtgtgagctgagctccgaatctcagctgtccaggctgtctggaaatcatcagccccactggctggatctcaaaatttactttcaaaaggctgatggagtgttttcaattaaacatgacctaaaattaagtaataaa

SEQ ID NO: 397500 - DNA, 416 bp, Homo sapiens
ctggaagactgagggaatggggtgtggatgcctcctctcggtggctgtgaccctctgggttcaaggagggagaactaaacagctgccaagactcatcgcaggccctgggtgcctacacactttgaatcacagctactgtaccgtgctgggtcactgccaggaatctgaggagacaataagctcttattttaaaaagatttgccagcatacccgggcttttacaaatgcttgataattattgccaaaaataggtattggcttagggtctccagtgctgtcctggcagctccagtgatgaggggcctgcaccatgtatgcagtccaaacctcgccacagagggggcctggaggtcagcaagccgggcacccctagaccccacagggtgggcattgtggaccacgcctttgctgctcga

SEQ ID NO: 397501 - DNA, 188 bp, Homo sapiens
taacccaactactgtaatctttgtttattctatctttttcatgaacatttaaaaatagttttaattatactgcataacattctataatttgctattttactttataatgtgttgtttttccttacatctgtgcttttccatgtaactatggaatcattttaatgactgtttatattggctgcataaaa

SEQ ID NO: 397502 - DNA, 591 bp, Homo sapiens
ctcttaggccagtgcatttaaaagctggtgtgtgttcactctctctcttctctaccatagtgacctgagagccacatgttaagatcatagatggaagggttctggatccctgcattaccacctggaagaaagctgctctggagggtcaactggataacaacatactttgtgtgaatgagaaactttgtggggttaatctacagagaattcagaatgaagttactatcttcgggtaagttagcctattctgactaatacactattccataaggtcagctctgtctcgggcggagttaatccctctttttcgtgttcccactgcatacctacatgatggcactcaatgactatactgagatctatctcagtataatcaaatagaaatagtatacacatacagtatagaaatagagtagtaatataccacataatgctataattaccgtaagggaaggtgaccctgatgcattggaagtactttagggagaatgtacaaaccagttgaccattgtatgctaagcttttgttgaaggaacctattagtatgacttccccttaagcaaatcttctttttccattaacttttcttag

SEQ ID NO: 397503 - DNA, 367 bp, Homo sapiens
cgtgattgcaccactgcactccagcctgggtgacagagtgggaccctgtctcaaaaataaacacataaataaataaaaattaaaataaattcagtggaaaagttagaagataaatttgagaccatttcccagaaaagtagtataaaaatgaacaacaaaaaagaaaatagcaaagtgagtgcaattcatgcaggaaatgtaatatccaactaatagatgttccagaaaaaggaaatacatggagaagaagaaattaataaataattttaaaaattgccccagaaatgcagtactgtgtatgtatttccagattaaaaggatcttttcgttgggcatggtggctcacgcctgtaatcctagcactttg

SEQ ID NO: 397504 - DNA, 342 bp, Homo sapiens
aaaagttcatgtattgggaacttaatccctaatgcaacaatgttgggaggtagggcttaataagaggggtctgccctcatcagtggactaatgtctttagtaagggagcaggcaagttaaagtgagagggagttgttataaaagcaaactctgccaccttgtatgtgctcactctctcctcctcctcctcctcctcctccttcctctctctctctctctctctcatgcttgcttctaccttccaccatcccaccatgggatgacccttgcctgatgctggtgccatgctcttggactttacagactataaaaccattagcaaataaacttctggtctttata

SEQ ID NO: 397505 - DNA, 405 bp, Homo sapiens
agcttccaatgaagtagatgagctggtagatttaggggtgtgtgggtgtgggtgcgggtgtgtggtgggggacagggtaaaatagttgggggttgtttactcattgctttgcagctttagagttttggttgaatccatgtagctaaccccagcagttttctgtaatgctggtaaggtagtagggatcctgagccaggcagaatttcatctctagcagcgtggaaatattcatcggagactgtgggtaaaataggcatgcaagaatttaataaaaaattaatgacctggccaggcgtggtgtctcatacctgtaatatcaacactttgggaagctgaggtgggaggagagcttgaggccaagagtttgagaccagcctgggcagcatagcaagaccctgtctctac

SEQ ID NO: 397506 - DNA, 480 bp, Homo sapiens
ttactattttataactatatcactatccagttcattggaagacagatttgattcttttaagacaaatgtaataatgcgatttaaaaaccattgcgctgaatttgatccaccatgctgtaatccatctgattgttgaattttccactgttatgacagctaaaaacaaactctcagtatactggaagaaggaactgaggaatataaagacagtctaatttatccatatgcctaaaaagacaatgtcatatggataaactaaatgtcacctttttttcctttttaaatattgtaggctgaacgtctttcaaataaaaacacaaccttaagaaaatcacaagaaaccagatcaaagacataaatagaacaaaatatgcacaagagatctcatccaagatcaaagatgtgaatgtaattgccatgaataagaagtgcagagctcaccagaacagaatgtcttcggtgcacagagaattataccca

SEQ ID NO: 397507 - DNA, 349 bp, Homo sapiens
aaaaatatttactagacacctgtgataagagctataaaatatataaattacaaagttctcggtctttgaggccaaacgcggtggctcacccctgtaatcccagcactttgggaggccgaggtgggcagatcacctgagatcaggagttcgagaccagcctggccaacatggtgaaacccagtctctactaaaaatacaaaaattagccggacatggtggggggcgcctgtaatctcagctactggggaggctgaggcaggataatgtcttgaacctgggaggcagaggttgcaattagccaagattgtgccattgcactccagcctggtcaacagagtgagactttctc

SEQ ID NO: 397508 - DNA, 230 bp, Homo sapiens
cacctgacttctttcaggtaacaagcatgacttatttttgcagggggtctaaagcttgaccaccgctgttgtatatgtcacctttcctagttccttctcagaagtccagcattttgacagaagcataaagcagggcacagggtcctgcctttgcacacccttcctgtgcccattgtcctatcacaccacctccctggtgcagccagactctaggccctgggccctccagt

SEQ ID NO: 397509 - DNA, 186 bp, Homo sapiens
gacccagctcgctcatgggcaagcagttgcttcacctcagctgctaatttgtaggatgagaagagtttagattaggcagctcctaggttctttcagtgattgagagtgctgctttttcataacagatttctgttgatggtgtgatttggaagatgaatctcaatcttttgactttcctaaggcctg

SEQ ID NO: 397510 - DNA, 444 bp, Homo sapiens
acctcctaccccacgccagcccccagtctccttgccgttacttgaaagtgccaggagagctcctgccaaagggcctttgcacatgctgttccctctctctgcaatactcttccccgtgtgatcatacggctcatgctcccactcccttcgggtctcagcttgaatgtcacctcctccctatgaccttccctaacctttcgtgtaaaattctacctctcccttcctcagtctcttgcttctcctgctttgttctggagaataccaaccagcaccacctgatttgtaactattcccttgagcacattctatctcagccacgggaatggaagcttcatgcaggcggggacatcatctgttcagttcatgctgtagcccagcaattctgaatgattagattgaaattggatccaaaaatatcacaaatgagataacgtaacttgttga

SEQ ID NO: 397511 - DNA, 510 bp, Homo sapiens
gaatgcatagcttgccatagctgagggtgggcagggttgagtacagcctgctctctcagcacaactgtgcctgaaatgtgagcggtgtggagagctggagactcagacaaaaacaggtgaaggaaaggctcttcaaggggtccaacgcacttccctagcccctgttttgtcccacaccacagcccaggttcttgctgcagagggagcccagctgagcctaggatccaggctgcttctgcgaacctgaagtcccccaggacacagcggggccttggggcttttgaaggaagcaagtggccaagggtgtgaaagtcatgagaaacccgagcttaaccactgggtgattgtgcacggtcaagaatttcatcatgatgaggcataggaaggaacctaattaatatccagggaagccacccacaggaaggaatttctttcccagaaagctagtatgatttaatattagaaaatctataaacatgatttatatgaataaaccaagaaattttttta

SEQ ID NO: 397512 - DNA, 766 bp, Homo sapiens
gaaaattatttgtaaacgcatttaaacaaattattatttctattttgagacggagtctcgctctgtcgcccaggctggagtgcagtggctggatctcggctcactgcaagctccgcctccctggttcacgccatcctcctgcctcaacctgtaatcccagcactttgggaggctgaggcgggctgatcacttgagcccaggattttgagaccagcctgggcaacatggtgaaaacccatctctacaaaaaatacaaaaattagctggacgtggtggcatgtgcctgtagtcccagcttctctgaaaggagactgacgtgggaggattgcctgagcccggggaggttgtagcatgtagaggacctgagaaactgtttttcataggtcacaacaacatgacaaataataacacatagactcaaatgggccccctcacttgattcaaagccctggattattataccatcctaccaaatagcaatcaggcactgccaattgggcatgcagctccttgtctccctccctcagagtgctatgaaagacctagggctcatatatttgttcaggcaaagtgagtgtatctgtgccactcctgttgccacacacccttgcagacagcctcgggtgcacctttatatttcaaagttgcctcagatactccaatctgacctgatttgacctcagtaaaaaacactggtgaagtaggtatggaactcacctacctgcaacccctgacgatggtcttatccatctccctttataatctc

SEQ ID NO: 397513 - DNA, 484 bp, Homo sapiens
cagcacacaggaaaatgcagtttagtagaggtaaagggtgggtagaaatggcattttttcccggaggcctttcctgtaggcaactatagttaaggagtgccctgtctgatgaaaactctgccaaaggatttcctggctgaggaattttctttccaaaggaaggtgggaaggaaatcagcccaaagcccgtgactttcacacttcaggcaaagttgagaggcagttagagggaacagggttgaaagcaacaaaaagtgccattttgatgagaacttcaggtgtttgttccaacatcaacctccctcccatacacaccaggcagaagccatgacctcaataaagagggagatcggaggacttcctgagaagggcgttttgcttttatgtctcccatgcctccagaacgtggaaaacacatgccagctcatttaacggggcaccttttctctccgtctagacactgctctctgctgggcctcctttc

SEQ ID NO: 397514 - DNA, 576 bp, Homo sapiens
aacgacgaattcacccaacaacgcatttctcagaatgaatccctgttgtcaagcgatgcatgactgtgcctttgatagttccttacaaattgatcttgagtgtgtattcatgtgtaacctagttactgaataatgcatctcgaaatgttggattctttttgcatccgcctgtgctgtgctgccttccatggagctctatgatgactggcacctcctggtggaggcatccttcccacattacccccagtaagagcaacaacaggcaaggctgtcctcttccccaggagggggaaggtaaagatggagagtcaggagaaaccaagagtttcccagtggcagaagctccggctcccctgaccacacagtgtgggttttcaccagagcttgagccttagcatcagccactcctgcgttcaacaacagctttggtgcttagtggctgggtgatgctgacccaatatagatgtcagtagagtgtacattttgcaaggaaaaaagctactgttctcatttattatttcatatgcttgttacatctattgctggataaatttgtgaatacgcacatcttagtga

SEQ ID NO: 397515 - DNA, 435 bp, Homo sapiens
caaaaattagccaggtgtggtggtacgcgtctgtaatctcagctgaggcagggaaatcgcttgaacccgggggacggaggttgcggtgagctgagaacatgccaatgcactccagcctggatgacagagcaagactccatctcaaaaaaaaaaaattaattcctcatttctggctaataaatttcattcctttttattgctgaatgaatattccattggatgtatatactacattttgttgatcagttcgtctggtgatgaacacttaggctgtttctactttttgtctgttgtgaataatgcttaatgcttctgtgaatatgagtgtacaaatatctgttcgcatctccagcttcaattcttttgtatatatacccaagaaagatatttttatttaatgttttcttgaaatataattcacatactataaaaata

SEQ ID NO: 397516 - DNA, 642 bp, Homo sapiens
actggttccagtgcctgaatccacttccttcctcttcccaggatatggtatcatcctgtacattccaccataataatggggccatctacttgcagagttactgcttggatcaaacaagataatgaacaaaaaagacctttcgttgtaaaggataccatcatacaaggttaccgtcagagaaatgtgttaaggatcggcagaagtgccaactaaacacaaaactattgaaggatgtaaagaaaggtatagtttacctaattgcagttagcttttcatttttcaatacggaactgcttggttctgaacaggacaaaagttcatctgataacccacaggacatcacccaaggaccgtgcaacaatgatcatctaaggaaacaagcatcagcatctgagcccaaacaacctacaggtcagtaacagcataaagaagcttcaatctcaggtgtctgcatcaagcaaggtttaatcatagtaactaaaaaaatgaattatctgaactaactttggcaatgtctttgaaaaaaggtaatgatctctactggttgtcttctcagacttccctaaatgttctacagacacaatttagcaaaagaaagtattaagaacaacagcctagaatggtggctcatggctgtaatcc

SEQ ID NO: 397517 - DNA, 302 bp, Homo sapiens
gatataatgtgatatgcctgggtgcctacaaattcttgatatactatttttcaaatagcaagtgataaatagcaaacaaagatgagcagtgcctatcttggctttcttcctcaatggtggttctttgttttgggcatctttcttcttactctgttttgaataacatatttcatattaaacacttttataaaatttccttattggataataagaaaatacaaaaaaggacaaatacaataaaaaaggaattttaatagttacataatatttgtctatgtcatagcttatagtatatcaaaatt

SEQ ID NO: 397518 - DNA, 357 bp, Homo sapiens
caggtgtgagccactgcaccctgcccccatttttaattaacaagcaatttatggggagatatttgagagaaatattctcttaccacatttttactcactactcttatattctagtgatgattcttgcctcaaccaatagctactagttttcaacaccaaccacattccaggtgctgcactaagggctctgcatgccttatccctatgtcatagaggaggaaaccaaaggtgcagagtgaaaaaatggcccaggcactcccagggagcaagtactggaggcggaggcagacagctgggtgcagtggctcacacctgtaatcacagcactttgggtggctgaggcaggaggatcgcttg

SEQ ID NO: 397519 - DNA, 409 bp, Homo sapiens
taaccactatagaatcccaatgcgccccacacctactgcccgtcgttttgcttccccacccctcttttatttatttatgcatttttttgagagacagaatttcgctttgtcgcccaggctggagggcagtggcgcgatctcggctcactgccacctctgcctctcaggttcaagcgattctcctgccaaagcgtagtacccaagtatctgggaccacaggtgcacaccaccatgcctggctaattttcttatttttggtggagatggggtcttactatgctgcacaggctggtcttgaactcctgggctcaagcaatccccccactttgggctcttaaagtgttggattacgagtgtgagccatcacacctggctgtctttttttttttgggggtactacgcttgggcg

SEQ ID NO: 397520 - DNA, 177 bp, Homo sapiens
gggggaaaaaacccacgtttggtcacagaactgttctgtgttgaagattgtgattattgtaatatggtgtgagcagaggaaaaacagattttgttttcccacactcacactaccactgtcaaaaatatttataagtgttagaagaagcttactgcattcatcactacgaacttatga

SEQ ID NO: 397521 - DNA, 655 bp, Homo sapiens
actagaatatcatgcctccagcacaggccaatgaccaagtgtcaagatgttgtccagtaggtctcggcactagctcgaatggagaattagatggcttccctggttcttggcatttaaaattctttgatataaaactacaagtatcgtacatatctttggacagtcagttttataaattatcaagataaaaagataataaggactatattatttatagagctcaggacttcaaacatgataaaagtattaaggaagcatcaaagacctcttccttcaatgttttagaagacacaaagacaaggaaaaaaatgtttttggcaacataggtacaaatgtactaaaatcaagaagttcaaatagttgtgattggatcatgtttaaaactctgtaattctaaacacatacaatcacacaggctttcactcgtgcaaggcaagaaagttttgttattggaaggaagttggcagaacagggtggatagtttgacactggatgacaacaccaattatgccagatgcagttctgcaataagctaactgtgggtccccaaccggtaatcaatcatgtgactgtggccactaacgggctaggggcctgccaaatttcacatgactgatagttatgaaatagcttcctttccgtgtgtctcaaaaca

SEQ ID NO: 397522 - DNA, 437 bp, Homo sapiens
atgcatcgatgccactgttcttccaagcctggcctgttaccttgtggcacatgagactagcagaaacacaggcttgatgtaaacaggcaaaagtcagtgccttttcttttagtccaactggagtagtggaaattaagaagaaacaaaatctgtaaccggttgtaattaattcgttgtaaacaccactgcactaggaccagaccatctcttttcaaaatcaactctctgcccgtcaaggagaaaggctccacggagggacatgatgccttttcccacctcccctaacactccctggcctccgggctgggactcacactgtcctgcggctgccagaattcagtaacagcttcatttgttcattgcattatttttccagttgccccctagttatgacaaggggtaactatttttttccatttttggtggagataaaaagt

SEQ ID NO: 397523 - DNA, 608 bp, Homo sapiens
ataccaggaaaaccatttggagatcaatgctttaaaggagaaaatgtgaactagtgggtgggagacacaaggaggcactttgacctgctaacacaaggagaccacactgacagcaagctatgccaatgacaggggcttcctacgtctagaagcattccagaaagggcacaaaaatgtacaaggggacatcaacatcgtatggttctctagcagcattttccaaagtagtttccaggtaacatgattcccaggaatcagggttccttcaaaaggaaatacagaaaatgctatattctgtaccctgagaagtcctgtagttaagcaaataaaacaaaaatgaaacccctcatgggtttctctaacctagtttttttgctaagtagccctttttacgtctcatactcgctggcatccctgaaacttgtgtttggtggcaaatgcttcccatgggaaataccaaactccactatctttctcagttcagcctctccttggctgaaataaccagatacagtttccaactctaagaaatacttatggttgaataagattaatgggagctagactggtcagctaaaagaagtaatcatctgaagcaagcaaaggga

SEQ ID NO: 397524 - DNA, 462 bp, Homo sapiens
cacacagaagatgctcaataaataccaagtttaattaaagtaggagtgcacagctagtgggcttgggagccatttaaacctagatacctggatttgaatgccggctcagctgtttactagctgtgaggctttaagcaaatcacttaacttctgtgtcttgttttcttcacatgtaaaaggggatccttactaaaattataggttaagataatgtatataaaccacctagcatgatgcctgctgaatagatcattcttgaataaagctgtgtattttccctgttttataaacttaataagctgtatcaaggcaaataagaagcttgtctcaaaagtaaatacaggctgggcatggtgactcctgcctgtaatcccaacactttgggaggccaaggcaggtggatcacttgaggctaggagttcaagaccagcctggccaacatggtgaaaccctgactctact

SEQ ID NO: 397525 - DNA, 266 bp, Homo sapiens
atgccatctctgatggacaacatgcacaaactttctgccttttcctatctacaagatcagagtaagtgtccaaggtttggtttattttatgtatccctaaatacagaggtacccctgagttagggtgacacagagcattctagaagcaaccttatagagaaacttaattgtaggcttaatcccaaaatagaaattcttttcactgcaaattgtcagtgtgatttggcatgccccaaaatacacacttgggtgccattggtcatcct

SEQ ID NO: 397526 - DNA, 491 bp, Homo sapiens
agtcactgggaacataaaggtgagcagtgccatctctgtctgtctttaagaattccgtctttgctgggtacggtggctcacacctttaatcccaacactttgggaggccaaggcaggtggatcacctgaggtcaggagttctagaccagcctgatcaacatggagaaaccctgtctctactaaaaatacaaaattagctgggtgtggtggcaggcacctgtaatcccagctactcggaaggctaaggcaggagaatagcttgaacctgggaggtggaggttgcagtgagccgaagtcaaaccattgcactccagcctaggcaacaagagcgaaactccatctcaaaaaaaaaaaaaaattcatctttaactgggtgcggtagtttatgcctgtaatcccagctacccaggagaccaggagtctgaggctgcggtgagccatgattgcatcactgtgctccatcctgggtgacaaagatgacccagattcta

SEQ ID NO: 397527 - DNA, 291 bp, Homo sapiens
aagcagttatacagactcagcatcgttaatgatcagggaaatgcaaatcgaaagcacaatgcgataccaccatgtctgaccaacaagaactcttttagtagagtggtggagggggttcaagagagaatgggaggaggccgggcatggtggctcacacctgtaatcccagtgctctgggaggccaagttgggcagttcactggagatcaggagcttgagaacagccttgggcaacatggcaaaaccccatctctactaaaaatacaaaaaattagcagggcatggtggcatg

SEQ ID NO: 397528 - DNA, 531 bp, Homo sapiens
tcgggaaaaaataaacaagattattaaagccccaaatttaatttctctctctcaggaatgttttactttctatacagcatgcccaacgaactgcttttctctcacacacacatacaaagcattaagcattggaaggagttcaaatcttctcaagattctgtttgcattaaaacaaagactggagcagccctatctacataccagcttggtaggtatggcatgagccaccaccaacccaaagtgaacaaagctcagggttggttccaagtttcaggactacacgtggactatgaaccctgggagagaccagcacatcataaggtatgacagaaagccaggctgggacagaaaaccagggtatcagtctgccccaaatcaaaatgttcattaaaattacttactcttcactgatgctgatggcaaaaagccatgtgtagaagaaaaacgaaagagccactgttctgcctggaacttctctgctgtcaattacgttaacttgccttaagatgcctgctatttgaagagtgcgtg

SEQ ID NO: 397529 - DNA, 501 bp, Homo sapiens
agtcagattcaggccaatggtattatgtttagctgttcatgaactagtagtttttcttatatagggtcttggagaaattgtggaattttggaaaaaaaaacacaattttccctatgtaatgggagttctagaagcatgctagataaaatgtgctagaaaccctcaaagaatggttgtagattatcatagagttcagatatacagctccatccgtctcacagttggtagtaaagggcagatggcccggtgcagtggctcacacctgtaatcccagcagtatgggaggccaaggtgggcagattgattgggctcagtagtttgaaactggcctgggcaacatagtgagacctcatctctacaaaaaaataaaaattagccaggcacagtggcacgtgcctctggtcccagaggattgcctgagcccggaatgtgggaggttgcagtgagctgagattgcaccactgcactccagcctgggctgcagagtgattctgtctcaaa

SEQ ID NO: 397530 - DNA, 1126 bp, Homo sapiens
tagccttcttgtagagggcttatgatcttagttggattagttaacaagtttttgttcagaaattggaaaatactagtcaccattactttcatctgtacttgaaaatttcgtctctcagacatccatcatctctaggtgttggtgacaaggcttgacatctttctagcagttgactttggcttcttaaattccttgaactaattgagagttttcttaagcagagcttagagggagtacttgcagcccccaaaacaaaggcagtttttaaattattgcctatagtctttgttattccagctgtcaccaaatgggattttaggcatttacaatcgtaaagggcaaaacgcaaattagggatgacaaaatcactcactgtggatgactctttaatgcttacctcaagacttcttagagtgtgattatcaccagtgacttcattgcctcttccagtattttgttaacctagtttggttccccctaaagctcttggataggccatttaaaagatgtacatgctgttttatgagctaaagatcatgtaacatattaaataatattttaaaaattactcataccctgttacttaacttccagtcttaattagaagagtgtgaactttcatcagtaggtcatagaaatagtacacacagcagcaaaataagaaaaagtatacttccctcttgatttcctttttctcccatgcctcccatgcctcattctgggttgaaggaagccagaatcgctttgggtaatagtagaacattatagtgactttaatttaggattttttatttactcttttatctttttctttccccacaccctgtaattatatcctaaattttaaaataaatgttcttgctgtttatggagcctttttattttatagtaatttcatatttttataagtattcttttattctgaaagtaatccttctatagtaactaggtaagttacatggaacactttcccttttccttaactaccagtgggcagttgatgaatgcacatacatccaaagaaagcttttccacccattttaagaatttctaagaaggtaacatttgtattggaatgctaatgccttgaagctgcatgttttgaaaaaagtagtggaataaaacc

SEQ ID NO: 397531 - DNA, 448 bp, Homo sapiens
tcagattttctcctatgtatctcttcaccatgccctacctactcttattgcagcatgtgtcttgctgtcttgtgctaggaatctaccatctctctttccaccattatgctgaacactccttatgtgtagggaacagattttgtttatctttaggccccagttcctagaaaagttcctggtatataattgacagtcaataaatattggctgagtgaatacgtgcctgtatctggctcctattttggacttctttctcttgaagctcctttaaaaacaaaactacataaaacaataaaaggacattaaaaattactgtctttctgccaggcacggtggatcacacctgtaatctcagaactttgggaggccaaggcaggaggatcagttgaggccatgaattcaagaccagcctgggtaatatggtgagaccctgtctgtacaaagaata

SEQ ID NO: 397532 - DNA, 351 bp, Homo sapiens
tctgtgccaagggcttgtgcaatggtattctaaaccaggtaacaagaagcccccaaatagcccagagctgtgagacctcattcctgcccgacaaggccacagccataccctacaaggccggggcctccagtaagtgggtgaggccaatgaccaggagaaaagggcattttcacccagggctctgctaaacctgcactggggaaccgaccccaggatccacagggaatgagtgcatttacccaacagagctgcggagcctccctcctcaaacccagactctgctagtccaagcagcccacttccactacaccagtttgcccagacggagagcctctgtttaagcagggcccc

SEQ ID NO: 397533 - DNA, 1173 bp, Homo sapiens
ttctttcttatactctcagttttacctagtatttcttgactcccctctttaaaagatgacaatattaatcctccttctccttcgttcagtgcttcacatcccaactgctacctttgtgctttaagtttgtactaatcggtaacaagtatatttagttctcatatttatatgctctgttctgttctcaaagttaaaaatcaatcaagagtgtttacattttgtgatgttttaaatactatttactgtggagctgagttgtacaccatgtttgcacatgttttgtggcacagctttactttttcctgatgtttctaattgcctttgtttttttttctcccttgtactgcttgccttcttcatttcctcagtttctctcaaactgtgaatcctttgaggtattctattgagtccctttttcccacagaaccattccctttttattccatcctggactggtcgttttgtaggcctactgcatgtcccactgtgatcctcagattcccttctctctgggttgattttcctgttttctggatcccatgtctttttctttcttggttatccccacctgccctccatggatgcacaacacatacacacacacacacaccctttcttcctcccggtggctcattctcaagtagctttcttagaacaccctgtgaccctgtgcctggtaacttttctattccccatatagctccttttcttctgtcatctttttggtttattttctggaggatttccgtgactttctttcacatggtctctctagacttgtttatttgatcatcaccttttagtttccacgaaaatctctttttttgttcgttccattgatttttcttcttttctatatatcttgttttaagtttatgaataaaatattttttaatctccctgaggacatgggtttgagatttaaaaaattacttgtttgttctggactccttttgtatttggtcatcttggtctgtttccccactttcacctttctccaatttctgatcctagatctattcatattgaacggggtggggggcaggtctactggcagtcttccctgtagggtgattgaatgggaacccactgaagtgtcagaatacaaagatattatttctggggcatattgcttcagtcatgaactctctgatttttttcactggtgtagac

SEQ ID NO: 397534 - DNA, 277 bp, Homo sapiens
atttcctcagtttctctcaaactgtgaatcctttgaggtattctattgagtccctttttcccacagaaccattccctttttattccatcctggactggtcgttttgtaggcctactgcatgtcccactgtgatcctcagattcccttctctctgggttgattttcctgttttctggatcccatgtctttttctttcttggttatccccacctgccctccatggatgcacaacacatacacacacacacacacacacacacacacacacccacccacc

SEQ ID NO: 397535 - DNA, 477 bp, Homo sapiens
attcaattacctcctaccaggtccctcccacaacacgtgggaattcaagataagatttgggtggggacacagccaaaccatatcaacccatctttattaaaacttaaaaacaagcctcaaaaagtataagctgataaacaagcaaattgtctgccaaaacaaaactctattaagaaaggcaagaggatccagacattaaatatcctaggatccatactatacaaaattatgggaggaaaattactataaattccaagcaggaaactaacccatgacctacaggagaaagaaatcaataaaaaaagagtcagaaatattaataacaatgacgtaagtagctgagacttcaaaacaagttactattatgtaacactaaaggatttaaagcaaaacacaaaggcaacaaaaaaacaaatgagggggccaggcacggtggctcacacctgtaatcccagcactttgggaggctgaggcagg

SEQ ID NO: 397536 - DNA, 535 bp, Homo sapiens
agttttctcctactccatacgcaattctcagtctcctttgtcagtttcccctccctgcaatctatctctaaatattaaaattcctcaagactcagttttttgctttattctctatcctctctttctagtagcacagatggaaatagatttaaacaattcatactgtggaaaatgaggggggctgttattggctaggactggctgccctgggttaaaaggagcattatccccatacaatgtaataagtttgggagaaacacttgtactgtatgactttcaaatttatagcttcagattaggcttctctgagctcagagtcagagtcagactgaaatattcaactgcccagccaatagatttttgcatctggtcatgatggagtaacatgcataaatttactttctaccttaaacaacaggagaactggagaaagatatggaacagatgttttttaagtttttgaaaacagggagtatagtatcgggattccaaagagaagagaaataattgcatctaccctctaattgccctagat

SEQ ID NO: 397537 - DNA, 469 bp, Homo sapiens
tcattcatgtgttcatgaaattactttttcattcactcatatttccaacaaacatttttgcttcacttgggccactgttttggggactcactagtgaatggaaggttcctgccttctggaagttacagctactagggtgcccaagggctgtatctgggctaactgctagattagctgcctaatttggacttgcaaacagctgttcccaaggtagaaacaagaaccctagtggtatctattacatgcttatgttctgcctctgagaggaggagactagggaaagcaccgaactcaaatcacagacaaatttcagtttgcatcctgccttcaccataaaccaactggatgaccttaggcaggtcacttattttctctgattcatagttagaattctgacttcaaagggtaataggagtaagtgagataaactatatggaaagcaagtatcacaatttctggccatagtaaa

SEQ ID NO: 397538 - DNA, 336 bp, Homo sapiens
ccatttccatcacccaagatagttctctcttgtccctctccagtcagttctcccctctccctggaggcaactttccagctttcattactatccattagtgttgactgttatagaatttcacgtaaatagaaccatatataatctgtactcttttgtgtccagcttcttttacttagcacatgtctgtaagatgtatgcatgttgttgcatgcataaatagttcatttcctttttgaatcatctgcctttgtattactatactacgatttgttctggatacattttcccactgatggacatttgggttgatccgactttgcgtgactgtgaaaaaag

SEQ ID NO: 397539 - DNA, 434 bp, Homo sapiens
ggcctttggcatctgagccagttctgatttgctgggatgctattattgcctcttcttatccatttcaggagtaaggggtagaagggaggaaaaaaatagaaataggaacagcatgaatgttgatcgacatcttgcattttgaagaggaaactcatcatctcctccaaatggtcatctactcaacgcctggagctctaaagaaatgcccatcctcttaatataaaacaaacacaaactatgtgttcagagcttccatgtgcatttgtgtttacagacggaaatacctgtgagactaaaaatcttcaagccttattgcagatccctggtttctgtgggattatgtaaaacctgtatttctgaaaccccgcctcccgtcttccttccatcttaaagcagggttgaaccttttattaaactgacagccaggaaatgtt

SEQ ID NO: 397540 - DNA, 468 bp, Homo sapiens
cccggttatcttcttctttctgttggcctgtctcagtctccttagtcagttcatcttcctctacctgaccattaagtgtggtatgctttaaaatccagtccgtaaaagggctcattttgatcacctcatcctcagcttcaactgccatctaaacactgaagactcttccccctagtaaaagatgccaggccaggcacggtagcacctgcctgtaatcccaacactttgggaggccaaggtaggaggactgcttgagcccagaagttcgagaccagcctggacaatatagcaagaacccatctgtacaaaaaaaatgtttcaattagcggggggtggtggtacacgcctgtagtcccagctattggtgggtgcggtggggggtactgatgtgagcaccagaggtcaaggctgcagtcagccatgatcacaccactatattctagcccaggtgacaaaatgaaaccatgt

SEQ ID NO: 397541 - DNA, 332 bp, Homo sapiens
cccggttatcttcttctttctgttggcctgtctcagtctccttagtcagttcatcttcctctacctgaccattaagtgtggtatgctttaaaatccagtccgtaaaagggctcattttgatcacctcatcctcagcttcaactgccatctaaacactgaagactcttccccctagtaaaagatgccaggccaggcacggtagcacctgcctgtaatcccaacactttgggaggccaaggtaggaggattgaggtcaggagttcaagaccagcctggccaacatggtgaaaccccgtctctactaaaaatacaaaaattagccgggtgtggtg

SEQ ID NO: 397542 - DNA, 370 bp, Homo sapiens
ctcaaactcctgacctcaggtgatctgcccaccttggcctcccaaaatgctgggattacaggtgtgagccactgtgcctgtcctcatgttgtcttgaaagtaacaagacaggcacggattctttttgatgcaagctgttatgggatgaattatgtctccccgcaaattcataggatgaagtcctaacccccagtttcctcagaatgtgactgtctttggagatggggcctttaagaaggagattaatgtaaaatgaggtcactagggtgggtccggatccaataggactagtatcctaataagaagagatgaggacttagacacacacagaggaaagattatatgaagacacagggagaagacggcatct

SEQ ID NO: 397543 - DNA, 601 bp, Homo sapiens
atggaacaattgtattaaatttctggaaagaaaataatatagtttcctttttgtagagatttctccaagattaaacagaaacgggccaataatgaaatccaatattccaaggatagtattctcatttagaaagaagactttcaatcagagggttaaaaaaaatcagtgaagcctgcttctgacaaataggaatgaggttaaatcacttagtctaggaactattctacatggttttactatttaacaggaaggggagaaaaggcaagtttgatttattgaaatggctatggaacccaaagaaaagttttacagcttgagcaaacaataaatggtcagaactgtacagaatcagaaagaggctctgaagatagattaccttggaaatggattagtagactattgaatatttaggttaaatacttgtctgctttggcaacattttcctatggtgtgtgctatttccataaatgccaggcagattgtataggagccatgtacggatctaatgacttctctgacgagagtagttaggacttgtttcccttctttctgatggataacctttagtgaggttattaactgatacagctggctgagtctt

SEQ ID NO: 397544 - DNA, 332 bp, Homo sapiens
cagaaacagttctctttttttctttacatatattttcagaatggcaactgtcttgtacatgttgatattggcctacattgttaataattagtgatatttttaaaagcccaattaaaaatatgttatttcataagtttcattttatccatgtgtcaaaattttatgcagacatttacgcaggtgatcctgtattttctttatgtttgtagttactgttcaacaatttaattctataatagattctgttatatgacagggtcattttattccaaataatgttaaatgaatttcaaagatttttataaataaagtactattcagtctccttttta

SEQ ID NO: 397545 - DNA, 252 bp, Homo sapiens
taatgggaatcttttttttccaatcccaaaattggaatccattgtctgacaacacatttgtgtgttggacaaaagaggctgcctggaaagggtgcatgctgagtgataggaatgcaggaggtacttgagaggcttgaaacaggccgggcgcagtggctcacacctgtaatcccagcactttgggaggccgaggcgggcagatcacgaggtcaggagattgagaccatcctggctaacacggtgaaaccccgt

SEQ ID NO: 397546 - DNA, 288 bp, Homo sapiens
gtggttgcttggatccaatgaaataaagccacgagggcatcctataaatggtaagagggctgtataaatagaaggaattaaccagcacccatttgtgctgttgcagctgctgcagatacgtgccttgtaaaattaccctattatttagagaccgagaaatatttggatagtggtaatgtgctgctctgagaaaagcagtcgccagtgggatttttatcacataattagagggtttgttaaatgtgctagtgaaaagaagctgtttgctgctgccttgttttaacatgg

SEQ ID NO: 397547 - DNA, 713 bp, Homo sapiens
ctggagaacacagtaggagaaggggcaggaaatgattacatggctgagtaccataaaaccatgaagtttatggacaggctgtaaatctgaacatgacacccttctcccctttcctctctctcccagcaacccgcccaggtgggccactcttctgtcattcccacataaccctctcagtcagagacttgtccttgtagggccctctcgtccccttcaaggctgcccttggtgatcacacataattctgagttcacccagacatagatgctgaagaggtgaggtacaaagtgtgacttacccacacgccgcactgacaatagaccctagtgcctggttaggggcatcactggcatttattaggaaaatgagttaggctagccagccttctctaaagcatacttctgtcgcctaactactcccactactcttctcttttttttgagatggagtctcactctgttgcccagcctggagtgcagcggcatgatctcggttcactgcaacctccacctcctgggttcaagtgattcttctgcctcagtctcccgagtagtgggattagcaggcacgagccaccacacccagctaatttttgtattgttagtagagacggggtttcaccatgttggccatgcaggtctcgaattcctgacctcaaatgatctgcccacctcggcctcccaaagtgctgggattataggcatgagccactg

SEQ ID NO: 397548 - DNA, 113 bp, Homo sapiens
acaagaggatctgcagttgaatttgtgggaaataatatgaaatacagtcagatggtcctaatggaggaagatgcagaattttctctagcatctagcttgtaggtcttgtgttt

SEQ ID NO: 397549 - DNA, 145 bp, Homo sapiens
tttccctgtagcagaccctcttcctgcttctggtctattcttcccaatttcagatgggcttaaaaacccgatacccatgttaataggtctagaattaaattaaaggtaaattctcagagccagggctgacacactaggaggacct

SEQ ID NO: 397550 - DNA, 357 bp, Homo sapiens
taagtagacagtctattgaggtttaggtttaaagtcttcctccagatactccagattgaatgtactaattaaaatagcaactacagtggtggagcattgagaatgctaatgaatgttttaaccctttggaaacctgatgcattcccataggttcatatggtcattctccaaaacactgggcattggttagaatggagtagacagtagatgcttagcttgaggtgggagtgaagctggctcctcaccattttttatatctcaagtcactgtggaaattactgggtgctttgtaaagtcttcctaacactggagctctaggactttgttgcttcctttcttccactcagccatgtttac

SEQ ID NO: 397551 - DNA, 250 bp, Homo sapiens
caataacaaacttgaatgtaagtggtttacattcccaaattgcaagatacagactggctgaatggatcaaaagaaagactcaactatttgctgcctccaagaaactcacttcacctgtaaagacacatatagactaaaagtgaagggctgaaaaatatattttatgcaaatggaaaccaaaagcaggcagcagtatataagttatacttatataagtcaaaaaacataaacagggacaaagaaggtcatt

SEQ ID NO: 397552 - DNA, 142 bp, Homo sapiens
gggactacaggcgcccaccaccactcccggctagtttttctatttttagtagagatgggctttcacagtgttggtcaggctggtctcgaacttctgatctcatgacccgcccaccttggcctctcaaagtgttgggattata

SEQ ID NO: 397553 - DNA, 600 bp, Homo sapiens
atcccctacttccctggtccaaggggagtttcggtacctcttcctggcaaagctctctctacttgagaccttatagctgcggacctgcttgtctgtgtcctccaagggacctgactgttttaacagaaatacccggcagaggaggcatttgatggtaaggagacagcttctaattcacattgctaaaatgagagacaaacaaacaaacagaagacaacctgtggaaaaggcttctgaataataaaaagagtcttccaactggcactcagcccaagagtccacagatcatcaccacagcaacagacagtatttggaggcaatgaggagcacaaaatgcagatctggcaaaggcattagcaaaattattcatttcaaggagactatataagctcctgaatttgtagcattcgcttctatatgtatattagccatcagaaacagaaagagctaatgagctgaagtgctggtgagaacagtcagggtaccacatacagctagctctacttggaacagacggctgatggcctaaggaacctgtagccacgtcagctccaaagcagggaccggttcagtcatcagtgcagccaatgttcatgaaat

SEQ ID NO: 397554 - DNA, 465 bp, Homo sapiens
acaacataagtgctatagatatgacacactgttaaattttatctgcattattaacattttctccattactttcctaggtgtctagacaattaagaaaacaaataaagccctgatttgtagcatttccgaatttccatggtaataaatacttccaccatggccaattttaagctaccagtgtgaaatcactgaatgtggatttgagaaaaaatgcacagtgacaaactgtaggggagggaacaaaaatatttttgtcttactcttccaggttctcaggctggagcttgtaagttggactaacaaatgagagattaacaaaagaaaagcatacacatttatttaatatgagctttatgtgacacagaagcattcataggaaaattaagacctgaagcaactgttaagcctgagtgtttttaatactaggtttgatgaggagtggaaagtcaatgaaaaacatgacag

SEQ ID NO: 397555 - DNA, 316 bp, Homo sapiens
tgctgggattataggtgtgagccactgtgcctggcctcaacaatttataatttggttttttaaaggatattgactattttaggctatatatgatgactagctttcaaaatgcttttctagcttatataaacaatattgaatagatgatttagtgatagagaactccacttaaattcagttccccacttcaatctttttccttgtaaaaattaaaaattattcaccttaacagttaaactacctaggctgttctgtctttccttctcttgtctttttcccactgtcttaataaatacataagttaaactgaattctt

SEQ ID NO: 397556 - DNA, 502 bp, Homo sapiens
gctcaccataaaggagaaatgcgttggctacttagtttccgtacgtgcctttgtgcacatatttgaataccagtacaacaaagcaactttatttttgctatggtctgaatatttgtgttcccctcatgcccccaattcatatgttgaaacctaatctgatgtgacagtattaagaggcagggccttaaggagaaggtgattagatgatgccctcatgactgggattagtggccatatgaaagaggcctgaaggagcttgttttcccctttcaccacatagggactcaacaagaaagtgcagtctattaggccctcatcagacactgaatctgctgacaccttgatcttggacttgctagcctctagaactatgagaaataaatgttgtttataagccatccagtttatggtatttttgttatagcagcctgaatagaagaactgagacaattttctaagaagatacagctatccttgcagggaagaaattcttacccatacc

SEQ ID NO: 397557 - DNA, 405 bp, Homo sapiens
tctgccttactcctagaaatatacaattgtggatctcacaaactgtcaatgtgcacaggtcactttctatgcaggtaacattttttagggatggaaagatacgccaaatgtccatattttgaaaggaactgatgcacattaaaaacatcttacaaatgccagaacattacccttacacattctggcactacacccctatcgagctagcgtgacaggtccctatctccttcaactcctaactctagtattcttacaagaaaggtctctgcagatagaggcctgaattctgatactcatgtgactacgtcaacaagtaacactgaaacaatttcaataatgctaaataaagtatagaagcgtttctaagcttgtagtcagagtgctaacgtgaatcaagtaagtcag

SEQ ID NO: 397558 - DNA, 339 bp, Homo sapiens
ggggcagggtcagaccccaccctttctggagccttgacctctcgcctcttgttagtccccacaagctgagggctgccatgcaaattcactgaaatcacatctaagcagtgcctaggaatacatttcagttcctcttcctctctgaggtcatcagtaagacattaattggggtcatacaacttagccctggtccgacatatgtagcctattcctgttttctcctgtgcaagtaacacagagattcattgtcattgtttacatcagcttttaataaaactgctgagcaatttcaccatagaatgtccattttctttcctttcccatcccctcccctcccct

SEQ ID NO: 397559 - DNA, 277 bp, Homo sapiens
tggtttcctagtatcacctactatcattagctttacctagttttacagccatgagaatatacctctcagatctccaaatacacagagaatgagtgaatggccccagctactatacactcaattccagtctgtcactccacatgagctgctttccataggctactcttacctccttcaggtctttgctcagatgttgttactttgtcaatgacacattccctgattactctaaaattgtcactagtctacttccttaccccacactactattccttta

SEQ ID NO: 397560 - DNA, 204 bp, Homo sapiens
tgtccaacagcatgtgtttactttgtgtctctatgtcacgttttggtaattgttgcagtatttcagatttattataattgtatctgttatggtgatctctgatcagggatctttgatgtttctattgtaattgttttggggagccatcaagcacacccatatgttgttgtgcattctgtctgcttcattgaccagctacccccg

SEQ ID NO: 397561 - DNA, 364 bp, Homo sapiens
cgaagaaaagggatggaagcaaaaattctttgagtgttatctcacatgattttgactttggaatcatgtaaatgtcttaaccatttgaaaaataaagttatatgtaaaaggaagtcaggtgtggtggctcatgcctgtgatcccagctactcgggaggctgaggcaggatcatgagcccaggggtttgaggctgcagtgggccatgatcataccatagagcaagaacctgtctccaaaacaaaacaaacaaaaccaacaaaacaaaaccccagaaaccaataagactattgcatagaatttgaaattcctttttgcctttagagtgccactgaaaaagaggaatcagagtgtactattataaaa

SEQ ID NO: 397562 - DNA, 286 bp, Homo sapiens
ttcctccccttcccttcctccctccctcccttccttctccatgttaagtatccatcaagggccatctggtttttacctacaaagcaagccttgaccactccagctctcactggctgctgaacttctataatagtccttctcagtgggggcagaggcggagctgctcttcaaggggaggacatgcatcagaatcactgtttgtggagtggggaggggcagtggtgttgccggctacatctccacccggagaaaacccctgagatggatggagggaggtatgccagag

SEQ ID NO: 397563 - DNA, 134 bp, Homo sapiens
cctgcctctagcatctttcctctctcatccaactctgtgtgaattcatcttcctgaagcacagacccaaacatgtgatgtctctctgcaaacacctataaaagctgccactggcttcagatgatgtcctcgtgt

SEQ ID NO: 397564 - DNA, 352 bp, Homo sapiens
gtgagccactgtacctggccatcaggaattattttagaagcaaatggtctgagtactacaattaaaagacaaagattggaagagtatattatttttaaaaaatgactcaagtaggccaggtacagcggctcctgcttgtaatccctttaggaggctgaggcagaaggatcacttgagcctaggagttcgagaccagcctgagcaacccagggagaccccatctctacaaataatttaaaaattagccaggcatggtggcacatgcctgtggtcctagctattcaggagctgaggtaggaggatcacttgaaccgaggaggtagaagctacagtgagtacagtgatcgaccaa

SEQ ID NO: 397565 - DNA, 501 bp, Homo sapiens
ggccaggttggctaaatgggaccacagcagaagcatgagccccagaatgtgcacgaaggaagagagagccgggggaggtggcgggctgggtgtgcagagtgggcctgagctccagcctcctccctggacgccctcccgtggccgcagccatccccgcacccactggtgtggcctgacccctcaccctgagcccacccttcgcggccactagggaacctcaggagaggccgccgcggtggggtgggcggattcccccggagcaggcccaggcccctgctcctgagctctcctgcagcgccgcctgctggccacagagagcccacgtgcgccggccgccaggcctgggcatctcccctcctgcagcgccgcctgctggccacagagaacccgcgtgcgccggccgccaggcctgggcatctcctctcctgcagcgccgcctgctggccacagagaacccgcgtgcgccggccaccaggcctgggcatctcctctcctgcagtg

SEQ ID NO: 397566 - DNA, 288 bp, Homo sapiens
tcctcttggggcaattcagcagacatcactggagcacctggaggtgctcagaggctggcatggccttggaggctgaaaatggaacccaaagattgaggagatgctctggacggggatacaggaagggtttgctttgagctcccaggacggacaactcggatccatcaacaccactcacatgtcctgaacgctcttctcttctgccaaggatgaagataaatatttacctttgaatgcagaataatgtctgaagctacataatgcgtgaaaggccttccttttaatcag

SEQ ID NO: 397567 - DNA, 559 bp, Homo sapiens
  misc_feature (505)..(505): n is a, c, g, or t
  misc_feature (542)..(542): n is a, c, g, or t
  misc_feature (550)..(550): n is a, c, g, or t
tcgcctgtttatgctcgtagttaatacttccgtgctccgttcctttgtgtagatccatatttccttctggcatcattttccttctgcctgaaggacttcttttaatatttcttgggcagccaatcatctggtggtaaatcctttcaccttttgtgtgtctttcaccttttgtgttttgccccttttttgaagtatgtatctagatctagatatatatattttttgagactgagtttcgctcttgttgcccaggttggagtgcagtggtgcaatctcagctcaccgcaacctccgcctcctgggttcaagtgattctcctgcctcagcctcccaatttagccaggtgtggtggcacatgcctgtaatccctcgtgccgaattcggagaggaatttaagataaaagccctgacccaaaggcccagattacattaaaggctgtggtgaaaaaagcagaactacttagcagagaacagaaatatgaagatggaattgctttgctgaagnacgcactggctaatcagagtgactgtgtcctgcatcngatcctangagaattcc

SEQ ID NO: 397568 - DNA, 607 bp, Homo sapiens
ctgtgcctgccctgaacggggatggaggacacagggggtggaggacacacttcctttaagaaaccagaggcctatcctggcacacaaacccagggctagtccatccgattggaaactaattatacagcaaatcgtatttgctgcccccgccccagcctgtggtggccctcctgccttttgttggttgtatgtgtatgttttttaattgctaaacagtgactcattctgactggtccccccacacaggaaacagccccatctccaatcatgccctgaacagagcttcctcatagccagcctccgcactggcctccactaacctccagggatccccacccagagacactcccagtcccaccagagtgcagcctagcccccagatatcacacccaggccccaggccccaaggtggggcttcagagaggactcctcggtgtcaggccaaccccttcattttggtatgactcaaccctgaaagccagaggactggggagggacctaggaggagccccctccactgaaggggacggaagtattgcctcagtccagctccaaaaccaggcccagaggcctgaggggggaggcggtttgacattggccgcggccg

SEQ ID NO: 397569 - DNA, 543 bp, Homo sapiens
gatggggaggagaaggtgttggcaggagttttggaaggctggatggccaggactgagttgattgactacggcttgtgagggaggagaaatctaggtgactcccatctccctgctggagggactgggtgaatgagatgccattgatgagacagggatgtgagagcaggagatctagggaggggtgactttagaccaccgagggtttctcagcctcagcattatggccatttcagcctgataattccttgtcgggggctgtctgtgcattgtgagatggtcaccagcatccttggcctctactcatttgaatttaacatccctgaagacagccggatggagctgcccaatagatggttgggtgttggagcgggggagctcaggagacagctttgcattgtgttttccatagcatgcaagggcccttgctgagtaggaaggaggagggaatgactccttgtgagcagcgaggttggagttcaagttatctgtgcccatgccctggctccccaagcatcttgtgggtgccttgagaagaaaaagaat

SEQ ID NO: 397570 - DNA, 217 bp, Homo sapiens
taggcccagaataaggacgggaggaaattgggggattccaggctttgctcggatctgagaggattggggcggcttacagactggggcggggggggggggcgtccgacagccacaagttagttttctgagaaaaaccttacacagagatgttaggaaacctatcccccattctcatcctatccatcaactcagacatcattgccgggaaatcctatta

SEQ ID NO: 397571 - DNA, 534 bp, Homo sapiens
aaaggttagcttccttgcccaaggtcacagagagaagaacaacaaaaatagaaggccttgtagagtgaccaggccagagtagatatttgctaaatgctggacttgggactattgcaattttatttagggaaggctgattcctgtgtaaatgagaaattacaccaaacagttaagaacagtttgttctctggtttcagagccttctgttgcagatattttctttgtagaattcccatggaagcccaatatggttacagaaaaacttctaatgtgtgcagtcagagagaacctttatctttattgagcgttatatggtgtggggcatgttagaatctaaagaaatctttgtaagaaatatgttcttgttataggtctcaagataaaaaaaagaagtaaataatatcatggcctgttttaacagtttgcagcattcctcatttattttgttttatttataaattctatttatcttatagtgtttactttttctcactataaaatgcttttagttgaaaatatgtaatacaaacagca

SEQ ID NO: 397572 - DNA, 326 bp, Homo sapiens
tgagtacactggatggaattagacttcggagaggaaaagagtagcaaaacgatagcaatagaaactacccaaaaggaaatagaaaaaaagaataaaaacagaattgtaggacaccttcaaatagcctaataaatgtgtacttggaatccccaggtagaggagagaggaggaaaaatatttgaaaaatcaggggctataattttgtcagatgatgaaaactataaatccacagattcaagaagctcaatacatctcaagcacagggaatataaggaaaactgcacaaaagcatactatagtcagattgctcaaaaccagtgatgaag

SEQ ID NO: 397573 - DNA, 212 bp, Homo sapiens
ggattcctgaaagtgcccagatctcctgacagagaatccctaagggcaggcctggaatctgcatttgtgatcagtctcctaggtggttctgcacactgacatttgagaagtgctgatccagggcccaggggaggactcaggcccatccctgatgagcatttggaaatgttcgagaggggagggatgcagggatgctggattcagctggcgca

SEQ ID NO: 397574 - DNA, 281 bp, Homo sapiens
atgaggctggctcagaaggctgcagggcccctgggaatggaggcagccctggggacaggccaacagccccggaagaaggccgagtgtctgaataatgaacgtgttctttaaatggagttgtggccctgtggcgtgctgagaactcattttccacagttcactattctcctagtcaatggggcttgacttgattatccctcctcccagcttcaggagatgtgggcaacattggagatttgttaaaaattagctaaataaaatcatcctctcctcctcagcaa

SEQ ID NO: 397575 - DNA, 187 bp, Homo sapiens
cccagagcgagatgcggtatgctttcactccactgcagaacctcccaagcactgcttcctgctcgctccataccttaagctgatggacatttacacccagcattctcatagacagtgtctggagtccatgtcatgactgctgagaatgctgggtgtaaatgtccatcagcttaaggtatggagcgag

SEQ ID NO: 397576 - DNA, 428 bp, Homo sapiens
acacttgtgtgttatgtaatattagtggtatatgaggtgtcttcacaaagtctaagtatttaattgtaagttcctggagggatgtggttgtgtctcctattttttacaccccataatcccagtttatggcatcatgcctggcatgtgaggcacccaataattatctagctgggtgtggtagacacacctataatcccagcacttattccttgagcctaggagttcaagaccagcctgggcaacaatgatacttcgtctctactaacagtaaaataacttaagcctggtgtggtggtacacgcctgtagtcccagctacccaggtgactgaggcagaggattgcttgagcctgggaggtcgaggctgctgtgagccgtgatcatacccactgcactccagcttgggtaacagagtgagactctgtctca

SEQ ID NO: 397577 - DNA, 441 bp, Homo sapiens
cagatcttgttagcactgtggcttcaggcctagttaaacattcaagcccaatgcggttggagagcacccatggcacgcccattgtgcagcagtgtgtttaatacatgtgctgcttttaatgggtgtgaaagatcagagagcttgggtgtgtgttttaccaaccactttttaaactcacatagtaaaatttatagtatataaaaagcagaaaatatggtgtatcttctaaatattcacatttaaaacattttttagaaataatgtatgtcaagcaaggtcaagctaatgtgtttatataggctctaaattagagttgtgaaccagtatctcatcccacttatagggttttttttgaaaacgttcaaatgtttccagcctgggtgacacggtgagaactctgtctccaaaaacaaaacaaagcaaaacaaaacccacccaaaa

SEQ ID NO: 397578 - DNA, 519 bp, Homo sapiens
tgaggagactgtggcaaagggagatgaattaacttgctcagagtcacactaccagactgcaaactcaggtgctttttattatgcagaatacccgctgcagacctaatcctgccccaggctctggggccagctttgttcgcagggagattttaaggagggtatataatttaaggtgtggtagaaagaatactggactgggatgctggtttgctggactgtcatctcaaatctttgatttgactcatcctggggcctggatgagtcagcctttgtgtgtgggccctggttttctgacccctaagaaggaagctggagcttgaccttctctaaagctatacctggccctaacatttagtgatcttcatggttgggagtaaaagtgtgcgtgtttgcctgttcagcagctgctttgtgcagaacctgctgaggtcagcagctgccctgtagctgttctagcatcagactcctacaggaaaaagtctcaatttatggaatgttctgctctggtaagttggatgg

SEQ ID NO: 397579 - DNA, 257 bp, Homo sapiens
agattgcgcctctgcactccagcctgggcgacagagtgagactccatatcaaaaaaaaaaaaaaagtccaactcccccacctcagtagtcaatgagttgtccctatcctactgactaaataatccgttctttcccactaatatgaaactcaaacttactgtgagccaggccctggtctgtcaagtttacctttctagtctcctgccgtaactcaatgaagcagattgataatattcccattcacagcaagaaaaccg

SEQ ID NO: 397580 - DNA, 338 bp, Homo sapiens
agcaacttcagcatataattttttgtttccttattaagtcaagaaattttcactttttcatggaaaggaagcagttttatggcttctctttggcatatccaaactgccagcatcactactcttgtgctttggggacattattaagtacaaaggtgacctgaaactgagcaatggggtactgtgacagttgataaccaaggtggctcctaagagactcatagatggggcacacctatagtgtggatttgctggacaaaggggagattcacatcctgaggaagatggagctgcatggcgcaagatttcatcatgctacttatgatggtgtgctatttaaa

SEQ ID NO: 397581 - DNA, 484 bp, Homo sapiens
ctggaatgcaatggcgcgatcttggctcactacacttcccaggttcaagcgattctcctgcctcagcttcccaagtagctgggattacaggtgggtcccaccatgcctggcaaatttttgtatttttagtaaagacagggtttcaccatgttggtcaggctggtctcgaacccctgacctcgtgatccacccaccttggccagagtgctgggattacaggtgtgagccaccacgcccggcccacccacttaaatgttaatccactcctaaaacacgcttaaagaaacattcaggttctttaaaccacatatctgggcactttggccagccaaattgacatataaaattaaccatctggcaaaattaatcaagaaaaaaagaaataagaatgacaaagggggaaccttagacatagcagagattaaaaagctaattaaattgtaattattacaacttaataaaaagataatccaatttaaaaaca

SEQ ID NO: 397582 - DNA, 745 bp, Homo sapiens
agtatataaggcaaaatgttctgtagccaagtgcttttgaaaaaaaaaaaaataagaaaggctgatgacagaacttctaccctagaagctaatttctctttaaagtactgtcatctaaacactccatccttggcaacatagatactgtcacttaaaaaaacaaaaacatagcctgggcaaaagaacgagatcctgcttctacaaaaagtaaacaaaaattgagccgggcatggtggctcatgcctgtaatcccacactttgagaagccaaggcgggcagaatgcctgagctcaggagttcgagaccatcctggccaacatggtgaaaccccatctctactcaaatacaaaagattagccagccatggtggcacgtgcctgtagtcccagctgctcaggaggctgaagcatgagaattgcttgagccctggaggtggaggttgcagcgagctgagatcgcgtaaacaaaaattagtggagtatggtggcacagcagtcctagctactcgggagactgaggcaagaggaatccctgaacccaggagtttcaggctgcattgaaccactgcactccagcttaggcttcagagcaagaacctgtctctaaaaaagaaggaaaaacctttttgctcttcctgtctcatggtgtagctgtctccccacataggaagctggaacgtcataggggattctctgtcttcccattatggacagtctcaccccttgccaggaccccatcaccacag

SEQ ID NO: 397583 - DNA, 513 bp, Homo sapiens
gtttcaggatacccaatcaacacacaaaatcaattgtatttctatataccagcaataaacaatctgaaagaataaaatacttagaatactttaccctaggagctgtaagactggtccactagaatctataaaacactgtgaaaggagttaatgaagacctaagtaaatagtaagataacctgtgttcacaggttgaaagacttaatattgtgaatttggcaatactacccaaagcagtttacaggttaatgcagttcctatcaaaataccagtgccttttttttttttttctgatcctaaaatttatgtggaattgcaagggatcctgaatagctaaaacaatcttgtaaaaggggaacgaagttggaggactctcacttcctaatttcaaaacttactaaaaccctcagtcatcagaatagtgtgatattggcataaggatagatatatagatcaatggaattgaattgaaaccaacccgtacatctatggtcagttgattttagacaaggg

SEQ ID NO: 397584 - DNA, 781 bp, Homo sapiens
  misc_feature (54)..(54): n is a, c, g, or t
tcctcgcctctcaattctctatacggtctccactattttcatcccaccactccnaaaaaaagaaataatatattcaatgtactaaaagaaaaatattgccagtaaagaatattgctttaatattctttattaaatataagcaaagctattcctcagaaatgaaagaaaataaagtctttttcagatatgcaaaagctaagggaagactagccttacaagaaacactcaagagagttttagatctggaagtgaaaagacaataaccaccaccatgatgaaaacaaatgaaattataaaattcacttgtagagctgatatacaaaagagaaagagaaaggaatcaaaccttatcactacagaaaaccactaagccacaaaaataaacaataaggaggattaaagagaaaggaatatacaaccggaaaaccatcaataaaacgacaagagttaagtcctcacctaccaataaataaccttgaatgtaaataaattaaattccccaattaaaagacgttgaatgaatgaatgaataaaaaaaccatgcaactatatgctgccaaataaaaactcacctcacctgtaaaagacacacaaagactgaaagtgaagggatggaaaaaaataatcaatgcaaacagaaacaaaagtgagcagaagtagctattcttatgtcagataatacaggctatttaagtaaaaagtgatagagacaaagaaggacattatataataataaaggtatcaattcagcaagaagacataacaatggtaaatatatatg

SEQ ID NO: 397585 - DNA, 370 bp, Homo sapiens
aaaagcacagcaaaacgggtgccacgctccatagccgtttcccaggggcctgccgtcttgggcagaagtgtcataaagggagatattgttagagggttttttatttcattttattatttatttgtttattgtgagacagtctcactctgttgcccagattgcagtgcagtgagccaaaattgcgccactgcactccaacctgagcaacacagcgagactccatctcaaaaaaaaaaaaatgcatattctggcttggcgtggtggcttatgcctgtaatcccagcagtttgagaggccgaggggggtggattgtttgagtccaggagttttagaccagcctgggcaacatggcaaaaccctgttgctacta

SEQ ID NO: 397586 - DNA, 479 bp, Homo sapiens
agctcggcacctattggactttcttccatgacctcagtcaaggtacagatatgcagtgactttttcactatgacacccattcctgccacgtttttttcatatccttaccactatctggaatttttatgtgtgccatctccagtaaaatacaacctgcatatgtgcatggatctggtaaaattgttacttttgctatccccttctttcctactaagtgcatcaataaatagcatccactctatatttgtgtcttcctcaagtaaatacatgaaaatgagatcctgcaagtttgtgtttttatagttagtgttaactccagagattacaacactgttcttgtaggatgtgtttttggggaaagcgttcctcttatggcagccctgttagcctgaggcagggcttaaacaaactgagcaggctcaaaaggacagtattgtaatggactggagtggccagatctttttacagaagaaagaata

SEQ ID NO: 397587 - DNA, 463 bp, Homo sapiens
aatgggaaacattggtggcgccacagctggctggtggcgacttcaagacccactggaaggctgggattggcagccatgactcataagggcggaataccacggggatcggtttgtctggcgaacttgagtgaagggtcaagatctggatttcacctttcctctgagcttcctgataacccggacgttccgtaaacccggatccggagccgaaagtggtgcccagatcccgtctcggaattcatttgttcagcatttaccttttgaacgccggtttcctgtaggaagtgtcgcctagctgatccgtgtagggctgttgggaattgggggtggggaggatggtgcgggtacgttctggtgtggcttaagaaagtggtaatagataggggaagaccagattatgcgaagccttgtaaattaattgatttttatccttaaggcaatgaaaagtctttgaagaatctca

SEQ ID NO: 397588 - DNA, 259 bp, Homo sapiens
attgacctgcttctagcagtggtactacattcagacagcaatgtggattgattctgcccccacgcttcatgtgccatccagaggcaggtgtactcatccattgagggatccttccagagagaggtgactgaggagcaaagccattgttgaaacaccgagtctgaggagatgagatggaggcacgtcccaaaattgataaacctctagctggtctgataaagaaaaatgacacaaattatcaatatcagtgaacatcact

SEQ ID NO: 397589 - DNA, 511 bp, Homo sapiens
caagttccgggtttgttaaaccacctttctatactcctaggtgaggcaaaagaacaggctagctagataaggctttttaactcctttccctgctatagtcctggtttactcaccaaaccttacattaaactcttatattaaacattataccattgagcactggtatctttgcagtattcacagtgatacccatggataccactagataccatttgaagtgcgcttgctgggagagaggaacttttcacgttttacttcaatttgcccctatactgtatgaacttttataatgagcacattttacagacagaaagacatgcatacggtattagaagatccttaatgattagtttataacttgtccctcacgcatcttaatccaactcaaaatactgtaaactgattggaaggaatatcaacatacaaaacaaagaatggccaagaaagcacatccctaataaaatattgctcatatcctagcaggtaaatctaaaggacatgaaatgataca

SEQ ID NO: 397590 - DNA, 300 bp, Homo sapiens
tcgagagctggacctgatgtgtgacaaagaccatgcttccatatctccttccactgtccccctcaactccctctctttgttcacccacaaccactcgggcctgtgcggctccctcccctgccaccttcagagtctgagccaggccacctcttgactgaccacactgtctttctggatgtttaatttttttttttttttttgagatagagtttccctcttgttgcacagctggagtgcaatggtgcaatcttggctcactgcaacctccaccttcagggtggttctcctgcgattctcctg

SEQ ID NO: 397591 - DNA, 381 bp, Homo sapiens
ttggagcaagtagtgagttaaatttaatccactcctttagccaagtgagtatggtgaagttagagtagcaaaagggaacttctgggtggaatgggtggtctatgcaagggaataattatattatatggctgtgggatttaagctggatatggaaagagtgaggatacaaggaaggtaagggacacagacagtggtcagatcaatggcttgtccttcctgataggtcaaaaacttttgggagtctgagtaccagaggtaagagtaaagataggaagtgggcagaggataggatgtttgagattatgtagatagtaatgaaaagggctagggtagaaccgtgggaagaacatcaataagagaaagaaatggagaggacagagt

SEQ ID NO: 397592 - DNA, 523 bp, Homo sapiens
acactgaagggtaagcagaagagaatttattgggtgaaaaggaaaagagaaagaaagcactcagcaaagcgagagggagtcctgccaacgggttctcaacacctgacactttgaataccaggccaccacacacgcgccgaagaggccaggttcctctcccttgcacaaggtgtgatcctcccatggctccactccatcatcccagtgcacaggcaggtccccaatccatgatggacatgtgcatacaagactctgggtggttccctcatctgcacaaatggatctgatgtgaacacttgtggggcgggtcagcgattctccgtgtaccccccttatctgcctcctgcatctatcattgggtatatattgtctttgcaaactgtctttgcatctatcattgaatgtctgtgttgtctttgcaactgttctgttaagataaaactatactaaaattaacaagttagttaaaaagaaaacttcaggacaaccatccacactagactacatagatagacaaatgatg

SEQ ID NO: 397593 - DNA, 460 bp, Homo sapiens
gaggggattggagctgtatagactggagtttgtgtatgatattccagctaaatgggtatcaattcaaaccatagtgttataaatttaggatgtaaaacataatctcctaggtaaacacaaagaaaaaacttttatttattcatttatttttagagatggggccttattctctcaccaagtctggagcatagtgttgtgatcatagctcactgcaacctcaaactcctgaactcaagggattttcctgcctccacctcccaagtagctgagactacaggcataagccactatacccagttacatttttaaatttttttgtagatacaaagtctcgccatcttgtccagactgatctcagactcctgggctcaggtgatcctcctacctcagcctcctaaaaagtgttgggattatgagtgaggtaccatgcccagccagaaaataatttttttaaatacac

SEQ ID NO: 397594 - DNA, 740 bp, Homo sapiens
tctactaaaaatacaaaattagccaggcatggtggcacatgcctgtaatcccagctactcgggaggctgagacaggaaaatcgcttgaacctgggaggcagaggttgcagtgagcccagatcgtgccattgcactccagcttgggcaacaagagcgaaactccatgtcaaataaataaatacgtacatctgtgttaaaatgtaaacataaagtgaaacaaagggagtgataaataacaaactcaggctaattaataccctgatgagctgcagtggggataggtttagggagagtgaagcatgaaatcagggagaagcaatgcaaatataatgttctatttcttatgatacttctagagcttttttgtatataattgctactactatggcttgagaatgtttgtgtcactcccaaatccttacgttgaaacttaatccccattgtggtgctattaagaggcggagtctttcgggaagtgattaagtcatccagtctccatccttgtgactgggattaaagacttcctaaaagaagcttcggagagctgcctggtccttccatctcttctgctacatgagggcacagcttctgtcctttccaccatctgaggtaacagcaccaaggcaccgtcttggaagcacagagcagctttcacgagacactgaatctactggcaccttgatcttggacctgccagtttctgtaactgtaagaaataaatttctgttgtttacaaatta

SEQ ID NO: 397595 - DNA, 343 bp, Homo sapiens
cacctttgtagccagccctggaaggcctgaatgcacaaacacagtgccctttcaccggagcctctcgggtctcctgtttcagtgaggccgtgaaagagagcactgtaaataaaagaggcctgtttgacctgcccctctggccgggacctccttccactctactgtaacagagctgccggccagcacagcctcggcccctctgctcagtcctactgcccacgcccactgggcaccgaggggcagcaagacaaaagggtgaggcccagcctggtctaagggtgtcagtgagaaggggcgcacaggcctggtcattccaatgactcgtaagcatcaaagcacttgt

SEQ ID NO: 397596 - DNA, 366 bp, Homo sapiens
cacgcctggtccataggtttacttttgatggataaaattcagaagctatgttttgtaagaccttatttctaaaattaatttctgtgatgcttgacaacatcctgtataaaataggtacattcctgatgagctctttcccatcagccagtgctaaattatgtctcagctggttctcagtattcttgcagcagagtattttctccttacaagtggaatgaatttagcttattagacccttgcagatttttgagtacctgacttacagatttttaatagtagatagttgactattaaattcctttttccagtttcatagcagtttatttcattactgcttggaaaagtctttacttatgttaatatatg

SEQ ID NO: 397597 - DNA, 361 bp, Homo sapiens
taaatataacaagtattcacttggaggctgtctgctgtgataaactttaaatcgctagagatttctttccttaaaaatgtattaccacttcttatgttataatctgtgctaactttgggaggccgaggagggtggatcatttgaggttaggagtttgagatcagcctgaccaacatggtgaaaccctgtctctactaaaaatacaaaaaaattagccaagtgtggtggcacatgcctgtaattctggctacttgggaggctgagacacaagaatcgcttgaacccaggaggtgaaggttgcagtgagctgagatcataccactgcactccagcctgggcaagacagcgagactctgtctca

SEQ ID NO: 397598 - DNA, 505 bp, Homo sapiens
ctggagaaaaaaattgtaattctttctgataactaaaatgggttataaagcacaaaatcaatcagaccaagaacagtctgttttactacaacatccatttctgctttcatagctcttatcagaaaatactccaacagtaacatagtcaaaagcagaaagaatagggtgtaacaattatgtgatttttgctatgggatactagcagccctttttaaatgcactagaaatatatatttaaaaacaaaggtccttccaaagatatgacttgtagaaatctagattctaaataactgtgatttcaaagatatgactttagaaacaatatgaattttctttataaacatttaccaattcaaaaaatggtgtctttattcaagaatttttaaaataagaataaaatcccttaatgctgcaattttgcagggcaagatcaaagtgcttggaaaatccgtatattagaatgcaaaagaacttgacagatgaactaattcatctgccaaatgcc

SEQ ID NO: 397599 - DNA, 682 bp, Homo sapiens
ggaaagaacaaaggataccaaaaaggcaatattttaagatagtgaaggatggtgtaattattcagtaaatggttctagaaaaattggttgaccattttgaaaattagattattaatactgacaagtctcatatgaaaaccagagagatacagatgaaattgagataccattttcttcctgagatttccaccgtgacaaaaaaatatgatgattattgttggtgaaggtttggggaaattctcaaacactgctggtagcagtataaattgctgtagacttttctagaggacaacactatgtacttcaaggaacacaccttaaggatttcctattggacaggtccttaaagataagaataatcattacagtattatttatgtaagtgaaaaactgatagcaacctaaatatatgccaccatgggactgcttatggtacattcatatagtggaatgctaggtagaaaagagatggagacaggaaagtcatgtttattgacataatacagtgagtttcaaaaaagtccaggattaatgcttttgtttggtttaaaaacctttatgtcggactgggcgtggttgctcccacctgtaatcccaggactttgggaggccgaggtgggcagattgtgaggtcaggagttcaagaccagcctggccaacatagtgaaaccccgtctctact

SEQ ID NO: 397600 - DNA, 403 bp, Homo sapiens
gaagaaaggcatgcgctggggtctaggaacattcccaccctgctgggaagctccagtgtgaggaactctccaacacagctgtgtgcgtaagctggaaaaattaagggcaggtcagcatccaccccaaattcacagagaggccgtttatggctctgctactcacatctccctttcttggaaaacattttaatttaggtctgacctcttgcatggtgggaaggacccaaggtccttgagtaactcagcgaaggcaggggtctctaccttcccatcctagggcagaccctgaacacaagctccttgagctctccaaaaacaaacccacaccaaatgaagggactcaggcactggctgcactccccacaggacggatcagctgctctagaggggcggctcttctctg

SEQ ID NO: 397601 - DNA, 380 bp, Homo sapiens
gaagaaaggcatgcgctggggtctaggaacattcccaccctgctgggaagctccagtgtgaggaactctccaacacagctgtgtgcgtaagctggaaaaattaagggcaggtcagcatccaccccaaattcacagagaggccgtttatggctctgctactcacatctccctttcttggaaaacattttaatttaggtctgacctcttccttgagtaactcagcgaaggcaggggtctctaccttcccatcctagggcagaccctgaacacaagctccttgagctctccaaaaacaaacccacaccaaatgaagggactcaggcactggctgcactccccacaggacggatcagctgctctagaggggcggctcttctctg

SEQ ID NO: 397602 - DNA, 122 bp, Homo sapiens
ttgggcaaatcacttgtgctttctgaccctcacaatgggagagctccctattctttgtgcctcactggaccataagcatcaaaggaaatatcatggaagggaaagagcttctgggatgataa

SEQ ID NO: 397603 - DNA, 581 bp, Homo sapiens
cttgtagctgacagtgtacttcaaaatcgtacataggaattaatgtggcttttgacattaaaaagcaaattactagaccattagaccatacactaaaaggttatcagctcagttaacaaaatgaaaagttgtatctcctctgagtacatttgtggacaagtgtacttaattgatgttctttaatttcatgtgcctgggaagatttttttttaaattgataatcaaagagggttaaaatagggaattagtcatgaaagcaatggcaacatttcataaacgaaatcgactctaggtttgaaaattggaaacaattaataactgtaggcttaacggcatttccttttaatttccttctttttagttacgtaaaatttaatttactgcctgtgtgcctcagtccaactattattagaaaattgcccttaaacttccaaggtattatacataaaagctctctgcaagccataatactaaatctcagcaaagagaataggaaagctaaatgttctgaaattgaagtcattctgctactgagcaggagagtaatttagcaaaccccgattaaatctctctcaataaaa

SEQ ID NO: 397604 - DNA, 407 bp, Homo sapiens
taaagttcagtatgagtcctagggcactggaaaccccaaatgactactgaaccttcctacttggaatttttccatgtcaaaggggtcagaacctgcgacagcagccagactcacatcctttgcactgcctgtccctcagcataaaaagtgcattttctttctttttttttttttttccagagatgaagtctcactctgttgcccaggctggagtgcagtggcacgatctcggcccactgcaacctccaccttctgggttcaagtgatgctcctgcctcagcctcctgagtagctgggattacaggcatgtgccaccatgcccggctaatcatgcaaaatcatgaagacccatagtgccacatttcctacaaaacaggtcaatcgattgtcaaaaggaaagcatcaga

SEQ ID NO: 397605 - DNA, 214 bp, Homo sapiens
taaagttcagtatgagtcctagggcactggaaaccccaaatgactactgaaccttcctacttggaatttttccatgtcaaaggggtcagaacctgcgacagcagccagactcacatcctttgcactgcctgtccctcagcataaaaagtgcattttctttctttttttttttttttcccacctggggacaacagagttgagacgcgtgttcctc

SEQ ID NO: 397606 - DNA, 489 bp, Homo sapiens
tgagctggggggaaaggaaggctggccctctgcttttggtgtcaggattactatttaatgcagtagtcctctattttccttcttcccccaaataaagtgttagtatatgtaattttcaaaagacattttaaaagagcctttccccacacctcaaaaaatttgatgtggaaaggcagattggcggttacacccctaatttttcctacccctttaaaaaatgaaattatatatatttccttccctttccctttccttcatttccttctttcttttctcgtttccttcctttccccccgtcctttcttacagtctcactctcacccctcgaacttctggcctcaagcaatcctctggctttggcctcccaaagtgttggtattacacgcatgagccactgtgcccagccagtctattccttttaaccaaaattcataggtagtgcccagagagagtacaagctctgactcatatggcagtatttacttaaaa

SEQ ID NO: 397607 - DNA, 409 bp, Homo sapiens
aagaagagggagacaatatggggggtcggcagctatcagtttctgctgtaggggaccactgagggctccaagcatagaaccatcatggttcagatgggagaattacatgggtccttagctcatagcttttgcttgatttatgtgatcaaatcagaaacttcggccccacacccaagcccactaatctcaggctccaacagccagcccctgctgcttcagaggtcttggtacttttgtttttccctctcacccatcacctccttttcttctttttttttatttcttttttggctgggtgcagtggctcacgcctgtaatcccagcactttgggaggccgaggcaagaggatcacttgaggtcaggagttcgagaccagcctggccaatatggtgaaaccccatctctaca

SEQ ID NO: 397608 - DNA, 586 bp, Homo sapiens
tttaaagggctcggacaaaaatagtttattctacatatagtcgaaaatctgccaaagaagtaggagagaaattgttggagttacatgtgaattattatgttttagaagaggcatggtgtgttgtgagaactaagcctggttgcagtatgcttgaaatctgtgatgtggaagacccttccaatgcagctaaccctcccttatgtagcgtcctgctcaaagatgccaggccttacttcaccacagtatttcagaatagtgtgtacagagtattgagggttaactgagaaggaaactacccattacactatggcacaatgtggtgtgtcaaaaacaatcaccctttggcttatttacattaataaaaatcacaagctttaataacagacacttaaaaataagataaaaatggattgaaagtttctctgattactaaaaggtaaattacttttctgttcattgaatgtcagccttattaagcttgtcatataagttattaaatcattcatgtcatactgcataaacaaatgttcatttcagaattttaaagaaaaatgtatataaaagaacaatgaattttaataaaaaa

SEQ ID NO: 397609 - DNA, 675 bp, Homo sapiens
gagcgagactctgtgggcgtaggaccctccgagccaggtgcgggatataatctcgtggtgcaccgttttttaagccggtccgaaaagcgcaatattcgggtgggagtgacccgattttccagatgctgtcttcgcaggtgccatgcctacaatggcaagcgtcaagctgtctacacttcatcccattgtgaatcatccactttacgaagatgcagacttgaggcctggttgcagtatgcttgaaatctgtgatgtggaagacccttccaatgcagctaaccctcccttatgtagcgtcctgctcaaagatgccaggccttacttcaccacagtatttcagaatagtgtgtacagagtattgagggttaactgagaaggaaactacccattacactatggcacaatgtggtgtgtcaaaaacaatcaccctttggcttatttacattaataaaaatcacaagctttaataacagacacttaaaaataagataaaaatggattgaaagtttctctgattactaaaaggtaaattacttttctgttcattgaatgtcagccttattaagcttgtcatataagttattaaatcattcatgtcatactgcataaacaaatgttcatttcagaattttaaagaaaaatgtatataaaagaacaatgaattttaataaaaaa

SEQ ID NO: 397610 - DNA, 1606 bp, Homo sapiens
gattgggagatcctgcttgcttttatgttggtgtaatctttattttaaatggactaatgatgggattgttcttcatgtatggagcatacctgagtgggactcaactgggaggtcttattacagtactgtgcttctttttcaaccatggagaggtttgttttctagaaagcaatttttaagaaatagaagaggctgtagaggaacaaggaaatatactcatcaaaacaatatttaattgtatactacttatgacttcacaatattttaaagaccctcgtgttgacctcaagcaatgatagaaggcccttcattgcactctgtctttccaatgttgcttttatgcttccctggcaatttgctcagtttatactttttacacagatagcatcattatttcccatgtatgttgtgggatacattgaaccaagcaaatttcagaagatcatttatatgaacatgatttcagttacccttagtttcattttgatgtttggaaattcaatgtacttatcttcttcttattcttcatctttgttaatgacgtgggcaataattctaaagagaaatgaaattcaaaaactgggagtatctaaactcaacttttggctaattcaaggtagtgcctggtggtgtggaacaatcattttgaaatttctgacatctaaaatcttaggcgtttcagaccacattcgcctgagtgatcttatagcagccagaatcttaaggtatacagattttgatactttaatatacacctgtgctcccgaatttgacttcatggaaaaagcgactccactgagatacacaaagacattattgcttccagttgttatggtgattacatgttttatctttaaaaagactgttcgtgatatttcgtgtgttttagctacaaacatttatctaagaaaacagctccttgaacacagtgagctggcttttcacacattgcagttgttagcgtttactgcccttgccattttaattatgaggctaaagatgtttttgacgctgcacatgtgtgttatggcttccttgatatgctctcgacagatgctgtcttcgcaggtgccatgcctacaatggcaagcgtcaagctgtctacacttcatcccattgtgaatcatccactttacgaagatgcagacttgaggcctggttgcagtatgcttgaaatctgtgatgtggaagacccttccaatgcagctaaccctcccttatgtagcgtcctgctcaaagatgccaggccttacttcaccacagtatttcagaatagtgtgtacagagtattgagggttaactgagaaggaaactacccattacactatggcacaatgtggtgtgtcaaaaacaatcaccctttggcttatttacattaataaaaatcacaagctttaataacagacacttaaaaataagataaaaatggattgaaagtttctctgattactaaaaggtaaattacttttctgttcattgaatgtcagccttattaagcttgtcatataagttattaaatcattcatgtcatactgcataaacaaatgttcatttcagaattttaaagaaaaatgtatataaaagaacaatgaattttaataaaaaa

SEQ ID NO: 397611 - DNA, 429 bp, Homo sapiens
ccggccaagtttcatacacacacacacacacacacacacacacacacacacacacactctttctctctctctctcatccctgcaagccagccaagtttcactccttcctttctgctttcttataaaccccccagtctttatttgtcctattgcggcttatttttcaccccaaggatacttctgatggtcatttagttttcaatgatgtgaagtcacttctcggaaggagaaaaggaaggcatcttatagtatgactgtcctgttcctgaggactcccttaaacattaaaaaatacttctttctttggcggagtgtttatataaatgaatcagagcattttaaatattgcagtattccttacaaaagtttcattgatttgattctattcacagactgttcgtgatatttcgtgtgttttagctacaaaca

SEQ ID NO: 397612 - DNA, 583 bp, Homo sapiens
tttgatgtttggaaattcaatgtacttatcttcttcttattcttcatctttgttaatgacgtgggtaagtgtttagttcataaagttgggtttttttaacctgccaaatagcatgttttcctgtctaaaacaggtataagagaataaataggccctttcctgattatcactcaacatgacaaaattcttcccaagcaaagctttttatctatcttatccttgaaaaatattatagtaggaagtttttctttttaagacagtgcccaagtaaatatttaaaaatgatcataaagtaataagacttactttaatcatatcccattttatgacaaaaatgacttcttttctcctaagtcacttgaggatgttaagtactcattgcagtgacactgccattgcccagaacatttttggaacttctctgagtttccttcacagactatggcacattctttagtatgtcttgcctttcaagagtgggtttgatctttggaaatgaccaaaattttctgaatattttgtgtgattgggctgggtaatacagatcttgctgaaacgatggtgtgacagtaaagtcataaga

SEQ ID NO: 397613 - DNA, 1403 bp, Homo sapiens
gtggacaccacctctccatgaaagtttttcctatcctttccttgtacttcagatgtatattttaactttgattctcaggacctcaagcaatgatagaaggcccttcattgcactctgtctttccaatgttgcttttatgcttccctggcaatttgctcagtttatactttttacacagatagcatcattatttcccatgtatgttgtgggatacattgaaccaagcaaatttcagaagatcatttatatgaacatgatttcagttacccttagtttcattttgatgtttggaaattcaatgtacttatcttcttcttattcttcatctttgttaatgacgtgggcaataattctaaagagaaatgaaattcaaaaactgggagtatctaaactcaacttttggctaattcaaggtagtgcctggtggtgtggaacaatcattttgaaatttctgacatctaaaatcttaggcgtttcagaccacattcgcctgagtgatcttatagcagccagaatcttaaggtatacagattttgatactttaatatacacctgtgctcccgaatttgacttcatggaaaaagcgactccactgagatacacaaagacattattgcttccagttgttatggtgattacatgttttatctttaaaaagactgttcgtgatatttcgtgtgttttagctacaaacatttatctaagaaaacagctccttgaacacagtgagctggcttttcacacattgcagttgttagcgtttactgcccttgccattttaattatgaggctaaagatgtttttgacgctgcacatgtgtgttatggcttccttgatatgctctcgacagatgctgtcttcgcaggtgccatgcctacaatggcaagcgtcaagctgtctacacttcatcccattgtgaatcatccactttacgaagatgcagacttgaggcctggttgcagtatgcttgaaatctgtgatgtggaagacccttccaatgcagctaaccctcccttatgtagcgtcctgctcaaagatgccaggccttacttcaccacagtatttcagaatagtgtgtacagagtattgagggttaactgagaaggaaactacccattacactatggcacaatgtggtgtgtcaaaaacaatcaccctttggcttatttacattaataaaaatcacaagctttaataacagacacttaaaaataagataaaaatggattgaaagtttctctgattactaaaaggtaaattacttttctgttcattgaatgtcagccttattaagcttgtcatataagttattaaatcattcatgtcatactgcataaacaaatgttcatttcagaattttaaagaaaaatgtatataaaagaacaatgaattttaataaaaaa

SEQ ID NO: 397614 - DNA, 282 bp, Homo sapiens
ggagtcgatggaacagaggaggaatagttgcttaaactcctacctccattacttgtctagttgatgtgcatggcggacacctgtgcagaacagacggtggaatggcttggagaactgggcagcaacttgcagggtcctatgggcagctgctgcttcttccttgtggcaacaatcttctgggcaacctcctggaagtccctttccacgttcagcccatacatagcacacgtctcatagtacgtgcaccgcttcaggtcgttggagcacttccttaccctggca

SEQ ID NO: 397615 - DNA, 429 bp, Homo sapiens
cacaccagcctgggtgatagagcgagactctgtctcaaaaaaaaaaaaaaaagtaaatggatccaatgttactagcagcattattgattatagtcaaaaactaagaccaatccaaacattcatcagctgttgagaggataaagaaaatgtggcatattcatacaatagaatatcattcagcaataacatgtaatgaagtactgacacatgctacaacatggataaaccctgaggacattaagctagtgaagaagccagacataaagtcccacatattgtgtgattcatttatatgaaatatccagagtaggcaaatccatagagacagaaagtataatagattagtggttgccagggtctggaggcagagggaatgaggagtgactgttaataggtaggggtttcttttttgggtggggaaaatgttct

SEQ ID NO: 397616 - DNA, 280 bp, Homo sapiens
ttagttagttcatcagtatttttaaagcaacgtatcgtacatgccataagaatattcaaaaaggatggagttctagggatactaccagcctacctccaaaaagaccattttatttgctgtgatttaaaggtatggagaaatgtgtaaaacctcccttactacccaacaataaatactgtttatgaatatagctacaataggcaaaaaattaaaaatccctttattgagagaaatacatcctagggattacaatcacagattctggatccagacatggttt

SEQ ID NO: 397617 - DNA, 447 bp, Homo sapiens
ctaacatacctgctctcatcactaaaaatatctgtctttagatgtcctttctgcatctaggtcttgcatctagatgcaacatgctcaatttgccaaatgcgtaggtagctgagaagtgccacattttaaagactgctctaaattcaagagacacatagtcatggaactgctggaggtttgggctttcgacacactctgaaatactgcctctctcctcaccacccacacttcctgctgataatccaagtttttttttctttgcctttattacttccaagctctagttcttggctgagacaaactgcagtccccaaatgctgtgatttaatgagaggaaatttactcgacttaatgtacaaatttgccaggggaagtgattttgataaggataattacattcacatcttagtgtaaattatagcaaatatcttacactgtgagcagctg

SEQ ID NO: 397618 - DNA, 416 bp, Homo sapiens
caaatactatttaatcaaggggaactaacatttattgtgtttttatatgccaggcactttacataaattcttgcagtcttcacagcaactccatgaggatgaggtggtgttatgaaattaagcagccaggcacagtggctcacacctgtaatcccagcactttgggaagctaaggcgggcagatcacttgaggtcaggagtttgagaccagcctggccaatgtggggaaactccatctctactaaaaatacaaaaattagccaggcgtgatggcacacacctgtaatcccagctacctgggaggctgaggcaggagaatcacttgaacccaggaggtggaggttgcagtgagccaagaagatcatgccactgcactccagcctgggtgacagagcgagactctgactcaaaaaaaa

SEQ ID NO: 397619 - DNA, 411 bp, Homo sapiens
gttcattatactatcccttgttggttaaagaaaatcatccttttattctttgacctgattgaaccaaattcaatttgctatcatagttcatttgtgttaacaacacagtactaataacccacgtactgtgtatattcatgccgaactcttttaagaattactaaatgctgggaggctgaggagggcggatcacgaggtcaggagatcgagaccatcctgactaacacggtgaaaccccgtctccactaaaaaatacaaaaaattagccgagcgtggtggtgggcccctgtagtcccagctactcgggaggctgaggcagaagaatggcgtgaacccgggaggcggagcttgcagtgaaccaagatcacgccactgcactccagcctgggcaacagagcaaggctccgtctc

SEQ ID NO: 397620 - DNA, 172 bp, Homo sapiens
ggatggagacaaaaaagccttgcttacattttttgcctgttcccattgggcccccaaggagaggctgaccacagatccatctaggctgagcagaattaatttcctaattaagataaggagaagctgtgctcattcaaactccaggacaagctgccagccaggtttgctgttg

SEQ ID NO: 397621 - DNA, 711 bp, Homo sapiens
catgcggtaccaaccgtgaatgttgccaaatacagatttcattagctgtcagagcgattgcatcatcacgttattcagcctctagaaaactataccacatacttgtgaaagagtgggagttaaaagggcagacaatgtcttagtattataaaaataactttgaccccacaggtcccctaaaagggtctcagagattccccccagtggtcccttgatcttaccttgagaacctctgccatatactaaataaacttattactgtcttcagttagaagaaactctaagactaaaattgaagatctagaattgaatatttcaatggaattcttaggtttcaataacaatgcttattaagggttatctaaatgtattagatactttcagggatgcagagatgaaacaaatacaacttcttttctccaagagctttcttgttacgaaatgtggcatttacacatcgagttgaaatagagtgaaaaggggtgacatgtttgttgtcacagtaaacaaactacataccactagactcacctttgcaatttataaactaagttacataattctataaaatatttttgactattgatgattctcttgacatgtgattaactataaacaaaaatgacagcaatctttagagatcattgcattttgctttaggctagtatatttaataacttgctctgaaagatttgggcaaacagggtaggg

SEQ ID NO: 397622 - DNA, 326 bp, Homo sapiens
atatactcctctctctctctctctatacacacacacacacacacaaacacacacatactatatattatagtttataacctagaagagaaaattacacattaaacatttaggttcttaatcatacaaggtttgtagttctactagagctgtactcctcatctagcttccctggaggatttattagatttttttttctgtttatgaaaggtattgggaactgacacataacgtgtttgctctggtttctatagctgtctatttctatattatagctattagaatgctagcagatctttctgatttgttctaagctaaagattccactg

SEQ ID NO: 397623 - DNA, 321 bp, Homo sapiens
cagaaaacggtgatctcgggaatgttactggttacagtataagcaatggatttctatcaagattttagatattccacatatgtagtagtattatcaatgtagggtctcagcattttccatagtttggaacaagaccatattcttaatttgtctagtgggaaaaggaaagctgaagtccagagcagttagactgtgactgactttctatattattaacatagggtacagaaaatggaatgccatttttctggtctaaatcgtttgctccccatcacatatttggagcttttccatgtctataaatggccagttgacttagag

SEQ ID NO: 397624 - DNA, 482 bp, Homo sapiens
cagccaagaacagaaccaggactggatgcccatttcgtcattcaacaaatatttactgagcacctacaatccctcaaaaactgttctagagtctaaaccgatggggtcgtaaccatgcccccagcccactcccttgcaggaaagaccgtggctccaggtcccccacattactgattaaaaaaaaactccagtgctctggccatgggcgtgaaggcaaggacagagaccgggaggataatgaggccaaacagctttggcccaccgccaccgggactggcaaagaggccagacctcctaatgctcttccttggaggaaggagcagtgtttgatttggtcaagaggccaagactaaaagtaagaggataaacacgagctggctggacgcgaggctggctcagggcagtgctgtcgggctgaggattcagggagctggtgttgtccaagcttcacatttgcggaaactacaactcccagcgtgtcc

SEQ ID NO: 397625 - DNA, 174 bp, Homo sapiens
tattgccctgatacaaaaccaaagagagttcaaaactatagacaaatatttctcatgaatatagaaacaaaagtccttaacaaaatattagcaaatagaatttgttaatataaaaacatataaaaagaattaaacaccacaaccaagtgggttttatttcagagactttaatat

SEQ ID NO: 397626 - DNA, 495 bp, Homo sapiens
gagaagtctacatggtctttgaagaaacaaattacctatgaccccatgtatttgcatttgtgctcttcctaactatatagtagtctgaatttagtcccccaacgtagggggatgttttaatggacaagcacttaattcatttcaaggttttgaggatttatcttataagcacttactaagcagtggttatgtcccaaggccagggctgcaccctggagactcagggaggcacaatacttgatttcatggatctcataatctagtgctatggaaacattaaaatattaaaaccacagtggagaagagcagtggataggtcttagggaagaagacttgtatgaaaggtgatgcctgaaatcatacttagtcatctttacataggacgatttttatggaagaatgaaatcttcaggattgaatgatattttcattttagcaaactggccatctcttttctttgagcttataaacatggttgaatgtgtcaagtagcga

SEQ ID NO: 397627 - DNA, 303 bp, Homo sapiens
ttcaggggagttaaaaaaaaaaaaaaaaaaaagacttgaacaatgaggctccactggatggatttaggggaattacaggaagcaggacctgacggtgcaatgccacactccacctgtccagacttggacctcaccaagggaggtctgtggggacagggagaggccctctgcctccaccccctcctctactccccaaaccctgagtcaggctgaatgtagtaaacctggaacagaaaagttcagtttggcaataggtatctgaaggactccaggtgcttctcccttgattcaaaattttactta

SEQ ID NO: 397628 - DNA, 386 bp, Homo sapiens
gtgttcagcttccaacctgcgcgtccctcctcttggagagcccaccctgctggctgctggtgcagtgcccgggtggcatggatctgattctgttgtaactatttgcttgtgtcccttcatctcctgctggaccatgagctcctggagagcagggatgtgtgtctaatgcatggcaggcactctatcaatacaggaatgcattttatgtggaatctgacttttttcctcagatgtggaagcacgcagcaacaaacatatgtcgtgaatcaaaaaccgggacataaagcctcacacagggtctgacaagaatataagcatcactattaactgcttctgctattctctgtgtcctcggcagctaagagttattgaataccatgtgctgg

SEQ ID NO: 397629 - DNA, 279 bp, Homo sapiens
taaattccttcacagaaaaaatattctttaacctcttaatggctgtttccacaagggcagaaacaggttcacaatcctagactcacttgtgaaagatcaattcagcagctgaatgctaacacatgtcttcaatcagaatctgctctgtttaggtccctatgcccatgattccccaccacttctccatcttctcaaaggagcttcaattcaaaacccagtaattctctgctttctactgtaccacctcccaggggccactttcatgttcctcggaaataa

SEQ ID NO: 397630 - DNA, 299 bp, Homo sapiens
aactcctgtcacattacctaagtgtgccatcttttacctgctggtcccaatgatccaggcagtaagctaatttgagggccaccactagaaagatccttaggctattcattgcttggggcctctgtgcttctccagaaatcttagtgaaacctggcctgaacaccaattccgggttctggatgagttcaaaagcctccccaccccattacttccactactacgttctctctctttcttcagctcctcagctcctgagcctacatcttttttttctttccttttttttttttttttttttt

SEQ ID NO: 397631 - DNA, 149 bp, Homo sapiens
cactatggaaaacactttggtagtttttcagaaagttaaacgtaagaattatcatatgaatcagcaagtctacgcttagatatatacccaagagaatcaaaaatacacattcactgaccgggcgcggtggctcacgcctgtaatcccag

SEQ ID NO: 397632 - DNA, 225 bp, Homo sapiens
aagagagatggttgcggggtatgaacaagagagagatccactcaaggaaactggggtgggggaggtgtttacattcaccaagaacaggttttcctgggctacgtagcatgaattttcatcatgcctctctaccttctctactcaacttcaatcacttcactcatattagccaacaattacttgatgttgaaatcagtatgtgctgatagcattcaagtcagaagg

SEQ ID NO: 397633 - DNA, 411 bp, Homo sapiens
tagttaaaaatgcaaattctcagccccaccctagacctactgaatcagaaactgggggtatggctcagcgttatgtgttttcacaggccctccaggtgattctgatgcgtgtccaagttgtaaaactgttggcctagaagaccaggcagaggactgggaagcaggaggttcccaaatccactactgacctgcagtgtagttgctgagtcagcaggctgagagcttagttccaagatcacacctgtgttttaagcccagctctgccacctatagattgggtgacttggatgagctccttaacctaagtgtcagtttttgcccatgtaaaatgatgataaaaatacccacctcacaaggcatgtatgagaataaaaaggcacaaggcctgactctatgaaataattgagttcc

SEQ ID NO: 397634 - DNA, 264 bp, Homo sapiens
gcgggcacctgtagtcccagctacttcggaggctgaggcaggagaatggcgtgaacccaggaggtggagtttgcagtaagccaagatcacgccactgcactccagcctgggcaacagagtgagactccgtctcaaaataataataataatatccgttcgaattacactataacaagaaattccttctgtaccttccctatgcctatgataagtctgatatttctattcccattttaatgaagataggagctcaaggaaataacc

SEQ ID NO: 397635 - DNA, 544 bp, Homo sapiens
caacagaaatattcaaaccacatatgtaattttaagttttctagtaggcatattaacatagtaaacacaaattaattttaattattttaaaacctagaatatctaaaatatcttaacatgtaataaatataaaagaatcattgggccgggcatggtggctcacgcctgtaatcccagcactttgggaggccgaggcaagtgggtcacaaagtcaggagatcgagaccgtcttggccaacgtgatggcacatgcctgtaatcccagttacctgggaggctgaggcaggagaatcgcttgaaccagggagtcggaggttgcagtgagctgagatcatgccactgcactctagcctggtgacagagcgagactccgtccccccagaaaaaagaatcattaatgagtctgagcatggtggctcacgcctgtaatcccagcactttgggaggctgaggtgggcagatgacttgagattaggagttcgagaccagcctggccaacatggtgaagcccgtctctactgaaaatacaaaaattagctgggcg

SEQ ID NO: 397636 - DNA, 936 bp, Homo sapiens
attacactttggcagaaacatgaaggctaatacttgaatccaagcacccattccctctgggcttaccacactgaaggcaaaatgagtggggttggtttttctcctcaagaaatgttgttctgggacagtgagtcattggtttttgttcttgcaacccttcatcatctaacaggtttggttaactcaagaagttctaggaaatgttcaaacactgcagatatttatcaaggggcatttttaggagtagcagagtgtcaagaactcaaattgacatctagtggcaacacttctaaagattggggccccgtactatatacaatgctaaatttccaatgctgtgattggaaaagactatgagaaggcctctagtctcttcccactaccatcatctgcagcaggcccacaccacccaaatcaacacaggtatggaagaatcgccccctgccacaggagtgggcagtaagcgttagaacacagattgccgagttctggttctcagtccacccaagtctggtctgtttccctaactgtagaaggaaggtgttagaaatggaaaatccttaatatattctttgattttttcaaaacagaataattgatttttatcatctttcttagtatacctttcacgttctgcacaattattctagattcaaactgaagattgtggttcatgtcaagagtcagtttggtcactgaacactgtctcatccagctgtgggacactcatatgagcttggtcataggtggctcatcttcccccacttactgggtttccataatgccattctcttgggctgttagataaaatatttacaacccatccctccatcatcatcaaagcaatttatttgcacaaactccactgtcactaaatcacatgaatgcatccatctttcttattttcatctttttgaaaattagccagcatgaaaa

SEQ ID NO: 397637 - DNA, 524 bp, Homo sapiens
cagtgggcataatcctaatggcctgatccaacttttctccccctttgaacagcaccaggacaaatcgtaagagatttggggacaaacagacctggttgaaacctcaatatgtgaccctggagaagtatgccacctaacctcttcaagcccacaaaatgaggataagcccttccttttgtgtgtgctgtaaaaattgcatgaaatgtacccagtatatgagcaattgctcagcagtgtttggatatagggagtggatagctattattaattgcagattattttggaaggaaaaacacacagagaattatgtatctttcagtgcaaatgttagttctaaaaacaatcatattatttacaaagctgcagttatagaacacaattctgatttctgcctcacccccacggttaatactgtaaaacatttcctacgtttcatctgatagtgttattaaaaatagctgttatttttaatagctatactaaaacataaaaatgtttaggtcaggcgtggtggctcatgcata

SEQ ID NO: 397638 - DNA, 790 bp, Homo sapiens
gaccccctacctgagggagggatatcccaggaggtggtgctgggttgtagggtgagggatgcagggtcgggggcacctatagctggagagggcaggggccaaaaggcagccagccttgtgggccacgggcatcctcctccagggtctgcgtgacgtgacaaatgcgtgaggtgcccggcgcagaggagggcttcctcctcacccctctcactccctcccggcccctctcactacttcccaggtccaagcatcagtcatcacccagggctgggtgggctcagagaccagccacctttcacagcactggtcagctctgttattttgacaatagccattctaacaggtgtgaggccatgtctcactgtggcttcaatgagcatttccctgatgattcgagatggtgagcatgttttccacatacctgttggccatttgtgtgtctccctttgagaaatgtctacttggctcctttgcccgttttttaatcgagtcacctgttttctggctatggagctgggtttcttacgtattctggatgtgaacccttgtcagaggtatgcttcatgaatcttttctcctattctgtgggccatctcttcactccactgattgtttctctggctgtgcaagggtctcttggtttgacatcctgtttgtctatttttgcgtttgttgcatgtacttttgggatcatctgcaaaacagcattgctcaaactgatgcatagtttttcactatgttttcttttggtgtttttacagattcaggtcttacgtttgtctttaatcca

SEQ ID NO: 397639 - DNA, 435 bp, Homo sapiens
tgattaaacccttctagacttttgtctctgtgtaagaaacaaatcaggattcctcccagaccaagcggatacacagcttctcctatccaaggaagggattcatccgccccctgggaaagcaagaaagaccatcatgtgatcaatagaaattgtgcttcacttcacttatcagccttgtgtgtgttgctgagaagggttagagagatcgagaatctaagacaggaaagggcctcagaaggctttaacttgagactcactgctcaccatactggtgaggaaagtgagattcagagaggaaaagagacttgaaggggtgatgaggctggttgatggccaacttggggccagtttatgcctccaagggcccagtgttctttcttgggtccccacatcttaggaaatatatatatttttttcttttccttctttcttttc

SEQ ID NO: 397640 - DNA, 568 bp, Homo sapiens
tacacacacatgggcaatggagtagccactgcaaatctccagtgcgagctggtggggagaagtgtcatgagctgaatggccagtggtctcctgagtgaaaaaaataaatcttagagttttatttcggcctcatttagttattaaaatcattggtttctttgtcttggtttccccttaactatcacagcgttaaaactcacccttcagagtcaattcacatcaataagagactcaaaatcttcagttccttcatgttcatacacacacatgcacatgtgtacacacacacagatatacatccatgcatatggatgtatggatctcttggttcccccccacactcttggttgacacacacccacatacatacacatgggcacacacaagcatacacattcatacacaggcatagatatacatacatgcacatatgtccacacatgcacacttggcatgcatacacacacatgggccaatggcagtagccactgcaaatcttcagtgcatctttctggggggctgcagaggtattaattacacctctaacctgagcaatctacttctccag

SEQ ID NO: 397641 - DNA, 264 bp, Homo sapiens
tgaccaagtggcgctgctgggtcagtgtgcgtgtggcatggacaatggccaggtaacagtccatgctgcggcaggccagtagtagaataccaccgtagaagttgacttccttcaggagctagaccacctggcacagattgtgccaaaaatccagccattcatcttggaggcagccaagatgggcaatgtcagggaaaagaacaggtcggccaaggccagggtcagcaggtagacatcggtgacagtggctgactcagctgaata

SEQ ID NO: 397642 - DNA, 283 bp, Homo sapiens
gccatatgaaaatgggcaaatttaatgggttaacatattaattgtcttaacttaggtgccaggtgactaataactcctttttgtttttttttcttagcatttggtttctgtatttcctagacattttttgttgttgttgagagctaatatatattatttgagacattttagaattaagtagaatataaattcatagggaaaaattagcttaaatgtaaagtacttaattttccgcctagtaaatgacaacatcaatacaagtttgacagtaacattttagtaa

SEQ ID NO: 397643 - DNA, 297 bp, Homo sapiens
ggaaacagctggagcaaaggctatgaggtggggccatgagcttggcatgttgaggtgacaggaaggccagtgtgtggagcagaatgcatgtggtcaatgatgcaatcagaggtagtcagtgctcgatagtataggccttataggccattgtaagtagttttgattatggtctaagtgcaatgggaagctattggagggttttaagagaagaggtgatatgaactaatttgcactttagacagttcactttggctactggttgaagaatggacatcagaggaataaaataggaagctg

SEQ ID NO: 397644 - DNA, 411 bp, Homo sapiens
gcagtgtaatgtcttgctaagagaaattagtattcagtctgctcaggttccagcaaggactttcttcatgaagatcttcaagtggaatcaagcagccttgcccatgaagtcatgcctgtggctccactgagaaattcgattaagtattccaatactgctgtgaaacgaagtgatctgattccggtgagacaatttatcttgcaagcatagcccatctggattctttacactaaggcaagaggcaagcagaagacaaagagagaaagcagaggacctccgggaaaggaagcccccttttcagtcggcctaggcagaagtagatttactctgaggattcactccaagggtgaagttttaagggtgcttcacttgctctggtttcataaataaattttgatcttcttaaataca

SEQ ID NO: 397645 - DNA, 329 bp, Homo sapiens
aattctatttctttatgaacaaatcatcaaaaagatcaattgtaagatgaaaaggctttgcctgtgccctatctttcgcaaaggcttttggtctatgtaaagaagaaaatatgtgccttggtgacagtaaagaattatcttaaagctgtattgagaatgaacatcacttgttactttataaagtttgggctgaaatgtcttgtcctccattcctggaggcctagctaagaaacttatatctaatggcaagaagaatgttccagaatacaggatgcttgaattcttgatccagcttaatttctttcttttttttaggaaaaaaacaagac

SEQ ID NO: 397646 - DNA, 349 bp, Homo sapiens
gaggctgaggcaggaggatctcgtgagcccaggaggtcaaggctgcagtgaatcgtgattgtgactgagccactgcactccggcctgggtgacagtgagatcttgtctcaaaccaaataaataaacaagtaaaattatggcttaaattattttttcctatttttaaaatgtatgtgcaaatgcaataaactaagtaagaaagaggatacaaataaatagtagaaacatctacgaataagctatggttgccagactcaaatatcacaacttaaataaaactgagctttcttgtatgtatttcttaggattgaacacggtagacaggggttagagccagcctagtgagtag

SEQ ID NO: 397647 - DNA, 476 bp, Homo sapiens
taccaatactacttgaactcctcaaacaaaattgaagaggagagaatatttccaaacttagtctacaaggtgagcattattctcatatcaaaaaccagacaagagcacaacaacaacaacaaaactacacgccaatatcactgatgaacatacctgcaaaaattctcaccaaaatattagcaaaccaaattcaacacattaagaaaatcattcatcacaatcaagtgaaattcatcgtagaaatacaaggatggttcaacatatgcaaatcaataaatgtgacgtaccaaattaacagaaccaagaataaaaaccgtatgagatttccacagatgctgaaacaccatttgataaaattcaatatccctttttgacaaaagtccccaacaaactgtgtatagaacgaatatacctcaaaataataaaggccatatatgacacacccacgtccaacatcatactgaacagggaaaaat

SEQ ID NO: 397648 - DNA, 373 bp, Homo sapiens
gcagtggctcatgcctgtaattccagcacttgctgaggctggtgggccacttaagcccagaccagcctgggcaacatggtgaaccccatctctactaaaaatacaaaaacttagccaggtgtggtggtgaacgcctgtagttccagctacttgggaggctgaggtgggagaataacttaagcctggaaggtgaaggctatggtaagctgtgattgcacaaccctgtctccaaaataaatagttgaagaaataatagttaatgtcaataataaaatatcttacacatcaaaaatacatggtattcctaaatactttttttttttttttttttttgagatggagtttttgctcttgttgcccaggctggagtgca

SEQ ID NO: 397649 - DNA, 283 bp, Homo sapiens
aacttccctttcccttgtttgtcaaaggaatccgccccaacggttgtccccttaagggaagtcccactggggggagggggcattggttgcattaatgccctcttaaccagctcagaagtcagaaacttcaaaagggaactcaaaccattgttagatgacccttattgggtagcagatcaaattgatcaatttttagggccacagttgtatacttgggctgaactaatgtccattttagatattcttttctcaggggaggaaaggactgtgatccacagggcca

SEQ ID NO: 397650 - DNA, 111 bp, Homo sapiens
agagaaagggaacctggaatagtcaaagcatatatggagggtgtgtggatgatcagaacacagggtgttgagcaggaatcctgtgggaaaggcctggatttggaaagtgga

SEQ ID NO: 397651 - DNA, 497 bp, Homo sapiens
cttataaagtgtcaaagtccaaattgatccaaatgataaaaggaactaattgggttgttgtgtgtactgttgtaaacagtctcacataatccttatagccgtcctttaagatatgtacaactgtatcccattttatagttgaggaaactagtttcagtatgttaacttgctaggatcaccccactagtaagtggttggagtttggattaaaagtcagctagcctcacgcctgtaattccagcactttgggaggccgagacaggtggatgacaaggtcaggagttcgagaccagcctggccaacacagtgaaaccccatttctactaaaaatacaaaaagtagctgggcatggtggtgcacacctgtagtcccagctactcgggaggctgaggcaggagaatcgcttgaacctgggaggtggaggttgtggtgagctgagattgtgccactgcactccagcctgggcaacagatcgagactccatctcaaaaaaaaaa

SEQ ID NO: 397652 - DNA, 123 bp, Homo sapiens
gggtaacagtgaaaataaaaatagggttgttgtatgtattaaatcagataatttactatgaagcacgtaacagcattggtaaacattaagtgcctactaacataattcagaagagtgattcat

SEQ ID NO: 397653 - DNA, 469 bp, Homo sapiens
aagacctgtaccgacagtgtgcacatgctgaagggataggactggttgacgaacacagggtaaaattataagagtgacacaagtttactgaggtggcagagagaacctggggtataaggtctgccttcgactgatcctttgctgaatgaagaggttaaaaatgactgcacataaatttgtcgattgtgggatagactattcaacagactgaattcaatgctactaaattcatgctaggcttctatttttttctgctagggaaaaggaaagggcagaatggacaggttgggtagatgtctcaaacagaatctgaaagaacagttgaggggagtagcagaggagctgacgttcccatggaaggactgctggtggggctgaagactcagccagggtggcagaccacacacatagattggcatcaatctactcagctgcatgacttcctccaactgggcccacaacaacctgc

SEQ ID NO: 397654 - DNA, 406 bp, Homo sapiens
ttttctgttttgttaatcattaagcatttctaaaactcaatttagacttgagatatttgtaaagaaacagtatgacatctgatatcctgtatctgagacagacgctattttatgaattttagcatgtgtctttacattgtgttgagaagtgtatatttatatgtgttgatatccaaataagttatttaccagtactcagactaatctttaatatccacctggttattggtttggttaagattttggtaatcacaattgaggcttaattggaacagtttttttcatggagtgccacttgagtaaagatcaccaaaaatcaagtcctttgatttttaagattttccataccagtggaaaagatagtaattagaaggctttttactgatagactgggttatcagcaaga

SEQ ID NO: 397655 - DNA, 570 bp, Homo sapiens
  misc_feature (513)..(513): n is a, c, g, or t
  misc_feature (522)..(522): n is a, c, g, or t
  misc_feature (530)..(530): n is a, c, g, or t
aaaaagccataatacaagactctaaagatctggaatgaaacctaataagagactggtaggtcaaatgagagcaaagcatttgaatttgactggattgttttctcactggaaatagtgattctatgagttcatcattaacacattttttgactggaaaactgctataggatcccagggaggactaaatttgaacagaggaagtggacagtgttgcagtctctgttctagctcttggttctagaataggagagttaagagcaccaatttgggatgaagaaagcagaaagcaattatcgatatcaatcaagagagcagaacagcctctctccctccatcctccctctgccctcttctcccttcctccttctctgctttcctttcactctgtgtatgttagctttggccccattccataagccgagataaaaatgctaggcatgataaatttgtgactgttactaacatttaggattttttttttgagatggagtttcactcatgttgcagtgagcngagattgtnccattgcnctccacctgggcaacaaaccgagagtttgcttcaccaaac

SEQ ID NO: 397656 - DNA, 484 bp, Homo sapiens
ctgaaatgtatctgtaagtacaacatagtttttatcaaaatctgaagactttttgtagctgtagacaagcttattctaaattttatatggaaaaaaaaatttgaaaaagagcaacagaatcactctagtgagtgttaagacttactatatagctatagtaattggagagatagacatacagaacaataaaacagaataataaaacaataaaacagaatagagaagcataaaatgcataaaagcaactcaatggaagaaggatagtcttttcagcaaccattgctctatcaattgaacatccataggcaaaaaaaaaaaaaaaatctctacctaaattgcacacttatattaaagttaacccaaaatagatcatggaattaaatataaaattttaaactataaaactttagaagaaaatatacacaaaatgctttgggacctaagcaaagagtaggcaatgtgttcttatatgtgacaccaagag

SEQ ID NO: 397657 - DNA, 309 bp, Homo sapiens
gaggcagactctagaggatctcccacagtgcctggggctttccaaaggcacctcgcatgcctatttgagcctgtcagccccagcacaggacaacgtcttgttgatgcggatgacgtggaaggagtggagccacacccggatatggaagccatctttgccacagctttttaccatgtacttattggcacaaattcgggcagcctccagggcttcagaggacagctgctcaaattcatctgacaccatgtggccataaagcggaaactcatccacttttaccttcttccgccccaggtcaaaaatgcgaat

SEQ ID NO: 397658 - DNA, 173 bp, Homo sapiens
ggcatagtctatcatgttggactaggaaatgatcccagagttaatagaaaacagtctcaacagtatctatggctaggttgcataccacccagaagccaggaagactaaatgtgggataaagctcttactgtttcaatcccattaattatgttgctttatgaatgtttttcttg

SEQ ID NO: 397659 - DNA, 563 bp, Homo sapiens
ttttattgttgttcgtatgttttggaaatttccttgaggttcaagtaattttgggagatcatctggatctttcctttaactgcattttttagtttattgtcaaagcctgtagtttgtaccataaaaataatataatacaaggaagaaaaatgagttatttcactgagtggtttgggtatgtttgggtttaaaataatgtttacttgcagccgggcgtggtggctcacgcctgtaactccagcactctgggaggccgaggtgggtggatcactggatcacttgaggccaggagttcaagaccagcctggccaatgtggtgaaaccccatctctactaaaaataaaaaaattagctgggtatgctggcaggtgcctgtaatcccagctactcaggaggctgaggtgggaggatcacttgaacctgtgaggtggaggctgcagtgagtcgagattgtgccactgcactccagcctaggtgacagaatgagactctgcctcaagaaaaagaaaaaaaataatgtttacttgggattgaagcctagttataataagcaaaacaaaaaa

SEQ ID NO: 397660 - DNA, 433 bp, Homo sapiens
atgtatgcccaggaattttcaaagaaaatttcggggagactgtcattttgctgattgcataaaatgatgttagtgtacttcctattgtatcctgctttgtttaactgggcatcgggagtgtttcatgatttaggagtaatctttttttcctgtcaatacagggtctcgctttgtcacccaggctagagtgcagtggtgctaacatggcttactgcagcctcaatctcccaggcttatctgatcctcccacgtcactactcaggaggctgaggtgggaggatcacttgaacctgtgaggtggaggctgcagtgagtcgagattgtgccactgcactccagcctaggtgacagaatgagactctgcctcaagaaaaagaaaaaaaataatgtttacttgggattgaagcctagttataataagcaaaacaaaaaa

SEQ ID NO: 397661 - DNA, 861 bp, Homo sapiens
ttggtatcagctcgttgtcttgtgaactgcttttcacactcctctaaaacttggttccttgtgctctcactgatctttatcacttttaataaaagctacaataggactaagaataaataagcataaagcatttggctggaagcaacacacacttcaggaaatgaaaaccaattaagtatctggcaagacccttcccacagaagctgtagatgggtcagctcatccacagagccgtgcccacaattcaaaaactcagatcccaatgatgaataatttggttttcatggtttcaacaatatttgctaacccaagtccaaatgtcagcaattagatttttttgttcaaaaaatttttaagagactggagtctcactatgctgcccaggcttatcacaaactccttggctcaagttatactccagcctctgcttccccagtaatcgggattacaagtgcactgctgtgcctggcaagcaattagatttcaagagtcctccactgaaggagtggtgccttctctattctccaggtgagagaaacagactaaaggcaaaagaggatgatacaggagagaggacaataaaaggcagaaggggcgatttaccccaatctcagatgtcaggaccagtttgatggaacatggcaagggcagcattcttccaacatattctaggagccaggcactttacattccttccaatcctctcaaagacccatatggtaggtaggttattctcctttctcaatgaggaaaccaactattagagacattaatttagtactcttctaaggaaacagagccactaagaacaaggacttgggattgaccccaggtctgtctgtcctcctacaatacaatatc

SEQ ID NO: 397662 - DNA, 315 bp, Homo sapiens
tatttatatcctatacttatgtaacacaaacatgtacagacagtcccaactttacataaatgtacactgaagaatttcaatccaataggattcataaattcaggaattaactatttgcactgcctaataattccttcagaaaaaattttaatctgggcaatgagtgcatttttgatttatcagttctgaggaagagacatgactctaatgggttaaatgggttaagtcattacccctcacataaactgggcaatgacactggtggaactgctttcctacactcaagctctattccgagtgactcagcaacccctt

SEQ ID NO: 397663 - DNA, 355 bp, Homo sapiens
aacatatttaacaaaaagtgcaaaacttacactctgaaaactacaaaacattgcagaaagtaattaaagaagacctaaataaatggaaaaacatgccatgttcatggatcagaagagttaatgctgttaagatgacaatattcctcaaacttgtctgcagattcagcataatccctgtcagaatctctgctgacatctttgcagaaattgacaagctgatgctaagagttatatgaaatttcaagggacccagaatagccaaagaaatcctgaaaaagaataaagtagaaaaacccacatttcttcattttgaattacaaaacaatagtaattaagaagtgtgttactggcacaa

SEQ ID NO: 397664 - DNA, 531 bp, Homo sapiens
ttaatgtagtacagtacgtctttttaaaaacttcatggtttaaaatttttgtgttccttttaaagatacttctatagtaacaatttaggctgggtgcggtggctcatgcctgtaatcccagcactttgagaggccgagctgtctgaacccattcaaacccattcttcctctcttgagatggaaggagaacaataagaatgaaaataaaaatgacaatgaacataatattaatgatgagagtggttaggtcgtgcacggtggctcacatctgatatcccagcactttgggaggccaaggcaggtggatcactttaggtcaggagtttgagaccagcctggccaacgcagtgaaaccccgtctctactaaaaatacaaaattagccaggcgtggtagcctgcgcgtgtagtctcagctactcaagaggctgaggcgcgagaatcacttgtacccaggaagcggaggtttcagtgagctgatattgtgccactgcaatgcagcccgggcaacaccagcagaactccgtcttaaa

SEQ ID NO: 397665 - DNA, 172 bp, Homo sapiens
ccaaaaatcagggcatgagctgtcagagaggagtaaatcagagctgcagctgggaggccttctggggaacgcaggacttagcatgggtctcaaaggcaacagcctttgtacggtttatcgtttactctcagccagcaggcagaaggggtgagaggtggtttctacttgcatc

SEQ ID NO: 397666 - DNA, 277 bp, Homo sapiens
accccagggtgctacctgcatgctaccatccagtcccagtgacgacactggtgccaacggtcccagggccgtccctgtatcctggaagctggctcacaggggagctggttgggtgttgatgggggttccccagtcacagggtgtcgtggtttagacatggccaagaccagactggctttgatcccattcaacaccgtgcagcatcctcgtaagacgcccgtggactggagtgggttgaaaatggtaaatggagtggtctaggagaatcactgtgctg

SEQ ID NO: 397667 - DNA, 572 bp, Homo sapiens
gcctccaaagtgctgggattacaggtgtgagccacctcacccggcctcaaatgtgaagtatttcaaatcgaacttgttcacagtcaaggcaagcatggcatgcttgctttggccagcacatgtactaaaaattcgaacaacacagagacgattaccatagcccctgtgcaatgatgacatgcaaatttgtgaagcattccatactttaaaaaaaacacacacagattgggacctgctctgcaaggcatcagatgccttccagtcagtaagagacaagagatacacagggtgctcccattcccacagcaagcaccaccctgcaccactagtattagcaccacccacatggaagggtgccagacacatacctactagctgcctgccacgcatggaaaattctttaggcaataccctccgcacccagaaggctaccagacctgttaagccttttcaaccagtttttgcaagcaagagaaatgcaattcttaagagcgggaacacccctttattacatgtaaagatacacaagctggatgaattgaataggggtgaacagtgatgacccatgacca

SEQ ID NO: 397668 - DNA, 400 bp, Homo sapiens
ttttactaacacacaaaataacaagttctagttgtgggacctaatgacttctatagttttgaaatggtgatgggcataaatgatatttcacaattggcaacaactgtgaagtgatataaaaatacaggtatttctgttggagacaaggtcatagatactgccaatatctggtgggtggtccatacattcataattgaaggaaaatgctaaattgtagaggctaatgcaaagtaaaatgtaattattttcctgtcccagtccccaaaacaagagcttgtggatctcagattaagatcccctgggttagaagaacttggctagaatattaacatagccttttactggctgtaccaccttaggcaagttaacctcaaaaagtctatttcctcatttataaaag

SEQ ID NO: 397669 - DNA, 414 bp, Homo sapiens
cggcacgagggtggtaatggcagaggcctagtggggagcctgaactcccattcttgcctagcagtatctaggaacaccaccctttccagatatcaacagatgccaagtagaggaactggacttctactttgatctagcagaaataaggcaatgtcccttctttttagttggagcattgtcacaggaggcctgctaaaacataagatccagagtcttacaatgctaggtctcaatttttaaaaaaggcattgtaatccaaagaatcaggaagatttgagaaaagacaagagaagccaacactgaaatggaacggctgttacaattatctggcaaagactttaaagcagtcatataaatgcttcagcaagcaattatgaacatgctggaaacgaatgaagaaaagttgtctcagga

SEQ ID NO: 397670 - DNA, 492 bp, Homo sapiens
cggcacgagggtggtaatggcagaggcctagtggggagcctgaactcccattcttgcctagcagtatctaggaacaccaccctttccagatatcaacagatgccaagtagaggaactggacttctactttgatctagcagaaataaggcaatgtcccttctttttagttggagcattgtcacaggaggcctgctaaaacataagatccagagtcttacaatgctaggtctcaatttttaaaaaaggcattgtaatccaaagaatcaggaagatttgagaaaagacaagagaagccaacactgaaatggaacggctgttacaattatctggcaaagactttaaagcagtcatataaatgcttcagcaagcaattatgaacatgctggaaacgaatgaagaaaagttgtctcaggaaaaaataagagatgtaaagaagaaccaaatggacattttggaactaaaaaataaagtaactggtccacacaaaaatca

SEQ ID NO: 397671 - DNA, 274 bp, Homo sapiens
tcaaattttgtagcttatctccaagacggtctctatcaatttcttcccttgtatgcaggaagctattttctgattaagaagtgggtccattcctcttaatgatctgcttaaccaaaagcatgtgggagaagcaattttctgggattttgaagttacatcctaagaagtctttaagtttcgcctgagtttcttgaatatttgctttggaggtggccagctgccatgctgtgagactgccatgttgaaggatgcctaaactaatcacatgaagagg

SEQ ID NO: 397672 - DNA, 451 bp, Homo sapiens
tataaatagcagagcaagcaattcctctgtcatcctgcaaaacaatgagcctcttccttcatgttgcttgaaggataaatagagtccccttcactcccccaccacacacacagggaagtaacttgagagccgtgtccaacagcagaggaggaactgggagtgtgctggtgggggctgattcttcagctctggtcccctggagtctgactgggaggcctgctgtgcctagcccagcgaagtcccacccaggcaagctcctggacaagcctgcagtgtggacttccaggagggggtatagggacctgccagctcctgggccccaggcttctctgacaagggagaggcagagaaacatcattatccatggatttcaaaaacatccctcagagagcttgaggctacaatgagctgtgattgtgccactgcactccagcctgggtgaccctctctc

SEQ ID NO: 397673 - DNA, 280 bp, Homo sapiens
cctgtacgtggaggtgtggcccagagctcaacacagggcctttgttctttgtcctcactttctttgttattgtatcctgtctcatgactttaaatactatttttgtgctgaggactgtcagatttgcatctctcgcctgttcttctctggactctaggttcgtgtatacagttgcctacttgacatcttcccattttgatattgaatattctcagacaatgtctccaggacaagatttcccccactttccaaacttgttctacatgtaatctgccttctc

SEQ ID NO: 397674 - DNA, 586 bp, Homo sapiens
ggttgcagtgagctgagactgtgccactgcactccagcctgggtgacaaagagagagagtctcaaaaacaaaacaaaacaaaacaaaaaaaacaaaaacgagagagactggccaagaaacagagtaatgaggcaaaagaggtggtgatgaagaaccttatatatgtcattcagaataagctttgatcaatattgcctgacttcaaataatactaccaggctattgtaaccaaaacagcatggtactggtataaaaacagacacatcaatcaatggaacagaatagagaacccagaaataaagctgcatacctacaaccaaaatgatcttcaacaaagtcaacaaaaacatacaccggggaaaggacaccctattcaacaaatggtgctgggaaattggatagccatatttagaagaacgaaactagacccagacttctcatcaaacacaaaagtcaactcaaaacagattaaagcctaaatattaagacctgaaactacaaaaaaacctagaagaaaacctagaaaaactcttctggacactggcttaggcaatctaacaaagtgctattatccagaactttaaaa

SEQ ID NO: 397675 - DNA, 450 bp, Homo sapiens
ctgaaaatggcagaataaatgtttcacattctttttttctcagatatattcttagctcctcttacctatatctttgtaccttcaaatttaagatttgcaatatataaagactttagaaacaacggagagagacttctagtcatacatttaagcttcagtttcaactcttcgaaaaatcatctcttaggaagcatcttcaaagtgtgaaaatacttcaacagtgtagactttttatcatgcttttcttcaggttacattattatttttgttaggttatattattatagacagtaataatcatgcattattacaatagtgatcaatttctattttaaatctcttaacagttttcggtgagtatcaagacagatgggaaagaaatgggtgtagtcattcttcccttcttaattacatcatagtgatttctttactgtatttacaaaatattgt

SEQ ID NO: 397676 - DNA, 910 bp, Homo sapiens
cactgtttttactccacagattactctagcatgccagtgaaatccaaatcctggcagtaccgtgtatatatatatatatgtttttcatggtctatttaatttaaaatttacttttttttaattcaaaagctttctgatcaaaaagggataaagatctagaaccactttgaattaaagtggcaggacagtctggcagtaatatgcaggacttgttctctctagtccacaggcacgtcttaaacaaatatttctagatttaagaaacacccagtgttcattgcttgtaatttcttaggtttctgagattacttgaagaattttaaaaattaaatattctgttatagctaacactcctctaaactgtgtgtgtgtgtgtgtgtgtgggtgtgtgcgcacacgcacgcacgctgttggggagaaggagggaggtattttttaatgagacttctaaaaaaggagggaggtttttttaaatgagactttgttaaaagtatagaagcaatcataagagacaaacttttcccttctattaataaaaaattatacattttgattatataaaagttagtaatttatagagaagaaagttaaaattctccatgacctcacgaccaagagatagtctagggatactatcttgatatctgttagaggcatttaaccttttgagagtcacagatatctttgtgaatctaatgaaagttataggtctccctgactacctgacccatttacttctgaaggattcgccgatgccagctgatgaggccaactttccagtaccgccccgtgtatgtatcccctcgccaaggtgtgtgcgcacaccacatgtgtgtgcagaccctagagtacaaagattgttcttgatcgacttctattttttcggacgttttagtgtggccccgcgcgc

SEQ ID NO: 397677 - DNA, 283 bp, Homo sapiens
ttgacccagtttggaatctccaggctctcaggggtctaagaggggacttattatggttttaaaattattactctgtttctaaaaaaaaacagaccttggaaaaaaattgtaacattaactgagtatttattaagtattaggttatttacgtaagtcatcttttcaacactcaaagttagtgtattgtcatttgtattttttataaatgaggacattgtgaggttaagtaggttaagggagttacctaaggtagaattgtggaacgtggtggggagagagaaga

SEQ ID NO: 397678 - DNA, 524 bp, Homo sapiens
aggtggaccctggctgctggtggaatatttgacatgaccggtgcccacgcccctctcccattcctctttcttgaaatggagagcaggcaagatgggggcagtggtggaagatgctcctcctccatgcacccagcagccctggggagcggcagggtcgcaacccaagagatgaacccccagtggccccgtcacgagctcccaacggaagggatgtcctagtgcagaggcagccaccacgctcgccccctgtactgggaaggccgccacgctcgccccgcgatggggaaggccgccacgctcgccccctgtatggggaaggccgccacgctcgccccctgatggggaaggccgccacgctcgccccctgtagggggaaggccgccacgctcgccccctgtactgggaaggccgccacgctcgccccgcgatggggaaggccgccacgctcgccccctgtatggggaaggccgccacgctcgccccctgatggggaaggccgccccgaaaaaaagaagaaaaaaaaa

SEQ ID NO: 397679 - DNA, 347 bp, Homo sapiens
aaatggaatgggggatttcctacattcattgattggtatggtagcaggtgtacacactgctaccctttgggttttttggctcacttactctattaactagagttcagtgtggccattatgcagaggtcatcgaggaatgtcatagttttatgattcaggctgaactattgagggagaggggatgaagtgtgaagagtattttcagatactttgtttttttctcagttcctatatagattattgtaaattccacatgcagtataaattaatgagactttactgtagtcagagatgcttagaccagaaatcagtttgttcttataatactgtaaaaatttcctgactga

SEQ ID NO: 397680 - DNA, 128 bp, Homo sapiens
gttttatttcatatagccagttttccaccgaaaactattctaggggtaagatttcaaataataattgttatggctaagaagaatttaagttgaatgtactacttctttcttatgtaatctctaaaaat

SEQ ID NO: 397681 - DNA, 601 bp, Homo sapiens
ttgtggagcctcacatcctgaactttctgaatttacgctgcagattcgtatgcttcagcacttggctctggctccaacagctccagaaaacatgtcattaattttcaaagcattttgttttaaagtaattaacattacctactgaaacaaacaatgctaaaatctcagtggaagtacaagatacaagtttatttctgttcacacaaggtcctgtgaaagttgggcagctcttctccaacaggggaaacagtttgcactgtcatctcagagtcctccaattccagctgttaaagaaataccacagaagagggacagactggacatgtgacatagcacttatcagcctattttacagaggccagagctccgttacaggtctgaaccaactgcaaggacatccagacgtgtagaggagcacatgaatagcgtgaatattaatactttctgccccactgttactactgggcatttgttcctgggctaagctcttcatctttttaatgtttttttccccacctgaaaccagaacttatttgaagttccaaagtttcttctcttcagccccaattcagtggcatctatgatgtgtgtgtgtgtgtgt

SEQ ID NO: 397682 - DNA, 124 bp, Homo sapiens
tggatcacaggagcggtttcccccatgttgttctcatgatagtgagtgagttcttagagatctgatggttttctaagtggcagcttctcctgctctctctcttttcctgccacctggtgaagaa

SEQ ID NO: 397683 - DNA, 423 bp, Homo sapiens
cggactgctgggtgaccggctgggggttaatcagccccagtggcagtgaggctggggatagaccgggtggggtgatgggggtgcggggtgagcattaccctctacccctgttcccgctacacaagcacagcagccccctccttggtctggggctgcaacctgcgcccctcctgctctcattctctcctcacttgcttttctgctctcactgccacctgtcagggcagggaccaaacacccagttcttcccccttccagggactgtgggggccagcaggacagtgtgagagggaggccagcttggcctgggcctgaaggagtgagggggagttcgggaggacctggtgacagaagcctcaggcaatgatttttaaaaattgaggcaactcacaaaccataaaattttcaagtgttcagtgttga

SEQ ID NO: 397684 - DNA, 689 bp, Homo sapiens
ctaatgatctttttcactattcataaaccagcataatttggtcaagctctagtattcttctgctaaaaatagaacaaactcacactgaatttctttggtgtcctctgtaatgtgctcctttaccgtcattcattcacttcatttcttcattcaacacagttttaccggacacatattttgtgccggagatcttgctggacacaaggaatacagagatggtcagaacagagtcctatctttccaagagatctcatgcttctctgagctgaacttctttatcaggattcctaaccacagggtgaactctgctctattccacaaacaaaggtgcatttattggtatccctggtgtcacttccctgcctgtgatgtcagttctctctctggacccattccagatcacacccagcctaaaaggttacttggtgtacagtggaaagtgtgacagtccagggacaagctagaattgatgggtaaactacctccccactctgggcttcatttcttcactgtaaagcacaggttagtgggtgggctctggagtcagacagcctagggccaaatgactttgggcaagtcatttaacctctctgagctttaatttcctcatctataaaataaggattggccaggcattgtggcttacacctgtaatcctagcactttaggaggccgaggcgggcagatca

SEQ ID NO: 397685 - DNA, 280 bp, Homo sapiens
aaattaaatcttctgatccatgaacataggaagtgtttccatttattaggtctttatttctatgttgttttgcagttttgaatgtttgtcttgcacttcttttgttaactttatttataagtataatgtttctttttgatgcggttgtaaattgaattttttttaattcaatttttgattgttcattgctattgatagaaacacccttgatttttacatattgattttgtatcttttgtatcttgctgaactttttattagctctaatagttttttttgt

SEQ ID NO: 397686 - DNA, 397 bp, Homo sapiens
  misc_feature (132)..(132): n is a, c, g, or t
  misc_feature (138)..(138): n is a, c, g, or t
aatgaacctataatcccttaaaaaccctgcaattctacagccaggcatggtggagaacacctataatctcagctaccagggaggctaaggtaaaaggctcacttgaaggctgggcgtggcggctcacacctnataatncccagcactttgggaggccgaggcaggcggatcacgaggtcaggagattgagaccatcctggctaacatggtgaaaccccatctctactaaaaatacaaaaaattagcgagcatggtggtgggcgcctgtagtcccagctactcaggaagctgaggcaggagaatggcatgaacctgggagatggagcttgcagtgagctgagatggcgccactgcactccagcctgggcgacagagcaagactccatcaaaaaaaaaa

SEQ ID NO: 397687 - DNA, 155 bp, Homo sapiens
aggtctaagcttggcaagaaaatgagaaaggctgtggctggctggagctgtggggagtgtgtggagagcagtcggagagttgccagggcctgcttagccttggtaaggtcgtttatctctctattccagcagctgtgggaagctactgaaggttt

SEQ ID NO: 397688 - DNA, 320 bp, Homo sapiens
tggaaaacagggtataagcggtgagagattgtccaaggcacatgttggctagcaggagagctgtgacttgaactcaagtcatctaaaattcagcgtacctttcaaatgcctaggattttctcaggaatccttcctaaagaagtggattttcagtcacagaaatctatctcttgaagctccaaagccttttatttcggttttggatagacatttattggtttcttttcgaatagagatcttgctgaaatgtatcatatacatccctattttgtcttaaagcatacctgaaagataatttagtcaatgactcagagtcataa

SEQ ID NO: 397689 - DNA, 187 bp, Homo sapiens
tatagccagttggttggaagtacaggacacaacctgggacttctggcgtctgaagtgggagcagtcttacgggactgaacccttcacctgcaggacctgatgcttcctctgggtagatagtgtcagaactgagttgatacccaattggtgtctgctggaggatttatggggaacccccacccccaca

SEQ ID NO: 397690 - DNA, 168 bp, Homo sapiens
gattaactcctcttcctcttaaattgccactgaagtggccacagaactataaaaacaggtaaaataaaacaccgtctgcagcagaaaattatgaaaggataaccagaactttctgagaaatttctttgcagtgggataatacacagttaaaagaagtgtcaagcagtc

SEQ ID NO: 397691 - DNA, 270 bp, Homo sapiens
attcttttggtggactctgtatatctgatgtgtactttgtatactactgaaattatcaatattaaataaaaaccactccatctcttaccctgatttaaaaatctatagttcattttcattagtaggataaaattcacagttttccacatagcttagaagaatcaacacccttttcaatcttatctcttctttaccatgactctattgctttgtgggaatatctcctgatacctccttaagattataaacagtaattcctatattgaaaat

SEQ ID NO: 397692 - DNA, 804 bp, Homo sapiens
ctctgtaacctccccaacactgaaaccaccatcaccctgacttccgcagagcagctggttagacctcgaggcctctctatgatcctataatactccatttctctccttgagatcattcactgcaccttggaggtgtttctgtacttttgttacaaaataccatacctatgatgggaggatctcatagctgctgagtccatctaagggtgtaataacaagaagtccacagtgaaaagggacagtcattcacagagtgttgtttactcagaaggggcagggtctcacttgcagacaaaagagacagatgagacctgtccattgtccaaaggcaatacaaaccctgtgtatctctatgtcaacaaaaaagaactcctcaactactatacagtgacaaaaaactgacacatactactaccaaaaataaaattccagacgttaaccacttattctgaattctaagtaaaatccagctgtgatgtcactcttgaaacaaatagcacttaaaactgtggtctggaacatcacaatcctatggaatcaccggggctgagatttctctgctccttctggttccattcttctgcatggcctccatttttctgtaagaataaatgcgctgggcgtggtggctcatgcctgtaatttcaacactttgggaggccaagacgggcggatcactagaggtcaggagtttgagaccagcctggccaacatggtgaaactccatctctactaaaaataaaaaattagctgggtgtgatggcacacgcctgtagtcccagctactcgggaggctgaggcagg

SEQ ID NO: 397693 - DNA, 332 bp, Homo sapiens
ggcatccaatcccttcccacccgcatgatgacactttgccagaactggcagcaaaactatcaagaataagggaaagattctgttaacattgctactggaatatcgttttttataggttaagtgaacagaggaagtaaaaaaatgttttaccatgagttcatattaatatgtcctatacaaatttaacattacagagtgtttacatttattttatttgcatctcctttctctcctaatcaaaaccttggatcttaataatattagcattcattaaaatttttttgttttttaataagagacaaggtttcagtgttgctcaggctggtctcaaa

SEQ ID NO: 397694 - DNA, 812 bp, Homo sapiens
gctttctgaatttacatgtggtccccgccccatccttaaggattctgaataagaactactaactttgtccagccctccagttttacagataaagaggctggtactctttggaaggctctactccatcaagagttatggtagagaaaatttcttgtggtttttggttttctctgtttttcaaaactggaaatcaggctaggctgcaaagaggatgttcttcaaccttgttaacccatcttcctcccttctaacttgggcttaaagtttgacacccaaaacagaagcaggtggtaagcccacttcctttaatcagcatttcacttaatctaagaagccattggtttttaccaggagacatcactatttttattagcattaaaaggaaaaaaaatgatgccaataaaatgatgatatgatgctttcatatcacttacaatttttgttttatttattcagatagttttgttaggtttatttgaacctagatttttgtaatttaatcacttttgtttgtatacactcagatgtatatacatatggacataaatgtattttacacatacacatatatatgcattaagtatatacacacataaatataaaataaaatatataagtagaatacattaattgaggtatctttcacagatacctgtattttccacaggatatggcatggggctgtgttccactgatattgcgtgtgcaaggtttgatgctggtgatttcttgatcccaccaaaggtttcgggcaatgacaaatcactgggtccatagtgaatgtaagatgttatagattataggatgcagtt

SEQ ID NO: 397695 - DNA, 497 bp, Homo sapiens
gggcaagcagagtaaaggatgaattacctttgggtcagtctgagcacatgtgcaattctcatgtcaagtatggagtagactgtctaaatctgaagctcaggagagagatccagcatgtgaagtcaccagtggctacaaggccaaggagttagaagacactgcccaaggagagtacagattgaacagagagggatatcaacactggacttacatattttaaatgaagaaactccggaatattttgcctcaaaaactgtgacttctgtattccacggaccactacattaatttttctcttctattgcagctttttatagtcttcaacaacaaccagtccctacatttaagaaggttaataactgagacagccttcctggtggatccatcatttggcccagcttgtagaaagattcccaactagctctaattagttccatcttatttggaggcagaggtattcctcatcatacccatatcctcatataaattgtccaggt

SEQ ID NO: 397696 - DNA, 780 bp, Homo sapiens
  misc_feature (780)..(780): n is a, c, g, or t
aaggggattgaaattacttaccaacatcacaataatataggatgctatatttctctatatatttgctttacaacagagctttatagtattctatggcttttttggtactctcattttttaatctcaaaggactttctagcatttcttgaagaacaaacctagcggtcataaactccttcatagtggtcataataaagggtattcaattatggaaagaggaagttaaattgtccctatttgcagatgacatgatcgtatatctagaaaaccccttcgtctcagcccaaaatctccttaaactgataagcaacttcagcaatgtctcaggatacaaaatcaatgtacaaaaatcacaagcattcttgtacaccaacaacaggcaaacagagagccaaatcatgagtgaatttccattcacaattgcttcagagacaataaaatacctaggaatccaacttacaagggatgtgaaggacctcttcaaggagaactacaaatcactgctgaatgaaataaaagaggatacaaacaaatggaagaacattccatgctcatgggtaggaagaatcaatataatgaaaatggccatactgcccaaagtaattgatagattcaatgccatccccatcaagataccaatgactttcttcacagaattggaaaaaagactactttaaagttcatgtggaacaaaaaagggccacattgccaagtcgatcgtaagcaaaagaccaaagtggaggcattatgctactgattcaaaatatatacaaggtacgn

SEQ ID NO: 397697 - DNA, 420 bp, Homo sapiens
tgatacagggggcaaaataaatatggttttagaaaagtggcatggctgctgatctatcagtgcaaaaaggagcacacccacccactacatggccaaaaatgttgaaggcaagagactagatggcttgtgaataatatcaaatgaagttgtctttctgtaggaagtcttagacaatgtaatcttgggaggcgggtggatcacaaggtcaggagttcgagactagcctgactaatatggtgaaaccccatctctactcaaaatacaaaaatagccaggtgtggtggcatgcacctgtagtcccagctactcaggaggctgaggcaggagaatcacttgagcccaggaggcagaggttgcagtgagctgagctcgtgccactgcactccagcctgggcaacacagcgagattccgtctaaaaa

SEQ ID NO: 397698 - DNA, 426 bp, Homo sapiens
ggtgaaagttgcttcgtaattcgtgtataattggccacagctagcaaataacaggatgattgaatccaggcctgttttattccaaaaatcatattaccctagggtacagtgtgccccatcggagaacacaccaggaaaagaaatatgacctcctttattaacagtctttcatactgacctttaatgaaaacactgactttaccgaccattgggaaagtagctcataaaactaagttatctgtatgagtcaataataagcactaaaggggttaagcttcttgcactgaataaagcaggtggcatattttttagaatttctagtttaagtagcttgtacttccctgtactggggatcacacgctaaagaagctttttgtttttttgttttttttttgagatggcgtctcgctctatcgcccaggctgg

SEQ ID NO: 397699 - DNA, 584 bp, Homo sapiens
aaaatactataaagctaaatgtgattgtcaatgtatgctataggtatgagaataaggaaattactatttcttttttaaaaaaacttttataacttcattataacacactggtcccaacaagtataacaatttaaagtatttttaaaaaatgtaaacagatgcagatttagtgagaaaatgaacgttttttgatagactgttctccgtgagtcttttgcatttctgcatgttttgtgagcaaaggcaatgactgccttgttctggattatctttttgaggatatgtcaagaaacatacgcctgcaaaggtcttcctctgaagccaaaggaagatttgttttttccagtacaaaaaagataatgtctctttctgggggaaatgtcaggctggattattgcctattttaaaacactggggttccccaaacttgtagtttccctcctgtgatacaagctacttcatgtgcaggtgccacctgaactttttacatcatcttttgggaattgggattcaattagccatcaaaaaggctaatactcttgttaatgcaattgctatgagtaataaactgcccattgtctctg

SEQ ID NO: 397700 - DNA, 299 bp, Homo sapiens
caaataaatcagattggcattttaaaagttagccagatataagaagacacatcagatgtgttctgtaccatgacaattttatagtgttgaagaataattaagacatttactcaatgaaactgccagataacaaatgatatagagaataaattgctgcttcagggaaaaatcaccttccatttctcaaagcatcttccatttctaagaatactgaaagtttctcaaagggcccccatttctaagaacactaaatcacgtaacttaatacctatctgtattagtttcatgggactgctgta

SEQ ID NO: 397701 - DNA, 395 bp, Homo sapiens
ggtggggttcactaacctgtgttttaaacaagccctttagggaattctaataagtttgagaaccactgttgctagaggactgcttatggaaagagagatggatataggggatgagaacaatttaaagagaaatattattttgtgtttcttaatggcacttttatgggtcctatatgtaaataagtgtattatctgagcatctactgtgtataacgtttgtgctagccactgtggataaagtggcgaacaagtcaaatgtggcccctgccctcacaaaattcacatcctggccagtgagagaggctccaaacgttctattaagtttgggggtggggtggggatcagagaagaaggcttctttgagccttttggttttatgactgtttctgaaaagc

SEQ ID NO: 397702 - DNA, 402 bp, Homo sapiens
caagaaatttgtgaaataggaaggatatgattattagacccgttttcctgatgagaaaaccgaggcttggataaggtatatcggttaggctcacttggttaatgtgtggtgaaggtagcaatccaatcacatgaatcttgacctagtgctcttcccatggtgtctccttaggaaagctcagatgtcctggagaatgacctttaaagatggtgccacatgcgccaccaggctagagctccacaagagccacatgtctttcttcactgccacatccttaatacccagcacagcacttggcatgcagtaggtgcccaacagccttagttatggaatgaatggatcatctgtgccagactctctttctgacttggaaccctccatacctacatctttctgatttag

SEQ ID NO: 397703 - DNA, 451 bp, Homo sapiens
ttcagagcaaatcagttgcctggagttcccagtgaagttgtacctgtgcccgtgcgataacgtcagtggaagctgccccgagtttggggctttagccccttggagaaaacagggccacatagctgcctttctatcaagtctccctacaaaactgagaggctctgggaaactcagcctgtgaccccagcgtgggtgaagataggatcaagatggccatgtggcagggtgccatggataacagaggctttcagcaggggagttttagtagcttccagaacagctccagtgatgaagacctgatggacattccagcaaccgctatggatttctccatgagagatgatgttcctcccttagaccgagaagtaggaggtatcattattggtgatgataatttatcttaattttttaaaatttatgtacaataaaattttatttttttttaatttta

SEQ ID NO: 397704 - DNA, 114 bp, Homo sapiens
tgctgggattacaggcgtgatttgttcttttttgtgttatttttatagctatcctagcgggtatgaagtagcatctcactgcggcttcagtttgcatctctaatgacggataac

SEQ ID NO: 397705 - DNA, 400 bp, Homo sapiens
ctcacttattcaaaacttttttttactaagactttgccatcgattcaacacttctgccttcaaccatagataattgtgccacactggtcctgctcccaggataaatgttgccatggccactttttttaatctgtggaagatacacctttttacatagaattggagaagcagacaagtttgggatatgtaggccgcttactgtatttggaaaaggtagctatgtttttctgagataaactttggagtaaaataaaagtatactccagatccctgttcattcagagtttataaacagggcctttatggtgctttccttttctaggttgtcaaaagtaatactacatttagcatattatcttttaagtatgtgcattaggaaacaattatgtgattctgcgtt

SEQ ID NO: 397706 - DNA, 389 bp, Homo sapiens
gggctatacaagcaaacagcaaggacctgagaagaaaaactagttaggtgtgactgtcagagtgatgtgtacagtgtgatcctttctgtgtaaaaacaagcagtaagaattcgctgtttacgtttgcgtgtgtttggagaagagtggggaagagtaggcactgccagactgtgaacactggttaggttattgttatatctttgtattatatacactggacatgttatttgtataatatgagaagaaattttataaatcattaaatcttttggcatttaggaacatttgtgttttctaatagttgcttctatactattatctttattatatgcccttcatcttctcagtgtttggctgttgttgtgattcccttttgtgagcagtgttga

SEQ ID NO: 397707 - DNA, 314 bp, Homo sapiens
cacatggttagggagtgctggaggtgatggtgggagggttggtcaggaaggttttacatggtggaagtaaggttttgcatggtggcttgtaagcatagtcgttaaggaagtgaaagcttgagtcagaggacacccgagggaggagcattccaggtggagggaggagtaagagcaaaggcctgggggaggaacagcaaggtgcccagggatgggggaggagcaagctagggagaggagtgggagatgatgggcccagagactttgatgggaggacagtgagagggaggctgagtagaagcagacatgatctgacc

SEQ ID NO: 397708 - DNA, 267 bp, Homo sapiens
cttccaagatacatctgaggtgaatacgggaattaaatttaaaagacacaaacaagacaataagaacagcagagccttgctttattaataagagcaagtcttcagggaatggctataacacttcactaaaccttctctttccagcaggttttcttcatggtaacacaggcaccaggctttagggttagagacaaaggcaaactatagaatttcttctaaattttaaatgaaccactatgaactcactcctgctcagcacctaaacaa

SEQ ID NO: 397709 - DNA, 171 bp, Homo sapiens
aaaaggaggcaatcagtattggagggaccattagcagtttctgccacggtccattttggccacccagatatctgtatacacctgtcttgacctgcataaaacatctgctttccacaagggagataggcctgggggcctaatcagtcacttcctttagggcaaatctggtat

SEQ ID NO: 397710 - DNA, 277 bp, Homo sapiens
tgggagctgagaggaggaacaaaatccatgcagagtttgttggaggaatgccaaagtgatcatagagtttactaagattttgacttactcttgcactttaatcataatatatttgcagcatgggggattagaggcagtctttggagggaagaggttgcatagaaaataattccttatagctgcagagcaccttgactgaacaaaggtgttttggggctgggtgtggtggtggctcatgcctgtaatcccagcactttgggaggccgaggcgggcaga

SEQ ID NO: 397711 - DNA, 382 bp, Homo sapiens
atgaacgcatgaaacagtccggagtggggaagctgaagctcaggcatcaggatccgggagaagcatccagtccaggcggacggggtggaaggttcagagcaggggccccaagtcaggagtagggaggcagacggcaagacctccttccatgaaaggaggctgggaccaggggaccaggtagtgcaacgcggtgagggggctgtcagggcgactggccggaggagtcagaggcaggaggcaccaccaggttacagacaaggaccttctacaagagggaaacgtgtcatgggctctggagcccctgtccaggttcaaattgtgaccctgtgccagggacagcttctttgtgcctcagtttttcccataaaatgaggataataat

SEQ ID NO: 397712 - DNA, 442 bp, Homo sapiens
tgttctccagatgaatgaagtacccaagatagagcatctactttaatttaaagtaccccaaagaagacgctgaacccttggatagcaatggaatatccccccttattattcaaagaacagaaataagcaaaaacatgaaataaaacaaaaagacccaaaatatcaaagtagctactcaaaatgtcaaaactagcattttggtgtgaatccttctgggttttcctcctgttttggtgtatgaacttaataaggcagcatgaaaattgctccactaaagaatgcaacagtaggtttatattggacagttgcatagcttggatgtatcagagtttattttaccaataatttgtgaaaatggacttttgaatgtggttcccaagtcatgtcagtgtaggataggtgtttgtgacacaaataactttccttcattattgaatactaa

SEQ ID NO: 397713 - DNA, 417 bp, Homo sapiens
cagatcccatgctggctcactcacatacccctcactgctctgcgcctggctcgcccttggcaagcatgggatccaggctggtagcacaagccgagcgcagcctgccaggctgagtgggcagaatgagcctagcaggtgtgagcaaaactcaagcagaggtgctgccggccacagaggtttccagctggcgaagcaacacctgaaggatcctgtgacattttgggatgagtgagttctctgaattcactggtgatctggttgtttaaaagtgtgcaccacctcccaccgaccagtccatctcttgccatgtgacactgcttgctctccctttgccttccaccatgattataaactttctaaggtctcaccagtaaggcctgcagaactgtgagccaattaaacctctttttaaaatag

SEQ ID NO: 397714 - DNA, 362 bp, Homo sapiens
gttatactgtgttttgtaatgcgtactagggatgcatactgagtgatgtcatgtgtcagaggaaaaagggggcaaggactagaggaacaagaatgacagaacattcgtaactgttgaagctgggtttagggtaggaaccggtatgttacatattccctctagttgtacgtatatttttcacaacaaaggaggtgggcggggcttccggtgggcccaccagttgcattctccatgctacttcctggctggaagtgtctgctctggccagcacaggtgagagctctaaactgtaaattgtatctcaaaagtctttcttgacatgccatttaacaacattcatatcatgcctctgattactctga

SEQ ID NO: 397715 - DNA, 456 bp, Homo sapiens
caatcaggtccacctcttattttccattatgaccgaaatatcttggaagtaagctatgctcatgcccctagggaacctcaggctggctctggtgtgcaatggattgttctgcagagaattccatcttactccagagattcagtggaaaaaaccctagatgtgataaatgactctgggcctcagtaatacggaggatgctgggcctgcttcagtagcccagcagataggaaagaagcatgttctaatgagatagctatggcattctgaggctacgtcagagctaggcattcttgatttctttctcccctgtcattgtgcaactttctttgtctttctcatggtcctcattgataatataatataatataactatataataatatataataagaaggtaataatgctttcatgtgtaccattggctttctttgaaaatcacacatttgtaaattttga

SEQ ID NO: 397716 - DNA, 195 bp, Homo sapiens
attgagccattgcactccagcctgggagacaagagcgagacttcatctcaaaaaaaaaaaaaaaaaaagtaagctgctttttgatttcttaatcaaactaatagcagtgcatcgtttaagtagtacttcagggcttacagtgaaaaacagtcccatgtgcttcccttctccacctctgattcttaactttcctga

SEQ ID NO: 397717 - DNA, 160 bp, Homo sapiens
gtcacaccaaacttcccttgaattagctgattaactgctctcttctatatatttaacttaaaaacattaaaaaccattattttaatgatatagaacatgaaattagaggactattacattattcagcactcttcaaagacccatgaccaaaaaaaaaaaa

SEQ ID NO: 397718 - DNA, 404 bp, Homo sapiens
aagtgctacattatgtgatttttagtgtttcatcactaagccttagtaaagtggattgcataaaatgaaaatgcacagcctctgaaaatcgctctggaaatgatggtgatgcttccagaggggaaagtgatgacccagtgagttgccgatatgaacagctgacgggtgtgttgcagaaatcagctatcaaaatagtttccggtcgccttgccagctgcaggtgacatgtaaactcgaaataactaaccccggtggagtgtcactaattcctgcagattttcctgtctcccgctaagtgatttcacctcttacttttgtgcagttaaattttatttcacttttaaaaactgattttaatcgatttattttcatttaacatatcttctgctcgttgagatcagttt

SEQ ID NO: 397719 - DNA, 287 bp, Homo sapiens
aaaaagccccacgatgttagtcaagttaagagaacaatcaactgctttcaaaaaaggctgttcgtttgagtttacaattccctaatttagaagcctagaagtgcaatctcccagcgattttttcatctcataaattttttcatctcatgaaattttatgccaaaggaagaaaaatatgacatttgcaatgtaatgccacctttatgcagcggtgtttgaggggtaggtgaggtgctgaggaatgtgtgcgtgtgggtacgaggcgtgtgggtagagaggtgggatac

SEQ ID NO: 397720 - DNA, 343 bp, Homo sapiens
gttatagttctgacgtgaggtgtgactgatcttactctgtcgcgccaggctggtctccaactcctgacctcaggcgatctgctggcctcggcctcgcaaagtgttgggattacaggcgtgagcccggccattctgagactgtgttgcaggcattgtacatcttcgcctgatgcacagcaggtatctcctgccacaaggaaaacctcctgcagaaccacagtagggatgcaacacgctaccccctgtgttgaccttgatgctacactctcacccaccgcaccaaccttgatgctacactctcacccaccgcaccaaccttgatgctacactctcacccaccgca

SEQ ID NO: 397721 - DNA, 385 bp, Homo sapiens
ttcctttaaatagaacattggcacacagataccccacaatctggcttattgcaactgttctctgttggtgaagtggcacgtttgcaatccccataacagccatcttaaccatttcacagcatattattcaaatgtacatctctaggtggcaacaaggataggcacttgggctcagtagcaaggggtctgtggggaaaatcctaggacgagggataggaacctgcaaatggcaagacaaactagaggatactcaaccagaggcttagattgggcagctccattggctttctgactgcctacgaggaaaacctcactggaaactcttttgaggttcttgaggaatcctagaggcaaacggactcctctgccttttggaaaggatttg

SEQ ID NO: 397722 - DNA, 732 bp, Homo sapiens
agggtttctgctgcaaggtgaggaaacatccatggcttgtacagatgtgagtctttgatgaagcccccaggcaggcaccaaggtgatgggactcagggccttggcttttagatacatcccagtccctgactgacatctgaccatgagggctggatgggtgggaacaaggaggagtagatggcaaaagtacctgagcccacttcccagccacagggtgaccctggcactgtaaaaaccctttgtcagtcatgccagaaggttctagaactgcccacctcttccatttcagtcctgctgaaaccccttagcctatttccgactcctctgtccatgctctgagttcagctgggcagtgtgtgggctatcacccctttcatttagacctacctagctggcccccatctgcagagccttccttagcaccattaggccttctacttgtgtccatttgaagcaggaggggctggatttggaaaagtctttgaagtgagagcaccacgcttgtcttcgttagaaactcttaactgcagaaaaaagttccagatggcaagggagcccttaagtggagattaggttgcattagactccaaaaccagaaaggaaaaagggtgatgggagtggagacgtgattggattcaggcccagaacctgtgaccatgctctgagctcagacttggggagggaggggtgtggctcccaccccttccagttaagacctgcctagcagagccc

SEQ ID NO: 397723 - DNA, 507 bp, Homo sapiens
gcaaggatatctgcccctagcgttgccctagagatcctagacagcacaataagacaaggaaaagttttaaaaaagaaaccaacacacaggttagaaatgaagaaataattatagtctttatttacaaatgaccttatggtctgcatagaaaaagatcccaaagaatctccaaaaaagctactagaaatactatgtgagtttagcagagttagagaatgcatggtcaatatacaaaaacaaattgtatttctgttagtaatgaacaattggaaattgaaattcaaaaaagattttacagtaacatccaaaaatatgaaacacgtggggatacatcacacaaactatgtgcaagatttgtatgccgaaaactacaaagcatggttgagaaaaactgaaagaagacctgcataaacggagagatatatcttgctaagagattgaaagattctattgttgtatgtcagttctccaaattaatctgtagaattaatccagtctaatcaagat

SEQ ID NO: 397724 - DNA, 464 bp, Homo sapiens
gaaatatagattacgttgcttacttgggttcacctagcaagctattggtaggcggcttccttggtacaccaggcttcagagatggaagtgctcaatgtaatgactcgatacttcttttctaggagatcctaaaatgttagtgttagttgcagagatttttgtagttgttgatgtctgcccccaaagaaggatattagttgagttagaaatgagatggctaaggacttgattaattcatactatcacctaatatcacaggactcaaactctgacatgggtgtttaataaaatcaacagacctgtaagggttttccagttacagcttccccggtttttctcccatcatccctaatcaactgatggagtcatcatttctatataacacagcttcccaggggcttcactgaaagcactcaagctcatcaaatggccagggcagcctgtcatgacaaattagtgcatgg

SEQ ID NO: 397725 - DNA, 559 bp, Homo sapiens
ctccagaatttggtgtggtttctttttacatattctatctctttttttaaattttaattttatcattttcttaattttatttttgtatttatgtttttctttagttctttaacaatatttaagaaagctcttttaaagtctttgtcacataagtgcaatgtctgaactttcttgtggatgttttctgccagtttatttgttcctaggagtgggctatgccttcttgttttcttgtatgccctgttatctcgttgttgttgaacactgggaatttgaaaaaacctcatctgccaatctttgcagactggctctgttcaggagcagttcttaacagattaccagagcttgatcttagcgtaggaatgagatgaaaagctaagatcttctcaggtattttctgagtatgcatcttgcctgggcctgtgtgtggctttctcaattccccgtatacatgactgtgtttcattgtcttaatttcacaaccagtctcatctttggaactttagctggtctgtttttatgtattgacttgtaatctcttgccctagccttctacatg

SEQ ID NO: 397726 - DNA, 314 bp, Homo sapiens
tctacacatttcttaccctaccacctctcattcacttatgtcccagccacactgccttctttctcttccttgaacacccaagcctggcagggtgctgtggctcatgcctgtaatcctgatactttgggaggccacagcgggtagatcacttgaagccaggagttcgagaccagcctggccaacatggtaaaaccccatctctgctaaaaatacaaaaattagctgggcatggtggcacatgcctgtaatcccatctactcaggaggctgaaacagaagaaactcttgaacccgggaggtggaggttccagtgag

SEQ ID NO: 397727 - DNA, 433 bp, Homo sapiens
gctgtaattggatgggaacctgtgaaaacagaaggggaatgttgtggtgcatgtgcttcttccttgctagtctctcctgggtctcggttgagcaggatcattacccatgaaggctcaatgccaaagccactaactatctttcctctggttggctagtttgcccccaatggtgccctgctgagtttatacattcttagccccaatttcactcccaccatgcccttaattccctacgagtattcctgctcctggctccaggaaaaagggagaggtaggagggtggggtggaggtgaacatccacacagtccccaagtggactcagcccatgtttagcactgaggggccctggagagggctgggctaagcagaaggtcgaaaagaccctcaggaaggcagaggcctcctgaaccaattccatacagcatcctggat

SEQ ID NO: 397728 - DNA, 549 bp, Homo sapiens
ccaacatggtgaaaccctgtctctactaataatacaaaaattagttgggcgtggtggcaggcacctgtaaagcgagctacttgggaggctgagactggagaattgcttgaacccacaaggcagaggttgaagtgagccaggatcgcgacacttcaccccagtgtgggtgacagagcaagactctgtctaaaaaaaaaaaagaaaaatgaaatactggtattgacatatttagaacaattgcctacacagaaccatattcattcatttaaacaatacttatagagtgtctaatatatgtgaggcagcagtgattgtaatcagtgctttgaacaaaatacacaaaataaggtaatatttccctaatgagttggcttttgaacagagacatcaaggacgtggggaggaggcattgtgaccatcggggaaggatatgctaaacaggctgggcgtggtggctcacgcctgtaatcccagcactttggaaggctgatcacctgaggttagaggttcaagacaaacctagctaacatggtgaaaccctgtttttac

SEQ ID NO: 397729 - DNA, 455 bp, Homo sapiens
gggccatcttgaagaatggccaccacagcctattaagagtggaaagagcctcgaatgagaagtcaggggaccctggttccagttctggctctgtggaaaagtcatttactctctggtcttcagtttctccttaaaccagtgctgttcaatagaaatacaatgcaagccacattgtaatttgacattttctaggatccatgttaaaaaggtaaaagaaatgggtgatgttatttttattttattttatttttattttttttaagaaatgaggctttgctatgttgcccaagctggtctcagactcctgggctcaagggatccttctgcctcagcctcacaaagtgctggaattacaggtgtgagccaccatgcctggtctatgatgttaattttaatattttaattaacccaatatataaaaatatcaatataaagcaatataaatgttttcttga

SEQ ID NO: 397730 - DNA, 504 bp, Homo sapiens
agtctcagccccaaatcaatgattcaccagccattcgacctggcaacgtcatgaacaaaaccaaacctcaattttctcctccacaaacaactaaactaacggggccctgcccgggtggctgatgtgaaagtctcgtgtggaaatgctcgggcccccgtggcagacaatgtgggggtgagtgacccgcacagcacgggtcggggcagcctctgtcttgggcacatgcattctacccgcctcactcttaccaccatgcagtgggcactgccatcgctcctgcctcacaaacaggaggctgggcacagagaggttcagtaacactcacggggccacacagccagccccgcacaggcccatgtcaaagccaggcagcccagctcacccccaggcttcctgctcactaccctgatgacacccacggaggcccagaggcttctggggagcaccctcaccctccttggatatagctgcccgtggcactgtgtctgcccgtggtgctgagtc

SEQ ID NO: 397731 - DNA, 486 bp, Homo sapiens
tcttccaacccagggtcttcttttttcccttgactaatctggctgctggccctggagaagctccatcttctctatccagcagttgttgcttctatgggccaccctggcctcctcctaaaggaagggaatttaggactggaaagataggcataggagacaacatgttctaagtaagacacgtctgcctcctctgtgtgaacttgctaacatctattagatatatacctgctagtttcaaagcagaaacattttttcaagttgtcccttgaacaatgtagggattagggcttctgaccctgagcagttgataatctgcatataatttttgactccccaaaaacttaactacttaatagcctactcttgatcagaagacttacggacaacataagcagtcacttaacacacatttttgtgttatacatattatatactatattcttaaaaagtaagctagagaaaaatgttattaataaaattataaaa

SEQ ID NO: 397732 - DNA, 701 bp, Homo sapiens
cggacacacacaagggtgaggtctagagcagaactgtaataggtgaaagaaagaggatagctctctcctacagagaggggtcccaggaaaatgggttgccaatctctggtgaaatgcagggggtttttatagatgagctaatgggaagatggtgtctgatctacatagggcatgaaaatctggttaggaccaattgtgccatttgcacagggcatgaatctctggcagcccccaccccaatcttttattatgcaggtgggtagctactccatgttgcttatttctttcggactgtatacatggtaacaaaaaaagggaaggtggagccccatggtggacatgcctggccccaggtagcccttttctgtgggtgtagctataggcctcccccagtgcaagcttccagcttccttatcaatgcttgcagctcaatctttcaggcttctctttgttaaaaaaggaatgatttcttgggctgctttttgttagaagggaagttctgtcaaggactcttttgccctcactatctgcctaaataatttctttctatctcctgtatcaagagctctcacttgatttacacacacaccaaaaataagaattataggggagaaaaatcatatgaatgtcagatatgtgggaaagccttcagtcaattctctgactatggacaacctgggagaacctacattagaaatgta

SEQ ID NO: 397733 - DNA, 269 bp, Homo sapiens
ggctaagtcacgctgaaccgccatgttgaaaggccaacagccaagactgccatgtggagaagcagcccgggccacgtgggaagaccatgtgtaggtagctgctccagttgacagctgagcccaggcaccagacttatgagttgagaagcttccaggggattccagcccctcataattcaactcactcccagctgttggagggccttcccagcagaggcccagccatcacagagcagagacaagccatcccttctatatcctgtctgaat

SEQ ID NO: 397734 - DNA, 512 bp, Homo sapiens
gatggcactgcttgtcagttatcaaaataccaaaatatggatatacttgcaaagtaataattattcattcactattaaaatgtttacttaagcccaggcacttctgtaggccaggggtctgcaaacgttttccgtaaagggccagagagtaaatatttcggactttgcaggccacacgtggtctccgtggcatagtcttccttgttttgtgttttttacaacccttggaaaaagtaaagaccattcttagctagaggaccaacaaaatgagccagaggatttggccattgggccagcctttgccccagtcctgtgcacctggggcatctttccatttattttcttacatttgtgtattgctttagagttcctagaatgctctcacacatagtaccttatgtaccttgaagcaaccttgaaagtagctgcatttatcatctccatttccagatggagaactaagcctaagaaagacaaacgtgccgaatgaaggtcaggtggcaaattaatgg

SEQ ID NO: 397735 - DNA, 280 bp, Homo sapiens
atgtctagcagaagcaagtggaacccagttggcccccatccaatttgggaacaagacactaaaccctggaagcctggcagcttccaaaagccttcatatgtcccttccaatctgcctgcctacagagtctcactccattacaaacagcatattagattcaaggagacagctctgtatcccagctctgtgcctggtaggttttgtgatcgcaggtaagtcacttaaacattttagggcttagtatctttatttgaaaaggtggataattctgtcaaagtgt

SEQ ID NO: 397736 - DNA, 926 bp, Homo sapiens
tctctccagtcgaggattctaacctgctcagaagagccctgcttcccctctaggtccaggatacaacaagtgaccctgatgacctgcaagcttcctatacggctggtgctacacctttataagcttctagaggccagtctgaaatggacagatttgacctcagcctgaacagcttaggacctctcattcccagggttcccctgctctgaaagctccaaaggggtggggactgcttattcactgctgtagcccctggcttgaacatacctagcatttatatggtgtcccataaatagctgaatgagtgaacctgctgttttctttttgccctgactaggagagctgaagcccgtgagaagaacctaacaggctcatggtctggccctcatggacaccccggggaccaccaggtgaagtggagtcaaggcctgctctcaaccctgggcatgggtggagacatgagtcagcatgagtggcctgagggggagggtcagcagccctgtccgaggcaatgggaaaagcactgaattttaaggcaaatggcccaggttgagtcctggctcctccctctgccttcactagttttgtaatgttgaacaagtcaatacatgaatttcataatctataaaacagggacagtaatgcttgtttggtgatctagtgtcttcacaggacagccatgaggctcaaatgtgaaagctcatggcactagaaacgggaagatggcacgtctgtgtgtccagtgtacacacatgcacctccacacaccaacacacagactgctgtttagactgagcagagcagtggggggcagctgcgtgcatggaccaggccttcctcatctctgtatctgccaccacactgagctcaggcttagcacccactaggcgtcagcaagtgcttctcaaatgaatgaaccaatgaat

SEQ ID NO: 397737 - DNA, 697 bp, Homo sapiens
accaccaccacccctcccccgaggactaaatgagcagcagggagtgacaaacagtcaggtgcacctaagttccagccaagctctaccatcgacactctatgacttggggagagctgaagcccgtgagaagaacctaacaggctcatggtctggccctcatggacaccccggggaccaccaggtgaagtggagtcaaggcctgctctcaaccctgggcatgggtggagacatgagtcagcatgagtggcctgagggggagggtcagcagccctgtccgaggcaatgggaaaagcactgaattttaaggcaaatggcccaggttgagtcctggctcctccctctgccttcactagttttgtaatgttgaacaagtcaatacatgaatttcataatctataaaacagggacagtaatgcttgtttggtgatctagtgtcttcacaggacagccatgaggctcaaatgtgaaagctcatggcactagaaacgggaagatggcacgtctgtgtgtccagtgtacacacatgcacctccacacaccaacacacagactgctgtttagactgagcagagcagtggggggcagctgcgtgcatggaccaggccttcctcatctctgtatctgccaccacactgagctcaggcttagcacccactaggcgtcagcaagtgcttctcaaatgaatgaaccaatgaat

SEQ ID NO: 397738 - DNA, 905 bp, Homo sapiens
ctatgtaagataatttttaatgatgtctaaatgtttagattgttttaaattcagaaatcagggaaaaataataacaaataattttttagtcgttgtaacactttagtgatccccttcaaattgtcaaggaagaagaaagttaacattggtgttgagacaccaatgaagaaattaatggcttgaaaataaaattggaggaaattattaaacttatccttaaaactaagttgtatagtagcaacttaactgccacagtaacaatgtgactctcgtaggtgagagcttaggatcccttggaggacactagcaggtttataacctatgagtcatatcacgagaatcaccggtccagaaaataaaatctttgacattccttgaataaactctatcactttaatatggaggatccaggaactgtaaaattggaaatatgaaatcatcctggaatggcttctaagaagccttaaaatatgccattaagtatgaagtcttgactataatatctaaataataaaatatacagaccttggttttgaaaatgcaagtagagttaatattttgctgggctgtaaccatatttattattacttcacttgtaccaaacacatatacttaaagaagctgaatttgtgcaataaacattcagcaaatccagttatgacattgtgcccagatgttcctgaagggtcatttggggaagtagtgaattctgttggtttccacaaagtctcctttcctcctgttggagctttgtttaatctagtttatccttaccttatcctagtctatcctacctgaagaggcaggtaatcataaaaacaaatgagacttcactgatttgtcactgacttccttacaaagctgtatgaacagcagcagggtaaacagaattgatgcaattatct

SEQ ID NO: 397739 - DNA, 1398 bp, Homo sapiens
caggcaggagtgtgctgctgagacgctaaaggggtcacctccctatccgcacacagtgtatggggtgttaggcctgagcagatgaaaggaagaaagggatcctcaaggagaacccgttggcagtgagcgagccccacataccaaacttgaggccccaggctttagccaaccaatgacccagggtcagtctggtctcccaggggagggtgggccagggatcagcactgtggcttccagtggccccacagatgcccttagctgcagtcccagcatgcctatatatggcaaagccagggacatgcatgccagggcttccgtacagccccttgcttaactcttgggctttgtgagtcactcagacctaggcttaaatcccaagatggccatttactgctctgtgatattggacaagttattcagtctccctgagcaagttcccctccctctaaagtgggaagatgataccacctcccttggagggcaactgtgaagagccaatgaacgaacacttaacacagcacccggctcctcgtgaatactgtgtaatattatggtatttcttggcttctgcaggccacatgccattggctttctatctaagctgcttgctctctacagggcctaatggagtgcccagggcctgggaaggcattggtgagcttcactgggactagattctccaaagcctggagtatgaagggtgcatgggctgcgtccagctacctgtgagcccctgtaggccctcacagtctgaaatgcccatggaggtgcctacaggttctcttcttaaagttgtcaggagatggggacattgcaacttgaaggcaagcctggccctgggtttgcttatcttggtggatctttcttacatctgatctttttacattcggtccattcactttggctggccatcaccaaagacaaagacagtggccaccatctttctcatcagtaatccaataatgaggttgctctgctacttaccaagccaagcaagcccattcctttagcctttctgcgtaggatcttatttcccatggggacctggggtcaaaccctgcctctgctgttcactcatcatgggaacacaaacacacacttcccctttgtctgtgcaatggacaggttgggtgacgtggtctcagtgaggctgaccaccctcctctgaaggttaattccatgatggtgtttccctagcttcagtcatttgcttatcacctttgtgatctctgcagtgtctgcctttcataatatttacttatttttttctttaaatctactcattcttttatttgagtatgtagatctttaaaaggaaactttttatcgctgtcattagtggaaagccagtatcacttgtcataaatagaacaaaaccataaaagaacgtaacaggaa

SEQ ID NO: 397740 - DNA, 251 bp, Homo sapiens
cgcacagtgttcatggaagccaagagacagtagggaggcatttccggtccactcccaatctacgatcccccaccacgcaaatgcccctggatgcaacccccattctttgtacagcagctgggttggtaaaatagaaacttcaatatcctgccacctgggggaccactcattccccaaacatttagaggggactgttctgtataacgggttaaatgtcttctgggtgacagagcaaggccctgtctcaaaaa

SEQ ID NO: 397741 - DNA, 395 bp, Homo sapiens
gaaggcagaaccgtcttgagcatggaccatactggtgatgccagcagcttctccgcaccatctggctcagctgtaccacccagcactggggtcaccctgggcgtggcctgaaccccaggacacactcgtttgtggtgctggtgctgactgccatcctcacgtttgtctgctcagggccagagccaaggccctcaggttcttgagtaactgggctggtggctttgggagtttgtcacttgtggtgagcatttgctcttggcttctgaatatactgtggatcattgtctgggggcgttggtcaggccagggcactgctctttagtttttgaaactttccttccttttcatgtcttgaggtttggtgcttggttgatagcacagctcgtgagggtgga

SEQ ID NO: 397742 - DNA, 499 bp, Homo sapiens
aaggacattttttctgaagatatagctatggtgttgattgggtagggcactctggccttgattctagatgcatgcagtagtgtagtctctgtatgagttcttcagttgtaaacagtgtcagtggtgtctgtgatttccttagtggcttagagtgtggctgttaatggaggctgtggggaagttttgctggggacaggggcaacaggtgggccagtcctcaggctctagtggtggcagcagtgggccaagagcatgcctgttcttgggccccagagcagtttatgctggtcctggggttagtgattccaggcaggctgattcttgggcctccaggaggcttgctcaggtgctggaaggggcagtggtagtccagttggggaggggctcaggttcctaggcagcaggcatggcaggggcaatgacggcagcagcagccagatcatcctctagcttccatcctatccatgctggtgttggtggtggctgcaatggcctgggt

SEQ ID NO: 397743 - DNA, 798 bp, Homo sapiens
tttcctttgtcttggtggatgactttaatgcgccaccctcctaccctatctggtacctagtgagtggcctagatgttaatgaagagacatgagctatttttttttttaagtaacttttaaaaattgacaaaagttacatgtatgtattatctaaaacatgatttggaatacgtatacatttagaacataaggttttagaatatgatttatgagaatgcataaatcagtctaattgacatatgtattacctcaatacttttttttttttgtgataacatttaaagtttcccctcttagcaacttcaaagagatttaatcttattggcagccagttgaacggtatagatcaagcctatgactttctcacctggaaaatcagtcacaaaaaatgtttcagatgccttcaggaagagatacaagaagagtctcctttgctaaatgccaggaatatcaaatcttggacttcagagactggccatataaggaaagagatttttatagacaaagagggttgaagtaaaataatgggatagaataagcatattaagctggataagtgttatgtaatcctaggtcatctcttaatggccatgtccttgacattgttgcattaagaatgagagctcggagaaatagtccatgtgttggcatgctagtctctaagttagaatagatgtgatcacaaatcatgagtgctcttaaagggtggatcctgcattcactcatccacttctgccttcattcaggctcaagcaagtggtggtgactttggaaagataaggagagaaaaggaaggac

SEQ ID NO: 397744 - DNA, 328 bp, Homo sapiens
catccgctctccaccatggagccagactgacctttggaaaacatcccccaaccccccaccgccaaaaaaaacaaagaaaagaaaaacatcccagatcatttcattcccctgctagtgatactcccgcatgagtgattttcctttgtactttgaataaaattccaactcctgctgatggcacccaagggctgtgtgtaactggcttccgcctgcctctccagcattgtcttagatcatctccccacactccccgtgtcgtgtacatgccggcctcctttttgttcttggtctgtcttacctcagggcttttgcacatgctcgtctcagt

SEQ ID NO: 397745 - DNA, 544 bp, Homo sapiens
tacattctagcacttatcacttaatgacagggacacatatgaggaatgcattgttaggcaattttgtcattatgcaaacatcatcgagtgtacttacacaaacctatggtatagcctactacacatctaagttatatggtatagactgtttctccagctatatggtgtagactgtttctcctaggctacaaacctgcacagcatgttactgtattaaatgctgtaggcaattgtaacacaatggtatttttatacttaaacatatctaaacatagaaacggtacaaaaaactttacacattatatagatgtatcaaattattcatatgtgctctgaaaatgtctatatctgttatgtatcaattttttaaaaagtgaatgacataattcatttgaaaaaatgtggacacacaaattggaaaagaggtataaatgcagtattataatctaatgggaccaccatcacatatttggtctgtcattgactgaaactgcaatatagagtttttcttaacatttgcatattaaagactctgactatatat

SEQ ID NO: 397746 - DNA, 578 bp, Homo sapiens
  misc_feature (1)..(1): n is a, c, g, or t
ngagtcggtaccgattacgctcctaacgggatgatgatgattttgtgcatgtgattacatcacgtaagattgtagcctatcgtgttaggagaccctggctggctttgaagaagcaggctaccatattcccagatgtcataggaagagagccaccggacaaggagctgagtgtggcctctggccaataaccagcaagaaattgagccctcggtgtagtagtctgccaggaactgaattctgcaacgatgttgagtttgcaagcagatccttcagttgagcctcagatgagactgcaaccccaactatcaccttgattgcagccttgtgagaccttcaaagcagaagaccaagctaagtgatgctcaaactccagatccacagaaattgtgagataacaaatgtgtatagtcctaaaccactacgttagtgatgatattgttatggaacgatagagaactagtacaatgtcctttctagaagaagacctctaacaagagaatgaagagttcaataaaaatgtaaggcatccgaagaggaaaatgtggagataaaagagctcagaaaattaatggaagagc

SEQ ID NO: 397747 - DNA, 352 bp, Homo sapiens
tttctttctgtcgggttagtctgcctgtcagcaaaaggggaaaactcgttctgagatagataaagggtggccgggtgcagtggctcatgcctgtaatcccagcactttgggaggccaaggcaggtggatcacaaggtcaggagtttgagaccatcctggccaatatggtgaaaccccgtctctactaaaaatacaaaaattagccaggggtggtggcaggcacctgtagtcccagctactggctgaggcaggagaattgcttgaaccctggaggcggaggttgcagtgagccgagattgcgccactgcactctagcctgagcgacagagcgagactccatcttaaaaaaaaa

SEQ ID NO: 397748 - DNA, 558 bp, Homo sapiens
cggccttagagaatcctgcccttcctgtaagttctgggaggtccctagcgtggctgtaaggcccaggtgacccctcgcttcatattctggtggtggtcgtggggaagggtacaaactaaggctagcgcattgaggtcagcagtggaaggagtctttgggggtaaccaggagtttagtttagaacccagagcaaagactgaagggattttcttcccagaacaaaggggacccaacagagtaccactactatgagccttggtagcctttcagcatgactctcggctaaggtatccctcaatttatccttagtggtcacagggtgatgaggacatagatttgatagggcagtcagtggcaggtcattagagggaggtgactcaggcccttatggaagtcaaagtgaggactgatggggctaggcactgcctctgtggtcagccttgggaagccctgggcagatttgtcattctgaacgcaccccaccccctccctccaactgcatactctgggatatcaagtggaagagggcctttctctgattggtataggcctcaagtc

SEQ ID NO: 397749 - DNA, 564 bp, Homo sapiens
tccaaggaggaggttcgtggctacatcccaaggcagatagccgtgcttccccaggagatgtgctgaggaaggggaggccaaagtggcccagagacaacaggacccacagtttatgggcacaaagggtggagatgcagtggtgaaggatgctggaaggaaggaaaagtgcaggagcaggatgcagggggccgcttctcctcattccctagaaggcttctcctcctccctagccagagagggctccgtgagaactcaagggttcaggaaaggccactgcattctccctactcaggccggccagaggcacactggctctgtatgagccagaggcacacaggctcagtgggatggggagggagcctgcagcagagggtggtgaccaggctcgcaggaaaggatgcctgaatgtttgaactgagtttccaggcagcagaatgttccctcctgcctcctggcggccctggggtcctggccaatccccaaaaggggtccggtggttctggcaggtcaaaccgggggaaggaaggagaaaacacttccacatcgtgaacccaagtgatgagc

SEQ ID NO: 397750 - DNA, 337 bp, Homo sapiens
atgacattctggaaaagataacgctatggggatgaagagctgacagtggttgccagaggttcaggataggtggaggtggagtatttgaatataaagaaatagtctttgttgtgtatcactggagttacactgtagtctgattgggaaagtagctacatgactctagccatttgccaaatctcataaaactgtatatcagtctgggtgcagtggctcatgcctgtaatcccagcactttgggagactgacgtgggaggatcccttaaacccagttggaaatcatcttatgcaacataacaagacctcatagctactaaaatacaaacaaacaaacaaa

SEQ ID NO: 397751 - DNA, 341 bp, Homo sapiens
  misc_feature (33)..(33): n is a, c, g, or t
cagaggaccccggatggcgcaaccgggcgacanttcaactctgcctaatcactcactttggctgggattacaggcgtgagccaccatgtccagccacagtatttcttttctaattactacatactttagtttcttcaagtgatttaactttggttatgcaagttcttttcaccacttcaaccaaggcttattagcagtagaaaataatattctagacaggttttttttttctggccataagatttaaatattctacacgcatattttcccttaaggtttggcttggcatgtggtagacatgcaacatgtatatgtgaatgatggaaagggtcgccaatcga

SEQ ID NO: 397752 - DNA, 934 bp, Homo sapiens
taggagttacttgtggctcagggggaatctgcaggtcggtggactatggaaaaaggggaagtcagcaagttccacatgactcaggagagcctggaggaggggcctacggggcaggtccatgttttaaccatcaccaagctaacaacctacccatgccaatgtgatttctctacacataagcaaccactaccccagccttatcatacctggttataaaacttcagtattgttcaggctgacctacactgcccaatccttccatcaatggatgcccctcctaccatgtccttgacgatggtcactgcccacttttaccaaaaaatatcaaaaaattctatgctgttttggaggaaaaaaatacattgaattttactagtcatatcttattttcttaaattgcataatttgagttgccaagttgtgaggacctacagtttacgtgcagaaaaatctcaaaattaataataagtaatacctaccatcagagtgcgcaagggaataaacagtgtcaagtagatgttgttactgttagccatgatgaccctgccagttggcgagtgagcccattatacagatacagagccagactccacagggaatcactgtccaagtcccacaattagcagacagtgtgattatcagcaagctcaggatgtgtgaccccagagctgatgttccttccctcccactgaactgcctacacagcttccctgaagagaatttccccagagagtccatctagatttttaactgtaatgttcaattatgaatatcaaggttttatccaaaaacaaagcatgagacaggctttggagaggagagttacgatacatttgcaccagcagagagcctcctgatgcaaaaaggtttttcccaacagttggaaaatagctgggccttagaatgaagatcacaaagaaaagcaaatgtgtta

SEQ ID NO: 397753 - DNA, 311 bp, Homo sapiens
aacgggctcgattgcacatgttccctgtcagaattgttcagcgatccagagctcccgtctctaaatatttacaaagtactacttatcagaatgaaagagaatgtttctgtaccacaatgtcaggcatatggtagcagcatgaaatagaagataaatcgtgtggggtgattccaactggatttaatgccagcaataattatttttaatcagatgcaaggttcccttgatgataccagaccatgtaacatcgggaaataattttgtcagttttcattgtctgatgctgtttctataaataatcttgtaggacc

SEQ ID NO: 397754 - DNA, 445 bp, Homo sapiens
caaaacaaaacaaaacacccctcttttctttataaattacccagtctcaggtttttctttatagcagtgccagaatggaccaagacagggagagaggaagcaagctctctgatgactcttctcaaaaggctgctaatcccatcaagtgaattccacccttataacctcctctcaacgtgatcacctcccaaacttctcgcctccaaataccaacacattgggagttaggagtttgacatatgaattttggagagtccacaaacattctgcctgtaacactagaaaagaaattttgatttcattttatctatttgtttgagacagagtcttgctctgttgcccaggctgcagtgcagtggcgtgatctcggctcactgcaacctccacctcccaggttcaaatgattctcctgactcagcctcctgaatagttgggactatgggca

SEQ ID NO: 397755 - DNA, 247 bp, Homo sapiens
tgaggctacagtgagctctgactgtaccatttgtactctagcctaggcaaagagggagaacccaaaaacaaacaaacaaaaagttggttggggcgggttggagaagaaagtatttctgaatttctgggtaggttactggtagtgtcaggccaaactagctctacagtcatattcattataaataaaggcaactagaagatctccatctagctattaaaattggttaaaatctacagagataaaggac

SEQ ID NO: 397756 - DNA, 389 bp, Homo sapiens
tcagctcaccagcgtggtcaggtctgcctgttctcgccagtccagccctgcgcctcctgcagccctgccactttctaccagcagctcttatctctcattgcctgttcatttgtggtgttcttgtaatccagtggttagccctactactcttctgaaatgatttactcagatgctttcctgccttccaaagccagagtgttcttcaggcctcactctacctgtattgttattgagtcatgtaagagttacttggagatattgtaatttcatccataaatacctgaatatgcatctcatctccttaagaacaagaacattctcctgtctcaccacaataagatgattgtactttctacctcatacataggctacattcagttttccttgtc

SEQ ID NO: 397757 - DNA, 844 bp, Homo sapiens
  misc_feature (600)..(600): n is a, c, g, or t
agcccggcgctcgcagcctccgccgcttccgggcagataggtgccttttcttgctccttgctcttggagttcttctcttagtccctgttccctggatgaaagcatcgctccgagcctcatgggaggaatgaaggaagaatcgagactagatatccaactaaggcttcgggacatgttttgagcgaagatgggtgtttctgcccggatagtataaatcgaggatccaggtctgggcagattcaaccatgggagcgaacacttcaagaaaaccaccagtgtttgatgaaaatgaagatgtcaactttgaccactttgaaattttgcgagccattgggaaaggcagtttgggaaggtctgcattgtacagaagaatgataccaagaagatgtacgcaatgaagtacatgaataaacaaaagtgcgtggagcgcaatgaagtgagaaatgtcttcaaggaactccagatcatgcagggtctggagcaccctttcctggttaatttgtggtattccttccaagatgaggaagacatgttcatggtggtggacctcctgctgggtggagacctgcgttatcacctgcaacagaacgtccacttcanggaagaaacagtgaagctcttcatctgtgagctggtcatgggccctggactaacctgcagaaaccaggcatcattcacagggatatgaagcctgacaatatttacttgacgaacatggtaaccggggtcctcctaacaagtcccactgggattggggtgtcggagaccgaagcccagggcattgtgttttgcaacctacacctggggttcgttatggcggttacacaataaagcgccttcgtgg

SEQ ID NO: 397758 - DNA, 771 bp, Homo sapiens
agcccggcgctcgcagcctccgccgcttccgggcagataggtgccttttcttgctccttgctcttggagttcttctcttagtccctgttccctggatgaaagcatcgctccgagcctcatgggaggaatgaaggaagaatcgagactagatatccaactaaggcttcgggacatgttttgagcgaagatgggtgtttctgcccggatagtataaatcgaggatccaggtctgggcagattcaaccatgggagcgaacacttcaagaaaaccaccagtgtttgatgaaaatgaagatggtaagaaatatgggatagtggcatataaaaaatagaattttgcaaaattcaagtatatgcttctagtttcataagttaagcataagcatggtctgtagggccttgaaggaaaaaggcaaagctgcatgagtgagtctgaggactttgtaggctcatagctaggttttaccttccactttccatgggacctttggcagctttcctaatctccactataccaatgtcctttgtccaaagggagctgcagttgggcatgtggtggatagttaaatgatttgtttgtcctctgtgctgttccttggcagttgaagttacccccattgctcattgttacagaaaatacattatcaacatgtacatgaatgataaccagtgctcataatattatagaatgaagctgtgccttctgaatttccaactgccaagcttttgtgtactagacaaatcccataatgctacgtcatagaaaaaaga

SEQ ID NO: 397759 - DNA, 511 bp, Homo sapiens
ctggataaagctggagattgttagtctaagtgaagtaactcaggaatggaaaaccaaacatcatatgttctcacttatgagtgggagcaaaggcattaggaatgacataatggactctggggccttgcagggaagggtgggaggggggtgagggacaaaagactacacactgggtgcagtgtacactgctcaggtgatggatacatcaaaatctcagaaatcacacctaaataacttatccatgtaaccaaataccacctgttccttaaaaaattgaaataataataatttgaaaaaaatagtctattcaaaaaaaatgttcttttgtggattgatgaggacataaaacaaaaatcaggtagggaagaaattgaaattggttcttcacatgatacacaaaggtaaattccagatggaaaaaagtacttaaatatcaaaataaaatgcttggtagaacatatggaagtgaatatttttctgattctggggtgtggcgggaattcttaaacat

SEQ ID NO: 397760 - DNA, 251 bp, Homo sapiens
caataaacataggtatctttttgatgtaattatttcttttcctttgggtacatacttggtagtgggagtgctggattgagtggtagttctattttcagttatttgagaaatctttatactgatttccacagaggttgtactaattgacattctcaccaacagtgtgtaagttctgcatcctcaccaatatctgttttttttgtcttcttaatagccattctgactggtatgagatgatatctttttgtggt

SEQ ID NO: 397761 - DNA, 351 bp, Homo sapiens
tcttcttccttttcctttctcactttcagtttaaagtgaaatcagcttcccaaagaaaggattagagaaatgggtgcctttttcttcagtttgatcatagtgtcctaaacatccagattaactctaccaggtaattctttttagacagctcttcagaggtcacctaaatcatattttattgtcaaataagtggatggattaatgaatgaatgaatgccacatgaacatttcaggttatctgagaaacgttaaggtcaaccacttttcagtgtaaattaaatctgatttttaaaatttccaaaatcaacaaataacaggttcttcttgaaatgatactagcttgagaatgtg

SEQ ID NO: 397762 - DNA, 447 bp, Homo sapiens
ggattcaaagagatagggcatgtaaggctccccgcacagggtctggctcacagtaggcaataattacaccagtcctctattgttgccgtccttatgcagccccagggaacttggagagcccttggctgaggcatccagcctctttgctgccctctggtgctgaggctcagtgtggtcttgcgtggaggaggctgggatcgtgaccctctagttccctgtgctccaacctgcctgctctgatacacctgctgcaggggtaggaatcgtcggggaaggagccttagcctcaaggcctggcttcttggcttcctgactgtaatgacagctccacacgttccacagaggtgatggtgttgacaggtatttgggaaataccagttttctttcccagcatatttgtccttattttttcaggacatggtaaacattttattgtcatcctagctt

SEQ ID NO: 397763 - DNA, 595 bp, Homo sapiens
agatttttcaattaaaaaatggttagtgggtttaatggtaaacaaggcacaaaaaacagtatagaggaccgtctacgctgtcaggactccacattgttttgtttgctcaattgttcttctctgaacctcttttctcatcttaatacggaaattgctaatgacatctgtctctttagattgttttgaggattaaaaatgtaatatatataaagaacacagaatattgtcttcaacatagtaaacccagaaaatgaaaattttaaagccattgcaatagacgagaaacacaataatcagaacttgctataatttgaacttctaggggtccaacaataaaaaagagtatttttaaaaagtgcttgttattgaaaattaggtaaattttggcataaacgaaaggttagtagtgcaatgacagtgacagtaatagcgactgggaagggggctacaatatgtaaagccagctcaagttctatttagggtgtcctccctcaattaccttagaaaacatgggcaggaagtagatcttataaacatttttagggtggattttttttttttaaggcagaaggattcaaggtgaatatgtaagtac

SEQ ID NO: 397764 - DNA, 632 bp, Homo sapiens
cgttaccaggctcatacaactcatcagctagggatacaagctcgtgctaccatcgatttttcctccactacactgcaggaagctaaagaatcggtctaactcatcttgcactcaacccagacttacggtcctattggtcaggacctaatatccatttcccaataaactgccaatataaagtgaacccaagggggacccacctgagactaggtttcagggcctttagaactgaagctatcatgctagtttccttcaacagtaccgttcagattcttggctgatgtcaccacagccacctccacaaaaatgaaccacaaacatgcagtcgtatttattttaattcataaatacattaacatagcagattaggcaactggtaaggtaaaattacaaatacattagaaatcatacaaaagtggccgggcgcagtggctcacacctgtaatcccagcactttgggaggctgaggtgggcagatcacgaggtcaggagatcgagaccatcctgaccaacatggtgaaaccccgtctctactaaaaatacaaaaattagctaggcatggtggcgcgtgcctgtgttcccagctacctggaaggctgaggcaggagaatcacttgaacctgggaggcgga

SEQ ID NO: 397765 - DNA, 210 bp, Homo sapiens
aaacttttatacagagttctgtcctcagatgtgaggaaaggacttttcaaagatgagttctaaatgtttgtttagagatggcagcaacaagccacaggctgtaagaggaacgtgaatctacctttttttgttgttgttgttgttttgtagcaacaggggtcccactctgttgcccaggctggtctcaaattcctgggctcaggccaccta

SEQ ID NO: 397766 - DNA, 470 bp, Homo sapiens
aatttcaaatgtgacagtgatggatcaatgctcagttcagatcatggtcaagtagatcttccccgagatgtagtgctgatgaaggaagctttcgggatggtctaaagttctttttctccctcttgtctgatacttcagccgtttgggattttgattttcttttaagccttgatttttggatttcaatttatagtagtgacttcaagattgtttatctgacttggtggaacaaaactctgagagggccatacacattcactggggctgtcttgagctgacagcttggaaaggcataattagcttgtgagataggaagaaatgataagatgttgctctttgccatgcatttgatgttctctattaatgttttaccattttagacagataactttcagtggttctgatttctataagttggacagcacagtgaatagagagacctgtattatcaccctcccaaattatcatga

SEQ ID NO: 397767 - DNA, 880 bp, Homo sapiens
atgaccagcacctcacttggcttttcccgtagaaagcttttggaagcctggaaatgagtctgggtaacaactgcagaagtgcccaaggatttaaacagggcagtgacatggggaagcatcatttttatgaggaagattaatctgacaataacatgtgggacccactggagagggaagaggatgctacagatcccagcacctgggtggggggaccacgggacagagagaaaggggaggttcccaaagaatggctgaagaaagcattgacagaacttagtgagcaactggccgaggaaggagaggaagaggaaggcacattgagactgcaagcctggtgggtagagaggaaaatgcctcactgacactgacaatagcaaagtatgcaaaaggagcagagatgacggagattctttttagatatataaacttgtatcgggagatggacaccaatagcccccaactgttgctgagtgggaaacagtgtgtctgtagcaatgagacactttgctgagtagacaatttattaactcttactttttttactcatgagtccagtagatccatgaacacaatgaccgcatttaggtttttccaagttttctcagagcccaaagtctaggtcttgaactcatggagatagggagtaaaaggatggttacaagaggttgggaagggggaggggttggggggtggcaggtgaggatggttaatgggtacaaaaagtagttagaaagaatgaataaggtgggatgcggtggctcatgcctgtaatcccagcacattgggaggccgaggcaggtgtatgacttgagctcaggagttcaagaccagcctgggtaacatggcaaaaccccgtctctaccaaaaatacaaaaaaaaa

SEQ ID NO: 397768 - DNA, 374 bp, Homo sapiens
cttttgtctttctttttttttttttgacaaggtcttactctgtcaccgaggctggagggcagtggcgccatcacggctcactgcagccttgacctccctggttcaagccatcctctcacctcagcctcccagagtgctggaattacaggagtgagccactgcgcccagcctgtttgtattttctgtgttattacaacagttatcaatcttcatcactggtaaatttataattatatacatacatatgtctttgtatagatatatactcacatatatcctattgattgttgtcacattaatactgaaaaatgagtaattttaaaactgatcttttacattaaacatctatatattacaacattattacatattaa

SEQ ID NO: 397769 - DNA, 439 bp, Homo sapiens
ctagaaagtactactaatcaaacgcacataatcttacaatgcacccgcaccaataggatcctcccgaatcaaccctgacccctctccttcataaataattcagcttcctacactattaaagtttaccacaaccaccaccccatcatactctttcacccacagcaccaatcctacctgggttaggtctacctgggttaggtctacctgggttaggtctacctgggttaggtctaccaggtagatctaattggggatccctgttgtatagggtagtcttattccacttagtgtaaaaaggacctaattcccacccctttttaaaaacttaatacagttttgaaaatattcataatagtagtttagtacatccttttttaaaatttatcctgaatttatgcctaaattgtgtttgacaaaggttttgttagtctctctcata

SEQ ID NO: 397770 - DNA, 342 bp, Homo sapiens
gagggaacatctggtaccaaagtaccaaatgtgttcatgagtgtgtgtgtgtgtgtgtgtatgtgtgtgtgtgtgtatgagagagagagagagagagacagagagagagagaagagagagacagaggaaaagagattggtcttccctttttactttttgtagctttcttctttctaccgcttcttgtgttttgggaaaggtgggtttcctcccttcaattccgtatgtctccttgctcaaaaatcatgctgacaggaggtcatggctcctgatacagtaaacctcaggatggtctttgcccatgcaagaggtttggctggcaattcacgttaatttcttctc

SEQ ID NO: 397771 - DNA, 521 bp, Homo sapiens
agccagtgcataggaaatagatggaatgcagactagatacaactacatacaattgtctctatttttggatgacacacttgtatatataaaagtactaaaaagaagttccactgaaatgctataagaacgaataaaagagtttagaaatgtcattggagacaaaatcaacatgcaaatatcaattgtgctttttttatagtcgtaaaaatcacataacattagctctaccctcttagtaaatatttaattgtctagtacagtacaatattgctaactgtaagtgcaatgttgtatagtaaatctccagaactttctaatctttcattactaaaactttataactattgtcaaagaatctttagagtgtcaccttgccagccagaaacctctgtggctggtggcgcccctgcttgagttttgctgatgcccactgggctcattccacccactcagcctggcaggctgggctcggctcaggctactggcccccatcccatgaccaccaagggtgagccgggagc

SEQ ID NO: 397772 - DNA, 480 bp, Homo sapiens
caatacaataagagatggggaattcagtactccattttcaggattagacagaacttccagatagaaaatcaagaaagaaacatcagatttaatctgcactgtacagcaaatggatctaagaaatattacagagcatttcatccaatacctccagaaaatacattcttctcctcagcacacagattattctcaaggatagaccatatagtagacctcaatacaagtcttaagatattcaaaaaatggaaataatatcgagcatattttctgatggactaaaagcagaaagcaataacaagaggaattttgaaaactatacaaacacatggaagtaaaacaatatactcctgaattaccagagggtcaatgaagaaaataagaaggcaattgaaaatttttttgaagcaaatgataatgaatacacagcatatcaaaacctatggaatacagtgaaaccatattatttcttcatactgaaga

SEQ ID NO: 397773 - DNA, 624 bp, Homo sapiens
tggttatcactaggctcttgcttatggtgtccggctcttgcactaacttacataggcggttttccccagagtggtccaaataggggaatgagtatacaaccctgtgttttgtaaaaattgtaaattacctaagcacatttcagtttcaggtgacactatttaagcatgacaggctagtgatctgcagtatcatttagatttgaggaaggagagatgagaaattaatctctgccacccttgttttgctttgtttgtgatacattgtgaagattgccttatagcattttatatattgttaaaactttcgcattgagcatcccatgctgactttgtaatccagaaagggcctaaaattgtccagtcataggagcattagatgctccagatttgcagtaagtttgtgtaaagcagaagcaaggcagcgctttggtctggatatgctgccatgccctgctttcttgctctttattgtgcttcacagacactgggttttttacaaattgaaggcttgtggcaaccctgcatcgagtaagtctttctctccataccacttttccaacagcgtgtggtcactttgtgtctctctgtcacattttggtaattctcacaatacttcaaacattt

SEQ ID NO: 397774 - DNA, 1152 bp, Homo sapiens
gagatttttctccaagagtggggaagccttggtagcctgttcctactatatagcagaaagattattgaaattcagtgcccggttttggctttctgatctttcctttcaaaagttcaagcagttcatcccttttgctaacacatttgctatacaaggtacaatacatttgattctgttgaagctttcatagtaaggattgcatcgtagttattcctccttcagactgtactcgttgatcctatacctccttggtcacttttgcagctcatttcttgagttgctgttctcgttttttccatgtcccagtttttgccagtgtactgttattttcgaaggtttctaggccctgtgtttccctgtatattgacttaattcatacctatttgtccattggtcatttattcatactttgtgaggtcctgatggcgattcagatgttaagccttctttaaattcaggtttagtgtcaaggttcttcttggttgtagttgcttgttgagaaattttttgggctattaggtcatgtgtaattggaggccatgttttggctgtgtggtgctctattttaggagtctacttgagtattcaagcctcattctagccagctgacttttaaaaaaatgtttgtttgtgattatatgctgtcccttagttgtagccagctctttcaaatgctagcttaaaaatggaaactggtcaggaatttcagtggcttcagcgtgacccttctgtacggaatacatgtggtatggagggtgagacagcacttaccagaatatgtgtggagtcctgtatgacaggcatagttttgggtattcataagtcaaggatgaataagacaacagaccttggcttgaagtgccttgcagcctggaagaagggagattgtcaacagctggattgagcatcgtccaaggaaaactagaaagagtgtgtacacagtatgaatctaaggaaagtatattcagctttgtgaaacggagggggagtaataggagagggagtactcttgggtcagtttttgaagtagtagtgaggactccctggacaaagaagagagcatttagacagaatgaacatctgtctacaaaggtgtgaacttgtgaaacaacctaaactgccttgggagtggcccattatttggtttcgctg

SEQ ID NO: 397775 - DNA, 519 bp, Homo sapiens
cttcccattgaccgaagcagaaaaattgaaccgaatctacgccccttgttctgattcctgctagaggaaaacagaaaatcatcccgcaggtctctttcagtccctggatggcgagcgcagcccctgggaggccacacttagttctttattgtgaatctctcgctactcaagttcgttcgggaccagggcctcggatggcctcggttgcccgtaagtacgcgaaagaagaggtgaatccaatcgctggcctagaggatagtgatcagacaacccgaggattactaaacaaggggcggcggtgtccctgtctcatggggttggcgtggggcggggggtaggcagcaagatcctccaggctcctggatgcaaagagtgagaaagaaagcgcagcctctggcagcctgcttataaatgcagcctttcggaagatgaaacttgcagtcttaggttgtcctcctttatatccatgttccaatcctctgggctttcctcgaaatgaataaaattgtggaaatgaat

SEQ ID NO: 397776 - DNA, 610 bp, Homo sapiens
aatttctgatgcccccttctcttagggtgggttcatacaacgagactacccatctcgctggctgtctaaataatcttttctccccatattcattttgaattattggagccttaattgcactacagacatgctaaattttgtgatagcttaagtagtattaagacattaagattcctggtgttagttttttctctgcaattttcttagaaatattgacttactggagccagagggtctgtagagatgagccagtacaggtttcttagagtatgttccaaggaacactgcgctatcaaagatgctctgcataaaaggacttccatggcaagtgaatgtgaggaatgctacataccttctttttccccttggagattaatgacacatgtaggtcttattagaggctctgtgctgtcctgtgataaataaagccaactaacttgtttttatcaagtgttccctgatttgcagaatcattagatgtttagtattataggattgttttttttggttttttttttttttttttttttttgagacagagtctcgctctgtcgcccaggctggagggatctcagctcactgcaagctccgcctcctgggttcatgccat

SEQ ID NO: 397777 - DNA, 500 bp, Homo sapiens
ttataccattttatttaaggaacttgaccctcagtggattttggtatctgcagggggtcttgcaaccagttccccatggatactgagggacagctgtataatttcttggcatatgatttcttggccgtctagttggggcaaggggactttgcgcttagaaatgttgggtttcacagggacctcatcaattagtatttctatcccagtttcagtcctcagccagaatacctgcagtaaaatgcctcatgtgagaaccatgattagttctttcagggttttgctatttgagccagagattagttaaacagtttctaaaactttctatttaatgtagttgtcttttaaaaagtcatattataaatttattgatcacttttcatctgtcaaagaagggatcagttacagctgtgattttcagttactagtaaggattgaggatatggcagactctctaggttctgattctgattcgctattctatggcaagtttattagtttcc

SEQ ID NO: 397778 - DNA, 401 bp, Homo sapiens
ttacctggatagacatgaacttgatcagtaattttgccttagatggttctacaagcagcctggaggggttgcctataataacaaaatggtgacacctgggcccctgcggcactccttgctctgaagaaaagacagacagttcaggtcaactccataggacgatgccagacctcagttagttgggtagaaacatgttgagtcacagggagcaggcaggagtccccagtggtaggaagggaagacctctctctctgtgttatactgacaactagaccaaacgacttttcatgattatccagacaatgttttataaaggtcaggtaggagactggcaggacttgttttctggtcacaaccctgctgaccaaaacaagtccaggcaggataaaattcaaaaaaaa

SEQ ID NO: 397779 - DNA, 282 bp, Homo sapiens
gctgatgtatatgtgtgtggataagtgtggagtgacaggagttagaagtaggggaggcgtatcagcatctgtggaaagggacttctagtcatatcaattgaaggaaagtttggaggaaagctttggagctctattcctgtcttttgatactaacttaagaggataattgcccttccattcattatggaaatccgaaacaagaggccaggttactcaatgatactgagtaaaaccaggacagcataataacattaatgtattaatgtagtaaggagctgatac

SEQ ID NO: 397780 - DNA, 269 bp, Homo sapiens
ttatgttctgaccaccaagcacacctatgccattacgcccatgaaacgccaatggaggagggcggggaggagaagtcgcccagcaaaaagaagaagaagattcagaagaaagaggagaaggcagagaccctggggctatggtgtctgagatgtttgtggggtgttgagtgtggaccctggaccagtgtaaccttttgtgagggtgcaatggcatctgatgagagtgaactctgctgagatgatgtgactttaggtgggaggtggagagg

SEQ ID NO: 397781 - DNA, 314 bp, Homo sapiens
cccttcccattcatcaccttcctagaggcagtgggagtaaaaaagtacagccaagagcactgtgtccagagctctgcctgggttctaagaatgccccaagggaaaacaggtccttcctttccatttctccatcatccctcagcttcttcatccccaatactttcatgatggcccaagaaggaaagaaaggaaaagaatctttactcatgcctcctgtgtaataggtaccatagaaggcaaattctccttagtgctcccatttactactcacaacaatccatccaagcagcacgtctcctttttcaagataaaaa

SEQ ID NO: 397782 - DNA, 478 bp, Homo sapiens
attccttttgaaaatgccacaaccttgtggttcttggtttggttggagttgctcttctctccgctttgcctgattgaaggactgcttgttctaattgcctgtttctgaccatattgaaattaaatattttaagtagttcttcttacagccaactgatactccattcaaaggctactgaagggccatactcagttgctagcttggctgcctaccagttttaaagccacacttaagtttctggtttggaaccgtgtgagttgtgggtaacttaagtcaagaataggaactgctcacttcaaatttgtagccttcattcttttccataactttgctttggggttgaagtaaatgggtatcattggccctagagaggaagtgatagtgggtttcaccagcagtcttacttaagtgctcgctgcaggaagtctgtagtacatgctagaatatcataggtgtttctcttctcccctctaaaata

SEQ ID NO: 397783 - DNA, 196 bp, Homo sapiens
ttgcctttttatgtttcttaatctggggaaagagagccagagttcttcgatttgtgtagcttatctataaatgtaaaaggaatgattttgttccctgcaatagatttaggctgataatacatttacctgagaaaatataattgcttttctgtttatacttcttatagtattgttctcgtactcatttcctataact

SEQ ID NO: 397784 - DNA, 282 bp, Homo sapiens
cctgttaccctaaacactgccaaccttgacctacctctgaaagccagtgggatgaggtctagggccaggtgggaaccttgggaaaggcatgccctactgtttgaccaaggggatgaggaggctgggtactccagtgatggagaccctttccccaccttttctctcacctctcctccacccagtgccctttcacctttcctttccaaccccacacccatccttccgccccacttccccatttatttctctctgctctttcatttccgtggccagccgcctccc

SEQ ID NO: 397785 - DNA, 1082 bp, Homo sapiens
gctctgcctcaccccgccctctagagcctggtgctgccagacacgggctgcaagatctccgtgggcggatggctttgcttctcatggccactctcttctgcaggctccaaggctgtaatttcactctctctgccagcagaggtggagagatgtctgttgctgctccctcgcggttcactttctgtcttgcaggtggaatcgttgcccgctcttgtctgccactcactcctttgctgctttgccatttctgactccagggcagttccagaaccggaatgaccctcataactgaagccattagtatgtcggatacaatatgtatgcatttatgtctcattttcaaatgtgcaccactgagctggcaggaaagtacagaatacattgagcctaaaaacagtgaaactggagaccctgggaccctgggcgcaaagctggcttttgccccaagggtttcctacgcctggagaccttgagttttattgttgataacttcatggaactggaggtgggggggtgggcaggagatccaataggagacacctctgaatgctgtagctacagatggctcacactaaaaccgtgactgagacataagtccactgcacagagagggaaggctgaacacatgcctccctcaatctggtgcttggtggagggggagagatgttgcctagaaattgacagcctttgtgctggaaacctccctacctgtgtagtataagactcaggagaataagttaattccatgtggacccaagatgagttcaggaagtgtccagtctccaggcaatagaccttccagaagttactgtagcacccgcaggcgctgggcacaggcaaacagacgtctctctggagaaattcaccttcaatccaggctgctccgaatttctagacgtgacatttaaggaaaatgagaagctcagagtccagtcataaaacatacaaggaaataaggcacaatgagtcagaaccagcaaaaaaaatacagtagacgcagatgtgaaagctcaacacagaatagaagataagtgttcctaatacactgaagtaaattgatgagaagctcaaaaggtaagaag

SEQ ID NO: 397786 - DNA, 795 bp, Homo sapiens
ccggaatattggccacaggcatctatgtatttgaatcatatccatttttgagctcactcctagcagaggagtcaaaacttacgttctggcccccaggtacatttccagtctcttactcataaaattgtgacatacccccaggggtgcccaaaggggtttgtgaatcaagatagtttgaggagaatcgattttctgatcctcagtttttctatgctctttttcctaaaagcgatattcctaaaaaggcatccaagacaaggcatcccctttcccatttgctggggaagacagctttacaagagaaagctgcccctctcacccatgtgaccccccactctggggcactgccctaggggtagaaatctccaaggcatcaaacaaagtgactcctgggggtcaagtgacagaggagcaagtctttctgcaagtcaagtggtttccagctctgctttcagcaaaattgaaagaggcactaatcaaattgccagcggatcataaaaaaacattttgataataatgttattaggcatataacttggaagaagttcaaagaattgaatggcatcctcataacaaactcatcggcttccatttatttatttatgtggacagtgtttctcaatgtttaaacctacaaaagactaaacatgggagtaaacttcatgttgaaccttgtgtgagtctagcaataagtcatccacatatacatacactaattgggaagaaaacctgtcccaaccccaactattttattaagagatgcatttccaataaaaatttaccttttatgtttaa

SEQ ID NO: 397787 - DNA, 337 bp, Homo sapiens
tagatttcctcccctttgatatcccatgcacacctcaaatgtgacaaactcacggcagatctcacccgcatcctcctgtaaatctacctcttctctgactgccctacgctggtgactggcaggtccccctgagtcataaacttgggctttgtccttgactcccatgtctccccggtttcactgttccagcaacatttgatcagttacttaatccttcctcttaaacatctctctgagtcatccagcctctcctggatattgcctttgtcactgctgagtctgtcttgatttaaatttttgatattttaataataaaatttttttgatattttgttca

SEQ ID NO: 397788 - DNA, 233 bp, Homo sapiens
cctggcacccagcatgtcccggcctcacccacccctctggccggcagtgagcagctggggtgacctcccagaaagaaaatgccagtgggtttggctaaagcagctggtcaggcaagccctgtggcttctggtcccctcaaaatgcccagagctgagaatttccagagcatcccatgctgttggcacccaaaaatcagggtggtcttccctctggggctggaggtgtggcaccc

SEQ ID NO: 397789 - DNA, 252 bp, Homo sapiens
gtttttgaaaataatttggagggaggaagataaaccagattgttttttccatttgcattgctttctggggagttagaagcatgaaacaactcacctctcacccttggaaataacctgaatttgtacataattctcttcttttaatgagttgtccacacgcatattatgactgcatattaaaatgtaattattttatgtaatgcttatatgaactatttcttcaatgaaaagtaaaattacttatttactatt

SEQ ID NO: 397790 - DNA, 252 bp, Homo sapiens
ctttacttataacattattcaatcgtactcataaactaattgttttttccatttgcattgctttctggggagttagaagcatgaaacaactcacctctcacccttggaaataacctgaatttgtacataattctcttcttttaatgagttgtccacacgcatattatgactgcatattaaaatgtaattattttatgtaatgcttatatgaactatttcttcaatgaaaagtaaaattacttatttactatt

SEQ ID NO: 397791 - DNA, 250 bp, Homo sapiens
tattaagtaagtctaaaaccaaaataataacaacaaattgttttttccatttgcattgctttctggggagttagaagcatgaaacaactcacctctcacccttggaaataacctgaatttgtacataattctcttcttttaatgagttgtccacacgcatattatgactgcatattaaaatgtaattattttatgtaatgcttatatgaactatttcttcaatgaaaagtaaaattacttatttactatt

SEQ ID NO: 397792 - DNA, 541 bp, Homo sapiens
caaagaagttcccttctcatcatcttcatctcagctattaaagatatatacagttgtacagtttgctctgatgttggcattttatgaagagacctttgcagatacagctgcactgtcgcaagttactctccttctgagggtttgcttcattatcctgaccttgacttccattggatttcttctggatcaaagacccaaggcagctattatggaaactctccgttgcttgatgttcttaatgctgtaccgatttggtcacctgaagcctcttgtcccttcattgtcatctgcttttgagattgttttttccatttgcattgctttctggggagttagaagcatgaaacaactcacctctcacccttggaaataacctgaatttgtacataattctcttcttttaatgagttgtccacacgcatattatgactgcatattaaaatgtaattattttatgtaatgcttatatgaactatttcttcaatgaaaagtaaaattacttatttactattaaaaaaaaagcctggcctcgttggcctca

SEQ ID NO: 397793 - DNA, 512 bp, Homo sapiens
caaagaagttcccttctcatcatcttcatctcagctattaaagatatatacagttgtacagtttgctctgatgttggcattttatgaagagacctttgcagatacagctgcactgtcgcaagttactctccttctgagggtttgcttcattatcctgaccttgacttccattggatttcttctggatcaaagacccaaggcagctattatggaaactctccgttgcttgatgttcttaatgctgtaccgatttggtcacctgaagcctcttgtcccttcattgtcatctgcttttgagattgttttttccatttgcattgctttctggggagttagaagcatgaaacaactcacctctcacccttggaaataacctgaatttgtacataattctcttcttttaatgagttgtccacacgcatattatgactgcatattaaaatgtaattattttatgtaatgcttatatgaactatttcttcaatgaaaagtaaaattacttatttactatt

SEQ ID NO: 397794 - DNA, 573 bp, Homo sapiens
gcctgtgcctcacacgagaaggcccttccacagagacaggtgattccgaccaggggagatggtggccaagggtttcgtaatcaactttgtggcactttcatacttcaattgttaaaaactgatcagtaatcatttctgattatgttttcttttatacagttaaatgttaattgtttttctgggtagaaaagaaacatttacacactgtggaaaatctgaagaatacagggaaaataaactcactcaataaacctggagaccagaaatactcaggatgagtgagactctattttcatatatacatacatgatcgccgctacaatccactttgttcatctttttaaaaacacctcatttaaaatcctttaactcgtaggctgatattcttgttttcatcttagtgccaacacttgctttccaaatcaggcagaaaaaggcatctgttatccattactgctgctcctgactaaacgctcccttccctgttggtttccaaggggcccgaggttggttggagatcatcctgacaagcccacagccctcctctccaggtaactgaatgccctgcggccg

SEQ ID NO: 397795 - DNA, 490 bp, Homo sapiens
ttacaggggcagcaaatgctgtctgtacattctcctccttagtgttcaagcagcactgggctgttgcctcctctagtcctgtaggggtaaagatgaccatcatgtctacttcaataaagggttttatgggtggacaacattgttctcccccattcctcagtagcggacctcttctcagcctggttgcactccttgctcttatgcatggcattagagccacacccagtgtgacagccatacccaatatgccaccaacgtcaggatcctctgggcctgcaccatcaactatggtagccatgaactgtatgtgtccatttacattaagtacaattaaataaaattagaaattcagtttctttctcactagccagctactttgggggctgaggtgggaggatcacttgagtccaggaggttgaggctgcagtgagccatgatcacgccactgcactccagcctagacaacagagtgagactctgtttctaagag

SEQ ID NO: 397796 - DNA, 208 bp, Homo sapiens
taggttttcatacttcatggcaagaaatctacaggaaattacctgtaccgtgagtgcatcggcatcagtattttttcacatgcaaattatagaaaactcagggtaaactggcttatgcaaaaaaggaacttgattagctcatgtaacgaaaaataccaagatttgctattaacatgacccagcatgatgtgattgggatgcagggcgc

SEQ ID NO: 397797 - DNA, 533 bp, Homo sapiens
gcagaatatgtgcattgcaggtgctatttatcatggtgaaaagttggaagcaaactcaacactgaaatgagaaacaggctgaatcacagggtggtgcatccactagcagggatcatatactgtggtaattaaatggtctgacatccttgcagcaagttaaactgtcacaggaaacaagagacaaagtatcatggactacaataaaaataggaaaaggtgttgccgcagagaaagactgtaatgcaggcgtcccatgctaagaatagttatactgtggccaggcgcggtctgggaggccgaggcaggtggatcacctaaggtcaggagttcaagaccagcctggccaacatggtgaaaccccatctctactaaaaagccaggcgcagtggtgcatgcctgtagtcccagctactcgggaggctgaggcatgagaatcacttcaacccaggaggcggaggctgtggtgagccaagatcacaccactgtactccagcctcggtgacagagctagactccgtgtcaaaaataaaaaa

SEQ ID NO: 397798 - DNA, 369 bp, Homo sapiens
aacagtatagggagcccagtaaataatccctaacatatatggtcaaataattttcaaaaaagtaccaagattattcgtggggagagtagaatcttttcaacaaattatactgggaaaactggatatccacatgcaaaagaatgaagttggacacttaacaccatatacaaaaattagctcaaaatggatcaaaggcctatatataacccctaaaactgtaaaacccagaaaaaaaaatatgggggaaaatcatgacataagtttgacaatgatttcttaggtatgaccaatggtacaggcaacaaaaaaaaaatggaaaaactggacttcatcaatattaaaaaatttttgggcgtcaaaggacactat

SEQ ID NO: 397799 - DNA, 682 bp, Homo sapiens
catttcaacatgagttttggagggaataaacattcaaaccatagcaataactaagtgattttgaaaaaattggaagagtattacaaataacagagctaaaaatgactacttaacaaaaatttgggtatacataattgttaaagctgatattgagagaagttacaccattgcttttcaacaaaacactgtttaaaaccactgttcacagaatgctggcatgatgaactttgggtctgactcaagacgaaaactcctgaattcacaccagaatcctgggaaagatcccatttctaggtactgtatataagaatcttacagctggggttggaatatcaaagaaaaaagactaggggtttttaatctagtgtgaaaaatgcttcagatgttacaattatatgtcatacaagaaaaacatatatgcatttgaaattttaaataacattaaagaaagacttcagatttttatgtttaactagtagcactttgttttttgagtcattatgcttggatttactcttttggcattgacacctgcattcttcaaagcttccttaatcagcaggatttcagaataaaattaattcttaatatcgggcaaggggagcttacggaatgaacgataacccggaagagctgggcccaatgtccattgtccaaggcccccggtcccacgttccgcgat

SEQ ID NO: 397800 - DNA, 677 bp, Homo sapiens
aactactaacacagaaactattctacttacaatatggttgtaattgaatctgtttgttggaaattccaaagtgactaagcttgctgtcacaaatgcacttccaggaataggagcatgaatcagtttctcaaagcttttaataaaagctggtgttcttgtttatgcatgttcaatgccatgtctgcctaggtgataaaataatgtttggtgcatagaaggcactaaaaatatagcttttgaatgagtgaaggacattttccccaaaattattgtcatttgtcatttgtctctgctggaagtctgtgggggcagataactgttcttggggatctcccaagtgtcctgaggaggtccttaggagccacagcctgcattctcgtcgcctcgcccctcatgtggatgtgaaccagactggaagaggcatccctttgccttgaggcaacagtttcaagagcagagtctctttggccagctcttaaacttctcccaagttagccctccccggaatgaacaggaggctcctctgcccatctagtgtcaaggtgccgactcaagaagtcatcctttgtcttcctcttccattctcttgctgatattgtccacggacacaggcacagcacttttgtacgttgcacgatttgctctttgccctttataatcatttctactattgaata

SEQ ID NO: 397801 - DNA, 632 bp, Homo sapiens
ttgtcctctggcacatagtaggaagcactcaatatctgttttttaaaatgaattgaatgtagtatgtgaggaagaaggagaaaacaagggcgtctgtttctagcataggtgaccccaggtgagtggtcgttttccacctgagagagagagtagagtagaactgcggggtcgtagcatatgttcgttatcaactttgctagataatgttgaattattttccaaaatgtgtgtgccagtttatattcaatacagcagtgtatatttgttctatttgcttgaggacattagtttttttcatatttaggtaaaatttgcataacctaaaattaactattttaaagtatataatcagtgacatttagtacattcacattgttgtacaaccaccacttctttctagttccaaaacattttcatcccctctaaagaaaccccatacctattagtctgttctggcactgctataaataaataactgagactgggtaatttataaagaagagatgtttaattggcacacagttccacaggctgtacaggaagcatggctggggaggcctcaggaaacttagaatcatggcagaaggtgaaggggaagccagcgtgtcttacgtggccggagcaggaggaag

SEQ ID NO: 397802 - DNA, 295 bp, Homo sapiens
tttcacttaaaagcttctggttgacgcgtgatttctcccctttgcaggaagctgacaagaagcacgttgctgagtgatcctgggttcccatcctccgcacccgtgcatccacgcgtgggcccagccagcaaggagaagtctaacaggcaggaggaggggagacacaaggagcccccgcagtaagtcacaagaagctgcctgcactctgactttctttggctttctcagcattttgtacagggttcccttgactgatgtgggggttagaactggaaggaaaggtccctctcctccc

SEQ ID NO: 397803 - DNA, 644 bp, Homo sapiens
gatttcttaactacaggactcttagccttttcacaggaatgtgcatgacttggtgactgcctacatgtcctgcctcatctcacgttttttttccctgacccactttgcttactctgcccagatttaatctagtactaaggatcaaattacaattgtctatgttacatgggcattttctcagtttgccacagcaatattatgatcactttaccatcttgaatatgaactgtccctccatctctgctcaattactgtgtcagagcaagcaaacgtttttactatttcattcatagattcagcaaaatttgttaagcacctactatatttgccagacacagttctaggcactggagatacaacagtgaataaaagaaaaaccctgaccttatatagtttaccttatagtggggagtggaaaaagggaacaataattaaaaatacatgttatgcccagtatggtggctcacacctgtaatccttaaactctgagaggccaaagtgggaggatcacttgaggccaagagttcaagaccaacctttataacacaccaagacctcaacagaaaaaataaaaataaattagctgggcacagtggtgcatactgtagtcccagttattcgggaggatcacttgagcccaggag

SEQ ID NO: 397804 - DNA, 405 bp, Homo sapiens
ctgatctatgaatgctaacatttatgttgttcgctatttctgtgtacttataccacccgtgtgagtgttgcttgatttggcagaagtaatggaattttaaaaagcagttgcatgagcaaatatatctattttccatatgtacatatttgcaatttagcaagtcatttgcttttgtttaaatattcaaaacgttgtcatatgtgtgttgtacacattaagattttatgtattttaaaaattatatatgtgtattgatatatttgtatgcacacagagcaaagcttgaaatagcaaaaggtaattacatgcatattgtatatactactttgtattaaaaatgtagtttattgatctttaaaaccaaatttgtttttgtaataaagagtaataaaaaattagattatg

SEQ ID NO: 397805 - DNA, 652 bp, Homo sapiens
tagaactatgggactgtatttaacaagtacatatgcatcagattagtttaactttatgataacttgcttctcctaaattgttactaaaaataattatacctaaagtcatccagaatgccataatttcatgagatgacacagcaggtaaattggtttctccaactcctaccttctaccagattgttctgtacagaacaatcatgcttccaaagacagccaccactagcaagaccaggaagaaagaaattcttatcacccctaatcaagcagataaattgtgtatgctccaaagcattcttattgaggaggaaaactgaggagttgtagaatatgctacagttactattagaaaaagtaaaagccagtcacctgagactctttaccctttgccccccaattctcagtatgccacctttcactttgatctcctgagtctcatttcacttccctaacattagagtttaggcacattcaattttatcttactttggattgttataaaatcaattaattctagtcttcttttgttttcctttttagtttatataataagagaacacatgcttgttccaaaaacaaaattttaagcccaaacataactttataaggtaaaaagcaaaaacatcctcttttctccatcttgtctcacttc

SEQ ID NO: 397806 - DNA, 320 bp, Homo sapiens
atcaccactgcatcatcacagcatatgcagtcacccggagatcccagagcttatgttatctttcacagaagcagatatacagaggggttatcttttcatctgctgaaaaagtttcaatgtttttatgtgcatgtacaatgcttacatacaaagtcaacattgtgataatgcactttcctgtagtcaaatttgcaaaatatgtgtaaaatgaattagaactctttaaaagcctttatacaatttatatctccagtattggaaaagattaaatacataggatagcaaattgcagaaaatgatgctgacaatttaaaatagtg

SEQ ID NO: 397807 - DNA, 159 bp, Homo sapiens
taactacccacttagtgcattgcccattgcccacccttcaatcccatactgatgccacccatacccagcatgcactgtgtccagcagctctcagctctgcctgggggcagcctaagtatctccagttaccaggggcagaaggagagtctaaacaaattg

SEQ ID NO: 397808 - DNA, 328 bp, Homo sapiens
ttctcatctctttccttatccacttcgcccatgcccaccccggccagagatgattctgaagtcgatctcagatgtgtctttttatctttaactattttagttgaattctatacttttgaggtctagctaatcagaaagaagagtgaagaaagagaccagggcagtcagaggaatcagatgccttttatctgagaaatgagagaaggaatactctctttcagaaacactggtctagaagacccaggaggaagatttcagggtctgtaaataagaaaagcacaataatgtggaaaccagttaagaatttatctctgtgtcattaaggcat

SEQ ID NO: 397809 - DNA, 704 bp, Homo sapiens
  misc_feature (38)..(39): n is a, c, g, or t
  misc_feature (331)..(332): n is a, c, g, or t
ggcagtactctcagggttataaggtacgaggctgggtnngcggcggcgtagctgtggcgggaaacgctgtttgaagcggcaggatggatggcaagcggcggccaggcccaggcccggggtgcccccaaagcgggcccgtgggggcctctgggatgatgatgatgcacctcggccatcccaattcgaggaggacctggcactgatggaggagatggaggcagaacacaggctgcaggagcaggaggaggaggagctgcagtcagtcctggagggggttgcagacgggcaggtcccaccatcagccatagatcctcgctggcttcggcccacnncaccagcgctggacccccagacagagcccctcatcttccaacagttggagattgaccattatgtgggcccagcacagcctgtgcctggggggcccccaccatcccacggctccgtgcctgtgctccgcgccttcggggtcaccgatgaggggttctctgtctgctgccacatccacggcttcgctccctacttctacaccccagcgccccctggtttcgggcccgagcacatgggtgacctgcaacgggagctgaacttggccatcagccgggacagtcgcggggggagggagctgactgggccggccgtgctggctgtggaactgtgctccgagagagcatgtatgggtaccacgggcacggtccctccgc

SEQ ID NO: 397810 - DNA, 480 bp, Homo sapiens
agtgatctgcccacctcagcctccaaaagtgctgggattacaggtgtcagccaccatgcccagccgacatttctaaaatagatcatctattgtttcataagattatgcttatagaaaagcattaggtgacaatataccttcttttctagtagttacttaaagtatgtatcgcatacttgaagcatcatgataaaattaatttggctagagtgtaagttggcaagctctagcctgggactactgcctggtttttattactccaccacagagatactgatggtgcttctgtttttaaagggttattgcaaaagaaagaagaatattagaaatgatttgtgactcgcaataacttaaaatatttttttctgacctttttatagtgtctgtggaaacctgggctggaatatttatgttttttaaaaaattttaaaattagtatttatggtagatagaccacaaagttactatgctcttaacttt

SEQ ID NO: 397811 - DNA, 226 bp, Homo sapiens
ccgggtcgacccacgcgtccgcgtatctgtagcccttgctacttgggaggctgaggtgggaggattaattgagcccaggagttccaggttacagtaagttatgattgtgccactgcagtacagccaggatgacagagaaagaccctgtatcaaatacatagatgatagatacatacatatatacatatatatgtgcatacatacatacgaaaagaaagatttgaga

SEQ ID NO: 397812 - DNA, 383 bp, Homo sapiens
gcctagttgctctggctaggacttctagtactctattgaataagtagtgaaaacagacattctcgtcttatttagatcttggaggaaaagctttcaatttttttttcccattttgtataatgttagctgtgggtttgtcatatttggcctttattgttttgaggtatgttctttttatattcaatttgttaatagtttttatcataaagggattttgaattttatcaaatgctttctcagcatctattgaaatgattttatacttctcgattccatttgtgttatttatcatattgattgatttgtatatattgaactatccttgcattcctaggatgaatcccacttcatcgtggtgaatgatatttttaatatgttgttga

SEQ ID NO: 397813 - DNA, 472 bp, Homo sapiens
cttaatattgggcttcccagcctccagaactgtgagaaataaatttctgtgctttataaattacccagtctcaggtattttgttatggcagcacaaacagacgaagacagttactattagaagcactgatcagggaagtgaaatggattaatttatttggagaatttggagtgaaggatggaatagagggatgagagacagatgagggaaactagttaggaggctagcacagtagtcgatatgaaaactcaagaagcatcttacccatagtgtaattaggaagtagcttgttcttgctgagtccatgctgatgtcttctgatcactttcccctcaatacccaacagagttttaatagtctgttggtctccagtggaagagaaagtcagacagatcctaattctctgtcctattgatgcttatatgcttggttcctaaggaatggtatgaaaaataacatagaagtgaaattc

SEQ ID NO: 397814 - DNA, 380 bp, Homo sapiens
gctgtgctcagaggatccccatcaaccctaaatttattatgattacagccactattagatttcaaaagggttcatcagaaatctctgaggtatatgatggggaaagaatattttgactaccactttaacaggtctgctatttaataatattagtttctttttaattgatgtttcatggacatccagaatactagctataaaatcatatatgctgcataatgcaagcaaaacaaaagcacctgtaaatattacagaagactatacatgtatgtatatcattgccataaaatacctatatacatatacgtatatacacacataattgttttcacaaccatgatagtattacttacaaaagcataataaatttagggttgatg

SEQ ID NO: 397815 - DNA, 407 bp, Homo sapiens
ctcatcagaaagactgtaaacctttgagagcagaagtcatgtttatatctcttgctaccttatatttaatgtaatgccacatacatagttggagtgcaatgcatattcagtgctggtgatcatgggatgtgtttgaaaaggatctataaccaagtaacagccaatgtgtattgggcacataataatcattatacacaatgctatacactttatatggattatgtcatttgtcctttctacaacccagtgatctacggacaactatagtcccattttactgatgaggaaactgaggcttagagagagctaagtaatttgcccatggtcatccagctcgtaggtggagaaaccagaattcaatccagatggtttgattccagagccaccactctcaaccaccgtgctat

SEQ ID NO: 397816 - DNA, 358 bp, Homo sapiens
tgtgcctctacattccctcttgggtgacagagtgagatcctgtctcaaaaaaaagctgttcatttcaggaatgttaattatattcgcattgttatgcaaagacttctagaaactttacatcttgtgaaacttaaactcagtacccattaagtaacaactgctaattttactctctctccagccctagactggacaaaccttccactttctctttttatgattttgacttcttaagatacctcatataaatggaatcatacagtatccattattttgttactggattaattcaggtgacataatattctcaaggttcatcttaaaatatgacatgatttttttttaaggtgggataata

SEQ ID NO: 397817 - DNA, 703 bp, Homo sapiens
gtagagacgggctttcaccatgttggctaggctggtcttgaactcctgacctcaaatgatctgcctgggcctcccaaagtgctgtgattacaggcatgagccactgtgcccagccaaaccaaatgttatgtaagccatccatctgaggaaagtgggcctgcatttgtagtcaaagcagtgaacaagcctcccaacagagtagaatggtcttaaataaggaaagacagatcttgcctctgcagaattataaatagcagaaacaactgaaaatagaaatgatcaccattacttttctagactattatgatggtttatatagatgaaaagctaagttactgtatggcaaggatttcttcctagagaagaaatcttcctagaggtaccattagttcagtgtagtagaactcctaagacatttggctggtaacatttcttgaaactgatctatgtgtcagcacctctactgggtgcttctaaaacatcttgcagaatggatgggttcattcaggctgcctcccaaggtggcatggtagtttctattttggcatttttgtttttgtttttttaaatacaaagatatttgtcttacctccttttcagagctctgtttaggctttcctaaagaagtcacaagtgctgggtgcagtagcttatgcctgtaatcccagcattttgtgtttttttgttttgttttgttttgttt

SEQ ID NO: 397818 - DNA, 534 bp, Homo sapiens
gccatttgtttcagtcatgtcagcaactttggttttcataagggttttaatgaatcggagagtggaatttaagaaagcaaacaatccaaggaatactccttatttttctaaaatagcaaagcaaaaatgggaaccctttccagtttagttacagcaagtatctattggagttttagaaattcttagagtacatcatttatcatatagaacaaaacttgattaatgaacactttttaaaagtctttttagggtcctattattattttagttgtttagatataaaaatattttatgacatattcactgttaaatttatagtgaattgacattcagtgacatttgtttttaaagttgtttattgaaatatgtagtctaccagaaataagtacggttaccaactactgaaatcaatttaatagtaatttggtcttgttagtctgttaaaaagaattattggccttcagatatttccacaaagccctttgttactcatgaatcccatcaagatgctatgaataaagactgtgaatatca

SEQ ID NO: 397819 - DNA, 254 bp, Homo sapiens
ctgctctagaggttccgtagggcgggaatatagcatggatcttcgtaccaagagcaccggtggagcccccaccttcaatgtcactgtcaccaagactgacaagacgctagtcctgctgatgggcaaagaaggtgtccacggtggtttgatcaacaagaaatgttatgaaatggcctcccaccttcggcgttcccagtactgacctcgtctgtcccttccccttcaccgctccccacagcttgcaccccttccct

SEQ ID NO: 397820 - DNA, 692 bp, Homo sapiens
atgtggccctttaagcccggcgagaaacctttgattgcttttctagccgcagcctccggcccaaaggttttcggaagcaaacggcgtgggtgacatcaatagtaagggagcgttgaatccctagatgagattgcctggtttcatccgaagtctggctcccagccagaagtttgagaggcaggataagaataatctgtcctttccctgcatccccggttctgcctcttcccgcagtaggtgacgggttgccccagctgagtacgtcgagttgtttttggctatgacttgccgtcctgcatttttctgagcatgtcagaacagagcctgcaactcattactgcctccactagagaaaaagtgtagtgtggagacttagggagaaaccattaatttcctgaatgttgaaaagaggcacaggagagtggtcagatgcaaaaagaacagacttaaggaggtggttttttgttttttggggttttttttgttttttttcagcaacccagaaaacactgcactcatcaacgccctagaaggcagcacagagtggattttcagtcccagcttggacacttagcaagtcactctgagtttaccactgataaggcccacttcccagggttataataagaaaggaatgaagaaaatatatgacaaggtacaataaaatactttgtaagttctcaagtatcatc

SEQ ID NO: 397821 - DNA, 285 bp, Homo sapiens
tcccagctcatgtcatcccagccacctgcagcagtgccctagggccccatccctctgcggatcatgctcttgggccacctcctccaagaagccttccctgacctccctcctcccagctcccaccacaggcagaatctgggcttgcagttgtttcaggaatggaagccccattcccaggtcctggggggaccccaaggcaggaggtgggcagagaggggtcctgcgaagcatagaggagccctgagttgctctggggtgggcgagggcttccgggtgcgtctgcgt

SEQ ID NO: 397822 - DNA, 290 bp, Homo sapiens
ttgctgtttctaacattttagcacctttctggcctttttactatgcttgtttaagatgttgagaccatattatatgtacagatttgtatcctgcttgtttttgattttcaatatgttttatgtcactgaagacttttcataaacatccttttaaaaaactgtgatattccgtcatatgaatatgtcactttttaaagtcatttccaaaattttagcagttactttgtacctgattgttttgctattataagtaatcctgaattaaatatcttttaatatttttttcatgt

SEQ ID NO: 397823 - DNA, 261 bp, Homo sapiens
atgtatgctttatataggtaggtgaaattttcggtttcaacatgtcttaaaacatattaaagcccatgcacatagacctgacatgttataattatctttaggcatatagaaaatgatttgagtgattcagctctgatttgcgttaacaataatgaacaaaactgtggcccagtgtggagagagagggttgagcatggcagagaccagaaatagcagggatcaatttttgcggagcctttaagacatattactggtgtagac

SEQ ID NO: 397824 - DNA, 395 bp, Homo sapiens
taacatgatggatgtcacaaaatctctatttgaacagttctataatgttcaaggaagcaggtaaaacagagcaaatgtgtgaatagttgtcattttaggggtgaagggaatttttttcccccttgaaggtttgaatctgctgaaataaactgaacagaaatcaacaggagaaaaggcatacccatgtattaatgtgcaattgtgcacgggagccatacaaaatatgagactctaagaagggtcagggagttgaggcttaaagaccattttcatgggggaaagagatgtaggcagttttgagggggtggtaaatgattcttaggagaaatgaatgagcccaaagaacagacagtggcctgagtcagagttcctcttagcgctggtggattgtggga

SEQ ID NO: 397825 - DNA, 476 bp, Homo sapiens
gttttttttgaaaaaaaatgcatcacatttttgagagtctgtcacttgaaggcatggtttagtctaatcttggtttatctcaaatgtaagttcagaaattgtggatgttacagcaagacataatttgactctgaatcagcaagtactttcaaatattcagaactatctggaagtgaaaacagcttcctctgtagacagacagcaagtttcttatcccagaaccctgtagatagaccatctgtgaaagttataatcaggagattcacaaatgtgataatgatgacacagtcacattgacaatgaggcttttagtcatacagattaaatatgtactctattgtgcaaacctcctagtaattgagaataaacttaatcttgggctacaagtaggtacaaagtattcccagttagattttacatgtatacattttgaaactattacttttttaaaaataaagcaatgacttttttaaatt

SEQ ID NO: 397826 - DNA, 519 bp, Homo sapiens
tcacacacacacctgatccagtcactttcaaataaagcatgtgacaagcccacggtcacttcctgcctcaggatcgttgacccaatttcataaggttttcaacagctgaataaaggcaaaatatgttttattttagagtctcatttagaatctcttgaatactaccaaacaggtaaatgagttaaaaatttaatttctaagataaccacagctctagattctgtatgggatagaaagctacatccagtgacttctcatcactaccttaataatactagactattccagtgggaagtatcagtgattatatcaactgtttcttatgaagtgtttggctgtgtcgtcataccatgaatttcaaatggctcatcccatctacaaccaagagaacaccctgcagtcagcattacagaatatgatggaataatttgaatgtctaatagaaatctcaaatgctccaccctgaactggccatgatatatttaaattaaattttgaagctcataaacaatttagaaa

SEQ ID NO: 397827 - DNA, 471 bp, Homo sapiens
catggtttaaaaaaacaaacattgatttctctgcttcaggagtttcctttcctatggtagatgaaactaggtacaataatttgttgtttgttttggagagctgtcaaggcatgctccatggcctctgaaactaggtagattgtatcacatacactccagaccaacatacttgctactttctgatttgattggattaacacgatgtcaacaatatagtggaacaatgtgatattcttgtcaggtacagtctctttggactatgtcagacaaatggcatgagagttaacatagtcctcgagctaattcataaatgtatattgttaccattttacataaatgtaatcgttgatgcccttattttctcagaggggtgggggaaaattgctattcccacattaatgtctgtatgttagtgaatctgagtgagtgccaatctacttgagcaaataaacatctggaatagcagctgta

SEQ ID NO: 397828 - DNA, 554 bp, Homo sapiens
cctcccaaaggtgtgagccaccgagactggcagacctgccaacttctgttaagccttctgacacctgcagccctgaccaatgtcttgagagacccaaagctaaactacctacttaagcggcccctgcaaacctgacctacagagactataacaataaatgtctgttgttttaagccactaagttttggggtagtttgctatatggcaatggataatgcagcgtggctctggaccaggtgttctcaccctgcctctggcaatacagcttgtcctcctgtgaaacaacttcctactactgctgtctttggatgtctcaatgtcccctgttgacttcctttatcctgtcctcaaccctttactaaactctcttcaaacttcacaatggaatatgttgcctgcttcctgcctggtgcaggttggaattatgaacaagacagacacccttcccttcagagtttatattctagtggggaaaacagacaataaattagccaacaaataaataagcaaggtaatttcagagaccagtaagtaaaacagagaaacgaatggaa

SEQ ID NO: 397829 - DNA, 520 bp, Homo sapiens
ttcatgggtaccctgtcatttttaacactcacattggcctcaaccaagccaaaagttaattgctatccctatctacctcccaaacaattttagtatgttgtaattccaatcctattcctcccagcttctattttatggctgtatttttgttccacctactatttcaaaaatctcttaaatgaggccgggcatggtggctcacgcctgtaatcccagctactcaggaggctaaggccagagggtcgcttgagtctgggagatcaatgctacagtgagccatgatcacaccactaccctccagcctgggtgacagagcaagaccccatctcaaaaaaaaaaggggtcccattttggaagggggccttaccgggaagatgtgtacacacatacacacatttgtgtccggagacacacagatttgtccatatgtgggcatatggatatataaggcaggagtggcacttgtaggcactttttatgcacgagtagacttgcttgcttggggccagttttccatact

SEQ ID NO: 397830 - DNA, 422 bp, Homo sapiens
ggaaggatatagaatagctcacagattctaagggcctgctgagaaccctcacatggatgggggaccagggattcaggcagtaggcattgatctcatcacatcccttgctgggctaaaccagcttcgtctttgattctattcttgtatctctcccttttaggatttgactcccaagactcactgacccagcttggacctggtgcctctcctgtggctaggaattcagggaaaaacatttgattgacagtcccattatggctaccctcaacaggagagaggaaattttccaaaagcaaatcaaagtgctcttgccataagaaggaggaaacggatgctggctgcctaaagagccctacctggcccactagagcatgcaagccacatgttgggcctcctgtgaggagcctctggctttgcttcct

SEQ ID NO: 397831 - DNA, 1020 bp, Homo sapiens
gtgtgcggggccaccgtcccatacttgtccacctcgggcatgttcatgtcgtcgatgaagtagacgagcttcttagtgcctggcggccgtagttcctccccgatttcttctccagcggcttctccagcacccctagagagggcagagggtcagctgcccgcctgcgcctcctgagccagagcctgttagccctaccctccagcactccaaggcaggactcgcctcacttctggcgcctcctgctgcctcctccatacctcattgccatctggctctgccctcaacacgccctgaagctgttctccctgagtgatggaggtgcgcctagctcccaaatgcaatgggaactcttctgtccttggcttgactctgggtgccatcctactgaggaaatcccttactctgtcaatcaccagccacgtgtccaagcccgaaaatatgcctctggaatcaatatcaagtcttccatttctccagacttcagatatttcttaaacccatcccttcctctctgatccctagaggcccccatcttgctggcatgaccagctgcttttccctcgtcacattggaaagggacacttgcaccttggcccagcatcagcgccttcccgtcaggagcagcctccgcctttatgctctggccaggagaacccgaccactgcccatccggcaatgccccactccccaccatgccctgtgaacgcgggttcttgtctggtgtgcttctctgttttcaccccttagaggcagcctgaccctttggatggcagcccaaacttcaatcacctgggaagacttcccacctccacagaggccaagacctcccttcccacaccagcccttgttccctggcactttgtgcaaacatccgtttgctcagctgccctgcctcgtgtcactgtgaatttacaccatttattcccaggtctctcaccccttcactgctgtgacactggtgcctggtgagggcctgatacacagtttgtgacatgaatgatgaatgaatatgcaactctg

SEQ ID NO: 397832 - DNA, 1272 bp, Homo sapiens
agagcctcagagggaaccagcactgcctactccttgacttctggcctccagcactgggagaggataaatgtctgttgtttgaagctgccccattagtggtcattgtttcagcagctggagaatgctgtataagcaggcaagtgttgctggagaagccggcacagaggcacccaggctcagcagctcctggccctgtccccatagggaacattccacttggtatccctctcaaaccctggccacactgtgctgcctgcctcccagcagagggtctcacttcccacgcagagagcaaagaagtgcaccagcatgaactccggaaacttaattttctctgcctatagacttgcatgcacctgaaaacagccatgcctgcatcccatggccaaacatcattcttgtctcgacaaatactacaaagcttcattcctcttgttccagccctaccctccagcactccaaggcaggactcgcctcacttctggcgcctcctgctgcctcctccatacctcattgccatctggctctgccctcaacacgccctgaagctgttctccctgagtgatggaggtgcgcctagctcccaaatgcaatgggaactcttctgtccttggcttgactctgggtgccatcctactgaggaaatcccttactctgtcaatcaccagccacgtgtccaagcccgaaaatatgcctctggaatcaatatcaagtcttccatttctccagacttcagatatttcttaaacccatcccttcctctctgatccctagaggcccccatcttgctggcatgaccagctgcttttccctcgtcacattggaaagggacacttgcaccttggcccagcatcagcgccttcccgtcaggagcagcctccgcctttatgctctggccaggagaacccgaccactgcccatccggcaatgccccactccccaccatgccctgtgaacgcgggttcttgtctggtgtgcttctctgttttcaccccttagaggcagcctgaccctttggatggcagcccaaacttcaatcacctgggaagacttcccacctccacagaggccaagacctcccttcccacaccagcccttgttccctggcactttgtgcaaacatccgtttgctcagctgccctgcctcgtgtcactgtgaatttacaccatttattcccaggtctctcaccccttcactgctgtgacactggtgcctggtgagggcctgatacacagtttgtgacatgaatgatgaatgaatatgcaactctg

SEQ ID NO: 397833 - DNA, 760 bp, Homo sapiens
gtgtgcggggccaccgtcccatacttgtccacctcgggcatgttcatgtcgtcgatgaagtagacgagcttcttagtgcctggcggccgtagttcctccccgatttcttctccagcggcttctccagcacccctagagagggcagagggtcagctgcccgcctgcgcctcctgagccagagcctgttaggtagggaggggcgctacctgcttccccggaggacagaaggtgggacctggctgggatccaagtttaccaaagccctaccctccagcactccaaggcaggactcgcctcacttctggcgcctcctgctgcctcctccatacctcattgccatctggctctgccctcaacacgccctgaagctgttctccctgagtgatggaggtgcgcctagctcccaaatgcaatgggaactcttctgtccttggcttgactctgggtgccatcctactgaggtgatcagcccgccttggcctcccaaagtgctgggattacaggagtgagccgctgcgcccggccctggatgccttttatgaaccaccaggctgaacccttctctggatcacgtttgctctggagacacacaggtccctggagcgggtgacacacctgagatttgccgctgcccgcattcccgacgatgaacacggagtggcggacctgcagcagctcctccagctgcaccaccttcagcacgaagctgtcctccgcctgcagcttgagctccacgatgctctgcttgatgatctgggga

SEQ ID NO: 397834 - DNA, 574 bp, Homo sapiens
cgaactcctgacctcaagtgatctgtctgcctcggcctcccaaagtactaggattagaggcatgagccaccacacctggccacttttcttatctatatttgttatgtggatgacttgtgttaacgcaaataagatgctgctcgtcatctttaaagaaaataggtggcaacctgttatagcaagtcctgtttttatttgtacttatgaggctttaattaaacgctaagaattaaaatgcacataataatagactttacctcacaaactggcttcaattattcgatgagacttacatgtattacttaaatgaggttaaatttaaccttttaaaaatgatttattgtggctgggcacagtggctcacacctgtaatcccagcactttgggaggccaaggcagacggatcacttgaggccaggagttgaagaccagcctgaccaacacggcaaaaccccatctccgctaaaaatacaaaaattagccaggcatggtggtgcacacctgtaatcctagctactcaggaggctgagacacaagaatcgcttgaacccgggaggcagaggttgcaaggagg

SEQ ID NO: 397835 - DNA, 2695 bp, Homo sapiens
  misc_feature (768)..(768): n is a, c, g, or t
tctctcatctcttagctcccctccaagcctggggggcagtggtgtggagaagccacaggcctgagatttcatctgctctccttcctggagcccagaggagggcagcagaagggggtggtgtctccaaccccccagcgctgaggaagaacggggctcttctcatttcacccctcccttgctcccctgccccgctaggactgggccacttcgtggtgtggggcagtgggtcccgagataggcttcacgactgagaatgtagagaactacaatagcaaagatttctattatgaaaacatacaaatagagaaatagaactgaaaggaaaccatacacaaatatgataaaagaatgatagcaaaatagatgagagagaaatatcagctataaatatcgagaggacttgtctgcacatctcatggtagctggctgggaccaacgtgaaggaggtcaggtatatggaaccctgggaggaatgctgactcgacagccttttgccattggtggctccggcagcacctttatctatggttatgtggatgcagcatataagccaggcatgtctcccgaggagtgcaggcgcttcaccacagacgctattgctctggccatgagccgggatggctcaagcgggggtgtcatctacctggtcactattacagctgccggtgtggaccatcgagtcatcttgggcaatgaactgccaaaattctatgatgagtgaaccttccccagacttctctttcttattttgtaataaactctctaggnccaaaacctggtatggtcattgggaaatgagtgctcagggagatggagcttaggggaggtgggtgcttccctcctagatgtcagcatacactctttcttcttttgtcccaggtctaaaacatctttcctagagaaaacaaaagggactaaactagaaatataaagagccctatacatgacaggtgatcacgtactgaatgattttgtagtacaaacaataaaaattctcattccgcatcatcatgcggtccatgatgatgaggccgcaaaaaaaaaaaaaaaaaaaaaaaactcgagactagttctctctctctccctcgtgccgaattcggcacgaggtgtaatcccagctactcgggaggctgagacagaagaatcacttgagcccaggaggcggaggttgcggtgagcagagattgcgccattgcactccagcctgggcgacaaagcgagactccatctcaaaaaaaacaaaaaaattagcatttacggaattctgaaattttgggctattaaatttctacatcatctaagtgccctcttggcaatctttcacatcctctcatggcatctgatccagaaggctcaaacctgatctgagtactagtgtgttcctcctactcacttctgtttctattaactaataagtgtagtaatgaaagccagtattagggacaaattttacatgactttcttctcaaacctggacctttattgaacctctgcctccctttttcattagtatgaaagtatgtatcttaaagggttgctctacgaattaaatggatcagtaaatataaagaaagcgcctagcaaagtgcctagtacaaaataaacgcccaactgttattgttactattgttttaaattctagtttccttaccccttaacatacattttcagttatacaaaagttgaacgtttccctggagattgccaaaattctctgaacggtttcaagagatctgtcctattcttcacctacacacaaaaaagtactaatcatcacacacaggctacctaagccacctgaccttacctcccattagctgtccctgtaccatctaactaaaatgtacagatacatacttgtggccaggcacggtggctcacgcctgtaatcacagcactttgggaggccaaggcaggcggatcacctgaggtcaggagtttcagactagtctggccaacatggagaaaccccgtttctactaaaaatgcaaaaattagctgggcttggtggtgcacacctgtagtgccagctactcgcgagactgaggcaggagaattgcttgaacccgggaggcgggggttgcagtgagccgagatccggccactacactccagcctgggaaacagagcgatactctgtctcaaaaaaacagaaagacaaaaaaacggatacatactggaaccctgaaaactttttcagtagcatttagaccttctctcatatacagcattgtaaaatccattgctttgcttttagctgcactatgtgccccaatatcatcaaatggcatttggccttctctttacagactgaaaaggcacattacagatcttaaatatgctagtagtagatcaatgggcagtgtgttattcagaatacagtattctgtgatggttttctaatctcagtgacagtaggtggttaaattaaatgtttatggccaggtgcggtggctcacacctataatcccagcactttgggaggccaagccaaggtgggcagatcttttaaggtcaggagttcaagatcagcctgaccaatatggtgaaagcctgtctccactgaaaatacaaaaaattagctgggtgtggtggcgcacccctgtaatctcagctacccgggaggtagagtttgcagtgagcagagattgtgccactgcactccagtctggacgacagagtgagactccatctc

SEQ ID NO: 397836 - DNA, 2674 bp, Homo sapiens
  misc_feature (3)..(3): n is a, c, g, or t
  misc_feature (6)..(6): n is a, c, g, or t
  misc_feature (134)..(134): n is a, c, g, or t
  misc_feature (747)..(747): n is a, c, g, or t
ggnacnaggcaggcggcgaggagagcggtgccttgcagggatgctgcgggcgggagcaccaaccggggacttaccccgggcgggagaagtccacaccgggaccaccatcatggcagtggagtttgacgggggcnttgtgatgggttctgattcccgagtgtctgcaggcgaggcggtggtgaaccgagtgtttgacaagctgtccccgctgcacgagcgcatctactgtgcactctctggttcagctgctgatgcccaagccgtggccgacatggccgcctaccagctggagctccatgggatagaactggaggaacctccacttgttttggctgctgcaaatgtggtgagaaatatcagctataaatatcgagaggacttgtctgcacatctcatggtagctggctgggaccaacgtgaaggaggtcaggtatatggaaccctgggaggaatgctgactcgacagccttttgccattggtggctccggcagcacctttatctatggttatgtggatgcagcatataagccaggcatgtctcccgaggagtgcaggcgcttcaccacagacgctattgctctggccatgagccgggatggctcaagcgggggtgtcatctacctggtcactattacagctgccggtgtggaccatcgagtcatcttgggcaatgaactgccaaaattctatgatgagtgaaccttccccagacttctctttcttattttgtaataaactctctaggnccaaaacctggtatggtcattgggaaatgagtgctcagggagatggagcttaggggaggtgggtgcttccctcctagatgtcagcatacactctttcttcttttgtcccaggtctaaaacatctttcctagagaaaacaaaagggactaaactagaaatataaagagccctatacatgacaggtgatcacgtactgaatgattttgtagtacaaacaataaaaattctcattccgcatcatcatgcggtccatgatgatgaggccgcaaaaaaaaaaaaaaaaaaaaaaaactcgagactagttctctctctctccctcgtgccgaattcggcacgaggtgtaatcccagctactcgggaggctgagacagaagaatcacttgagcccaggaggcggaggttgcggtgagcagagattgcgccattgcactccagcctgggcgacaaagcgagactccatctcaaaaaaaacaaaaaaattagcatttacggaattctgaaattttgggctattaaatttctacatcatctaagtgccctcttggcaatctttcacatcctctcatggcatctgatccagaaggctcaaacctgatctgagtactagtgtgttcctcctactcacttctgtttctattaactaataagtgtagtaatgaaagccagtattagggacaaattttacatgactttcttctcaaacctggacctttattgaacctctgcctccctttttcattagtatgaaagtatgtatcttaaagggttgctctacgaattaaatggatcagtaaatataaagaaagcgcctagcaaagtgcctagtacaaaataaacgcccaactgttattgttactattgttttaaattctagtttccttaccccttaacatacattttcagttatacaaaagttgaacgtttccctggagattgccaaaattctctgaacggtttcaagagatctgtcctattcttcacctacacacaaaaaagtactaatcatcacacacaggctacctaagccacctgaccttacctcccattagctgtccctgtaccatctaactaaaatgtacagatacatacttgtggccaggcacggtggctcacgcctgtaatcacagcactttgggaggccaaggcaggcggatcacctgaggtcaggagtttcagactagtctggccaacatggagaaaccccgtttctactaaaaatgcaaaaattagctgggcttggtggtgcacacctgtagtgccagctactcgcgagactgaggcaggagaattgcttgaacccgggaggcgggggttgcagtgagccgagatccggccactacactccagcctgggaaacagagcgatactctgtctcaaaaaaacagaaagacaaaaaaacggatacatactggaaccctgaaaactttttcagtagcatttagaccttctctcatatacagcattgtaaaatccattgctttgcttttagctgcactatgtgccccaatatcatcaaatggcatttggccttctctttacagactgaaaaggcacattacagatcttaaatatgctagtagtagatcaatgggcagtgtgttattcagaatacagtattctgtgatggttttctaatctcagtgacagtaggtggttaaattaaatgtttatggccaggtgcggtggctcacacctataatcccagcactttgggaggccaagccaaggtgggcagatcttttaaggtcaggagttcaagatcagcctgaccaatatggtgaaagcctgtctccactgaaaatacaaaaaattagctgggtgtggtggcgcacccctgtaatctcagctacccgggaggtagagtttgcagtgagcagagattgtgccactgcactccagtctggacgacagagtgagactccatctc

SEQ ID NO: 397837 - DNA, 217 bp, Homo sapiens
aattatatattaatattaatattaataattatattaatgtaaataatttaaatagttcaattaaaaggcagagatagtaggaccggatttttttttaaatccaatcttaaccgggcatggtgacgcctgtaatgtcagcactttaggaggccaaggtgggaggatcacttgagcccaggagttcgagagcagcctgggtcttgttatctatgcttta

SEQ ID NO: 397838 - DNA, 234 bp, Homo sapiens
ctgattgctaacccaataatatttcagcgatatcaagcttgtacgataaggtttttttagtaaatatttaatctctacattatttttcccaaatagtctagtcagatataatgtgagagccctggtaatattggaaagggtcgttttgaagtgattagattttatatacagctttgttgatagagtaaagattacattgtgggaattaatgagatattgcgattaattggaagt

SEQ ID NO: 397839 - DNA, 558 bp, Homo sapiens
tgttacaaatgtttatgaaagaaaagcccaatataaaatgagcccatgaagccaagagaaagacctaacctattttgtggcatcaaggaaggattcctcaaggaaatcacaactaagcaaaacaaaagcatatgcaaaggtcttgagtagagaaaactgaaaacagtagaaataatgaagaaaagtaacaagaggtaaaataatatatgctatttgtaggagactgatttggattacaaaatcaaaactccataggaaggcaggaggggtggaagcagccctaccatttggaaataaaaaataaaagtctcccaaacaagtcctgaaacaaagcttgtcccactgtcctccctcagtaaacaccagtcattctaatcttctgtcaaattcaaagtcaagtcaagcactttgcatatgtaccatttgtgccagcagttctcttcacatgggaaactaccttcaacttcttgattttagaactcagaatcaaagttccaaattttctacacaggacaagctttggagcagcaatccagctggaagatggggaagaggctt

SEQ ID NO: 397840 - DNA, 595 bp, Homo sapiens
tcatagtaggctactccaggagactagtagttcttatattttctagtctatttgaaactaactcaaggatatagacatgctttcactctagtgtcttaggagaaggctctgtaggaggtatgggcctggatcagattaaactaatagcaacagtttctaagaaaactgtcctactgtatgtagtgacctacttgaagttccccttagggcaacatatataaaaggtgaaaagtattatgatttgtgatacatacacaggcttatttagtttgaagtgtttgtactgtttactttgacctattatctgtcataccttttaggtgtgataattcaacttaattttctttaccaagatccacaaaccccaaataattactttttctcttcccatttcctccagggcatacacaaattgcagtgtgttctaaggcattacaaagtaacaaaataatactgttagatttataaaatgagtcctaataagacatttcagggacatgttgaagcatcatcagttgtaagttagcactattaaaggattaaatcttgtaggatgaaggtggagagttaaagtagtaaagaatcttgctagcag

SEQ ID NO: 397841 - DNA, 402 bp, Homo sapiens
aataggtagtagttttccaacagcaggtccatctcttctgtgttagggacaagctaccccaggacctgcccctgcctctcagtgcagctgacccctacgctgaatactctgcagctgcattcctgaacccttatctaggtgctccagcaaggtcaccagacttgcttacagccctccggctggcacgggggaggtcacgagaaacgtggataaacctaagtaacaccctcttgtaaattcctattttcacaagataatatattgtaagccggtcacgagatgctatgtggtaaagttaaccgaaaaacaaccccagggtctctttccccaatataaacccctcattttgtaagctcagggctgcctcctctgactgtagtggagcagcctggcaggttaata

SEQ ID NO: 397842 - DNA, 388 bp, Homo sapiens
ctgccatgcctggccccaactggtattctttaaggctcctctcccacatgccctggaaggtggggagagggatcactcagggggagtgggaagagcccggctcagggcctgacaacagacatgaacaagtaattcataaaataagaaataccaatggttaccaaccatcagataaacggaaacagacacaagatatcattttctactaccacactggcaaagaatagaaagattaacaaagcccagattggtcagaaacaggcattctttgtagtcggtaccctgtgtaggagccaagttggtactatgtagcagaatgataaacatgcaaccctctgcccctgcaaagagatattgtgacaaagatattcactgaagtgtgtttata

SEQ ID NO: 397843 - DNA, 521 bp, Homo sapiens
tgagacaggctgtcacccaggctggagtacagtggcacaatctcggctcattgcaacctgcgcctcccgggttcgagcgattctcctgcatcagcctctcaagtagctgagactacaggtgcccaccagcatgcccggctaatttttgtatttttagtagagatggggtttcaccatgttggccaggctggtttcgaacgcctgacctcgtgatctgccctccttggcctcccaaagtgctgggattacaggcgtgagccactgctcctggcaaaatgctgtttctaagcgtttctttgacaagtcccatccttcaggttcatgcatgattagggagaggcagcagccctgactgagcacctgagtgttcatggaaccaggtgcatagcgtaatgacatgccattcatgacactactttcttccctgaacatgccatgaattcctgatgattacacagttccccaacaagtgctgctcaaaacctggaactaatcagaaggaagcaccagccttgactgtt

SEQ ID NO: 397844 - DNA, 670 bp, Homo sapiens
attcaaactaaatattgtataacaacttttctgcaagcttgaaaaatctttgaagtagaagctaggaccaagttaaagaatacatgcatgcaacaagaatctctgcataattatgtttattattgcaagactgagccacaatttggctaagatttctagcagccaggggggataacggaaagcctagttatgatgactgtcatcaagagaaggaaacatggcacttaagaaaaacaaagttttgcttagaaatgaattataaataatttcccctgggactgtttagtaaactttactttggaaactctgtataatctcaaatgcaattttcatgtacttttttattttgaccacttaacaaaataagaagacataagattactaggaaacagcctgctggttgtctgagtcatagagaatatgcactcaacttaccctattgtcaatcgtgtctatacttggactatgttcacaaaaatttgctttctcactcaaagttgggttactgatgggcacaattcagatatcagccctctggaaacttctgacacatttggtcttatagaagatacgaaaagaagaaacaacatatgtataataaaaagaaaatccaagtaatgaagttagagaaatatgaaaaaaatctataattaaaaacaaactttcctaa

SEQ ID NO: 397845 - DNA, 504 bp, Homo sapiens
taatgctaaggattctctgttttgcataggataaaattcaaacttctaaacttggcctacggaccccctatgatttttagcctcttccttgcagtttctcctgcccctctgtgaaccaggtcatcttggacctgagcctgtacatgcaccctctccccctgggagacttcctcactcatcattacctgactgacttgtcaggaagagacaccctttctatccaccttgcctaccaccaatcactgacctaggttccctttctatgaatgccagtagtgccccatatttacctcatggtaaatttacattatgggtttatcactctattctactttgattttcatgcatttgtctagcccaagtaaactgtaaactccttgaagataggaaacggagtcttatttgctgttatatagttcctgctatagtgcttagcacataacaggctctataaatatttgttaagtgaataaataaatgaatgttttaaggaaaaatgtaaaa

SEQ ID NO: 397846 - DNA, 413 bp, Homo sapiens
ctatcggtaggaatgtggaagttgaagactcagagtgcagaaagaaacaagtagcattttagagaaaagctaaatcccctccaagaatacctcaatcatcgtgaaaagcctgttagtagacgcactaacactcaaggcactgcttcacaaggtaaggaacgtgtaattgaaaacttgagaaaggaagaaacttgttctgtactggcagaaagcttagcagaattgtgtcctgcagtcatatgggacacagagcttgtaaatgatgaatttgaatgcttatccgagaaggtttccaaataaaatgtggaaggcacggcctggtttcttcctgcctcttatagtaaaatgcaagaggagagagagaaaatgagggatccgtgaggttgagtaatccgttaagcggtagcgagctc

SEQ ID NO: 397847 - DNA, 223 bp, Homo sapiens
  misc_feature (208)..(209): n is a, c, g, or t
ctatcggtaggaatgtggaagttgaagactcagagtgcagaaagaaacaagtagcattttagagaaaagctaaatcccctccaagaatacctcaatcatcgtgaaaagcctgttagtagacgcactaacactcaaggcactgcttcacaaggtaaggaacgtgtaattgaaaacttgagaaaggaagaaagcaagaaaaagacaaagnnctaggccggcaaaa

SEQ ID NO: 397848 - DNA, 367 bp, Homo sapiens
cttgccttaccttttactctccctcttgccctgttatattgtattcccaatagcccatatacatgagcacaccctctttagctatgttacacagatctcactctctagtttgaggaccaactatctaaatgaacatatctaaactaacttttgagtgtcttactctaccagcacggcctcttattggccactaagagagcaggccaggccaaggacattaattaccaagcccttagcttacagccttttctagtgcttttgtttattcttcatgtgtctattgaatatctaatgatggcttggggatgttcttgagaaactcattttctttagaggcccattttatcttcctgtgctgtaagtaact

SEQ ID NO: 397849 - DNA, 1015 bp, Homo sapiens
ctgtgttttattttacaaagtctagaaactgcctcaaaacagtaacaacttcatcttcagtaagaccctcccaatccccttccgtcttaaccttaactacatctgcctgtgggtccccagatttccagggccctgtagcttttctcagtataaaggcttcttccatggctggggtgagcagcctgagacatctgcaggggaggctccctagaaagagctgggtctttaataatctcctcccagggtgagagaggactgaaaacttacaggaaattagctctgataacagacccccttttcccacagctgccaccccaggattcccacccactcacaaacatacccataaattgatgtgtccacactcctcccaggactaggcaccaccctcaggtgatctacctgcctcggcctcccaaagtgctgggattacaggtgtgagccactgcgtccagtgtctcagttttttttttttttaggtagacatatcatttagaatgtgctagagcatcctctataaggggatctctcctttggttgtacctcatttgctgtaacacccaagaatgcagagctaggttgatgccacctagaatctgcacataaggtttggcctctgcctgggatttacaatacagggccagacttaggattgagaatgtacagaaaaccaacaggaggcatgttctgcattgtgagatgtcaacatagacatcttaaagttcccttttgagagtatggcttcttgagcttttcagatcttgttcagtgacctgctacagttatgtgagaggcaccaggtatacatagaatctcatgggagaatccctaagtgtaaacaagcatcttaggagtgagagagcaaggccacagagtatccaaagccatgaccacagctgtatctacctgtaaaatgtggtactggagtattcttgtccttcctcttacccagagctagctcatcaggacaggtgatccaaattctggagctccaccagggcagtttcattgtttt

SEQ ID NO: 397850 - DNA, 284 bp, Homo sapiens
aacactttttaaccagcttttctgcggagcagattaacagagctcctcttgctgtcatgatggaagttgatctctgggaagtatattttctatgtgaaatctacacaaaaggagaacaaaaattgggcaaaactagcagtctgccacaataagcaataattgaaagcccattggccaaatgtcagtagaatcttttactgagaacttctccatatatgtatctttgccttcttctcagtttttcatagctcttttatctttcatccctttatgttgtctctttc

SEQ ID NO: 397851 - DNA, 486 bp, Homo sapiens
ccttcccttcaaaacctaatagaaacttgggtggctagcgatctcagctctccggcagggggtgcccacagctccttagctgccaggagcgcccaagtttaagaaaggaaagaagctcaggtttccggagtgcctgctgtgctctaccaggcgctgtgtgaagtggggtgggcagtaggaggtgccaccactgcttcatacatgggcagatgggccttcaggttctttctagacagggaggtaggaggtgggaaggagagaggagcaaggcagtggccaaaaccttcccctactggggttgaacagggggaagaaaggagaaattgtaaatttaaattcagattttactacttcttatttatgtgatcttgggcaaattactagctgtctctgaacatagtttctcatctataaaatggctgtaatcatttgcttctcaaggtgattgggagaacaaaataaattaatatacatgaaagtgactaa

SEQ ID NO: 397852 - DNA, 656 bp, Homo sapiens
taactgtatctcactcactcactcactcacccactcacgctcattcgtttagagacagggtctcactcagtcgcccaggctggagtgtagtggcataatcttggctcactgcaagctctgcctcccaggcttcaaccaccttggttgattcttttttttttgggagatggagtcttgctttgttgcctaggctggagtgcagcgacacaatctcggctcaccgcaacctctgcctaccaggttcaagcaattctcctgcctcagcctcccaaagtgctgggattacaggcatgggccaccccccccggccccaaaatatatttaacttcctgtcttcctggacgaaaaagttattctcttacctttccatgaatatacacttggtttgagatttcctcgtcttacacttcttatttacaggacttagggagcctgaacattctgtactgaggaaacagaacagagggctggatattgcagaagtccatcttgccttcataatggtgctcttatggtataagtgatgaattcatctgggggtggagtgagggagtgggcaggggagattatcatggatttactaccacttatagtgccaatatgtttaaaaaaaggaaagactttggggcctcagccaatttttaactttggatgaa

SEQ ID NO: 397853 - DNA, 521 bp, Homo sapiens
tgaaggtgaaaaaccgtatgattatctcagggaccacaggaaaaagcatttgacaagatccaatgtgataaaaaaaaatctcagcaaactaggactagaggggatcttcctcagccagataaaggcatgtatgaaaaaccctcagccagccaggcatgggccaccccccccggccccaaaatatatttaacttcctgtcttcctggacgaaaaagttattctcttacctttccatgaatatacacttggtttgagatttcctcgtcttacacttcttatttacaggacttagggagcctgaacattctgtactgaggaaacagaacagagggctggatattgcagaagtccatcttgccttcataatggtgctcttatggtataagtgatgaattcatctgggggtggagtgagggagtgggcaggggagattatcatggatttactaccacttatagtgccaatatgtttaaaaaaaggaaagactttggggcctcagccaatttttaactttggatgaa

SEQ ID NO: 397854 - DNA, 643 bp, Homo sapiens
gttgggtttttctttactctcttattttaaaattaactttattgttttaaaaatacaaataatttatctagaatctcataatagaaccgaattatagaacataatgcttactaaagtgcatttagtagactttatttagaacatgatgttttcataattcacaatataaagtaaggaaggaagtcttgctctctaaatattagtgagacttgctctcttaatgagataaagcttcttcccttaaaaatgtttcatgtttcttttggatacattgaacaaatttttcttttgttctgattcatatacttatgtaacaaggaaaaaaatctgaagtatgttgttttatttacagtagcctttttgaaattggatttttaaaaataattgcaggattgcttttcattgatgtagctaatgtgtagttacgttgtttctcgtaagtgtaattaggtaagctaaaagaaaaacaaaaaacctttcctcctcactaagagacttttgtcagtttttttaaaaagttttttaaatttgcaaataaagtatgtataaaacacaaaattacatttcttatattaaaatatgcgctatatctaaattactaatattgttataaaaatgtagcaattaaaatgaattttagact

SEQ ID NO: 397855 - DNA, 742 bp, Homo sapiens
gttcagttttcacatctaaagaatgttgataacaataactactgttttgaacacagaatttattgatgattaaacagtatttcaaatacttcatcaaacatgtgaagtcccaatagttgatagtttttattattctgtgcatgattaacaatgacaataatatgtattgttctgattagctatagctgagtatatagccacctaaaaatataatggctaaaattgaaaacggttgtatcacacttcatgattccaagggtaggcccgagctcaactgagtattctccttcctggcctcatgtgaggtcttttctgtgttccaatcagatggtggctgtgactggagctgcttaactctcccctgtgtgcacccatgtgccccttctccacacagcaagttaccctccatggccttgtcgtgtggccattcttttgggcaaactagcctgggtttcttttatggtggctgttatggaatgaatattttactcccctaaattcatgtggtaaagcctaaattcccagtgggttggtaaggtagacctcccttcttcctgggaaatgtgtctcaaggccctagtgaatacttgaaaccgcagatactaaaaaatcatatatttaatgtgattttttttctatgcacatgtacctatgataaagtttaatttgtaaattaggcatagtaagagtgtaacaacaataattatttataaaataaaagttattatgttgtattgtcata

SEQ ID NO: 397856 - DNA, 343 bp, Homo sapiens
caaagtgacagaaccttcctcatcagcaattaaacataaataaactctccaatcaaaagaagagattgcagaattgatgggaaaaaacaagatccaattatatgctgcctgtaggacactcactttaaagatataaaaaagttgaaagtaaaaggatggacaaagatattccatgcaaatagttgctaaaagacagctagggggtggcaagactagtcttggataaaaaaggacacggtatattgataaaagggtcaattcacccagaagatataacgattataaacatatatggactaaaaacaaaggagccctaaaatatatgaaacaaacattgatagaa

SEQ ID NO: 397857 - DNA, 211 bp, Homo sapiens
actagcgctggtaaacatcttcctctaaataactgtctctcatctcttccatctctagcacggagttcatctaactcatcctctttcagtctctccagctcattctggagggcctgtttggatatttccacttcaatcatctgctgtcggagagtttcgttttcatcctcagctttagcgcgcttttcctccaccgtcttaagttcgtggt

SEQ ID NO: 397858 - DNA, 508 bp, Homo sapiens
ccagagtaattaacttattcaacaaatatatattagacatatgtcatatattaggccttatggtaggtggtgaggtgacagcagtggccagttcctcccagtggtgaaacacaacacttggggaaacccaggtgagcaaagtgaggctcgcaacacagcagcacaggtaggtatgctcacaaaccaccatcccgagggaaatgtgcagaaacagtaaccaacattgagatttcaccgtgcataaagagaaaacgatttgaactaggtacaggtaaagccagttaagattatttttttaaatatattttaaggataaatttaagactcatgaggacattttctagccagcaaagcacagacaggctggtattgtgggtctgatttaacaaaataaatatttgtggctggttcaattatggtaaattattgtttctcaagtgcctgagtacaaactgtgctatcacgtaggtgaaataagcccttcccttggggatctggctctgatatg

SEQ ID NO: 397859 - DNA, 184 bp, Homo sapiens
gagacagagattgtagtgatgcgtctacaaaccaaggaatgccagggctaccaccagcagcgaggagagaggcatggagcacactctccttcagagcctcaagaaggaccaaccctcagaccccttgatttcacacttctagccttcagaactgtgagaaaataaattcctgatgttttaagcc

SEQ ID NO: 397860 - DNA, 315 bp, Homo sapiens
cccatggggacaaaagttggagtccaggactaataaagggtggcagcccttctatatcaccctcggatttggcctaggactttaaaaccctgcattgtaggtataagggagtacaagtaaagtaactctcatgtagactgcagactgaattcaaatcatctaagtggcccagaaaaatctcaaggcctgaacttacattaagttgcccctaattgctagtggcaagagtaaaaccaaatccactttggagaaaaaataacatcatcccaggcctcaattgtttctgtaattttctttctttcccttccttcctat

SEQ ID NO: 397861 - DNA, 413 bp, Homo sapiens
ggttccactcaaccgatttttgctgcatgtcaacacttattaccggtgagtgtgagggtattttttctccttctctaggtctcttaatgatttctgagctagttgtgtattaaagtgcttaaaggaacctttaacataatctatagcatgagcaccaaccttccccgcttgggttcaaaaatggcgagctcgaggttgggcccggaggcgcccaggcctcactggcctcagcgcactgccgccgtgctccttgagcgctcagaggttcgccaggcctggggcaggaaccccgcgcagacgatccgccgtctgggggctttctccccgccacccccttccatccctcacctgttactagcaggcaccttttcttctctcggtatctttggcctatcctcgggttttgttttatt

SEQ ID NO: 397862 - DNA, 123 bp, Homo sapiens
ggctggatccctcatgaatggcctggtgcttttgtcctcctagtaatgcctgctttttagtatcttgtagcaataagtaatgaagctagaagagttgtctactatagcctccctgagagttcc

SEQ ID NO: 397863 - DNA, 594 bp, Homo sapiens
ctgaactaaaaattcagcttttaactaaaactgaatttagttaaactaaatttttaactgccataaaaatttcgttggtgaaagtagaagtagtaattgtgaagattagtgagacatctaaataatattttaatcctatctaggaatattcttaaatggaactaataaaggttttgttggttttagaactgaatattacagataagtaacctcttttttttttttttaaccaggatcatttatttttaccttctgctgcttgatctgataggtgataacagcctttttatgcctataatgctacaagttgttcatgtcttttgacccagtttaatccagacacttactaatccatgaatggaggaactgcagcatctgtagactgtagtttctttttttaaaagttattgtgactgaacatttccatacatcctataaggagacatattaagtctttgtatacttgaggatataatgcaattattgaaatgctaatgcattttaaccatctaaagagaaagtaataggaaaaaaatgattctgttaaaatagcacattatcaagtatatgaaggagtacctagaatgttatgaa

SEQ ID NO: 397864 - DNA, 203 bp, Homo sapiens
aggatcctctgcgtccatcaggctggagtgcagtggtggtctcgactcactgcaacctctgcctcctggcctcaagcgatccacccacctcagcctcccaaaatgctgggattacaggcacgagccactgagcaaggcctcaagtcacatatgtaatgttaaattttccagtagccacaagaaactgatacaactaattatca

SEQ ID NO: 397865 - DNA, 258 bp, Homo sapiens
agaccccccagctcgccctcacacacagtgtgcagactcctcacaaagagcccagtgtacacacacaggccttcctgagacagggacaggagaggacctgccagtcctggagtgagtgacctgtgccccacagcctccccaacaggtgggccccagagactccttcaaatctgactctctctccaccctggggcgctctggttctttttgaagtggaagagaacagagaacgacagtttaggtgttgggggaggcaaa

SEQ ID NO: 397866 - DNA, 528 bp, Homo sapiens
taagaaaaaccaaagtaggtacacttaataggcatctctaaggtaaagtgctcccccctttcaaaggggccagcctcttttgcacccgagtatctggtggaccagctgcagcatcctcttgggaagcagaagcaggaaatcctggcccacagtcctggtggggttcagaattggccatgccagcaccctgagctatttctgagctcccagccccagccaccactcactatctgagccacctctgccagaaacactgccagtgagtggtaggcagccagactctaccaggcctggggccttcagtgggcctgcctggctcctgcctggagctgacttatgtgtcccagacccactccacacactgaccctccctgctccattgccctttccagccaatcagccaggagctttcttactcttataggtgtggatgtgcaattaagagcttaaaacgggaacttttttactggagcaaattgtttgagacacatttaaaactatgtttaacaactgctagcaaagaaaaga

SEQ ID NO: 397867 - DNA, 489 bp, Homo sapiens
ggacaattatgaatgctgctgctgttaacattttgggtgtttctgtcctttgatataaaaatatacacttatatattgggtatatgcctagtagaattgttggttcataggatatgcatgttaggtttagtaaattctggcagtttttgaaagtgattgtaccagttttacattcccagcaatagtgttaaattccattgtcctgcatttttaccaatacttgctattgtcagttttaaaaatttgtcattctggtgggagtgtaataatatgtcattttggattgaatttgcatttgcttcataaccagtgatggtgaatccctgtattgaacatttgaaaatcttctgttgcaaagtgtgctttattcaaggcctttgtgaaatttttattaggttgtccatctattaaattgtagaaatctttacatattttgagtgagttcttttttgggtatctgtattagagtcttccttagactgtggcttg

SEQ ID NO: 397868 - DNA, 179 bp, Homo sapiens
gtggtatcattcaatcctttcactttttatggatgagaagactgaggtttagagacctaccacattggtaggttaatgatacattcatcaaaagtaacaaccttgttaggaggagttgtttacagaggatatactagtactctttcagttttaactaaagcttccatttactgatagct

SEQ ID NO: 397869 - DNA, 306 bp, Homo sapiens
agtgggctaataatactgcttgtattagttttcgtactagctgttgtgagctctatactagtccctcatgctctctgggcctcctgatttctgtctctgtagacagggaattaatccttctctaacttggctcaccaggcactgtgaggttcacaagaatgaacagaagttaaaatgctttgaaaggaaaagacatcatatgaatagaagagattgttactaaaatttccaaagtcacctggaatcctttctgacacggttcttctaatccttgtcccttctgaagttagaatctgttgttagaga

SEQ ID NO: 397870 - DNA, 424 bp, Homo sapiens
cagacctgtggaactgtactgcaggaaggaaggccttgcagctggtaggtttttcattgcgggtcctgctcaagagccagatgtgacattgtagcaggttctagcctatggccacagaggtgggaggttattgaaccaccactatgctgtacacttgattttttattttattttttgagacagagtctcactctgtcacccaggctgaagtgaagtggtgtgatcacggcttactgcaacctcgacctcctggactcaagcaatcctcccacctcatcctcccgagtagctggtagctgggtgtacactttaatcaggcatgcacaacctactatcttttaaacaaattagttttatctgtgtcatatctcaaaatttggttttctcaagtaaaaaatatcagaatgaactgttatctattata

SEQ ID NO: 397871 - DNA, 423 bp, Homo sapiens
ccagaggaaggtgtagagagaatcctgctcaattttgggaaaagataattaatgcagatgagagaaaaattcaaaagttctagcaatacaaaagagtatatagagaaaaatgtccctcctaccctggccccaagtctcctgtctccctaacctcctccccagagatggctgaagttttcagtttatatggccttccatagacactgttgctttataaatatgtgcctgcttatccatactcctcccaccatgggacgtaccactcacaccttactgggtttttttacttaacatatttaggaaatcattctattatcaacatatatagagagttatttgttctttctgttgacatgcttttacttatttagttgtatggctgtactgtaacatctttgggttaaatatttgtttccaggttct

SEQ ID NO: 397872 - DNA, 380 bp, Homo sapiens
tttctcagttcccccttccccacagtgagagaatgttgtgtttagtaactgaaaattcatggcatatagtaaacctcactaaatgcagacacttttattaacatgtgactgaagggcaggccccctgtgggcctggtcttatccttatcctttttagtatatgcacttcttctccacagtgcatatgctaatactaggtattcaagaaagcaaggtttgatttggatttgcagtgtctcccctaaatgctcagctcctgctatatgcatttcattctgcacaaacctcctcgccgcctgccacatctaagctatgatacaaatattcttcacgtgtgaaattccttgctcactgcttttacctcactgtggccatcttct

SEQ ID NO: 397873 - DNA, 370 bp, Homo sapiens
agttggaggtcttgttataaaccaggttcattcagtaccacacacagcaagttaatcactgagatgatgggtttgtgagagtttattcataacgtggccaagcaaggaggcaggagaacaggtctcaaatccacctccttgaaaacagggattgggggtacttaggcagtagaaagcagggtggtctaaagtgtgggaagaggtgattggtgggtaggaaagatgaggtaattggggcttccacgcaagcataatctagctttgtggttcctcataggacacatgcagaaaatggtggcgtcagcaccatctgagggaggagtgttttggccctctgatgtcaaaagatcacctcttgggcgtacgggga

SEQ ID NO: 397874 - DNA, 679 bp, Homo sapiens
gtaagatagctgtgggtacataactgcttaggaatgcagggctgaatgaagtcactagaattgttaggtgttgtcaattccttgtatttgtctttgtattcccagcgcatggcacagaacatggtatggaaagaaaaaaagaaaaaaaaaagaaagagggaaagacggaaagatggaaggaaggaatgaaggaaggaagaaggaaaaagaagaacgaaaaagaaaggaaggaaagaaagagagaaagaaagaaaagaaagaaaaagagagaggaagggggaaaggagaaaaaccgagaaggatggagggaaggagagaaataaagaagaaggttttcaaagtgtagaagaggtggggggacagattatgcagaaaggaaaagcatatcctggagcatattcaatgacttagaagccagagaaagcaggctcacttaattcaagaagagattacacattctgagtggttttagaaaatggggtagggcaatttccaggtggctttgaacacgttaagatttaatttgggaagtatgatgtgttactgtaactattgtaggcttctgagaggaatattaagatgactcaaatgaatcaagtggaaggaaaaacgtgaaactcaaaggagttaatccaatggaaaaaaacgaaccatactgcaagaaattaaatgaaggcag

SEQ ID NO: 397875 - DNA, 500 bp, Homo sapiens
ttctaggacttcagaatgtaccctatagtgtctagatttattcattcaacacaaggttttttagattcagccatgtttgttgcagttaccagtagttttgtccattttatagctgaagagtatttcattattaatacaacacaaattgtttgtccattttcttgttgaaggtcttttaggcagtttacagtttggggatattataagtaaagatgctataaacgttcttgtgtaagtcttataatgggcataagttttcatttcttttcaacctaggattggaattgttgggtcataggtttcatgtatgcttaattatataaaacaatgttaaacaatttttcctaagtggttgtagcattttacattccaacaataatgtatgagaattataattgctccatattctcaacaatacgtggtactgacaatatttttaatcataaccattttagtgggaagaataactcactgtggttttaatttgcatttccttaatg

SEQ ID NO: 397876 - DNA, 443 bp, Homo sapiens
ttcccttggagttgttttagtgctcttgttgaacataaatgtaaaggtttagttatcaattaaacataaatgtaagagtctattgctgggcctttttggattcattaatctatatgtctatccttatgtaagtcccatgtggtcttgattcctgttggtttgtagtaagttttggaatcaggaagagtgagtccttcagctctgctctacttttacatgatattctgggtaccttgtgaattttagaatcagtttgtcaagttctaccaagaagttagctctttttttccttgttatagatccaaatttctgacatcctgatcatcttaagcccaaggaataagctcagaatggcaatggaagaagtgttgagaatgtcagatgctaggttgggtgtggtagctcatgccagtaatcccagcacttggagaggccagtagtgg

SEQ ID NO: 397877 - DNA, 411 bp, Homo sapiens
ccgcctgtatccagaactgaccagttatagacctctactacctctacttgccttggctccattctctttggcagagacagatgtggagctaccagagccctgggtgaaaggcatacttttgcattcgtgcaggcccttcccacccatttataggtgtaaattttacaaagcctagattcctgtgtgttggcactgggacagtgttgtatttaagaagcacaggacaatatccaaaatataatttaaaaggaaatgcattctttattcatcctcatgtaagtcataacagagaataaacatagataggaactctttaacatttactaaattcccaatttctttctttctttctttcgctcgttctttctttctttctttctttctttctttctttctttctttctttctttc

SEQ ID NO: 397878 - DNA, 523 bp, Homo sapiens
tagagccaaacagaaatgctgctttgtgactttgtgccaaatatccatcagcttgctctgccagcagtgctgggccggccctgtacacgtcacctctgcccccaccagctctctgctctctgaaagccgtcttcttgtgcccttaaagtcagcttgccttttgatacaatttggatgtgtgtcccctccaaatctcatgttgaaatgtgactcccaacgttggaggtggagactagtgggaggtgttggatcatgggggcggctcccttgtgaacggcttggtgcccccacttcgtgatgagtgagagctcactctgttagttcactcgggagctggttgtttaaaagagtctggtagccctcctcccctctctcttgctccttctctcaccacatgacacacacgggctctgctttgccttccaccatgagtagaagcttcttgaggcctcaccagaagcaggtgctgccatgcctcctggacagcctgcagaaccatgagccaaataaacctcttttcttt

SEQ ID NO: 397879 - DNA, 421 bp, Homo sapiens
ttttgagacagagttttgctcttgttgcccaggctggaatgcaatggcacagtctcagctcaccgcaacctccacttcctgggtccaagcaattctcctccctcagcctcctgagtagctgggattacaggcatgtgccaccatgcttggctaatttttgtatttttagtagagacagggcttctccatgttggtcaggctggtcttgaactcccaacctcaggtgatccgccgccttggcctcacaaagtgctggaattacaggcacgagccattgcgcctggctcctagtaaattcttcttttctgtgatgtgtctcttacctctaataatacttttcttcttaaagtctacttcattaaaaatagttatgctgggcatggtggctcatggctgtaatcttggcactttgctggaggtc

SEQ ID NO: 397880 - DNA, 1311 bp, Homo sapiens
cgagtgggtcctgcatatatttttgaagtggaaggcaagccccattcagttgaagagtattatcttaatgatttggagcacattcatcatagcaagctctctcctcatctcctggaggaaccggtgataactaaggatatatattaagttgctgtctctctcattcagatgtttgatgacttagatatgaaggagagtgggaacaaggcttggtcgggggcccagtttgtgttggagcgaagcagtgtgttggtgtttttgccaggtctgggtgaaataaattatatgcatgaacttctcacaagcctggttcataaaagattattctgtccaccaatattgcagagagttctgtcacagttccagatgtcaaatatgttatagatttttgtttgactagaactttggtctgtgatgaagatacaaattatcagagtctgcgattgagttgggcttctaaaaccagctgtaatcagagaaaaggccgtgctggacgagtgtctagagggtactgttaccggctggtacacaaggatttctgggacaactccatccctgatcatgttgttcctgagatgttgcgttgtccattaggaagcacgatcttgaaagtgaaattacttgacatgggtgagccgagagctctgctggccactgccctttccccgcctggtctgagtgacattgagcgcaccatccttctactaaaggaggttggagcacttgcagtgagtgggcagagagaagatgaaaacccccatgatggtgaattgaccttcttaggaagagttttagcccaacttcctgtaaatcagcaacttggtaaactcatagtccttggacatgtatttggatgtctagatgaatgtcttattatagcggcagctctttctttgaagaatttttttgcaatgcctttccggcagcatctcgatggatataggaacaaagtgaatttctctggcagtagcaagagtgactgtattgcacttgttgaggcatttaaaacatggaaggcttgcagacagacaggggagctgcggtacccgaaggatgaacttaaatggggacggttcaattaccattcaatcaagagaattacagaaggtgctgacctcatatgcagcacttggagactagaaatctcacaggtcacatgcatgtgatctcggcgaccgtgtggaccagagttatttataagcgggatcactccaaggtgataggcagggtctataccaatattacttggacacgaaagaaagggcagaaatgtgaacccacaatgggtggaacatcctgttaaaaacgagt

SEQ ID NO: 397881 - DNA, 731 bp, Homo sapiens
tttgaatgtgtgtttttgttaacttcaggtaaaacatggctaaaagcttacggagtaagtggaaaagaaagatgcgtgctgaaaagagaaaaatgaatgccccaaaggaggccagcaggcttaaaagtattctcaaactagacggtgatgttttaatgaaagatgttcaagagatagcaactgtggtggtacccaaacccaaacattgccaagagaaaatgcaatgtgaggtaaaagatgaaaaagatgacatgaaaatggagactgatattaagagaaacaaaaagactcttctagaccagcatggacagtacccaatatggatgaaccaaaggcaaagaaaaaggctgaaggcaaagcgagagaaaagaaaggggaaaagcaaagcaaaagcagtgaaagtggcaaagggtttggcctggtagactcttaaaaccttggaaaatgccacatgggatagatgacggattagaatgtatacacatgtatactttgatttcaactgccaccaaatgaaaaccatttgttttcctattttaacttggccttttttcttcaattcaaacccagcataactcctcaagtttgttttgggaacttgaataaaatattttctttgatacatccaagctctactgatactttaactggatgctacccaatatccagttataatcaggcctcaacgttctgtcaggtattaatatggttagaattgttcttacaactgg

SEQ ID NO: 397882 - DNA, 450 bp, Homo sapiens
gcacaacaagggcaattcaaatgcaaaaatatttcccttctatttatataaatgttaactattcatttaaacaaaaactgcagtaccagtactgaaagaatgaggggcaaaccaaagtgtctgaggacagttttggaggagcataatagccagtacagaatgtctaaaatggggccgggcgcggtggctcacgcctgtaatcccagcactttgggaggctgaggcgggcggatcatgaggtcaggagatcgagactatcctggctaacacggtgaaaccccgtctctactaaaaatgctaaaaaattagccgagtgttgtggcgggtgcctgtagtcccagctacaggctggggcaggagaatggggtgaaccccggaggcagagtttgcagtgagccgagatcgcgaccctgcactccagcctggacgatagagcgagactccgtctca

SEQ ID NO: 397883 - DNA, 215 bp, Homo sapiens
attgcaagggcagctggggaatctacaggagttcatgagttacgaactgagcttaacacactctgcgtggagaacaatttgccaaagcgttatgtgtaaatgaacaaacaaggaaaagagtgtggagtgctaagtaaagccaggaagggacatgaaggcgaatcctacgcaccctcccaggaaatgggggtttaatcgctctgcccaccacctct

SEQ ID NO: 397884 - DNA, 386 bp, Homo sapiens
gtggatcacaaggtgaggagtttgagaccagcctgaccaacacggtgaaaccctgtttcttctaaaaaatacaaaaatcagctgggcgtggtggcatgcacctgtagttccagctactcaggaggctgaggcaggagaattgcttgaggccaggaatttgagaccagcctggggcaacacagcaagaccaccccccctaccaaccccatctctaaaaatgtttttttaattagctgggcatggtagcatgtgtctgaagcctcagctacgccggaggctaaggcaggaggattgcttgaatctaggagttcgaggttatagtcagctatgatagactatagctgactatatcacagatagctatgatagcctgggtgatagaacaa

SEQ ID NO: 397885 - DNA, 627 bp, Homo sapiens
taaacatgcagagagcttcacgtaatgaaaatgactgtgcagtatatgtctatagggttaggtaaattatttattaatgggcatcattctgatgacgctgctccacatttatctttctcccttagttttaagcatagagttggaaagggccatagatatgatctggtcagaccgaatgcgatagcaggaattatcctgagaacatgctgaaagataggctgaagcctttgcctcaacatttcttctaattgtccctaatgcagcctgtcccattgtttgtcatttcgaattcacagaaagttctgccttatacagagtgaaccaaagctgatctccctgtagctcccagcagtggtccttactctgcttctggagacaagtccatccctctcccatggggggccattcaggctattgaaggcaactcttatatttccccaccctcacccgcagtttccccattttcagctatttaattatattgcccttagtgcccttcattgaggagttgtcttgctaagaccaggtagcaaaaataaggagcttatcagatgaccaccagagatagaaagcaatgaatgggaatcttcatgtcatttatgaatatcgcattcgtcttacaaccac

SEQ ID NO: 397886 - DNA, 263 bp, Homo sapiens
cttcatgtccctccagtaggatggctttccagaggcttccattcctcactccgtgacttaatcgactatgagcttggacaagtgtggtggagataatgaggatatgagataacttcatagttatttgaagattgggtgagaaaatccacaaaaagcattcagcacatggcaatactcagtgaaggctattttcctcaactacaggagctttttcctttgatctatttcttgatctacctgtcctcctgatgggacactcccta

SEQ ID NO: 397887 - DNA, 372 bp, Homo sapiens
gaatgaaccaggagagagagaacatgtttttaaaatggcgcaaatgcaccccatctcccccgattcctgctggctgggcaagatgggaaaatggcgccaaatgcaccccatctcccccatctccccatcttgcccaggaactccaagacatcaagatttcacgatttttaagacgtcaagatgctagcatgctaacaccatcacggttctagaactttaaaggtgtcaagattctaaagccttctggattctagaatcctgtagatgtcagcattctaaagtaccatcaggttctttatttactggattcattagttccaggattccatgagcctggtgtttagcctaaaaagttatggtaaattaacattg

SEQ ID NO: 397888 - DNA, 613 bp, Homo sapiens
gggtgtatgcatgtgatgatgactggccaagtaagctgcttaaggagaagagggtacttgagaggggtgagagatgtgaaaaagtggtgttatcagtggacagaagttccacatgggggtcaaaggatcactggagatggggtcctagagagactgagctgaaaaggggtcagtggttagagagtagggtgtctgagttcatagaagatttcagttattggtagtaagtaagttcaaagttaccaccaaaattgcagctgaggcaaagtagaagacaaaattttcaaaggagagatccagtgaactccaaggccgtgcagctggaaggatcatctttgtatctgtcaccaagaagtataactgtggtgatggtagagagtgagacaggaactaagatctgaaaggaacaaagggaaattgaggggactgtatactagaagactgcaacaagtacccaggtaactgatgacatgtttttaatggaagaagcagaggagaatggatgagcagcatcccatgaggacaagcatccattgaggacattgaggacaaggaaatctactctgcctccaggcacagtggtatactaggtgtgggagagaaaagagccact

SEQ ID NO: 397889 - DNA, 301 bp, Homo sapiens
cattaaagtaattgaatcagcagtcaaataaaccttccaatgaagttaactccaagcctattgatttgcaagtaatatcaatcaaaattcaaaaatttttaaaaatgcaaaattatacaaactttccagagaatagaacaactgggacgtactcctcacataattttatgtggcttgatataaaatcttgacaagaggactatgaagaagaaaacccctacccaaagtcactcatgaacgtagatgaaaatatcctaaataaaatattaacaacccaaatccatcagtttataaaaatagt

SEQ ID NO: 397890 - DNA, 587 bp, Homo sapiens
tgttacaggctgaacgcagacaccagtgaaagccaccatcacaggggactcgccaccttgcctgcccatcccgagtcactgctggggtgatctcttctctaggtctctgggcagggttccgattcaatgaatcgtggagcttggtttcagccccacctcccttcagacaggaggggtgtggaaaatcccatttccccctctctctctttaaaaaatacacaccacatagccaaagaatttaatttctctgtccaaggggagcaactggtacatgatacagcaagaaccagtttgggtctccccattccgtgtttcccaagacaacctgtggtcttttcttgttgctcataggtgagccaaagagatgcactattgacaggcttgtaggaatgaaagaaaataaacagaaaatgcctgctcgcaaggtaggtttttgagcactcagggagaagccagaagtgtacaggcatcctaagttagacctctcaactgggcaccacaggacactcagagtctcaaggggccagagaggtcctgctttctgatcctttcctttaaagccattctgcaccgccgcccacctcccc

SEQ ID NO: 397891 - DNA, 112 bp, Homo sapiens
tgaggcaccctgcctccacctgctctctgctctcgaagcgtcagttataccagcacttctctcttctcttttgtctctttttacagtcacccctttagagtgacaggcagcg

SEQ ID NO: 397892 - DNA, 534 bp, Homo sapiens
gagctgacaatctgtaagaaggttttgttatcttcatgttacagatggtgaaccgaaacttacagagctcaagtcacttgaccaggctccatccctacaagaggcagcacgcaaactaaaaaccaggcggccttttccaaagcttgtgctctgctccactgctggaaggaacccttcggggaattgaagcagcactgaacaaaggccatttttaagaagcgacaccagaaacctaaggcggggtccccggctcaacaaggatctcatgttttgtgggtcagagattcttgtgtcgtgtctgggtgaggtcaaaaaccatgcagagactttcacttcctgttctgtggcagacaagacatctgaaaagctctcctgcagcaacacttctagatgccaaataaatcacagcaagtgcacttttaaatgtgttactaagatcataaaaatgaaggaaaatgcccaagcatatccccaacccctcaccccacaaccaccaccaccacaataaacaagttgctgacagcggattggcaa

SEQ ID NO: 397893 - DNA, 538 bp, Homo sapiens
taaatgtgtttgatgagtgaatgagcaatgagcatcaaagtattatttagcaatggggaaaaaagtagaaacttggaatctgacaataggaactcattacaatgcaaccaggaagtaagagctccctctgcaggctcactgttgcagcatcaccaagagtgggggagttggggagaccctcaactagcaatgacctccactccctgcctgctcccacctcggcctaaggagagctgatctcaggctgaggagaccaagtgccatcagaagcactggttgcttctgacctcaataccatgcatggattttattctaagggccaccaagagccactgttgagtgactaccacatctgtgtttcagaagctcacttaaccagcagtctggcaaaaacgtaaataatatccagtgtcagtgagggtgtggaaaacagtcactcttgttcacgccaagggggagtactacaggtacactctttttggagagcaattaacccagcattaaccctagtggcaattccacttctaggaacctgccc

SEQ ID NO: 397894 - DNA, 361 bp, Homo sapiens
tggccaacacggtgaaactctgtctctacaaaaaatacaaaaattagccaggtgtggtggtgggcacctatagtcccagcaacttgagagcctgaggcaggagaactgcttgaacccaggaggcggaggttgcactgagttgaggtcgtgtcactgtactccagcctaggcgacagagcgagactccatctcaaaaaaaaaaaaaaaaaaagaattcttttagactttggggtcaggaaacaagaaaatcaagtcattccacactgttacttgaaatagatgctcagatctttctggcagtccaagacttctttgccatgcctcttattcagaaacttccttcctactctctctgtataat

SEQ ID NO: 397895 - DNA, 219 bp, Homo sapiens
cgtggtttgctcatctgtctgatctgggcttgcccatggcctattgttacttggtcatgacgtgtgcttctttttgcctccatgccatcctccctcctgtctcggatgtctctcccataccctctcatgggtgcctcctggcagaccctcgcccttccccccagctctgtgtcacttatgagcttctgcgctctgccttgattggtccctctagctgtc

SEQ ID NO: 397896 - DNA, 155 bp, Homo sapiens
ggtaaaatctgcgtctggcacagccagccaggtctccttatcctttgcttccctttctgcctgtgactgaatgggtatgtcagggtctagtaggggatccaggaggaggaaacctcattaacttctattctgcagcaattgatgtccacccaact

SEQ ID NO: 397897 - DNA, 442 bp, Homo sapiens
acacacacacacacacacacacacacccctacacacctcttagtgaagctcccaggtggagatgtggttattcagaagaacacatccctctgttctaagaatctgagtaatctgattaaatgaggtgttaccatatcatgttttcttagttaaaaaatacataaggggctgggtacagtggctcatctgtaattccagcactttgggatgctgaggtgggagaattacttgagcctatgaatttgacattagcctagccagcatagtgagactccatctctaaaaaaaaaaattaactgggtatgatggcgcatcctgtgatcacagctaaatgggaggctgaggtaggaggatcgcttgagcctaggaggtcggggctacagtgagccatgtttgcgccacttgcactcccgtctgggcaacagagggagaccctgtcgca

SEQ ID NO: 397898 - DNA, 255 bp, Homo sapiens
aagagatgttctccctctgtctggcaggagcacaaaatattaacagccccatgtgtgctccagtgattgtctcacctcatctatttctccagcatttttttcctgccctcagtctccttacacacacatagttgagtatgttgccaaagtctcaaggaagctctttaaagatttcaagctcactctctgtttgtgtacgaaacttctttctggtacttagccctgcagcttctcctcagaactctgaattctgcc

SEQ ID NO: 397899 - DNA, 600 bp, Homo sapiens
tggatatctgtttagtattcacaacatatatgtatctccattaagcccagaattctttgacagatggtctcacccaaagaactcataaatacttgattacttcaacttagtttgcaaaaattaaaaaatcagtaaattatgttacagactatagtattttgagtgttaaaatcacttctaaagaacaccatcacaacagaaccctaaattcagaatcgggttgacatggtctaagaaagtgaataaacgggtaagtgatcttcctagtgcatcatattctacactaaaaattcaccatttatacttcatttctgaaactcaatgtcaaagagaagattaaaaatctgggggctgggcacagtggctcatgcctgtaatcacagcacttagggaggcatgggtgggtagatccctgagctcaggagttggagaccagcctgggcaacatggcaaaaccccgtctctaaaaaaagatactcatgtgttataatatttattttgagatactattaatatctcagagtttatcatttcatcgctatcttttgcaagaccttcttatacctgttgtttcacgagtaagcatacatgtaactgtcg

SEQ ID NO: 397900 - DNA, 255 bp, Homo sapiens
atatggtgttgctcaaggtcacattcaaatatttttctgaatatttctagtttatttggacaaatatacaggcaaatgaatgagaaatgtaaattaataaacttaataaacatttagtttttagaagaattgacaggcatatttaaatcatacttagtagataaaaataggtcaattagttaatgatagattctatttgtgactaaaagtcaatgataagatagaatgaatacgtatgggaaagagggagactaa

SEQ ID NO: 397901 - DNA, 479 bp, Homo sapiens
gataagatgataagcctgaatagacatttggtgacagaagagagaaacagattgagactattagaaggtaaataacagggagaagtcaaggatgactagtttggaatacaggatgaagagtgaagctacccaatttatataaagaatactggagaaagaagaggtttaggaaagggggcagaggatggggaaaatgatgagctcatttttgaacacactaagggcctgagggacagccagcaagatgggtcaagatatccagcaagtatctggaataaaagacagattgtgaaggcaggtctaagatatacctatgagttgaaaccaccaaagtacatgagatcacctgggaatagtatctagagtaaggagagcaatgtgccaagaagaaaacactagaggataaggaaaacaattttgaatggtgaggtagaggcaggaaccagagtgtagcaggtcagaatgaatgggagctaaag

SEQ ID NO: 397902 - DNA, 1203 bp, Homo sapiens
aatccaagagaacatttggaaataaaagacaacctgaatctacatggtgtaattatccagaatggtaatctctaagagcataataagatgattatatatagtatacattcagaaagagaataataagggtttcagagaggaaccacgaaagcaaatggagaaaaaaggaaagcgtatatgaatattctttactattattgcatctttaatgtaaattgaacattttataaaaataaatctatgagcaacatatgaatgagaaaaagcaaagaccaagaaccgtagttgttaatcaaagagcagggacatgcaggggtctatattaattccgctgcctgaatctcactagtgagactccttttaccactcccagagggtacataacacttgaaatgtccatactaaagctgcttgttatgcttttacaatcttcaatctaaactaaattattcttagaaagctagaagttgatcctgacttttgatctcactgcttacaatctgccttcagtgtttcaccatgaagagtattttattaaagacatttttttttagagcagttttaggttcatggcaacattaagaggaagatacagagattttttatttatcacctgccccccaacatgcatagcgtccccatatcaacatcctccactagaggggtacatttattacaactagtgaaccaacattgacatcattattcccaaagttcatcgttgacattggggttcactcttggtgttgcacattctatgtatttggacaaatgtataatgacacgtatctaacattatagtatcgtacagcatcttttcactgccctaaaaattctctgtgctctgcatattcaacccttctcccacctcctcaccatcccctggcaactgctgatctttttctctttccatagttttgcctaaggaaagtactttttttcttggaaaagttgttaccttgtttgctctctccaccgtcctgtttatatctgccctcaaagacacataaatttaatttctataattctcatattttttagtgaattccactgacttctagataccttaattattctttcagcaatctgataataatttattaatttatttaacaagaatgtattgaagaattactacatgccagacacagttctagtcactggtaataagtaatgaacaagataaacaaagttgttagccac

SEQ ID NO: 397903 - DNA, 485 bp, Homo sapiens
gtgtattactacactgtaagaaatggaagtggctcaaccagaagagagagtagtctagttcagctgaaattaagaaacagatggttgttaggagctttccatgaggatcagaaatctgtgcccctcttatatacagctctgttgttgagtggatgattcgaggatgcccagaagacaagactaagcattttatattttagagcagagacaaggcttctgtggcagaacttgtattcagaagtagactctttagaacatcaagtgtgatctgatggcagaagactcatttgacatcagtgttttttgtttgtttttttgtttttttgtttttttttttttagcaaaaggatcaaatggtgctgatcaccaaagtgcaagatcaagtcacagccctcattgtctgggaccatgccttgaatttctataaaggtgaacactgttacactcaagtgtcattgagcaaattcatctctttcaaatggaaa

SEQ ID NO: 397904 - DNA, 320 bp, Homo sapiens
ggttgtatgtttctatgattttatccgttttctctagattatccaatttgttggtatatagttcttcataatagttctttatgattctttttatttctgaggcatttgttgaaatgcccccattttcatttttgaagctatttatttaactcttccctcttttttttagtctagttaaaagtttgtcaattttgtttattttttcaaaaaattaactcaattttgtcaacttttctatagtttttctattctttaattgattttcttctgctttgatttttattattttcttccttttgctaatttcattttgttctttt

SEQ ID NO: 397905 - DNA, 442 bp, Homo sapiens
tggaacactgtaagaccaggctgtaaccactactccctggaagcagagcctgccttacggtattgccaaatgaaaccactcccagcctccctgtcaatccagccaaccctgatgagtgcccggagcatgccgggtagacctgtctgtgcctggaggagcctcaggtccagtgttatgtgatgatacctgctgcttcatctgggtgcccccctcaaccacagatcctcctttgagacattcccatcctattgaaacgccaccttcttctcgaagccttcctaggcttcacgatcagacacattctccatctcccaccccaacatttctgaagggagcagttacattccattctgcactctggaactcttgttactatttcccctccccggggcaaacagggagctggctgtgtccaaatgaatctctggggctacagttgtct

SEQ ID NO: 397906 - DNA, 318 bp, Homo sapiens
gtcactttacttagaactaagtggcctcatcatcagattgataggaccagaggtaaaccactgagggagccatctcttttaggcttacttgtgagaatggaacagcctggtagaagagctcttcccaatagaggcagggtgcactgatggccaattgcccagggaactcgccctccccgtcaaggagttggaaccccccaaagacaccagaggagtatgtccctatggtgaaggaagtcggcttggccctgaggacattattggccactgtggataagaccattcccctcctaccagccagcacccatcgagagattg

SEQ ID NO: 397907 - DNA, 179 bp, Homo sapiens
ggaagacaccacatggatagatccggacaggcagttttaccataagagttagagaaattcagaggactgaattcactgtgattggggtggattgagatggttttgagctctgttgcggtcacaggaggaaagacaacatggagatggcagcaggcagatattctgacctttgtgcaagt

SEQ ID NO: 397908 - DNA, 975 bp, Homo sapiens
ctccccagccaggacaagttctaaaagttttcatttttaaatctttgctttcctatcaggataaataatggaaattctacactgtggattcctaaataggaacagctgtgctttctttctgttatctacatgcttgatggggggaacaaactgagtaagaaggtttaataattttattttaagaatctccaatgatatatgcagccttttaaatatgtaaaccagccccaatttttcccattgttcaattttttgttcctttttaaaacataacaataaattcattgttctttgtcagtgcaaatgttgggtggattatttaaagccagttaggagctgatcactgaagtatgtgagttttaattttctcctagttgtcttgatcttaagaaggaattaaagaaaatctcaagtgtctgccttcatactaagaacacatgaaatttctgaagcaaatagaaagatgaagaaataataatatatgttcatacttttggaatatgaaaaggatctgcaggagaacaattattataacatttgtctcaaaagataccatagaatcagttggaagttaataagtctctgtagacattttttaggaaaaatttttaacaatactcatctcagtaggttttgaaagaaaaagtttaaggtatgagtccgttgtacttatcacatgtttagaattaggtgaagtagtttttatttatgactcttctttctcttcctctgaaccattagcctcaatcttctttggaataaaaagaactctcagataaaacggagagaagtaatagcaaataatatattttttctttatattcttggagctgtattttaatatttaacacagttttaaagtttaatatcacctctacttttctataagcttgatattctaggcttgctactgtcatattgagaaatttgtctacataactagatcattaaataattttatactttgtttagctg

SEQ ID NO: 397909 - DNA, 606 bp, Homo sapiens
tcatcaggacaggacttaagtcgctttggctttactgatgtttccagggctagcatactgccttgtacaaagtacaaagttaataaatatgcactgaatgaatgataatcccagtatagctttcaagggtagcagatcactccttcattattactttctggtcctagaaaaatgcacattatattaagtgtccaaaaggaaagtaactatcatttcagagtctacacctctgagccccaagtgttgatagcaacaaattttaaagaaaataatctagaatgaacggcatgtatgcttcgtgccaaagtctggcttatctcttttaatcaattgattagctattgactggataacacagacttctctagcagaggaaagataagattcattagctgtcattaacctaagctagtgagataacaagtactattggccagtgcagtggctcacacctataatctcaacactttgggaggccgaggcgggtggatcacgaggtcaggagttggagactagcctgaccaacatggtgaaatgctgtctctactaaattagccaggcgtggtggcacatgcctgtaatcccagctactaaggaggctgaggc

SEQ ID NO: 397910 - DNA, 480 bp, Homo sapiens
ccccatcaattaatttaatctaatcgacaattttagaatattccatgtaacaatagcaaaatacacatagtttgaaagattatatgaataatttaccaggatatactatgttctgggccataaaatacatattaaaactgaaaaagaatagaaataatagaaagtatctcacactacagtagagttgaactagaaataaaaaaatagtaacactgcaaatgtttacaagtttaacatcatatatccaagtaacctataagtcaaaaaagtagattcaacaaaaatttagaaatattttgaactgagtaaaatacaaatacaacttaccaaaatgtatgggatatagttaaagcaggggtatgacagaaatttttaatactaaatgcatatataagaaagtaagaaatatctaaatcagtaattttaatccatatttcacatagaaaactatagaaagaaggtcaatttaagcccaaaaca

SEQ ID NO: 397911 - DNA, 349 bp, Homo sapiens
tgccaccacgcctggctaatttttaaatttcttatagagatgggggggcagtgggtggtgggggtggagggtgtctcactctgttgccaggctggtgttgaactcctggcctcatgtggtcctcccacctctgccgcccgcccaagtgctggaattgcagatgtgagccacagtgcccagccccatagttgctgcatttatgcctttctttagccagcatgcctaaatgttgacatcctcaattaagacacagtatcttgtcttttccacatctcaatgatgcagaaaaattcagttatgtttagtaatcatttattgtgtctaatgtctaagattttatattagatgt

SEQ ID NO: 397912 - DNA, 1630 bp, Homo sapiens
  misc_feature (771)..(771): n is a, c, g, or t
  misc_feature (907)..(907): n is a, c, g, or t
  misc_feature (929)..(929): n is a, c, g, or t
  misc_feature (969)..(969): n is a, c, g, or t
  misc_feature (972)..(972): n is a, c, g, or t
  misc_feature (1003)..(1003): n is a, c, g, or t
  misc_feature (1005)..(1005): n is a, c, g, or t
  misc_feature (1027)..(1027): n is a, c, g, or t
  misc_feature (1045)..(1045): n is a, c, g, or t
  misc_feature (1136)..(1136): n is a, c, g, or t
  misc_feature (1626)..(1630): n is a, c, g, or t
gctgggcaccatggtcacaggcctggcatccctgctgctcctcgctggggcccagtatctgccaggctggactgtgctgttcctctctgtcctggggctcctggcctcccgggctgtgtccgcactcagcagcctcttcgcggccgaggtcttccccacggtgatcaggtgagcttcagggttgcccggccacacagcagggtccagggcctctcatggggaggaggggccaggtggacaggaggccctgtccccataccccacccaggttcctgcctgtgattcctccatccagtaaggactcggggtaaagcactgccctgctcctggatggtgggggccactgctcacagaaggctctgggcagacggctcaggaactgggaaggggagggaaggccacgcaggcctgaagccaggagtgcggggtgggggcagagatgaggaggcctccagaaatggcagaattctcggggaaagcatcacttttcgatcttcttcttcttctttttttttttttttgagatggagtctcgctctgtcaccaggctggagtgcagtggtgtgatctcagctcactgcagcctccaactctctggttcaagcgattctcctgcctcagcctcctgagtagctgggattacaggcacccaccaccacgcacaactaatttttgtatttttagtaaagacagggtttcaccatgatagccaggatggtctcgatctcctgacctcatgatccgcctgccttggcctcccaaagtgctggnattacaggcatgagccactgtgcccggccactttccagtcttgaacagagcaaaaagtgctccaggagaggaaggaggtttttccaaaacaatttttcaaattatcctcagccagcaaaccttaggctgtgcggangccgggccttccccctgctcantctggagtcacatgtgtgtcccccaatctgttgccccacnagntgcccccaacgcactctctcccacagagggncnggcctgggcctggtgctggggnccgggttcctgggccagnaggctggctgcccccaacacactctgtcccacaggggggccgggctgggcctggtgctgggggccgggttcctgggccaggcagccggccncctggacaccctgcacggccggcagggcttcttcctgcaacaagtcgtcttcgcctcccttgctgtccttgccctgctgtgtgtcctgctgctgcctgagagccgaagccgggggctgccccagtcactgcaggacgccgaccgcctgcgccgctccccactcctgcggggccgcccccgccaggaccacctgcctctgctgccgccctccaactcctactgggccggccacacccccgagcagcactagtcctgcctggtggccctgggagccaggatgggaccaaagtcaaggcctggggcatggctgagtaccccagacgtctggtccagggcagacacattcctctcagaagcccgtgtctcagtgcaggtggagccgtggggacagcgtgaaggtgtctccagccaggccccaggcactgggaggccctgggtctccccccagccacacccagtaggtgtggaggataaaggcttctgtggaaannnnn

SEQ ID NO: 397913 - DNA, 150 bp, Homo sapiens
attcctgctgctcccgcgagaattcctgctgctcctcgctggggcccagtatctgccaggctggactgtgctgttcctctctgtcctggggctcctggcctcccgggctgtgtccgcactcagcagcaggaagggatcctctagaataac

SEQ ID NO: 397914 - DNA, 647 bp, Homo sapiens
atgctgctctgagtggtatgatgaaatctgctaccatcaaagggacataaatcatacctttgtccagtgtatccacactgtataagccacccttagtagccatcttggttctcagatcaactgtcgcagtattgcagtgcttgtgttcaagtaacccttatttgacttaacagcctcaaagcacaagagtggtcatgctggcaattcagatatgccaaagagaagctgtaaagtgcttcctttaaatgaagaggtcaaagttcttgatttaataaggaaaaatcataatgtgtgcagggttcagtactagctgtggtttcggcatccactggggttcttggaatgtatccctcgcagataagggggaactaccctgcagagggctatcctgtacactgtaggacgctaagccacatcattagtctctaactactagtagcaagtagcaccagcagtaacaatcaaaaatgtcttctaacattgccaaacatctcctggaggacaaaattcaccccctgctgagaaccactagtttaaagttgatgacagactttaaaaaggaaggatcatgctgtcaccatgtgaatccactgatcactaattgaaactactagacactatgtgtctcctgatgtgatacaatatga

SEQ ID NO: 397915 - DNA, 349 bp, Homo sapiens
cccagtcaggaggcaagggggtcagggacccacttgaggatgcagtctgtcacttagcagagctggtgaactgtactgggagaatccctcttgtcagaatcagctgctctcttcagagccagcaggcaggaaagattaaattccgctgaagctgtgcccacagccaccccttcccccaagtgctctgtcccagggagatgagggttttgtctgtaagcccctgactggggctgttacctttccttcagagatgccctgcctagtaagaaggaatctacacaagcaatctggccacaatctctttgccatgcccagcccagacctcccagcctccttagcactgccaggg

SEQ ID NO: 397916 - DNA, 603 bp, Homo sapiens
gtcccccatccttccccttcataaatgactctacatgggctaaatctaggtacagggaggccttctcttgagccgcccactgagcattctatctcaaggccctgctcccacctcaaattcagctggttctaaaccagactcatcatctcctgaaaaatattcctcacttctctccttccctccttccttccttctctcctcccctctgctttctaagggtcagagctctcccaacctcctcctgctccttccccatttcccctcagaggcttcacccagtaaatctctccgatgtctcaccctgtctgggcatctgcttctcagaggacttgactaacatgagacttaaatcagcccatgagtggggacttctctcaatatttctttggcatttctcacagtgctggacagccagactctctccttgggaattacataattgcacatgtggaatgacttggggagacccaaggaaggtttccccaagtgtgtgacccctgacaccaacctactatgtgaccttagccaacttacttcacctcttagcccattaattttctcaccataaaatgagtggttaaattcaatgtaaattcacacaaa

SEQ ID NO: 397917 - DNA, 441 bp, Homo sapiens
cattctttattcttaccaagtctttgacacacaacctgtacttcacacttaaagcatgtctcaatttggacactcaagtttcaccagaaacattcaatctgtatttagatttcatactagttacaattgaaaaaggagaatcacatatctaacttactctggccatttgaaaaggttttccaatgattgaattgattatgcctttaaaattaaatggaaaacattttgtaaattaaatagaaatgaattgaattaaataaaatgaaattttgagtttctcattggcacgaacccatttcaagtgctcagtagccacacgtggctggtggctattgtactggacaacacagcaccatatgattttccctccgagtggggctgagtgatctctaagcccttcaaatgtatgctcctcccctgcgtttatacagatgagtgctt

SEQ ID NO: 397918 - DNA, 345 bp, Homo sapiens
tgaaaaatccaacttggaaagaggatcctggattcacatggtagtgttgagctgagaagcttcaggattctgggtctatctgttttcaaactgtctcctgcaacactggttcatcagaagagcctctggtgccacagagagtggatctaggtaacattccttccatggaccttcaaaggagaatctcaccttctaagttttactaggttaaagcagtcgttcccaaccaaggtgcttttgtcccccaggggacatttggcaatgtctgaagatattcgatagtcacagctagtggagaggtactgatatctactgggtggaggccaggaatgccaccaaacatcc

SEQ ID NO: 397919 - DNA, 592 bp, Homo sapiens
ttaagttacggtatatatacaaatgcaatatcatttggtgacatttaaatgctctaaaagctcaaaggtgatcacacactatggaaagtgtggatcttataagagattactaacatgtggactacattaccttccagtatctagtcatttattaataaaagcttttcaagactattagtagttagcaactaacacaggcagcaaccaagtagacagcaaactcccctgcttcatgatctcctatcacaataactactcatttttcaaaaacaactacgtatcaggccagaagtaagtgcacacaaacattatttcatcttaactctcacaataaacttttgaaattttactattatcctgattatatgggtgagaaaaccgagactcaaagaaagaaaagaaccccactatcacacggtaagtaaatgattatatcaaaattcaaacccaggctaagtctgattccatttgtatatatctctgtcagtaacatttgtctttaatgattttgttatgctaatcaccagatgcttttctccttgccagttcttttctgaaggaaaatgcctgaaaagacagataacctaagaca

SEQ ID NO: 397920 - DNA, 221 bp, Homo sapiens
aggcctgtctcctgggcggagctgctgaggaggctggaggtaaggacaagcccctgagagttcacaggtcatcattcccaagtgtcctcaggtagcgtgtgtgtgtgtgtgtgtgtgtgtgtgtgtgtgtgtgtgtgtgtgtgtaatgttcaagcacgttttcctgggacagtcgggactggggcctccccaaactgcagaatctacccagttatgtttga

SEQ ID NO: 397921 - DNA, 457 bp, Homo sapiens
atgaggttaacatgcaacccagcaattctactcttatgtatttacccaaaagaaatgaaaatacatgtccaaaaaaacacatgaacatacacagcagttttattcaacatttcaaaacattgggaaacaatccaaatgtccatcaaccggtgaatgaataatgaaatttatctcacaattacaatccaacagcactaatgttcttttaaaatcaatgtatcgtggtatattcccataatgaaattctcccagcaagaaaaaagaagacaactgcattcaatgacatagatgaatcttgaaaacattacactttgtgaaagaagtcaggcacctaaatacatactgataatcccatttatacaattctagaatagttaaagctaatctacagtgacaaaaagcagagcagtggttgtctaggccaggagtggtcgtgggcaaattgactgcaaaggag

SEQ ID NO: 397922 - DNA, 415 bp, Homo sapiens
gttgacagcctgatcacttgacaagaggctggctggtgagggcagtgaggtgagaggggaggtgagtgagttccagatctggttcagtcctcttgacttggggtgctttaatatagctcctttaagctgtggacgcttccttggtgacaagggtgtatgggggggtggacctgctgccacttttgagtccaaaggtcaaggcctcccacgataggctgggcacagctctcccaggtctcttaataataatgtcatttctttgtgcctactatgtgctaaatattttacatacattactactattttccacaatcctatgagataggtactattaggattctattttttttacttttttttttgagacggagtttggctctgtcgcccaggctggagtgcagtggcgcgatcttga

SEQ ID NO: 397923 - DNA, 568 bp, Homo sapiens
cggatgagggagtagaggctgggcccctgtgaagccctccttgcatgaggtgactacagaggagtggacctccagagcctggtgacaccctctcccaccacacagactacagctgggtctagggtgtgacgagctggcagagaagccgccccagagcgatagccacttccggaggacaaggatctctccaccggctcaggaaaacaagccagtttaagggaaacccaaatggctttggggggcgggggcataaaatgtgcaggactccctcaggccttgccatgcagaccttttcaggaggactgccaggggaagacggctgctcacttctgccccacggccaggcctgtgacagccgctcctgtcagcgcagtcctctgcggggccgacgctgtgtaaataattaacaaaacatctgccttgcttcataacacaccgtggctgacacagctctcagggccttcagagaccctccaatgccacgccgaggacttatggcctcgctttgtggggacaggtgggaacgagagcagatactgacaggcaaacattttcctgaggcgccaca

SEQ ID NO: 397924 - DNA, 984 bp, Homo sapiens
taggacttcgccgatctcacaggctcctttccagatgagctgactgtaatctctgggaagctggatctggaggaacaatgggatgggatttgcggtgacccttcctgcccttcttgagcagcttgtgaaccagaagatgtgcctggagagaaagcctcatttggggaagtgcagtagtcgaagttctttattttgaaaatggagaacaacccttctcacaatcctgtctccccttccccctttccaactagaatatcagctcccctgaacatgagtcagtcacatttcagggaaaactggctgatgttgaagaaatcacttgagggcaaactttgtccttcaagctgtgggtctctgaagtgtagagccagcagatcccccagtgtagggactgggccttccttgcccattgaatgctttctatacatgaagacttggagctctttacagatgacagtagccagtgaggaagataaaagaagagaaaagacccaaaatgcgggtttgccactcttttttgccagcaccgtggggacagtcactctgccttctttccaccacctccaacttcacactcacacgcacactctggtcccacagagcctgtttggtacttgcctgacagcccaccttgaaaccagatggtcatgaacctgtcaccaagtcatctgaagatcttccactgcaacctgtatggcatctgccacagggaccatgggacatgattgaagaaccactccagtgcagttgatgaaggggtgggtctgcactggagttaggtgcaccagggcctgggccaagggtgggctgggtccatcttgtgtgtggtggtcttcttcagagtagcagctgattcagagggattccatagaactgcacaggctaggtctagtcagatatcttggacattttctatttctagattagagaatatagcatacgctgattttaatataactgtgtatgtgactttttcagtgagaa

SEQ ID NO: 397925 - DNA, 438 bp, Homo sapiens
acatggttcaattactgctctttttgtttttgtttttggtttctttgagatggagtctcgcctgtctcaaaaaaaacaaaaacaaaaacaaaaagagcagtaattgaaccatgtcaaccccttctaaaaactcaatgcagtggcctccctttgcatatgaaatgaaatctgaactccttcctgtgcttgccagcatctatgaggtactccatcagctgagccttcctaccttcggcctcatttcactctgcaacccctgcccgcaacttaccccttactcgccgtgcttcaaacacactagccttctttctgcttcttgaataagtcaagcatttatcctctgacatgcaatttcctgggtctggaatgttcttttcccaaatcttttcatgcctgactccttctcaacatttggttcttacctcaaatattgattcc

SEQ ID NO: 397926 - DNA, 428 bp, Homo sapiens
gatatggagtctcactctgtcccgcaggctggagtgcagtggcacgatctcagctcactgcaaagtctgcctcccgggttcaagaaattctcccacctccgcttcccatgtagctgggattacaagtgcacaccaccaagcccagcaaatttttgtatttttagtagagatggcacttcgacatgttggccaggctgatcttggactcctgatcccaggtgatccaccggcctcagcctcccaaagtgctgggattacaggcatgagccactgcacctggcctggatatctcttctgtaaagtgtctgttgaggtcgtttgcccgtcctcctctcggcttgcctgtcttcttgctgacttgaaggagttcttcatattctaatttcccatctcaggtcagatttctcctcccactctgcactctggct

SEQ ID NO: 397927 - DNA, 438 bp, Homo sapiens
gtgacaagaaagttcttgagtaaaggctaggaggaaaactatctgaggttacttatttgcctaatccttctatattagaattaggagatgtaaattagtctccagatcacttgtgttgccttcttagtcccaccgtagccatgacagacaaattctcagccctcgccctgctgactgtgtgcaaagttagagaacagcccccaaatccaccccccacttttggaactgcagagtttgggggggtccgcaagatcaccctcgggttcaatagtttactagaacgactcacagaactcactaaagctattatacttacagtgaagggagacagactaaaatcacccaagagaagagatatatgggcaaagtccaggagggtttcagatgctgagcttccagttttcctttcccagtggagtcatggatagtgtaactcct

SEQ ID NO: 397928 - DNA, 473 bp, Homo sapiens
tcaggtgttttcttttttgctgataaagtgtgggtgaaatgtgttggacttggtgcatgctgcaataattgcaaatgagatgatctgcacatgaattttcttggtgtgattttgtttgatctttctcggtgtggttctgtaatggcaagagacatcttcctctgcatcagagtatgaaacatcttaaaaggcattgcatggctgaagtgcaggtctgtattttttagaactagctatttgacaggaaagggtgtaaatccacattgtgttcattcaattccacaagcattcattgaacaccatctcatgacaagccagtgccaggggccgtgaatggggctggaggcagacacattcccagggtgactttagagtggcctctcctgtgtgctcatttggaaaatcagaaggaagatgacgcaggcttgattctgtccggctcagatgttcaagaacattgtgatcacttcaga

SEQ ID NO: 397929 - DNA, 367 bp, Homo sapiens
ggttggctagaactcggacccggccacacggagtgcaggggaagacttgggaacatggtttacatgtgcgtctgggaggaagaggagagcatggaagcgatgactactcccaccccagcatccttgggatgcagcagcagatcttgaggtctccagggtgccaagagcagagctgcttccctagaaaggaaattcacatgaccgtgatctcatctggttcctgggtttgaggttgggggcatttcggccaagcttgcagtcttctctggtggggaataaagtagggtgagcaaatccgttgtaagagatggacctatatgttcctggttgcaacgatatttatcgtatccctactgtgtgccgggca

SEQ ID NO: 397930 - DNA, 425 bp, Homo sapiens
caaattcctggcctcaagtgatctgctggcctcagcctcccgaagtgctgggattgcagacgtgagccaccgcatctggcctctcctagttgctttttctgagttttatgttaaggctttactcaaatgtcccggtggcctgggctgtccactcattaaggaatgggggactaaaaagctggttgctctttgtgtctggcttgtcaactggtggactcacagcgagatgaactggctggccctttcgttgggagatccccagtgttggcggctataggtgcgttccctgagtttaccaggttccccagagaatacttttccagtcatttgcctgaagggtatgaggctatggggctagctgccagcattctgggaaacctgggggaagattgagtcttacacattgagcaagtaaacatcagtgt

SEQ ID NO: 397931 - DNA, 272 bp, Homo sapiens
tataaagagtaaggtttaaacagtacttgctctcttttttgtttgtttgtttgtttaaagtagattgatatatttacatggttcaaaatcaaatgacataaaagatgtatactgagttggcccacttcctcctttgttcccatccaacctgttttctcatctccaacatgcaatcactttcattagtttgttgtgtagtcttctagtgtttctttatgcaaaaccaaacaaatataagtattcctcccccttttagaaaagaggtcacatgc

SEQ ID NO: 397932 - DNA, 518 bp, Homo sapiens
ttccttgattattctctggcagaattgactaagtataacatctgtactgcaatgaaaacataaaagctagtacgtaaagtaacagtttgaaagaatgaaaccagaaagaaaaagaaagcattttcttttcatttgaataacttctgaaaatcagctgagtatttatgtttctattcattgtttataatcacagttaactttaagtgatcactacttcttaggtggaaacatttactttttctcaaaatatgaactgtcttaattagtcctattcaaataaaaactccataacccatattcttctatgttcatatatatctttgtatctcctctttcattataccttataattccctcaatttggagatcatacgaatctgggatatctgttttagcattggtgtgtctaacctcataagaacatatcgcatagtttttctgatacatagaattagcaatctgcttactagaaaattacaggaggtcttcatgaacattgcgttaattttttctctatg

SEQ ID NO: 397933 - DNA, 547 bp, Homo sapiens
cagtgttttgaaatcatatgttaagggcaaacatacagaccctagcatcaatgttctagaatcatatgtgagggacatacattcagactctcgcagcagttgttctggaatcctatgtgggggacaaacattcagacaatggcagcagtgttctggaatcctatgtgagggacaaacactcagagccttgtagcagtgttctggaatcctatgtgagtgagagtgcctggagcctacccaacctgacgcccccaaagccctcacagggtctgacctcccagcatgcacctgcctctctctgaaccccaactgcccaccctgcctgttcccttggccccctccatcctgtgcagcccatagactgtgaccatctctccagccactctggtctttcctttacctttgtcctgtcagaatctctgagcaggatctcccaagtccatccaaacacgtgctttgtccacttttgactaggcccttgggcatcactgggctatcccagctgtccacagggccttcaataatgcacattgcacctggcttatcc

SEQ ID NO: 397934 - DNA, 307 bp, Homo sapiens
acaggacttcacatctttaacctagatttttaataaatgtgaagaaatatgtgtcaggaaatgggacaagaaagtagtcttttttagaagagtttcacttgaggacagtttctaacccagtctgtgcaaagcctcttggagggctctgagctgggatatgtaaccccgtgtcctattctcttcccctgaaaagcccacgctggacctggccagccagcagcactggcatggaccactggtaggagcagcccttttcttcctctaatcaactgtttccagaatagagcttaacaagatgattttattt

SEQ ID NO: 397935 - DNA, 667 bp, Homo sapiens
tcgtgatgctgtcaggctgcccagagacatgtgtgcagagccaggcttggtgtgtgccacagagcggcactactacagtgtcaatggaaatcataccagtgacagctgaagacgtgacagggagaaacatagacaagggtgtaggcacgtgagaatcacaacagggacaaatgaactccccaaaaggtggggatcagcagtgaagacacaggagagcactagtgaccaaggaagaagggtgtcctataagtcaaatgtggacacattttcctgatggcctccagatttggcaattttgtcacctgaaaagaattttcttcagtagagaggggctgaagcccattttaaggggtttaagagtaagaatgaggtaaagagatggtagaagcctttggcagaacagttgttcaaatatattttaagagatttccacttccagcaataagaagatacagtagtccagaattaacttcctactataagcaactagaaaactagtcaaaaataggaaacaactattttcagcaggaactggggaccaagatggctaagactgtaacccctgagaaaaggaaaaaaagaaggggtgccccaccatcaccttggctttctgggcactgcagtgcagggagcaaaaccaaaccacactgcagccaccctgagttga

SEQ ID NO: 397936 - DNA, 537 bp, Homo sapiens
ctgacttgtcccaacactgtcagtgaccttaatcacttggtcaccttggtgtctgccaggtttcttctctgtaatgtcaccttttttctctttataattgatagtattttcaggggacatatcgtaagattatgccaatatcctatttctcgtcaagtcttcatcctcagttttagcatccattgatgaattctatctgaaccaaacaccactattttgttttatttccatctctgttagttggcattctatgtaagaagagctttccttttcctgtcatttatttatatcagcatagacttgtaaaatcccactttattcagcaggttgtaatcagttactgtcattaaatattttattgctcatactgtcccagtttgtccagtgggagccctttcaaggaggttcctaggtcttcgtaacaagtccccatcattctttgaacactttctggcagaagttgttccaggcttctcttgtattttgcttggctcagctatctacaatcagccattttccctagaagcactggtccta

SEQ ID NO: 397937 - DNA, 570 bp, Homo sapiens
tgtcctagatgttgatgggggtggtaggtttgggtaggtcatagggtgtggctgggtcttagatatgtaaatttctcagggctggcagagtcagtcaggggtagccctttggcaagagtaatatgagtttggattatcgaacttcagagtttaaccctaagaggtaagtatttgctcgtttctaaattttgaagttttaaagccggcgttttgataatctgatatattttactaaccctctgaattcactgagagtaggtagggcactaattcagaggtcctagggaaaccttctggggggagataccaagttatggctacaaaatgacccaactttacatggcacggagctctaaaagtaagcagaattagcaagtgtggatcaacagatacaggatttaagaggcatcataagtttgcaggcggtagctgaaactaacaaatgaggtaaccagaggaaaaaggtgtaactgtgtgtgtgtgtatacatacacacatatacctactattttactatatataataaaatatatagatattatacatatataaagagagtttatgtatatg

SEQ ID NO: 397938 - DNA, 1187 bp, Homo sapiens
ttaattttttaaaacgtagttacttaaaaagattgggagattttctattcctctatcaatggggatttccaggcacgtgccccacccaaggcccacgcccagagcgcccgagcggcaggacaacgcccgctgacatcttcccgtcccgacggcacaggctactccgagctccgccttttagattgcaccgagagaagccagctacagcttggagtccaggccgggttttcaagcatcaagacggaagtaacagcggaaaggaagttccaaggcccgcgctgggaaaaaggtggggggaccaggggaagactcggagtgcgatggcggcgcaaattccaattgtggccaccacttccactcccggaatagtccggaacagcaagaagaggccggccagcccttcccacaatggcagcagcggcgggggctatggcgccagtaagaagaaaaaagcgtccgcttccagctttgcgcagggtatcagcatggaagccatgagtgagaataaaatggtgccctctgagtttagcacaggacctgtggaaaaagctgccaaacctttgccatttaaggatcccaactttgtgcactctggccacggtggcgcagtagctggcaagaagaacagaacctggaagaacctgaaacaaatcctcgcttctgaaagggcattgccgtggcaactgaacgatcctaactacttcagtattgatgctcctccatcctttaagccagctaagaagtattctgatgtttcaggtctgcttgccaactacacagacccccagagcaaactgcggttcagcaccattgaagagttttcctacattcggaggctgccctctgacgtcgtcaccggctacctggccctgaggaaggccacgagcatcgttccctgagccccagaaagggagatgaagtggaaagctgtttcaaaaacagactctggactcatgattttgtttcacggaaacaaactcgttctgctgtcaatctgaaaatgccagtgctgtgccttggaaagaatgtttggctttaatttaagggttttttttttttttagtgtgtgttttccctccaagtgtgatatttcctgctgaattaaattatacttcagttgttgcctcaagtaaaggtgtttgacaagaagatacaataaaaccatacttttcatttaaaaaaaatcc

SEQ ID NO: 397939 - DNA, 1129 bp, Homo sapiens
ttaattttttaaaacgtagttacttaaaaagattgggagattttctattcctctatcaatggggatttccaggcacgtgccccacccaaggcccacgcccagagcgcccgagcggcaggacaacgcccgctgacatcttcccgtcccgacggcacaggctactccgagctccgccttttagattgcaccgagagaagccagctacagcttggagtccaggccgggttttcaagcatcaagacggaagtaacagcggaaaggaagttccaaggcccgcgctgggaaaaaggtggggggaccaggggaagactcggagtgcgatggcggcgcaaattccaattgtggccaccacttccactcccggaatagtccggaacagcaagaagaggccggccagcccttcccacaatggcagcagcggcgggggctatggcgccagtaagaagaaaaaagcgtccgcttccagctttgcgcagggtatcagcatggaagccatgagtgagaataaaatggtgccctctgagtttagcacaggacctgtggaaaaagctgccaaacctttgccatttaaggatcccaactttgtgcactctggccacggtggcgcagtagctggcaagaagaacagaacctggaagaacctgaaacaaatcctcgcttctgaaagggcattgccgtggcaactgaacgatcctaactacttcagtattgatgctcctccatcctttaagccagctaagaagtattctgatgtttcaggtctgcttgccaactacacagacccccagagcaaactgcggttcagcaccattgaagagttttcctacattcggaggctgccctctgacgtcgtcaccggctacctggccctgaggaaggccacgagcatcgttccctgagccccagaaagggagatgaagtggaaagcttgtcaatctgaaaatgccagtgctgtgccttggaaagaatgtttggctttaatttaagggttttttttttttttagtgtgtgttttccctccaagtgtgatatttcctgctgaattaaattatacttcagttgttgcctcaagtaaaggtgtttgacaagaagatacaataaaaccatacttttcatttaaaaaaaatcc

SEQ ID NO: 397940 - DNA, 976 bp, Homo sapiens
ttaattttttaaaacgtagttacttaaaaagattgggagattttctattcctctatcaatggggatttccaggcacgtgccccacccaaggcccacgcccagagcgcccgagcggcaggacaacgcccgctgacatcttcccgtcccgacggcacaggctactccgagctccgccttttagattgcaccgagagaagccagctacagcttggagtccaggccgggttttcaagcatcaagacggaagtaacagcggaaaggaagttccaaggcccgcgctgggaaaaaggtggggggaccaggggaagactcggagtgcgatggcggcgcaaattccaattgtggccaccacttccactcccggaatagtccggaacagcaagaagaggccggccagcccttcccacaatggcagcagcggcgggggctatggcgccagtaagaagaaaaaagcgtccgcttccagctttgcgcagggtatcagcatggaagccatgagtgagaataaaatggtgccctctgagtttagcacaggacctgtggaaaaagctgccaaacctttgccatttaaggatcccaactttgtgcactctggccacggtggcgcagtagctggcaagaagaacagaacctggaagaacctgaaacaaatcctcgcttctgaaagggcattgccgtggcaactgaacgatcctaactacttcagtattgatgctcctccatcctttaagccagctaagaagtattctgatgtttcaggtctgcttgaaccaccaaactgttttccacagaggctgcatcaattgacattcccactagcaatggatgagggttccaatttttccagatgctcaccaacacttgttaattttggttttgttttcattatggccattctggtgggtgtaaagtagcatctcattgtggcttgactgaatttctctaatgagtaatgatgttgagcatttttcatgtg

SEQ ID NO: 397941 - DNA, 553 bp, Homo sapiens
tggggttgaaagacgctgccccgcggagtgaatgactactctttcccttcgtttggacacatgggcttacaacgccttgtgttgtaaggagagaagaagaataagatttacacacagtacaatgcacaaattttcaagaatactggctgaaccacagatcttcaagaatcctgtctcacgcctgtatcccagcactttgagaggccaagggtatcagcatggaagccatgagtgagaataaaatggtgccctctgagtttagcacaggacctgtggaaaaaagcttgtgcaagaacattgcccatcttaaggggatacacaaaaacatttgatggcaacacagagaccaacagaggaaggcacaaacaaccatgggcaacgaacgaaccacgaaaacctgtgaaaggaacgccagcgacaacggaaacatcaataccacctcatgaaacacgaggccatctgcccgccagaacaagttgaaccgagcgcagacacacgcaaacaagagaatagaacggagaactagaaccagaagaaacacgacaaaaacgca

SEQ ID NO: 397942 - DNA, 964 bp, Homo sapiens
ttaattttttaaaacgtagttacttaaaaagattgggagattttctattcctctatcaatggggatttccaggcacgtgccccacccaaggcccacgcccagagcgcccgagcggcaggacaacgcccgctgacatcttcccgtcccgacggcacaggctactccgagctccgccttttagattgcaccgagagaagccagctacagcttggagtccaggccgggttttcaagcatcaagacggaagtaacagcggaaaggaagttccaaggcccgcgctgggaaaaaggtggggggaccaggggaagactcggagtgcgatggcggcgcaaattccaattgtggccaccacttccactcccggaatagtccggaacagcaagaagaggccggccagcccttcccacaatggcagcagcggcgggggctatggcgccagtaagaagaaaaaagcgtccgcttccagctttgcgcagacttcagtattgatgctcctccatcctttaagccagctaagaagtattctgatgtttcaggtctgcttgccaactacacagacccccagagcaaactgcggttcagcaccattgaagagttttcctacattcggaggctgccctctgacgtcgtcaccggctacctggccctgaggaaggccacgagcatcgttccctgagccccagaaagggagatgaagtggaaagctgtttcaaaaacagactctggactcatgattttgtttcacggaaacaaactcgttctgctgtcaatctgaaaatgccagtgctgtgccttggaaagaatgtttggctttaatttaagggttttttttttttttagtgtgtgttttccctccaagtgtgatatttcctgctgaattaaattatacttcagttgttgcctcaagtaaaggtgtttgacaagaagatacaataaaaccatacttttcatttaaaaaaaatcc

SEQ ID NO: 397943 - DNA, 337 bp, Homo sapiens
tactgtggagtggttgtcagaattaaatgagctaacttgcgtaggacagccatccctgtgcttggcacttagggtacccgggaaacatagcagttggaggtcctggcctgtttctcctgtggcttctgcacagcaggtgctactccccgtgtggtgtgccctcccctagggcaggctgcctgctggagctctgggcatactgtcttcccttgcatgccctgtggcatcatcgtatgccctgttgagagcagaggtggggaactcagctgaaagaaactgacttcttcaaactatttttattatgttttaagggtatcagcatggaagccatgagtga

SEQ ID NO: 397944 - DNA, 896 bp, Homo sapiens
ttaattttttaaaacgtagttacttaaaaagattgggagattttctattcctctatcaatggggatttccaggcacgtgccccacccaaggcccacgcccagagcgcccgagcggcaggacaacgcccgctgacatcttcccgtcccgacggcacaggctactccgagctccgccttttagattgcaccgagagaagccagctacagcttggagtccaggccgggttttcaagcatcaagacggaagtaacagcggaaaggaagttccaaggcccgcgctgggaaaaaggtggggggaccaggggaagactcggagtgcgatggcggcgcaaattccaattgtggccaccacttccactcccggaatagtccggaacagcaagaagaggccggccagcccttcccacaatggcagcagcggcgggggctatggcgccagtaagaagaaaaaagcgtccgcttccagctttgcgcaggccaactacacagacccccagagcaaactgcggttcagcaccattgaagagttttcctacattcggaggctgccctctgacgtcgtcaccggctacctggccctgaggaaggccacgagcatcgttccctgagccccagaaagggagatgaagtggaaagctgtttcaaaaacagactctggactcatgattttgtttcacggaaacaaactcgttctgctgtcaatctgaaaatgccagtgctgtgccttggaaagaatgtttggctttaatttaagggttttttttttttttagtgtgtgttttccctccaagtgtgatatttcctgctgaattaaattatacttcagttgttgcctcaagtaaaggtgtttgacaagaagatacaataaaaccatacttttcatttaaaaaaaatcc

SEQ ID NO: 397945 - DNA, 1679 bp, Homo sapiens
ttaattttttaaaacgtagttacttaaaaagattgggagattttctattcctctatcaatggggatttccaggcacgtgccccacccaaggcccacgcccagagcgcccgagcggcaggacaacgcccgctgacatcttcccgtcccgacggcacaggctactccgagctccgccttttagattgcaccgagagaagccagctacagcttggagtccaggccgggttttcaagcatcaagacggaagtaacagcggaaaggaagttccaaggcccgcgctgggaaaaaggtggggggaccaggggaagactcggagtgcgatggcggcgcaaattccaattgtggccaccacttccactcccggaatagtccggaacagcaagaagaggccggccagcccttcccacaatggcagcagcggcgggggctatggcgccagtaagaagaaaaaagcgtccgcttccagctttgcgcagacgtgcctttcgccttccaccatgattgtgaggcctccccagccacgtggaactgctcattggtggaagggacttgccttgtctcggatgagactttggactgtggacttttgagttaatgctgaaatgagttaagactttgagggactgctgggaaggcatgattgattttaacatgtgaggacatgagatttgggaggggccgggggcggaatgatagtttggctgtgccctcacccaaatctcatcttgaattgtagctcccaaaattcccacatgttgtgggaggaacccggtgggatataattgaatcatgggggcagtttcccccatgctgttctcatggtagtgaataactctcaggaaatctgatggttttataaggggaaacccctttcacttggctttcattctctctcttgcctgctgccacgtaagacgtgcctcttgccttccgccatgattgtgaggcctccccagccgcgtggaaatggtatcagcatggaagccatgagtgagaataaaatggtgccctctgagtttagcacaggacctgtggaaaaagctgccaaacctttgccatttaaggatcccaactttgtgcactctggccacggtggcgcagtagctggcaagaagaacagaacctggaagaacctgaaacaaatcctcgcttctgaaagggcattgccgtggcaactgaacgatcctaactacttcagtattgatgctcctccatcctttaagccagctaagaagtattctgatgtttcaggtctgcttgccaactacacagacccccagagcaaactgcggttcagcaccattgaagagttttcctacattcggaggctgccctctgacgtcgtcaccggctacctggccctgaggaaggccacgagcatcgttccctgagccccagaaagggagatgaagtggaaagctgtttcaaaaacagactctggactcatgattttgtttcacggaaacaaactcgttctgctgtcaatctgaaaatgccagtgctgtgccttggaaagaatgtttggctttaatttaagggttttttttttttttagtgtgtgttttccctccaagtgtgatatttcctgctgaattaaattatacttcagttgttgcctcaagtaaaggtgtttgacaagaagatacaataaaaccatacttttcatttaaaaaaaatcc

SEQ ID NO: 397946 - DNA, 341 bp, Homo sapiens
gtccctttcccctctgggaaatgagtatgtttagaggacctgtgatcatgcagttgtttgtgtttgggttattaatgaatggttctgcctccaaaatgtgggtcttctcatttgcctgctgcgaactgggtctgtgtgtgggccaccattcttgttactgcattgccaggaaggcttccatctttccttcccctctgcttgggctacaatggtaatgttctgtttatagtgttggttcttgttattcattaattctaataccttgatttaaacaatattatcatcatcaccataatctaatcattgcttaattattataattgctgtaatatgtaatcaat

SEQ ID NO: 397947 - DNA, 538 bp, Homo sapiens
aggtgtgggctgggcgcggtggctcacgcctgtaatcccaacacttcgggaggccgaggagggcagatcacgaggtcaggagatcgagaccatcctggctaacacggtgacactccgtctctactaaaaatacaaaaaaaattagccgagcgtggtggtgggcgcctgtaggtagtcccagctactcaggaggctgaggcagaagaatggcgtgaacctgggaggttcacaaggcgggtaacaaagggcccatgaggcctgattaactgatctgacaaaccatctgtcacccacagccctaagccacactgtgaaactgcctagggtggcaccagctttttatcttcctcagggtcctcccctcaggcccccaagtcaccccatcatggtccagattctcccctgagtgactccatccccatggtcatttcccctcctgagcctccccctctgagggccaagggctgtcctcagggccctcctggggcttcctggtggggaacaacctgaggcaggaggataagctcttattcagagc

SEQ ID NO: 397948 - DNA, 767 bp, Homo sapiens
agcagctaccttaatggacagtgcaggcctaagccatcaggagggtccttgggtacttccccacccttgccttttctccttgcactacccattccttatttattgagcgtcttctgtgtcttgaggctgtggagataacaaagctgctcagctttcctccttcctggagcctctgagacaacagaagttatatgtccccaaggactggagcttctgtttgcgccaccagcctagtgctgtagtagaggctttaggcacttagttctgagagtacccttgaaagcaaccatttcctgtgctttacagttggagaaacagagtcttggagaagttaggtaatttgcccagagttccccatatctttgagccaggatgtaaactaaggctcttctggctttttcggaggtactcagttacatcctgcttccaagcttttcggagaagaaacagggtaacagtccttataaccaacttaggttttcttgtaaattcttggagttcttgtgtttctaatgcaggtataactgtacatgacagagctgagaagatagttgaggttactaagcaactctaacaaaagagggtttttgctgagggcattccatttaagtcccaaactttactttcatagtgagaactggttttgaagtgtcaaagggaagcagttagaagcaaaatgcagcagtcaataagcccctccttacttcacgttagttgggccagcaagatagtagagaggactgattcatttggcctattcttgaaac

SEQ ID NO: 397949 - DNA, 363 bp, Homo sapiens
gtgaccctagaggatacccaaaagtgcactcttctatatctacagatctccagcaatctccccttttccttccccatcgcagggtgcttccttcattgtttttttggtcagcatcaccagagatttacgagtttggggcactttcaaagaatcgatagttgacttttttggccctcaatggaaggtgtgttctgaaggtttctcctccctgtgtctctagccctccctctaaggacgtttcaaacacctcttctataccaatcagctcatgtctcctgaggaagaacgctcttgatttctcttgtgtgagtctgtatttatttcacctttattcttgggtagatatagaagagtgcactttag

SEQ ID NO: 397950 - DNA, 327 bp, Homo sapiens
atggacaacttgatagcttgtcacatctgtggacattactattgttcttgatctcaaactttttgtggaagcagaaaggaaagatgccagctcataacttctttgacagccttaggcagtcaccatccccccaccccacccctggtatccagggagtagtcaggattttggcagaaaaccttgggcaggttatgttccaaattgccaaggtactattgacccacagcctggcttggccttgactcatccaagtagggacaatgactcatgctgcctgtgtcccctgcttgtaactagtacccaattaattattaactggtgacactc

SEQ ID NO: 397951 - DNA, 498 bp, Homo sapiens
taacttaaaaataaataaaagcatgttatttaatgggtgtataatattctaccttatgcatctatcttaacacttccattattggatatttgcagtgtttttcatttctgcaattaaaaacaatattctggagaatatcaatatcaattaataataataatactgtcgaataattgctttcagtaccttaagctatgaaataagcaaaataaggattgtagtagctatggcataccaagtaagtactataaaactcagttctttggatgccatctaaatgagtttacacaaagtagagctagaaagtctgggtcactgattgacaccatggcaagaaggatgtcttcttatatttaaatgtaaggttgaataggttgaaaatgccactttcagcaaaggtgggaagatcgcttgtgcccaggagtttgaggttatagtgagctatgatctcgccactgcattctagcctgggttgagagagtaagaccttgtctctta

SEQ ID NO: 397952 - DNA, 500 bp, Homo sapiens
actcacatgtttattgcagcactattaacaatagcaaagacatataattaagctaagtgctcatcaatagtggattggataaagaaactgtatatggaatactacacagccacaaaaaagaacaaaagcatatcatcctcagcaacatggatgcagctggaggccattaatttaagtgaatttaatcagaaacagaaaaccaaatactgcatattctcacttataaatgggagctaatcattgattcacacggacataaagattaggtcagttgacactggagaattgaaaagggaagagagagagataaagtagggcaatggttgaaaaattaactcccgaataccatgttcactgtttgggtgataagatgaacagaagcccaaacttaagcatcatgcaatataccaatgtaacaaaccagcacatgtacttcctgaatcccctgaatctaaaatttaaaatgaaaataaaattaaaaaaataaattctagactaga

SEQ ID NO: 397953 - DNA, 219 bp, Homo sapiens
catgttggttaggctggtctcaaactcctgaccttgtgatccacccacctcagcctctcaaagtgctgggattacagccgtgagccaccacacccggcccctgccattcttccttctataaatacttggatatttactctgtgcctcttgtggctttagatagtgacagatgtctcagaagtctatatcctagacataaacttatgtgtatactcatag

SEQ ID NO: 397954 - DNA, 516 bp, Homo sapiens
taaaaatgaaacatgtccatgcaaaaatttgtaaacgattatagcagcattattcataatagctaaaaggaagaaacaacacaaatgtccatccactgaagaatgaataaacaaaatgtatagccacatagtggagtactactcagccatgaaaaggaatgaaggactgatacacactacaacatggatgaactttgaaaacatcatgctaagtgaaagaagccagtcaccaaagattacttgtgtgatgccattcatatgaaatgtccacaacagagaaatctgtagagacagtgcttgcttagggctggtggggggcagggagagtagggaagtgatggccaaagggtacagagtctcttcttgaggtgatgaaaatattctaaaatcaaccatgttaatacttgcacataaccttgaatatgctttttaaaagccattgaattatacacttttaggcgaattgtgtggtatgggaaatacatctcaataaagatgtttattttaaaagtcact

SEQ ID NO: 397955 - DNA, 540 bp, Homo sapiens
gttttccaattaacctacctctatacaggaaggagtaacgtctgttaaatacttttaagttaacgtaaaaaacataaaacataaaaacaaaatagatttgtaagcattttgctaaaatagtcattacgtgtctctaaaaaccagaacaagaagacagacagtttaagagtgaaagctatttgctgacttagaccaagtgaaagccaacgctaaccaaaaaaacattttccatgtaaaaacattccttttaatatttcttaacctagagctctactcatcaaaaagagaaagagagaaaaaagattactgcttaaaatctcagcaaagggaacccagtacttaactagaccagctcccagagtgaccagatgcaaatctctttcacaaatagccacagggcagcacggcctcctctaggaacaccggccccaactgcccacccgcgggggcttccaggcctccaggtgccaagacatcccaccaggggccaaccacatgggacctctggggtagggcttccctacagtcagcctccaacac

SEQ ID NO: 397956 - DNA, 670 bp, Homo sapiens
ccttcgatttttgaggctgctgacctttggatggggtttttgtggggtctttttttgttgatgttgttgttgttgctttctgtttgtttgtttttaacagtcaggcccctcttctgtagggctgctgccatttgttgggggtcgaatccataccctactcgcctgggtccctctcgcatctggaggtattaccagtggaggctgcagaacagcaaagatggctgcttgctccgtcctctgggaggaagcactgacctgatgccggcaggaacgttcctgtataagatgtctggcaacccctggtgggtctcagtcaggaggcacgggatcagggacctgcttaaggaagcactctgactgccccttggcagagcagctgtgctgcactgaagggaatccccctcctctggactgcccagacccttcagagccagcaggcaggaaagactaagtctgctgaaccacgaagacgatagtcacccctgcccccaggggctccttcccagggagatcagttctgctcataaacccctacctggagttgctgacatttctgcagggaggcctcgcctagtgaggaggaatggatccgagtcccacctaaagaagcggtctggccacaatctgccactaccactgtgctgtgctgtggggaattcctcctggtcca

SEQ ID NO: 397957 - DNA, 295 bp, Homo sapiens
gaatcatgagaaagagaaactacatttactattcatcaaatggaaagggatcatccccgaggtcttcatcctcatcatcttcacatggaggaggctgaggaggagaaggaggaagagggaggttggtctggctttctcaggggtggcagaggcagaagaaaatccacatataactgacctgtacagtccaaacctgtgaaggatcaactatgtttctgtgtctctttctcccagttcttgtcttcagagataccaacattggatgttgcctctcaactggtttccttctctttca

SEQ ID NO: 397958 - DNA, 461 bp, Homo sapiens
gtatttctgtttttgttctgtggtctgggtttttcatttaaatttatacttctggtaattttgaggatttataacctgattttaattctagtggttgattaatgtcatattctaaatagtgcatatgtacttctatttctcgatgtattggtattaaaaaggaagaacggctgggcatggtggcttatgcctgtaatccaagcactttgggaggctgagatgggaggactgcttgaggccatgagtttgagagcagcctgccaagaaagtgagactccatctctacaggaaattttttaagaaactagctggcgcagtggtgtgggcctgtagttccagttactcgggtggctgaggcaggaggattccttgagccccggagttgcaggttgcagcgagctatgatcatacccactgcatccctgactcctgcttgggcaacagagtgatactctgtctca

SEQ ID NO: 397959 - DNA, 685 bp, Homo sapiens
tgacaggagtggtcatccaataaatatgcctaaatggctggatgtaatactaccaaaaccccacaagttacagacatagtctcataaatcatggttttgtatttatctatatttggaattgatattataagagttttaagtcacaatctgaatctctgggttcctcatcctatcaattaggaagtatttgctgaatgcaaaattattgtcaaaagagaaacttgtaaacaaattacagacatacacagagtaactgctttttaatttttattttatttatttttttgagacagaatctcgctctgttgcccaggctggagtacagtggtgcaatctccactcaccgcaacctccacctgcgaggttcaagtgattctcctgcctcaccctcctgagtagctgggattacaggcacgcaccagcacacttggctgatttttttgtattttcagtagagacagggttttgccatgttggccaggctggtctcctgacctcaggtgatccacccacctgggcctcccaaagtgcggggattacaggtgtgagccactgcacctggccagagtaagtggtttttaatagtcaaattaccaactatttgaatagacggaaaggtagttttataatctgagattctcaatccttgtggcacagtaccatcaaggagagctttaaaaaaaaa

SEQ ID NO: 397960 - DNA, 222 bp, Homo sapiens
cagccctcaagcaaggggttccttaggggccagagacccaaggctctcccacccactcagtgtgttccagaaaagagcgaggcagactggtgttagctagacgtccccagaagccaagaggagaagcagacgggagcctggtgaggtaagcgctgcaggtcctggtcctgacgccagacatttgtgagacccaacctcattccccacaacctgcccaggaga

SEQ ID NO: 397961 - DNA, 360 bp, Homo sapiens
gagccaagatcgcgccattgcactccagcctgagcaacaagagcgaaattccatctcaaagaaaaaaaataaataaattagccataaagcaatgaataatactgtaagatatattcaccataaatatatatcaatatacattaaaatcaaaatatatgattgtctagttaggcagtatgttctaggcaatatacaaaggactacatgtacctagattaggagtttaaaataagacagttgtacagagatacatttgtagattcaacattgatgaatataaaaaataatgtgccaggctcatgctctgtcattcaggctggagtgcagtggtgccggacgcgtgggtcgcgagcggccgct

SEQ ID NO: 397962 - DNA, 369 bp, Homo sapiens
gggtgtctgcatatgctatttaagctttaccgcctcagagcacccgctgccaatcttcacacagacaattcgatcagtccttcaggtcttaagtcacttctcaagaatgccgtacttgcctaggctagattagatcctactgttacatgctccctttatttttgtttttttgagacagggtctcacttacccaggctggaatacagtggtgcgatcatagctcgttgcagccttgaccttctgagctcaagtgatcctcccacctcagcctcctgagtagctgggaccacaggtgcacatcaacacacccagctaatttttgattttttttttgttttgtgcggtaaaagcttgggatcctctagatca

SEQ ID NO: 397963 - DNA, 659 bp, Homo sapiens
gggtgtctgcatatgctatttaagctttaccgcctcagagcacccgctgccaatcttcacacagacaattcgatcagtccttcaggtcttaagtcacttctcaagaatgccgtacttgcctaggctagattagatcctactgttacatgctccctttatttttgtttttttgagacagggtctcacttacccaggctggaatacagtggtgcgatcatagctcgttgcagccttgaccttctgagctcaagtgatcctcccacctcagcctcctgagtagctgggaccacaggtgcacatcaacacacccagctaatttttgattttttttttgttttgtagaaacaaggtcttactatgttgcccagggtggtctccaactcctgggctcaagcaatcctcctgccttggcctctcaaagtgctgggattacaggtgtgagacactgcacctggccccttattttgtaactcttatcaccattataacaacaccgatggtatctttttaatgtcgtcagtctgccctactaaactgcaagctgtgtggaggcaagaaccatgtctgttcactgctgtatttctagcaccaagtggagcgtctggagcacaggtgagagtaaccattataaacggtcctcaccattgtcccagccatcc

SEQ ID NO: 397964 - DNA, 326 bp, Homo sapiens
taaaatatgcaaattcggcagcattccctagccatacttaagcctcacatttaaaacactaactgcatacttttgaaactgtagaaattagggtaaattactttttaaatgagttacagtggaactatgccaattaatgcaggtaaaaagtactaggtttcagaagtagctcggaagtatcaaattattggctctgcagtccaaatgatgtaaaattcaaaactgaattcttctacataactgcaagaactgagtacgataatctcccagcataaatcctgcaaatttagaaatagtgactagagtcttgggatttgcctaaatcc

SEQ ID NO: 397965 - DNA, 349 bp, Homo sapiens
actagagacggggtttcaccatgttagccaggatggtctcgatctcctgacctcgtgatccgcctgcctcggcctcccaaagtgctgggattacaggcgtgagccaccgcgccaggccaactgaacttctttaatgagctgctgcaagaattaaataatataatgtctgcaaagacacaatccttaacagtatccatataaagatttccactgcccactatgtctggctaatttctttaggcttcagtcaaatgtcatttttctgcacagaaatcttctttgactttaaggtccaggtcagagccacctggaacatgctttaacagaatcctatatttttctttcatgg

SEQ ID NO: 397966 - DNA, 5493 bp, Homo sapiens
attcctgccgctgccgccgccgccgccgaggtcccgcaccagccatggcgcagatcctccctgttcgctttcaggagcacttccagctccaaaaccttggaattaatccagctaacattggattcagcacactgaccatggaatctgacaagttcatatgtatccgagagaaagttggtgagcaggcacaggtcacgatcattgacatgagtgacccaatggctccgatccgacggcctatctctgcagagagtgccatcatgaatccagcctctaaggtgatagctctgaaagctgggaagacacttcagatctttaatattgagatgaagagtaaaatgaaggctcatactatggcagaagaagtgattttctggaaatgggtttctgtgaacactgttgccttggtgaccgagaccgcggtctaccactggagcatggaaggtgactcccagcccatgaagatgtttgatagacataccagtctggtgggctgccaggtgattcactaccggactgatgagtaccagaagtggctgctgctcgtaggcatctcggctcagcaaaaccgtgtggttggagcaatgcagctctactctgtggataggaaggtttcacaacccatagaaggccatgctgcggcttttgcagagttcaagatggaggggaatgccaagcctgccacccttttctgctttgctgtacgtaatcccacaggaggcaagttgcacatcattgaagttggacagcctgcagcgggaaaccaaccttttgtaaagaaagcagtagatgtgttttttcctccagaggcacagaatgattttccagtggctatgcagattggagctaaacatggtgttatttacttgatcacaaagtatggctatcttcatctgtacgacctagagtctggcgtgtgcatctgcatgaaccgtattagtgctgacacaatatttgtcactgctccacacaaaccaacctctggaattattggtgtcaacaaaaaaggacaggtactgtcagtttgtgttgaggaagataacattgtgaattatgcaaccaacgtgcttcagaatccagaccttggtctgcgtttggccgttcgtagtaacctggctggggcagagaagttgtttgtgagaaaattcaataccctctttgcacagggcagctatgctgaagccgccaaagttgcagcgtctgcaccaaagggaatcctgcgtaccagagagacggtccagaaattccagagtatacccgctcagtctggccaggcttctccattgctgcagtacttcggaatcctgctcgaccagggtcagctcaataaacttgaatccttagaactttgccatctggttcttcagcaggggcgtaagcaactcctagagaagtggctgaaagaagataagctggagtgctcagaggagctcggagacttggtcaaaaccactgaccccatgctcgctctgagtgtgtaccttcgggcaaatgtgccaagcaaagtgatccagtgttttgcagaaacaggccaattccagaaaattgtgctctatgccaaaaaggttgggtacaccccagactggatctttctgctgaggggtgtaatgaagatcagtccggaacagggcctgcagttttctcgaatgctagtgcaggacgaggagccgctggccaacattagccagattgtggacattttcatggaaaacagtttaattcagcagtgtacttccttcttattggatgccttgaagaataatcgcccagctgagggactcctgcagacatggctgttggagatgaaccttgttcatgcaccccaggttgcagatgccatccttggaaataaaatgtttactcattacgaccgggcccacattgcccagctctgtgagaaggcaggcctcctgcagcaagcactggagcactacaccgacctctatgacatcaagagggctgtggtccacactcacctcctcaatcccgagtggcttgtcaatttctttggctccttatcggtggaggattctgtggagtgtctgcatgccatgctgtctgctaacatcagacagaaccttcagctgtgtgtgcaggtggcctctaagtaccacaagcagctgggcacgcaggccctggtggagctctttgaatccttcaagagttacaaaggcctcttctacttcctgggctcaatcgtgaacttcagccaagacccagatgtgcatctgaaatacattcaggctgcctgtaagacagggcagatcaaggaggtggagaggatatgccgagagagcagctgctacaacccagagcgtgtgaagaacttcctgaaggaggccaagctcacagaccagcttcccctcatcatcgtgtgtgatcgttttggctttgtccatgaccttgtcctatatttataccgcaacaacctgcagaggtacattgagatctacgtgcagaaggtcaaccctagccggaccccagctgtgattggagggctgcttgatgtggattgttctgaggaagtgattaaacacttaatcatggcagtgagaggacagttctctactgatgagttggtggctgaagtagaaaaaagaaataggctcaagctgctgcttccctggctggagtcccagattcaggaaggctgtgaggagcctgccactcacaatgcactggctaaaatctacatcgacagcaacaacagccccgagtgcttcctgagagagaatgcctactatgacagcagcgtggtgggccgctactgtgagaagcgagacccccatctggcctgtgttgcctatgagcgggggcagtgtgaccttgagctcatcaaggtgtgcaatgagaattctctgttcaaaagcgaggcccgctacctggtatgcagaaaggatccggagctctgggctcacgtccttgaggagaccaacccatccaggagacagctaattgaccaggtggtacagacagcattgtcagaaacacgggatcctgaagagatttcggtcactgtcaaagcctttatgacagccgacctgcctaatgaactgattgaactgctggagaagatagttctggataactctgtcttcagcgagcacaggaatctacagaatctgttgatcctgactgccatcaaggcagaccgcacacgggtcatggagtacatcagccgcctggacaactatgacgcactggacatcgcgagcatcgctgtcagcagcgcgctgtatgaggaggccttcaccgttttccacaagtttgatatgaatgcctcagcaatccaggtcctgatcgagcacattggaaacctggaccgggcatatgagtttgcggagagatgcaatgagcctgctgtgtggagtcagctggcccaagcccagctccagaaagatttggtgaaggaagccatcaactcctatatcagaggggacgacccttcctcttacctggaagttgttcagtcagccagcaggagcaacaactgggaggatctagttaaatttctgcagatggccaggaaaaagggccgtgagtcctatatagagactgaacttatttttgccttggctaaaaccagccgtgtttctgagctagaagattttattaatggacccaacaatgcccacatccagcaggttggagaccgctgttacgaggagggaatgtacgaggctgccaagctgctctatagcaatgtttctaactttgcccgcctggcttccaccttggttcacctcggtgagtatcaggcagcagtggacaacagccgcaaggccagcagcacccggacgtggaaggaggtgtgctttgcctgcatggatggacaagagttccgcttcgcacagctgtgtggtcttcacatcgtcattcatgcagatgagctggaggagctgatgtgctattaccaggatcgtggctactttgaggagctgatcttgctgttggaagcggccctgggcctggagcgggcccacatgggcatgttcactgagctggccatcctctactccaaattcaagccacagaagatgctggagcatctggagcttttctggtcccgtgtcaacatcccaaaggtgctgagggctgcagagcaggcacacctgtgggctgagctggtgttcctctatgacaagtacgaggagtatgacaatgctgtgctcaccatgatgagccaccccactgaggcctggaaggagggtcagttcaaggacatcattaccaaggttgccaacgtcgagctctgttacagagccctgcagttctatttggattacaaaccactgctcatcaatgacctgctgctggtgctttcaccccggctggaccacacctggacagtcagtttcttttcaaaggcaggtcagctgcccctggtgaagccttacctgcggtcagtccagagccacaacaacaagagtgtgaatgaggcactcaaccacctgctgacagaggaggaggactatcagggcttaagggcatctatcgatgcctatgacaactttgacaacatcagcctggctcagcagctggagaagcatcagctgatggagttcaggtgcattgcggcctatctgtacaagggcaataactggtgggcccagagcgtggagctctgcaagaaggatcatctctacaaggatgccatgcagcatgctgcagagtcgcgggatgctgagctggcccagaagttgctgcagtggttcctggaggaaggcaagagggagtgcttcgcagcttgtctcttcacctgctatgacctgcttcgcccagacatggtgcttgagctggcctggaggcacaacctcgtggacttggccatgccctacttcatccaggtgatgagggagtacctgagcaaggtggacaaactggatgccttggagagtctgcgcaagcaagaggagcatgtgacagagcctgcccctctcgtgtttgattttgatgggcatgaatgagacccagctgattgcactaagccctgccgtgggcccagcccctgccagcttcccctatggatatgcctctgctcccaacttcgccagcctccaatgtacaacttccgcgtgtagtgggcgttgtcaccacccaccctacctgcagagttactaacttctccaaggagcatgtcactccagcagcacaggggacgcaatgggaggcagggacacctggacaatatttatttttgctgaaacccaatgacggcaacctctgagccatcccagagcctggggaggccagggtagaggctgacggcgcaagaccagctttagccgacaacagagactggactgtgggccctcctgctggagccaggccttcctcctgggcgcctccgactggctggagctgccccctccaggccagtttgaagactacatgaacacgtcttgtttggaggtaccggacctcataaaaggactctcagcctcttggcaatcataaatattaaagtcggtttatccaggcaaaaaaaaactg

SEQ ID NO: 397967 - DNA, 5322 bp, Homo sapiens
attcctgccgctgccgccgccgccgccgaggtcccgcaccagccatggcgcagatcctccctgttcgctttcaggagcacttccagctccaaaaccttggaattaatccagctaacattggattcagcacactgaccatggaatctgacaagttcatatgtatccgagagaaagttggtgagcaggcacaggtcacgatcattgacatgagtgacccaatggctccgatccgacggcctatctctgcagagagtgccatcatgaatccagcctctaaggtgatagctctgaaagctgggaagacacttcagatctttaatattgagatgaagagtaaaatgaaggctcatactatggcagaagaagtgattttctggaaatgggtttctgtgaacactgttgccttggtgaccgagaccgcggtctaccactggagcatggaaggtgactcccagcccatgaagatgtttgatagacataccagtctggtgggctgccaggtgattcactaccggactgatgagtaccagaagtggctgctgctcgtaggcatctcggctcagcaaaaccgtgtggttggagcaatgcagctctactctgtggataggaaggtttcacaacccatagaaggccatgctgcggcttttgcagagttcaagatggaggggaatgccaagcctgccacccttttctgctttgctgtacgtaatcccacaggaggcaagttgcacatcattgaagttggacagcctgcagcgggaaaccaaccttttgtaaagaaagcagtagatgtgttttttcctccagaggcacagaatgattttccagtggctatgcagattggagctaaacatggtgttatttacttgatcacaaagtatggctatcttcatctgtacgacctagagtctggcgtgtgcatctgcatgaaccgtattagtgctgacacaatatttgtcactgctccacacaaaccaacctctggaattattggtgtcaacaaaaaaggacaggtactgtcagtttgtgttgaggaagataacattgtgaattatgcaaccaacgtgcttcagaatccagaccttggtctgcgtttggccgttcgtagtaacctggctggggcagagaagttgtttgtgagaaaattcaataccctctttgcacagggcagctatgctgaagccgccaaagttgcagcgtctgcaccaaagggaatcctgcgtaccagagagacggtccagaaattccagagtatacccgctcagtctggccaggcttctccattgctgcagtacttcggaatcctgctcgaccagggtcagctcaataaacttgaatccttagaactttgccatctggttcttcagcaggggcgtaagcaactcctagagaagtggctgaaagaagataagctggagtgctcagaggagctcggagacttggtcaaaaccactgaccccatgctcgctctgagtgtgtaccttcgggcaaatgtgccaagcaaagtgatccagtgttttgcagaaacaggccaattccagaaaattgtgctctatgccaaaaaggttgggtacaccccagactggatctttctgctgaggggtgtaatgaagatcagtccggaacagggcctgcagttttctcgaatgctagtgcaggacgaggagccgctggccaacattagccagattgtggacattttcatggaaaacagtttaattcagcagtgtacttccttcttattggatgccttgaagaataatcgcccagctgagggactcctgcagacatggctgttggagatgaaccttgttcatgcaccccaggttgcagatgccatccttggaaataaaatgtttactcattacgaccgggcccacattgcccagctctgtgagaaggcaggcctcctgcagcaagcactggagcactacaccgacctctatgacatcaagagggctgtggtccacactcacctcctcaatcccgagtggcttgtcaatttctttggctccttatcggtggaggattctgtggagtgtctgcatgccatgctgtctgctaacatcagacagaaccttcagctgtgtgtgcaggtggcctctaagtaccacaagcagctgggcacgcaggccctggtggagctctttgaatccttcaagagttacaaaggcctcttctacttcctgggctcaatcgtgaacttcagccaagacccagatgtgcatctgaaatacattcaggctgcctgtaagacagggcagatcaaggaggtggagaggatatgccgagagagcagctgctacaacccagagcgtgtgaagaacttcctgaaggaggccaagctcacagaccagcttcccctcatcatcgtgtgtgatcgttttggctttgtccatgaccttgtcctatatttataccgcaacaacctgcagaggtacattgagatctacgtgcagaaggtcaaccctagccggaccccagctgtgattggagggctgcttgatgtggattgttctgaggaagtgattaaacacttaatcatggcagtgagaggacagttctctactgatgagttggtggctgaagtagaaaaaagaaataggctcaagctgctgcttccctggctggagtcccagattcaggaaggctgtgaggagcctgccactcacaatgcactggctaaaatctacatcgacagcaacaacagccccgagtgcttcctgagagagaatgcctactatgacagcagcgtggtgggccgctactgtgagaagcgagacccccatctggcctgtgttgcctatgagcgggggcagtgtgaccttgagctcatcaaggtgtgcaatgagaattctctgttcaaaagcgaggcccgctacctggtatgcagaaaggatccggagctctgggctcacgtccttgaggagaccaacccatccaggagacagctaattgaccaggtggtacagacagcattgtcagaaacacgggatcctgaagagatttcggtcactgtcaaagcctttatgacagccgacctgcctaatgaactgattgaactgctggagaagatagttctggataactctgtcttcagcgagcacaggaatctacagaatctgttgatcctgactgccatcaaggcagaccgcacacgggtcatggagtacatcagccgcctggacaactatgacgcactggacatcgcgagcatcgctgtcagcagcgcgctgtatgaggaggccttcaccgttttccacaagtttgatatgaatgcctcagcaatccaggtcctgatcgagcacattggaaacctggaccgggcatatgagtttgcggagagatgcaatgagcctgctgtgtggagtcagctggcccaagcccagctccagaaagatttggtgaaggaagccatcaactcctatatcagaggggacgacccttcctcttacctggaagttgttcagtcagccagcaggagcaacaactgggaggatctagttaaatttctgcagatggccaggaaaaagggccgtgagtcctatatagagactgaacttatttttgccttggctaaaaccagccgtgtttctgagctagaagattttattaatggacccaacaatgcccacatccagcaggttggagaccgctgttacgaggagggaatgtacgaggctgccaagctgctctatagcaatgtttctaactttgcccgcctggcttccaccttggttcacctcggtgagtatcaggcagcagtggacaacagccgcaaggccagcagcacccggacgtggaaggaggtgtgctttgcctgcatggatggacaagagttccgcttcgcacagctgtgtggtcttcacatcgtcattcatgcagatgagctggaggagctgatgtgctattaccaggatcgtggctactttgaggagctgatcttgctgttggaagcggccctgggcctggagcgggcccacatgggcatgttcactgagctggccatcctctactccaaattcaagccacagaagatgctggagcatctggagcttttctggtcccgtgtcaacatcccaaaggtgctgagggctgcagagcaggcacacctgtgggctgagctggtgttcctctatgacaagtacgaggagtatgacaatgctgtgctcaccatgatgagccaccccactgaggcctggaaggagggtcagttcaaggacatcattaccaaggttgccaacgtcgagctctgttacagagccctgcagttctatttggattacaaaccactgctcatcaatgacctgctgctggtgctttcaccccggctggaccacacctggacagtcagtttcttttcaaaggcaggtcagctgcccctggtgaagccttacctgcggtcagtccagagccacaacaacaagagtgtgaatgaggcactcaaccacctgctgacagaggaggaggactatcaggatgccatgcagcatgctgcagagtcgcgggatgctgagctggcccagaagttgctgcagtggttcctggaggaaggcaagagggagtgcttcgcagcttgtctcttcacctgctatgacctgcttcgcccagacatggtgcttgagctggcctggaggcacaacctcgtggacttggccatgccctacttcatccaggtgatgagggagtacctgagcaaggtggacaaactggatgccttggagagtctgcgcaagcaagaggagcatgtgacagagcctgcccctctcgtgtttgattttgatgggcatgaatgagacccagctgattgcactaagccctgccgtgggcccagcccctgccagcttcccctatggatatgcctctgctcccaacttcgccagcctccaatgtacaacttccgcgtgtagtgggcgttgtcaccacccaccctacctgcagagttactaacttctccaaggagcatgtcactccagcagcacaggggacgcaatgggaggcagggacacctggacaatatttatttttgctgaaacccaatgacggcaacctctgagccatcccagagcctggggaggccagggtagaggctgacggcgcaagaccagctttagccgacaacagagactggactgtgggccctcctgctggagccaggccttcctcctgggcgcctccgactggctggagctgccccctccaggccagtttgaagactacatgaacacgtcttgtttggaggtaccggacctcataaaaggactctcagcctcttggcaatcataaatattaaagtcggtttatccaggcaaaaaaaaactg

SEQ ID NO: 397968 - DNA, 664 bp, Homo sapiens
ctagatatctcaatatcgccactgtagtaattttaaagtgagtgacaggcccacaattcccagggatcttctggtgtttcaagttgattgtggcaccgacctctctgatgtccagaacaagcattctgtctcctggcaaagtcttttctaagggaggtggcctgagtgtggctctgcccctcccctcctcccttctgagctatggatctgcttagtgagcataatcaagacctcctagacgttatctggagtctgagttcccagtgagacataactggagggtaaatgtgtctggctgagaacagaatgggaggaattgagcccttgtttaaaattatcagctctgggttaacctatctttgttttctgtctttagacaactgggaggatctagttaaatttctgcagatggccaggaaaaagggccgtgagtcctatatagagactgaacttatttttgccttggctaaaaccagccgtgtttctgagctagaagattttattaatggacccaacaatgcccacatccagcaggtaggccatgcctcctgggggctgtgcactgccagtcagatttaggtccagggatgttcctcagagcagcagtcccgagctgttttggcaccagggactggtttcatcgaagacagttttaccacagaca

SEQ ID NO: 397969 - DNA, 5102 bp, Homo sapiens
attcctgccgctgccgccgccgccgccgaggtcccgcaccagccatggcgcagatcctccctgttcgctttcaggagcacttccagctccaaaaccttggaattaatccagctaacattggattcagcacactgaccatggaatctgacaagttcatatgtatccgagagaaagttggtgagcaggcacaggtcacgatcattgacatgagtgacccaatggctccgatccgacggcctatctctgcagagagtgccatcatgaatccagcctctaaggtgatagctctgaaagctgggaagacacttcagatctttaatattgagatgaagagtaaaatgaaggctcatactatggcagaagaagtgattttctggaaatgggtttctgtgaacactgttgccttggtgaccgagaccgcggtctaccactggagcatggaaggtgactcccagcccatgaagatgtttgatagacataccagtctggtgggctgccaggtgattcactaccggactgatgagtaccagaagtggctgctgctcgtaggcatctcggctcagcaaaaccgtgtggttggagcaatgcagctctactctgtggataggaaggtttcacaacccatagaaggccatgctgcggcttttgcagagttcaagatggaggggaatgccaagcctgccacccttttctgctttgctgtacgtaatcccacaggaggcaagttgcacatcattgaagttggacagcctgcagcgggaaaccaaccttttgtaaagaaagcagtagatgtgttttttcctccagaggcacagaatgattttccagtggctatgcagattggagctaaacatggtgttatttacttgatcacaaagtatggctatcttcatctgtacgacctagagtctggcgtgtgcatctgcatgaaccgtattagtgctgacacaatatttgtcactgctccacacaaaccaacctctggaattattggtgtcaacaaaaaaggacaggtactgtcagtttgtgttgaggaagataacattgtgaattatgcaaccaacgtgcttcagaatccagaccttggtctgcgtttggccgttcgtagtaacctggctggggcagagaagttgtttgtgagaaaattcaataccctctttgcacagggcagctatgctgaagccgccaaagttgcagcgtctgcaccaaagggaatcctgcgtaccagagagacggtccagaaattccagagtatacccgctcagtctggccaggcttctccattgctgcagtacttcggaatcctgctcgaccagggtcagctcaataaacttgaatccttagaactttgccatctggttcttcagcaggggcgtaagcaactcctagagaagtggctgaaagaagataagctggagtgctcagaggagctcggagacttggtcaaaaccactgaccccatgctcgctctgagtgtgtaccttcgggcaaatgtgccaagcaaagtgatccagtgttttgcagaaacaggccaattccagaaaattgtgctctatgccaaaaaggttgggtacaccccagactggatctttctgctgaggggtgtaatgaagatcagtccggaacagggcctgcagttttctcgaatgctagtgcaggacgaggagccgctggccaacattagccagattgtggacattttcatggaaaacagtttaattcagcagtgtacttccttcttattggatgccttgaagaataatcgcccagctgagggactcctgcagacatggctgttggagatgaaccttgttcatgcaccccaggttgcagatgccatccttggaaataaaatgtttactcattacgaccgggcccacattgcccagctctgtgagaaggcaggcctcctgcagcaagcactggagcactacaccgacctctatgacatcaagagggctgtggtccacactcacctcctcaatcccgagtggcttgtcaatttctttggctccttatcggtggaggattctgtggagtgtctgcatgccatgctgtctgctaacatcagacagaaccttcagctgtgtgtgcaggtggcctctaagtaccacaagcagctgggcacgcaggccctggtggagctctttgaatccttcaagagttacaaaggcctcttctacttcctgggctcaatcgtgaacttcagccaagacccagatgtgcatctgaaatacattcaggctgcctgtaagacagggcagatcaaggaggtggagaggatatgccgagagagcagctgctacaacccagagcgtgtgaagaacttcctgaaggaggccaagctcacagaccagcttcccctcatcatcgtgtgtgatcgttttggctttgtccatgaccttgtcctatatttataccgcaacaacctgcagaggtacattgagatctacgtgcagaaggtcaaccctagccggaccccagctgtgattggagggctgcttgatgtggattgttctgaggaagtgattaaacacttaatcatggcagtgagaggacagttctctactgatgagttggtggctgaagtagaaaaaagaaataggctcaagctgctgcttccctggctggagtcccagattcaggaaggctgtgaggagcctgccactcacaatgcactggctaaaatctacatcgacagcaacaacagccccgagtgcttcctgagagagaatgcctactatgacagcagcgtggtgggccgctactgtgagaagcgagacccccatctggcctgtgttgcctatgagcgggggcagtgtgaccttgagctcatcaaggtgtgcaatgagaattctctgttcaaaagcgaggcccgctacctggtatgcagaaaggatccggagctctgggctcacgtccttgaggagaccaacccatccaggagacagctaattgaccaggtggtacagacagcattgtcagaaacacgggatcctgaagagatttcggtcactgtcaaagcctttatgacagccgacctgcctaatgaactgattgaactgctggagaagatagttctggataactctgtcttcagcgagcacaggaatctacagaatctgttgatcctgactgccatcaaggcagaccgcacacgggtcatggagtacatcagccgcctggacaactatgacgcactggacatcgcgagcatcgctgtcagcagcgcgctgtatgaggaggccttcaccgttttccacaagtttgatatgaatgcctcagcaatccaggtcctgatcgagcacattggaaacctggaccgggcatatgagtttgcggagagatgcaatgagcctgctgtgtggagtcagctggcccaagcccagctccagaaagatttggtgaaggaagccatcaactcctatatcagaggggacgacccttcctcttacctggaagttgttcagtcagccagcaggagcagttggagaccgctgttacgaggagggaatgtacgaggctgccaagctgctctatagcaatgtttctaactttgcccgcctggcttccaccttggttcacctcggtgtgctttgcctgcatggatggacaagagttccgcttcgcacagctgtgtggtcttcacatcgtcattcatgcagatgagctggaggagctgatgtgctattaccaggatcgtggctactttgaggagctgatcttgctgttggaagcggccctgggcctggagcgggcccacatgggcatgttcactgagctggccatcctctactccaaattcaagccacagaagatgctggagcatctggagcttttctggtcccgtgtcaacatcccaaaggtgctgagggctgcagagcaggcacacctgtgggctgagctggtgttcctctatgacaagtacgaggagtatgacaatgctgtgctcaccatgatgagccaccccactgaggcctggaaggagggtcagttcaaggacatcattaccaaggttgccaacgtcgagctctgttacagagccctgcagttctatttggattacaaaccactgctcatcaatgacctgctgctggtgctttcaccccggctggaccacacctggacagtcagtttcttttcaaaggcaggtcagctgcccctggtgaagccttacctgcggtcagtccagagccacaacaacaagagtgtgaatgaggcactcaaccacctgctgacagaggaggaggactatcaggatgccatgcagcatgctgcagagtcgcgggatgctgagctggcccagaagttgctgcagtggttcctggaggaaggcaagagggagtgcttcgcagcttgtctcttcacctgctatgacctgcttcgcccagacatggtgcttgagctggcctggaggcacaacctcgtggacttggccatgccctacttcatccaggtgatgagggagtacctgagcaaggtggacaaactggatgccttggagagtctgcgcaagcaagaggagcatgtgacagagcctgcccctctcgtgtttgattttgatgggcatgaatgagacccagctgattgcactaagccctgccgtgggcccagcccctgccagcttcccctatggatatgcctctgctcccaacttcgccagcctccaatgtacaacttccgcgtgtagtgggcgttgtcaccacccaccctacctgcagagttactaacttctccaaggagcatgtcactccagcagcacaggggacgcaatgggaggcagggacacctggacaatatttatttttgctgaaacccaatgacggcaacctctgagccatcccagagcctggggaggccagggtagaggctgacggcgcaagaccagctttagccgacaacagagactggactgtgggccctcctgctggagccaggccttcctcctgggcgcctccgactggctggagctgccccctccaggccagtttgaagactacatgaacacgtcttgtttggaggtaccggacctcataaaaggactctcagcctcttggcaatcataaatattaaagtcggtttatccaggcaaaaaaaaactg

SEQ ID NO: 397970 - DNA, 5627 bp, Homo sapiens
attcctgccgctgccgccgccgccgccgaggtcccgcaccagccatggcgcagatcctccctgttcgctttcaggagcacttccagctccaaaaccttggaattaatccagctaacattggattcagcacactgaccatggaatctgacaagttcatatgtatccgagagaaagttggtgagcaggcacaggtcacgatcattgacatgagtgacccaatggctccgatccgacggcctatctctgcagagagtgccatcatgaatccagcctctaaggtgatagctctgaaagctgggaagacacttcagatctttaatattgagatgaagagtaaaatgaaggctcatactatggcagaagaagtgattttctggaaatgggtttctgtgaacactgttgccttggtgaccgagaccgcggtctaccactggagcatggaaggtgactcccagcccatgaagatgtttgatagacataccagtctggtgggctgccaggtgattcactaccggactgatgagtaccagaagtggctgctgctcgtaggcatctcggctcagcaaaaccgtgtggttggagcaatgcagctctactctgtggataggaaggtttcacaacccatagaaggccatgctgcggcttttgcagagttcaagatggaggggaatgccaagcctgccacccttttctgctttgctgtacgtaatcccacaggaggcaagttgcacatcattgaagttggacagcctgcagcgggaaaccaaccttttgtaaagaaagcagtagatgtgttttttcctccagaggcacagaatgattttccagtggctatgcagattggagctaaacatggtgttatttacttgatcacaaagtatggctatcttcatctgtacgacctagagtctggcgtgtgcatctgcatgaaccgtattagtgctgacacaatatttgtcactgctccacacaaaccaacctctggaattattggtgtcaacaaaaaaggacaggtactgtcagtttgtgttgaggaagataacattgtgaattatgcaaccaacgtgcttcagaatccagaccttggtctgcgtttggccgttcgtagtaacctggctggggcagagaagttgtttgtgagaaaattcaataccctctttgcacagggcagctatgctgaagccgccaaagttgcagcgtctgcaccaaagggaatcctgcgtaccagagagacggtccagaaattccagagtatacccgctcagtctggccaggcttctccattgctgcagtacttcggaatcctgctcgaccagggtcagctcaataaacttgaatccttagaactttgccatctggttcttcagcaggggcgtaagcaactcctagagaagtggctgaaagaagataagctggagtgctcagaggagctcggagacttggtcaaaaccactgaccccatgctcgctctgagtgtgtaccttcgggcaaatgtgccaagcaaagtgatccagtgttttgcagaaacaggccaattccagaaaattgtgctctatgccaaaaaggttgggtacaccccagactggatctttctgctgaggggtgtaatgaagatcagtccggaacagggcctgcagttttctcgaatgctagtgcaggacgaggagccgctggccaacattagccagattgtggacattttcatggaaaacagtttaattcagcagtgtacttccttcttattggatgccttgaagaataatcgcccagctgagggactcctgcagacatggctgttggagatgaaccttgttcatgcaccccaggttgcagatgccatccttggaaataaaatgtttactcattacgaccgggcccacattgcccagctctgtgagaaggcaggcctcctgcagcaagcactggagcactacaccgacctctatgacatcaagagggctgtggtccacactcacctcctcaatcccgagtggcttgtcaatttctttggctccttatcggtggaggattctgtggagtgtctgcatgccatgctgtctgctaacatcagacagaaccttcagctgtgtgtgcaggtggcctctaagtaccacaagcagctgggcacgcaggccctggtggagctctttgaatccttcaagagttacaaaggcctcttctacttcctgggctcaatcgtgaacttcagccaagacccagatgtgcatctgaaatacattcaggctgcctgtaagacagggcagatcaaggaggtggagaggatatgccgagagagcagctgctacaacccagagcgtgtgaagaacttcctgaaggaggccaagctcacagaccagcttcccctcatcatcgtgtgtgatcgttttggctttgtccatgaccttgtcctatatttataccgcaacaacctgcagaggtacattgagatctacgtgcagaaggtcaaccctagccggaccccagctgtgattggagggctgcttgatgtggattgttctgaggaagtgattaaacacttaatcatggcagtgagaggacagttctctactgatgagttggtggctgaagtagaaaaaagaaataggctcaagctgctgcttccctggctggagtcccagattcaggaaggctgtgaggagcctgccactcacaatgcactggctaaaatctacatcgacagcaacaacagccccgagtgcttcctgagagagaatgcctactatgacagcagcgtggtgggccgctactgtgagaagcgagacccccatctggcctgtgttgcctatgagcgggggcagtgtgaccttgagctcatcaaggtgtgcaatgagaattctctgttcaaaagcgaggcccgctacctggtatgcagaaaggatccggagctctgggctcacgtccttgaggagaccaacccatccaggagacagctaattgaccaggtggtacagacagcattgtcagaaacacgggatcctgaagagatttcggtcactgtcaaagcctttatgacagccgacctgcctaatgaactgattgaactgctggagaagatagttctggataactctgtcttcagcgagcacaggaatctacagaatctgttgatcctgactgccatcaaggcagaccgcacacgggtcatggagtacatcagccgcctggacaactatgacgcactggacatcgcgagcatcgctgtcagcagcgcgctgtatgaggaggccttcaccgttttccacaagtttgatatgaatgcctcagcaatccaggtcctgatcgagcacattggaaacctggaccgggcatatgagtttgcggagagatgcaatgagcctgctgtgtggagtcagctggcccaagcccagctccagaaagatttggtgaaggaagccatcaactcctatatcagaggggacgacccttcctcttacctggaagttgttcagtcagccagcaggagcaacaactgggaggatctagttaaatttctgcagatggccaggaaaaagggccgtgagtcctatatagagactgaacttatttttgccttggctaaaaccagccgtgtttctgagctagaagattttattaatggacccaacaatgcccacatccagcaggttggagaccgctgttacgaggagggaatgtacgaggctgccaagctgctctatagcaatgtttctaactttgcccgcctggcttccaccttggttcacctcggtgagtatcaggcagcagtggacaacagccgcaaggccagcagcacccggacgtggaaggaggtgtgctttgcctgcatggatggacaagagttccgcttcgcacagctgtgtggtcttcacatcgtcattcatgcagatgagctggaggagctgatgtgctattaccaggatcgtggctactttgaggagctgatcttgctgttggaagcggccctgggcctggagcgggcccacatgggcatgttcactgagctggccatcctctactccaaattcaagccacagaagatgctggagcatctggagcttttctggtcccgtgtcaacatcccaaaggtgctgagggctgcagagcaggcacacctgtgggctgagctggtgttcctctatgacaagtacgaggagtatgacaatgctgtgctcaccatgatgagccaccccactgaggcctggaaggagggtcagttcaaggacatcattaccaaggttgccaacgtcgagctctgttacagagccctgcagttctatttggattacaaaccactgctcatcaatgacctgctgctggtgctttcaccccggctggaccacacctggacagtcagtttcttttcaaaggtgtccagaaggtgcccttggctccagagctggaccattcaagtggatggcacgcacgtgcccacctgtgcccctgcctagtgtccccataacaagcttggccaagtgccttgacggttccctcaacttgtcaggcaggtcagctgcccctggtgaagccttacctgcggtcagtccagagccacaacaacaagagtgtgaatgaggcactcaaccacctgctgacagaggaggaggactatcagggcttaagggcatctatcgatgcctatgacaactttgacaacatcagcctggctcagcagctggagaagcatcagctgatggagttcaggtgcattgcggcctatctgtacaagggcaataactggtgggcccagagcgtggagctctgcaagaaggatcatctctacaaggatgccatgcagcatgctgcagagtcgcgggatgctgagctggcccagaagttgctgcagtggttcctggaggaaggcaagagggagtgcttcgcagcttgtctcttcacctgctatgacctgcttcgcccagacatggtgcttgagctggcctggaggcacaacctcgtggacttggccatgccctacttcatccaggtgatgagggagtacctgagcaaggtggacaaactggatgccttggagagtctgcgcaagcaagaggagcatgtgacagagcctgcccctctcgtgtttgattttgatgggcatgaatgagacccagctgattgcactaagccctgccgtgggcccagcccctgccagcttcccctatggatatgcctctgctcccaacttcgccagcctccaatgtacaacttccgcgtgtagtgggcgttgtcaccacccaccctacctgcagagttactaacttctccaaggagcatgtcactccagcagcacaggggacgcaatgggaggcagggacacctggacaatatttatttttgctgaaacccaatgacggcaacctctgagccatcccagagcctggggaggccagggtagaggctgacggcgcaagaccagctttagccgacaacagagactggactgtgggccctcctgctggagccaggccttcctcctgggcgcctccgactggctggagctgccccctccaggccagtttgaagactacatgaacacgtcttgtttggaggtaccggacctcataaaaggactctcagcctcttggcaatcataaatattaaagtcggtttatccaggcaaaaaaaaactg

SEQ ID NO: 397971 - DNA, 1238 bp, Homo sapiens
actcactttattgcaatgttcactttattgtggtggtctggacccaaacccatgtgtctctctaaggtgtgaatgtctgtggtgacattggcatccactgaatcgcccagacagtcctctttgtgtgagtgtaggtcttttggttctaggtgtccagaaggtgcccttggctccagagctggaccattcaagtggatggcacgcacgtgcccacctgtgcccctgcctagtgtccccataacaagcttggccaagtgccttgacggttccctcaacttgtcaggcaggtcagctgcccctggtgaagccttacctgcggtcagtccagagccacaacaacaagagtgtgaatgaggcactcaaccacctgctgacagaggaggaggactatcaggatgccatgcagcatgctgcagagtcgcgggatgctgagctggcccagaagttgctgcagtggttcctggaggaaggcaagagggagtgcttcgcagcttgtctcttcacctgctatgacctgcttcgcccagacatggtgcttgagctggcctggaggcacaacctcgtggacttggccatgccctacttcatccaggtgatgagggagtacctgagcaaggtggacaaactggatgccttggagagtctgcgcaagcaagaggagcatgtgacagagcctgcccctctcgtgtttgattttgatgggcatgaatgagacccagctgattgcactaagccctgccgtgggcccagcccctgccagcttcccctatggatatgcctctgctcccaacttcgccagcctccaatgtacaacttccgcgtgtagtgggcgttgtcaccacccaccctacctgcagagttactaacttctccaaggagcatgtcactccagcagcacaggggacgcaatgggaggcagggacacctggacaatatttatttttgctgaaacccaatgacggcaacctctgagccatcccagagcctggggaggccagggtagaggctgacggcgcaagaccagctttagccgacaacagagactggactgtgggccctcctgctggagccaggccttcctcctgggcgcctccgactggctggagctgccccctccaggccagtttgaagactacatgaacacgtcttgtttggaggtaccggacctcataaaaggactctcagcctcttggcaatcataaatattaaagtcggtttatccaggcaaaaaaaaactg

SEQ ID NO: 397972 - DNA, 5610 bp, Homo sapiens
attcctgccgctgccgccgccgccgccgaggtcccgcaccagccatggcgcagatcctccctgttcgctttcaggagcacttccagctccaaaaccttggaattaatccagctaacattggattcagcacactgaccatggaatctgacaagttcatatgtatccgagagaaagttggtgagcaggcacaggtcacgatcattgacatgagtgacccaatggctccgatccgacggcctatctctgcagagagtgccatcatgaatccagcctctaaggtgatagctctgaaagctgggaagacacttcagatctttaatattgagatgaagagtaaaatgaaggctcatactatggcagaagaagtgattttctggaaatgggtttctgtgaacactgttgccttggtgaccgagaccgcggtctaccactggagcatggaaggtgactcccagcccatgaagatgtttgatagacataccagtctggtgggctgccaggtgattcactaccggactgatgagtaccagaagtggctgctgctcgtaggcatctcggctcagcaaaaccgtgtggttggagcaatgcagctctactctgtggataggaaggtttcacaacccatagaaggccatgctgcggcttttgcagagttcaagatggaggggaatgccaagcctgccacccttttctgctttgctgtacgtaatcccacaggaggcaagttgcacatcattgaagttggacagcctgcagcgggaaaccaaccttttgtaaagaaagcagtagatgtgttttttcctccagaggcacagaatgattttccagtggctatgcagattggagctaaacatggtgttatttacttgatcacaaagtatggctatcttcatctgtacgacctagagtctggcgtgtgcatctgcatgaaccgtattagtgctgacacaatatttgtcactgctccacacaaaccaacctctggaattattggtgtcaacaaaaaaggacaggtactgtcagtttgtgttgaggaagataacattgtgaattatgcaaccaacgtgcttcagaatccagaccttggtctgcgtttggccgttcgtagtaacctggctggggcagagaagttgtttgtgagaaaattcaataccctctttgcacagggcagctatgctgaagccgccaaagttgcagcgtctgcaccaaagggaatcctgcgtaccagagagacggtccagaaattccagagtatacccgctcagtctggccaggcttctccattgctgcagtacttcggaatcctgctcgaccagggtcagctcaataaacttgaatccttagaactttgccatctggttcttcagcaggggcgtaagcaactcctagagaagtggctgaaagaagataagctggagtgctcagaggagctcggagacttggtcaaaaccactgaccccatgctcgctctgagtgtgtaccttcgggcaaatgtgccaagcaaagtgatccagtgttttgcagaaacaggccaattccagaaaattgtgctctatgccaaaaaggttgggtacaccccagactggatctttctgctgaggggtgtaatgaagatcagtccggaacagggcctgcagttttctcgaatgctagtgcaggacgaggagccgctggccaacattagccagattgtggacattttcatggaaaacagtttaattcagcagtgtacttccttcttattggatgccttgaagaataatcgcccagctgagggactcctgcagacatggctgttggagatgaaccttgttcatgcaccccaggttgcagatgccatccttggaaataaaatgtttactcattacgaccgggcccacattgcccagctctgtgagaaggcaggcctcctgcagcaagcactggagcactacaccgacctctatgacatcaagagggctgtggtccacactcacctcctcaatcccgagtggcttgtcaatttctttggctccttatcggtggaggattctgtggagtgtctgcatgccatgctgtctgctaacatcagacagaaccttcagctgtgtgtgcaggtggcctctaagtaccacaagcagctgggcacgcaggccctggtggagctctttgaatccttcaagagttacaaaggcctcttctacttcctgggctcaatcgtgaacttcagccaagacccagatgtgcatctgaaatacattcaggctgcctgtaagacagggcagatcaaggaggtggagaggatatgccgagagagcagctgctacaacccagagcgtgtgaagaacttcctgaaggaggccaagctcacagaccagcttcccctcatcatcgtgtgtgatcgttttggctttgtccatgaccttgtcctatatttataccgcaacaacctgcagaggtacattgagatctacgtgcagaaggtcaaccctagccggaccccagctgtgattggagggctgcttgatgtggattgttctgaggaagtgattaaacacttaatcatggcagtgagaggacagttctctactgatgagttggtggctgaagtagaaaaaagaaataggctcaagctgctgcttccctggctggagtcccagattcaggaaggctgtgaggagcctgccactcacaatgcactggctaaaatctacatcgacagcaacaacagccccgagtgcttcctgagagagaatgcctactatgacagcagcgtggtgggccgctactgtgagaagcgagacccccatctggcctgtgttgcctatgagcgggggcagtgtgaccttgagctcatcaaggtgtgcaatgagaattctctgttcaaaagcgaggcccgctacctggtatgcagaaaggatccggagctctgggctcacgtccttgaggagaccaacccatccaggagacagctaattgaccaggtggtacagacagcattgtcagaaacacgggatcctgaagagatttcggtcactgtcaaagcctttatgacagccgacctgcctaatgaactgattgaactgctggagaagatagttctggataactctgtcttcagcgagcacaggaatctacagaatctgttgatcctgactgccatcaaggcagaccgcacacgggtcatggagtacatcagccgcctggacaactatgacgcactggacatcgcgagcatcgctgtcagcagcgcgctgtatgaggaggccttcaccgttttccacaagtttgatatgaatgcctcagcaatccaggtcctgatcgagcacattggaaacctggaccgggcatatgagtttgcggagagatgcaatgagcctgctgtgtggagtcagctggcccaagcccagctccagaaagatttggtgaaggaagccatcaactcctatatcagaggggacgacccttcctcttacctggaagttgttcagtcagccagcaggagcaacaactgggaggatctagttaaatttctgcagatggccaggaaaaagggccgtgagtcctatatagagactgaacttatttttgccttggctaaaaccagccgtgtttctgagctagaagattttattaatggacccaacaatgcccacatccagcaggttggagaccgctgttacgaggagggaatgtacgaggctgccaagctgctctatagcaatgtttctaactttgcccgcctggcttccaccttggttcacctcggtgagtatcaggcagcagtggacaacagccgcaaggccagcagcacccggacgtggaaggaggtgtgctttgcctgcatggatggacaagagttccgcttcgcacagctgtgtggtcttcacatcgtcattcatgcagatgagctggaggagctgatgtgctattaccaggatcgtggctactttgaggagctgatcttgctgttggaagcggccctgggcctggagcgggcccacatgggcatgttcactgagctggccatcctctactccaaattcaagccacagaagatgctggagcatctggagcttttctggtcccgtgtcaacatcccaaaggtgctgagggctgcagagcaggcacacctgtgggctgagctggtgttcctctatgacaagtacgaggagtatgacaatgctgtgctcaccatgatgagccaccccactgaggcctggaaggagggtcagttcaaggacatcattaccaaggttgccaacgtcgagctctgttacagagccctgcagttctatttggattacaaaccactgctcatcaatgacctgctgctggtgctttcaccccggctggaccacacctggacagtcagtttcttttcaaaggcaggtcagctgcccctggtgaagccttacctgcggtcagtccagagccacaacaacaagagtgtgaatgaggcactcaaccacctgctgacagaggaggaggactatcagggcttaagggcatctatcgatgcctatgacaactttgacaacatcagcctggctcagcagctggagaagcatcagctgatggagttcaggtgcattgcggcctatctgtacaagggcaataactggtgggcccagagcgtggagctctgcaagaaggatcatctctacaaggaacagtgtgggtcaggaggcagcgatcgatgagcagcatgccagcgggggagacttctttccggagccagctcagcacatcgggtccatgcagatgtgggcactgggcgtcctcaggggtctcccaaacggaactcagaggatgccatgcagcatgctgcagagtcgcgggatgctgagctggcccagaagttgctgcagtggttcctggaggaaggcaagagggagtgcttcgcagcttgtctcttcacctgctatgacctgcttcgcccagacatggtgcttgagctggcctggaggcacaacctcgtggacttggccatgccctacttcatccaggtggacaaactggatgccttggagagtctgcgcaagcaagaggagcatgtgacagagcctgcccctctcgtgtttgattttgatgggcatgaatgagacccagctgattgcactaagccctgccgtgggcccagcccctgccagcttcccctatggatatgcctctgctcccaacttcgccagcctccaatgtacaacttccgcgtgtagtgggcgttgtcaccacccaccctacctgcagagttactaacttctccaaggagcatgtcactccagcagcacaggggacgcaatgggaggcagggacacctggacaatatttatttttgctgaaacccaatgacggcaacctctgagccatcccagagcctggggaggccagggtagaggctgacggcgcaagaccagctttagccgacaacagagactggactgtgggccctcctgctggagccaggccttcctcctgggcgcctccgactggctggagctgccccctccaggccagtttgaagactacatgaacacgtcttgtttggaggtaccggacctcataaaaggactctcagcctcttggcaatcataaatattaaagtcggtttatccaggcaaaaaaaaactg

SEQ ID NO: 397973 - DNA, 3668 bp, Homo sapiens
attcctgccgctgccgccgccgccgccgaggtcccgcaccagccatggcgcagatcctccctgttcgctttcaggagcacttccagctccaaaaccttggaattaatccagctaacattggattcagcacactgaccatggaatctgacaagttcatatgtatccgagagaaagttggtgagcaggcacaggtcacgatcattgacatgagtgacccaatggctccgatccgacggcctatctctgcagagagtgccatcatgaatccagcctctaaggtgatagctctgaaagctgggaagacacttcagatctttaatattgagatgaagagtaaaatgaaggctcatactatggcagaagaagtgattttctggaaatgggtttctgtgaacactgttgccttggtgaccgagaccgcggtctaccactggagcatggaaggtgactcccagcccatgaagatgtttgatagacataccagtctggtgggctgccaggtgattcactaccggactgatgagtaccagaagtggctgctgctcgtaggcatctcggctcagcaaaaccgtgtggttggagcaatgcagctctactctgtggataggaaggtttcacaacccatagaaggccatgctgcggcttttgcagagttcaagatggaggggaatgccaagcctgccacccttttctgctttgctgtacgtaatcccacaggaggcaagttgcacatcattgaagttggacagcctgcagcgggaaaccaaccttttgtaaagaaagcagtagatgtgttttttcctccagaggcacagaatgattttccagtggctatgcagattggagctaaacatggtgttatttacttgatcacaaagtatggctatcttcatctgtacgacctagagtctggcgtgtgcatctgcatgaaccgtattagtgctgacacaatatttgtcactgctccacacaaaccaacctctggaattattggtgtcaacaaaaaaggacaggtactgtcagtttgtgttgaggaagataacattgtgaattatgcaaccaacgtgcttcagaatccagaccttggtctgcgtttggccgttcgtagtaacctggctggggcagagaagttgtttgtgagaaaattcaataccctctttgcacagggcagctatgctgaagccgccaaagttgcagcgtctgcaccaaagggaatcctgcgtaccagagagacggtccagaaattccagagtatacccgctcagtctggccaggcttctccattgctgcagtacttcggaatcctgctcgaccagggtcagctcaataaacttgaatccttagaactttgccatctggttcttcagcaggggcgtaagcaactcctagagaagtggctgaaagaagataagctggagtgctcagaggagctcggagacttggtcaaaaccactgaccccatgctcgctctgagtgtgtaccttcgggcaaatgtgccaagcaaagtgatccagtgttttgcagaaacaggccaattccagaaaattgtgctctatgccaaaaaggttgggtacaccccagactggatctttctgctgaggggtgtaatgaagatcagtccggaacagggcctgcagttttctcgaatgctagtgcaggacgaggagccgctggccaacattagccagattgtggacattttcatggaaaacagtttaattcagcagtgtacttccttcttattggatgccttgaagaataatcgcccagctgagggactcctgcagacatggctgttggagatgaaccttgttcatgcaccccaggttgcagatgccatccttggaaataaaatgtttactcattacgaccgggcccacattgcccagctctgtgagaaggcaggcctcctgcagcaagcactggagcactacaccgacctctatgacatcaagagggctgtggtccacactcacctcctcaatcccgagtggcttgtcaatttctttggctccttatcggtggaggattctgtggagtgtctgcatgccatgctgtctgctaacatcagacagaaccttcagctgtgtgtgcaggtggcctctaagtaccacaagcagctgggcacgcaggccctggtggagctctttgaatccttcaagagttacaaaggcctcttctacttcctgggctcaatcgtgaacttcagccaagacccagatgtgcatctgaaatacattcaggctgcctgtaagacagggcagatcaaggaggtggagaggatatgccgagagagcagctgctacaacccagagcgtgtgaagaacttcctgaaggaggccaagctcacagaccagcttcccctcatcatcgtgtgtgatcgttttggctttgtccatgaccttgtcctatatttataccgcaacaacctgcagaggtacattgagatctacgtgcagaaggtcaaccctagccggaccccagctgtgattggagggctgcttgatgtggattgttctgaggaagtgattaaacacttaatcatggcagtgagaggacagttctctactgatgagttggtggctgaagtagaaaaaagaaataggctcaagctgctgcttccctggctggagtcccagattcaggaaggctgtgaggagcctgccactcacaatgcactggctaaaatctacatcgacagcaacaacagccccgagtgcttcctgagagagaatgcctactatgacagcagcgtggtgggccgctactgtgagaagcgagacccccatctggcctgtgttgcctatgagcgggggcagtgtgaccttgagctcatcaaggtgtgcaatgagaattctctgttcaaaagcgaggcccgctacctggtatgcagaaaggatccggagctctgggctcacgtccttgaggagaccaacccatccaggagacagctaattgaccaggtggtacagacagcattgtcagaaacacgggatcctgaagagatttcggtcactgtcaaagcctttatgacagccgacctgcctaatgaactgattgaactgctggagaagatagttctggataactctgtcttcagcgagcacaggaatctacagaatctgttgatcctgactgccatcaaggcagaccgcacacgggtcatggagtacatcagccgcctggacaactatgacgcactggacatcgcgagcatcgctgtcagcagcgcgctgtatgaggaggccttcaccgttttccacaagtttgatatgaatgcctcagcaatccaggtcctgatcgagcacattggaaacctggaccgggcatatgagtttgcggagagatgcaatgagcctgctgtgtggagtcagctggcccaagcccagctccagaaagatttggtgaaggaagccatcaactcctatatcagaggggacgacccttcctcttacctggaagttgttcagtcagccagcaggagcagtaagtgagtcccctctccctagggctctgcatctcactgatgcaaaacctggctgaagcaagaagttgaagagattctcacaaatctctacgtatgatgtatccagagatatcagagggcacatctacatgaaagtttcccacaagagtctgagataaacattattctgttattgacacca

SEQ ID NO: 397974 - DNA, 459 bp, Homo sapiens
ctgggctccaggccgcaggagcgggacactgactgggagcttcctgggggctgcttctactggaagtcctctgggaaggcagtgagacagtccccaaggcccacagaggaggaacagagcagggcccactttaggcacatgtggaagacaagtcagcaagggtaggctgggccggtggagggcacggcagggagacagatgagcgggcgtcacaggtcctcaaagcggagacccaaaggcacctggagctctcacctgagggtcagaatcctggtgcctttgtaggaacagtgtgggtcaggaggcagcgatcgatgagcagcatgccagcgggggagacttctttccggagccagctcagcacatcgggtccatgcagatgtgggcactgggcgtcctcaggggtctcccaaacggaactcagaggtgtgtgctgcaggcgatggcaggcatgcagag

SEQ ID NO: 397975 - DNA, 314 bp, Homo sapiens
ttgctgcagtacttcggaatcctgctcgaccagggtcagctcaataaacttgaatccttagaactttgccatctggttcttcagcaggggcgtaagcaactcctagagaagtggctgaaagaagataaggtagaaacacttgtgagctcgtagcccccccgcacagcttgaaaacttggtccaggctccctacctgcctcctaactttgccttgtcccttggcataccacagctggagtgctcagaggagctcggagacttggtcaaaaccactgaccccatgctcgctctgagtgtgtaccttcgggcaaatg

SEQ ID NO: 397976 - DNA, 5372 bp, Homo sapiens
attcctgccgctgccgccgccgccgccgaggtcccgcaccagccatggcgcagatcctccctgttcgctttcaggagcacttccagctccaaaaccttggaattaatccagctaacattggattcagcacactgaccatggaatctgacaagttcatatgtatccgagagaaagttggtgagcaggcacaggtcacgatcattgacatgagtgacccaatggctccgatccgacggcctatctctgcagagagtgccatcatgaatccagcctctaaggtgatagctctgaaagctgggaagacacttcagatctttaatattgagatgaagagtaaaatgaaggctcatactatggcagaagaagtgattttctggaaatgggtttctgtgaacactgttgccttggtgaccgagaccgcggtctaccactggagcatggaaggtgactcccagcccatgaagatgtttgatagacataccagtctggtgggctgccaggtgattcactaccggactgatgagtaccagaagtggctgctgctcgtaggcatctcggctcagcaaaaccgtgtggttggagcaatgcagctctactctgtggataggaaggtttcacaacccatagaaggccatgctgcggcttttgcagagttcaagatggaggggaatgccaagcctgccacccttttctgctttgctgtacgtaatcccacaggaggcaagttgcacatcattgaagttggacagcctgcagcgggaaaccaaccttttgtaaagaaagcagtagatgtgttttttcctccagaggcacagaatgattttccagtggctatgcagattggagctaaacatggtgttatttacttgatcacaaagtatggctatcttcatctgtacgacctagagtctggcgtgtgcatctgcatgaaccgtattagtgctgacacaatatttgtcactgctccacacaaaccaacctctggaattattggtgtcaacaaaaaaggacaggtactgtcagtttgtgttgaggaagataacattgtgaattatgcaaccaacgtgcttcagaatccagaccttggtctgcgtttggccgttcgtagtaacctggctggggcagagaagttgtttgtgagaaaattcaataccctctttgcacagggcagctatgctgaagccgccaaagttgcagcgtctgcaccaaagggaatcctgcgtaccagagagacggtccagaaattccagagtatacccgctcagtctggccaggcttctccattgctgcagtacttcggaatcctgctcgaccagggtcagctcaataaacttgaatccttagaactttgccatctggttcttcagcaggggcgtaagcaactcctagagaagtggctgaaagaagataagctggagtgctcagaggagctcggagacttggtcaaaaccactgaccccatgctcgctctgagtgtgtaccttcgggcaaatgtgccaagcaaagtgatccagtgttttgcagaaacaggccaattccagaaaattgtgctctatgccaaaaaggttgggtacaccccagactggatctttctgctgaggggtgtaatgaagatcagtccggaacagggcctgcagttttctcgaatgctagtgcaggacgaggagccgctggccaacattagccagattgtggacattttcatggaaaacagtttaattcagcagtgtacttccttcttattggatgccttgaagaataatcgcccagctgagggactcctgcagacatggctgttggagatgaaccttgttcatgcaccccaggttgcagatgccatccttggaaataaaatgtttactcattacgaccgggcccacattgcccagctctgtgagaaggcaggcctcctgcagcaagcactggagcactacaccgacctctatgacatcaagagggctgtggtccacactcacctcctcaatcccgagtggcttgtcaatttctttggctccttatcggtggaggattctgtggagtgtctgcatgccatgctgtctgctaacatcagacagaaccttcagctgtgtgtgcaggtggcctctaagtaccacaagcagctgggcacgcaggccctggtggagctctttgaatccttcaagagttacaaaggcctcttctacttcctgggctcaatcgtgaacttcagccaagacccagatgtgcatctgaaatacattcaggctgcctgtaagacagggcagatcaaggaggtggagaggatatgccgagagagcagctgctacaacccagagcgtgtgaagaacttcctgaaggaggccaagctcacagaccagcttcccctcatcatcgtgtgtgatcgttttggctttgtccatgaccttgtcctatatttataccgcaacaacctgcagaggtacattgagatctacgtgcagaaggtcaaccctagccggaccccagctgtgattggagggctgcttgatgtggattgttctgaggaagtgattaaacacttaatcatggcagtgagaggacagttctctactgatgagttggtggctgaagtagaaaaaagaaataggctcaagctgctgcttccctggctggagtcccagattcaggaaggctgtgaggagcctgccactcacaatgcactggctaaaatctacatcgacagcaacaacagccccgagtgcttcctgagagagaatgcctactatgacagcagcgtggtgggccgctactgtgagaagcgagacccccatctggcctgtgttgcctatgagcgggggcagtgtgaccttgagctcatcaaggtgtgcaatgagaattctctgttcaaaagcgaggcccgctacctggtatgcagaaaggatccggagctctgggctcacgtccttgaggagaccaacccatccaggagacagctaattgaccaggtggtacagacagcattgtcagaaacacgggatcctgaagagatttcggtcactgtcaaagcctttatgacagccgacctgcctaatgaactgattgaactgctggagaagatagttctggataactctgtcttcagcgagcacaggaatctacagaatctgttgatcctgactgccatcaaggcagaccgcacacgggtcatggagtacatcagccgcctggacaactatgacgcactggacatcgcgagcatcgctgtcagcagcgcgctgtatgaggaggccttcaccgttttccacaagtttgatatgaatgcctcagcaatccaggtcctgatcgagcacattggaaacctggaccgggcatatgagtttgcggagagatgcaatgagcctgctgtgtggagtcagctggcccaagcccagctccagaaagatttggtgaaggaagccatcaactcctatatcagaggggacgacccttcctcttacctggaagttgttcagtcagccagcaggagcaacaactgggaggatctagttaaatttctgcagatggccaggaaaaagggccgtgagtcctatatagagactgaacttatttttgccttggctaaaaccagccgtgtttctgagctagaagattttattaatggacccaacaatgcccacatccagcaggttggagaccgctgttacgaggagggaatgtacgaggctgccaagctgctctatagcaatgtttctaactttgcccgcctggcttccaccttggttcacctcggtgagtatcaggcagcagtggacaacagccgcaaggccagcagcacccggacgtggaaggaggtgtgctttgcctgcatggatggacaagagttccgcttcgcacagctgtgtggtcttcacatcgtcattcatgcagatgagctggaggagctgatgtgctattaccaggatcgtggctactttgaggagctgatcttgctgttggaagcggccctgggcctggagcgggcccacatgggcatgttcactgagctggccatcctctactccaaattcaagccacagaagatgctggagcatctggagcttttctggtcccgtgtcaacatcccaaaggtgctgagggctgcagagcaggcacacctgtgggctgagctggtgttcctctatgacaagtacgaggagtatgacaatgctgtgctcaccatgatgagccaccccactgaggcctggaaggagggtcagttcaaggacatcattaccaaggttgccaacgtcgagctctgttacagagccctgcagttctatttggattacaaaccactgctcatcaatgacctgctgctggtgctttcaccccggctggaccacacctggacagtcagtttcttttcaaaggcaggtcagctgcccctggtgaagccttacctgcggtcagtccagagccacaacaacaagagtgtgaatgaggcactcaaccacctgctgacagaggaggaggactatcagggcttaagggcatctatcgatgcctatgacaactttgacaacatcagcctgatgccatgcagcatgctgcagagtcgcgggatgctgagctggcccagaagttgctgcagtggttcctggaggaaggcaagagggagtgcttcgcagcttgtctcttcacctgctatgacctgcttcgcccagacatggtgcttgagctggcctggaggcacaacctcgtggacttggccatgccctacttcatccaggtgatgagggagtacctgagcaaggtggacaaactggatgccttggagagtctgcgcaagcaagaggagcatgtgacagagcctgcccctctcgtgtttgattttgatgggcatgaatgagacccagctgattgcactaagccctgccgtgggcccagcccctgccagcttcccctatggatatgcctctgctcccaacttcgccagcctccaatgtacaacttccgcgtgtagtgggcgttgtcaccacccaccctacctgcagagttactaacttctccaaggagcatgtcactccagcagcacaggggacgcaatgggaggcagggacacctggacaatatttatttttgctgaaacccaatgacggcaacctctgagccatcccagagcctggggaggccagggtagaggctgacggcgcaagaccagctttagccgacaacagagactggactgtgggccctcctgctggagccaggccttcctcctgggcgcctccgactggctggagctgccccctccaggccagtttgaagactacatgaacacgtcttgtttggaggtaccggacctcataaaaggactctcagcctcttggcaatcataaatattaaagtcggtttatccaggcaaaaaaaaactg

SEQ ID NO: 397977 - DNA, 2212 bp, Homo sapiens
ctagatatctcaatatcgccactgtagtaattttaaagtgagtgacaggcccacaattcccagggatcttctggtgtttcaagttgattgtggcaccgacctctctgatgtccagaacaagcattctgtctcctggcaaagtcttttctaagggaggtggcctgagtgtggctctgcccctcccctcctcccttctgagctatggatctgcttagtgagcataatcaagacctcctagacgttatctggagtctgagttcccagtgagacataactggagggtaaatgtgtctggctgagaacagaatgggaggaattgagcccttgtttaaaattatcagctctgggttaacctatctttgttttctgtctttagacaactgggaggatctagttaaatttctgcagatggccaggaaaaagggccgtgagtcctatatagagactgaacttatttttgccttggctaaaaccagccgtgtttctgagctagaagattttattaatggacccaacaatgcccacatccagcaggttggagaccgctgttacgaggagggaatgtacgaggctgccaagctgctctatagcaatgtttctaactttgcccgcctggcttccaccttggttcacctcggtgagtatcaggcagcagtggacaacagccgcaaggccagcagcacccggacgtggaaggaggtgtgctttgcctgcatggatggacaagagttccgcttcgcacagctgtgtggtcttcacatcgtcattcatgcagatgagctggaggagctgatgtgctattaccaggatcgtggctactttgaggagctgatcttgctgttggaagcggccctgggcctggagcgggcccacatgggcatgttcactgagctggccatcctctactccaaattcaagccacagaagatgctggagcatctggagcttttctggtcccgtgtcaacatcccaaaggtgctgagggctgcagagcaggcacacctgtgggctgagctggtgttcctctatgacaagtacgaggagtatgacaatgctgtgctcaccatgatgagccaccccactgaggcctggaaggagggtcagttcaaggacatcattaccaaggttgccaacgtcgagctctgttacagagccctgcagttctatttggattacaaaccactgctcatcaatgacctgctgctggtgctttcaccccggctggaccacacctggacagtcagtttcttttcaaaggcaggtcagctgcccctggtgaagccttacctgcggtcagtccagagccacaacaacaagagtgtgaatgaggcactcaaccacctgctgacagaggaggaggactatcaggatgccatgcagcatgctgcagagtcgcgggatgctgagctggcccagaagttgctgcagtggttcctggaggaaggcaagagggagtgcttcgcagcttgtctcttcacctgctatgacctgcttcgcccagacatggtgcttgagctggcctggaggcacaacctcgtggacttggccatgccctacttcatccaggtgatgagggagtacctgagcaaggtggacaaactggatgccttggagagtctgcgcaagcaagaggagcatgtgacagagcctgcccctctcgtgtttgattttgatgggcatgaatgagacccagctgattgcactaagccctgccgtgggcccagcccctgccagcttcccctatggatatgcctctgctcccaacttcgccagcctccaatgtacaacttccgcgtgtagtgggcgttgtcaccacccaccctacctgcagagttactaacttctccaaggagcatgtcactccagcagcacaggggacgcaatgggaggcagggacacctggacaatatttatttttgctgaaacccaatgacggcaacctctgagccatcccagagcctggggaggccagggtagaggctgacggcgcaagaccagctttagccgacaacagagactggactgtgggccctcctgctggagccaggccttcctcctgggcgcctccgactggctggagctgccccctccaggccagtttgaagactacatgaacacgtcttgtttggaggtaccggacctcataaaaggactctcagcctcttggcaatcataaatattaaagtcggtttatccaggcaaaaaaaaactg

SEQ ID NO: 397978 - DNA, 5634 bp, Homo sapiens
attcctgccgctgccgccgccgccgccgaggtcccgcaccagccatggcgcagatcctccctgttcgctttcaggagcacttccagctccaaaaccttggaattaatccagctaacattggattcagcacactgaccatggaatctgacaagttcatatgtatccgagagaaagttggtgagcaggcacaggtcacgatcattgacatgagtgacccaatggctccgatccgacggcctatctctgcagagagtgccatcatgaatccagcctctaaggtgatagctctgaaagctgggaagacacttcagatctttaatattgagatgaagagtaaaatgaaggctcatactatggcagaagaagtgattttctggaaatgggtttctgtgaacactgttgccttggtgaccgagaccgcggtctaccactggagcatggaaggtgactcccagcccatgaagatgtttgatagacataccagtctggtgggctgccaggtgattcactaccggactgatgagtaccagaagtggctgctgctcgtaggcatctcggctcagcaaaaccgtgtggttggagcaatgcagctctactctgtggataggaaggtttcacaacccatagaaggccatgctgcggcttttgcagagttcaagatggaggggaatgccaagcctgccacccttttctgctttgctgtacgtaatcccacaggaggcaagttgcacatcattgaagttggacagcctgcagcgggaaaccaaccttttgtaaagaaagcagtagatgtgttttttcctccagaggcacagaatgattttccagtggctatgcagattggagctaaacatggtgttatttacttgatcacaaagtatggctatcttcatctgtacgacctagagtctggcgtgtgcatctgcatgaaccgtattagtgctgacacaatatttgtcactgctccacacaaaccaacctctggaattattggtgtcaacaaaaaaggacaggtactgtcagtttgtgttgaggaagataacattgtgaattatgcaaccaacgtgcttcagaatccagaccttggtctgcgtttggccgttcgtagtaacctggctggggcagagaagttgtttgtgagaaaattcaataccctctttgcacagggcagctatgctgaagccgccaaagttgcagcgtctgcaccaaagggaatcctgcgtaccagagagacggtccagaaattccagagtatacccgctcagtctggccaggcttctccattgctgcagtacttcggaatcctgctcgaccagggtcagctcaataaacttgaatccttagaactttgccatctggttcttcagcaggggcgtaagcaactcctagagaagtggctgaaagaagataagctggagtgctcagaggagctcggagacttggtcaaaaccactgaccccatgctcgctctgagtgtgtaccttcgggcaaatgtgccaagcaaagtgatccagtgttttgcagaaacaggccaattccagaaaattgtgctctatgccaaaaaggttgggtacaccccagactggatctttctgctgaggggtgtaatgaagatcagtccggaacagggcctgcagttttctcgaatgctagtgcaggacgaggagccgctggccaacattagccagattgtggacattttcatggaaaacagtttaattcagcagtgtacttccttcttattggatgccttgaagaataatcgcccagctgagggactcctgcagacatggctgttggagatgaaccttgttcatgcaccccaggttgcagatgccatccttggaaataaaatgtttactcattacgaccgggcccacattgcccagctctgtgagaaggcaggcctcctgcagcaagcactggagcactacaccgacctctatgacatcaagagggctgtggtccacactcacctcctcaatcccgagtggcttgtcaatttctttggctccttatcggtggaggattctgtggagtgtctgcatgccatgctgtctgctaacatcagacagaaccttcagctgtgtgtgcaggtggcctctaagtaccacaagcagctgggcacgcaggccctggtggagctctttgaatccttcaagagttacaaaggcctcttctacttcctgggctcaatcgtgaacttcagccaagacccagatgtgcatctgaaatacattcaggctgcctgtaagacagggcagatcaaggaggtggagaggatatgccgagagagcagctgctacaacccagagcgtgtgaagaacttcctgaaggaggccaagctcacagaccagcttcccctcatcatcgtgtgtgatcgttttggctttgtccatgaccttgtcctatatttataccgcaacaacctgcagaggtacattgagatctacgtgcagaaggtcaaccctagccggaccccagctgtgattggagggctgcttgatgtggattgttctgaggaagtgattaaacacttaatcatggcagtgagaggacagttctctactgatgagttggtggctgaagtagaaaaaagaaataggctcaagctgctgcttccctggctggagtcccagattcaggaaggctgtgaggagcctgccactcacaatgcactggctaaaatctacatcgacagcaacaacagccccgagtgcttcctgagagagaatgcctactatgacagcagcgtggtgggccgctactgtgagaagcgagacccccatctggcctgtgttgcctatgagcgggggcagtgtgaccttgagctcatcaaggtgtgcaatgagaattctctgttcaaaagcgaggcccgctacctggtatgcagaaaggatccggagctctgggctcacgtccttgaggagaccaacccatccaggagacagctaattgaccaggtggtacagacagcattgtcagaaacacgggatcctgaagagatttcggtcactgtcaaagcctttatgacagccgacctgcctaatgaactgattgaactgctggagaagatagttctggataactctgtcttcagcgagcacaggaatctacagaatctgttgatcctgactgccatcaaggcagaccgcacacgggtcatggagtacatcagccgcctggacaactatgacgcactggacatcgcgagcatcgctgtcagcagcgcgctgtatgaggaggccttcaccgttttccacaagtttgatatgaatgcctcagcaatccaggtcctgatcgagcacattggaaacctggaccgggcatatgagtttgcggagagatgcaatgagcctgctgtgtggagtcagctggcccaagcccagctccagaaagatttggtgaaggaagccatcaactcctatatcagaggggacgacccttcctcttacctggaagttgttcagtcagccagcaggagcaacaactgggaggatctagttaaatttctgcagatggccaggaaaaagggccgtgagtcctatatagagactgaacttatttttgccttggctaaaaccagccgtgtttctgagctagaagattttattaatggacccaacaatgcccacatccagcaggttggagaccgctgttacgaggagggaatgtacgaggctgccaagctgctctatagcaatgtttctaactttgcccgcctggcttccaccttggttcacctcggtgagtatcaggcagcagtggacaacagccgcaaggccagcagcacccggacgtggaaggaggtgtgctttgcctgcatggatggacaagagttccgcttcgcacagctgtgtggtcttcacatcgtcattcatgcagatgagctggaggagctgatgtgctattaccaggatcgtggctactttgaggagctgatcttgctgttggaagcggccctgggcctggagcgggcccacatgggcatgttcactgagctggccatcctctactccaaattcaagccacagaagatgctggagcatctggagcttttctggtcccgtgtcaacatcccaaaggtgctgagggctgcagagcaggcacacctgtgggctgagctggtgttcctctatgacaagtacgaggagtatgacaatgctgtgctcaccatgatgagccaccccactgaggcctggaaggagggtcagttcaaggacatcattaccaaggttgccaacgtcgagctctgttacagagccctgcagttctatttggattacaaaccactgctcatcaatgacctgctgctggtgctttcaccccggctggaccacacctggacagtcagtttcttttcaaaggcaggtcagctgcccctggtgaagccttacctgcggtcagtccagagccacaacaacaagagtgtgaatgaggcactcaaccacctgctgacagaggaggaggactatcagggcttaagggcatctatcgatgcctatgacaactttgacaacatcagcctggctcagcagctggagaagcatcagctgatggagttcaggtgcattgcggcctatctgtacaagggcaataactggtgggcccagagcgtggagctctgcaagaaggatcatctctacaaggaacagtgtgggtcaggaggcagcgatcgatgagcagcatgccagcgggggagacttctttccggagccagctcagcacatcgggtccatgcagatgtgggcactgggcgtcctcaggggtctcccaaacggaactcagaggatgccatgcagcatgctgcagagtcgcgggatgctgagctggcccagaagttgctgcagtggttcctggaggaaggcaagagggagtgcttcgcagcttgtctcttcacctgctatgacctgcttcgcccagacatggtgcttgagctggcctggaggcacaacctcgtggacttggccatgccctacttcatccaggtgatgagggagtacctgagcaaggtggacaaactggatgccttggagagtctgcgcaagcaagaggagcatgtgacagagcctgcccctctcgtgtttgattttgatgggcatgaatgagacccagctgattgcactaagccctgccgtgggcccagcccctgccagcttcccctatggatatgcctctgctcccaacttcgccagcctccaatgtacaacttccgcgtgtagtgggcgttgtcaccacccaccctacctgcagagttactaacttctccaaggagcatgtcactccagcagcacaggggacgcaatgggaggcagggacacctggacaatatttatttttgctgaaacccaatgacggcaacctctgagccatcccagagcctggggaggccagggtagaggctgacggcgcaagaccagctttagccgacaacagagactggactgtgggccctcctgctggagccaggccttcctcctgggcgcctccgactggctggagctgccccctccaggccagtttgaagactacatgaacacgtcttgtttggaggtaccggacctcataaaaggactctcagcctcttggcaatcataaatattaaagtcggtttatccaggcaaaaaaaaactg

SEQ ID NO: 397979 - DNA, 3617 bp, Homo sapiens
attcctgccgctgccgccgccgccgccgaggtcccgcaccagccatggcgcagatcctccctgttcgctttcaggagcacttccagctccaaaaccttggaattaatccagctaacattggattcagcacactgaccatggaatctgacaagttcatatgtatccgagagaaagttggtgagcaggcacaggtcacgatcattgacatgagtgacccaatggctccgatccgacggcctatctctgcagagagtgccatcatgaatccagcctctaaggtgatagctctgaaagctgggaagacacttcagatctttaatattgagatgaagagtaaaatgaaggctcatactatggcagaagaagtgattttctggaaatgggtttctgtgaacactgttgccttggtgaccgagaccgcggtctaccactggagcatggaaggtgactcccagcccatgaagatgtttgatagacataccagtctggtgggctgccaggtgattcactaccggactgatgagtaccagaagtggctgctgctcgtaggcatctcggctcagcaaaaccgtgtggttggagcaatgcagctctactctgtggataggaaggtttcacaacccatagaaggccatgctgcggcttttgcagagttcaagatggaggggaatgccaagcctgccacccttttctgctttgctgtacgtaatcccacaggaggcaagttgcacatcattgaagttggacagcctgcagcgggaaaccaaccttttgtaaagaaagcagtagatgtgttttttcctccagaggcacagaatgattttccagtggctatgcagattggagctaaacatggtgttatttacttgatcacaaagtatggctatcttcatctgtacgacctagagtctggcgtgtgcatctgcatgaaccgtattagtgctgacacaatatttgtcactgctccacacaaaccaacctctggaattattggtgtcaacaaaaaaggacaggtactgtcagtttgtgttgaggaagataacattgtgaattatgcaaccaacgtgcttcagaatccagaccttggtctgcgtttggccgttcgtagtaacctggctggggcagagaagttgtttgtgagaaaattcaataccctctttgcacagggcagctatgctgaagccgccaaagttgcagcgtctgcaccaaagggaatcctgcgtaccagagagacggtccagaaattccagagtatacccgctcagtctggccaggcttctccattgctgcagtacttcggaatcctgctcgaccagggtcagctcaataaacttgaatccttagaactttgccatctggttcttcagcaggggcgtaagcaactcctagagaagtggctgaaagaagataagctggagtgctcagaggagctcggagacttggtcaaaaccactgaccccatgctcgctctgagtgtgtaccttcgggcaaatgtgccaagcaaagtgatccagtgttttgcagaaacaggccaattccagaaaattgtgctctatgccaaaaaggttgggtacaccccagactggatctttctgctgaggggtgtaatgaagatcagtccggaacagggcctgcagttttctcgaatgctagtgcaggacgaggagccgctggccaacattagccagattgtggacattttcatggaaaacagtttaattcagcagtgtacttccttcttattggatgccttgaagaataatcgcccagctgagggactcctgcagacatggctgttggagatgaaccttgttcatgcaccccaggttgcagatgccatccttggaaataaaatgtttactcattacgaccgggcccacattgcccagctctgtgagaaggcaggcctcctgcagcaagcactggagcactacaccgacctctatgacatcaagagggctgtggtccacactcacctcctcaatcccgagtggcttgtcaatttctttggctccttatcggtggaggattctgtggagtgtctgcatgccatgctgtctgctaacatcagacagaaccttcagctgtgtgtgcaggtggcctctaagtaccacaagcagctgggcacgcaggccctggtggagctctttgaatccttcaagagttacaaaggcctcttctacttcctgggctcaatcgtgaacttcagccaagacccagatgtgcatctgaaatacattcaggctgcctgtaagacagggcagatcaaggaggtggagaggatatgccgagagagcagctgctacaacccagagcgtgtgaagaacttcctgaaggaggccaagctcacagaccagcttcccctcatcatcgtgtgtgatcgttttggctttgtccatgaccttgtcctatatttataccgcaacaacctgcagaggtacattgagatctacgtgcagaaggtcaaccctagccggaccccagctgtgattggagggctgcttgatgtggattgttctgaggaagtgattaaacacttaatcatggcagtgagaggacagttctctactgatgagttggtggctgaagtagaaaaaagaaataggctcaagctgctgcttccctggctggagtcccagattcaggaaggctgtgaggagcctgccactcacaatgcactggctaaaatctacatcgacagcaacaacagccccgagtgcttcctgagagagaatgcctactatgacagcagcgtggtgggccgctactgtgagaagcgagacccccatctggcctgtgttgcctatgagcgggggcagtgtgaccttgagctcatcaaggtgtgcaatgagaattctctgttcaaaagcgaggcccgctacctggtatgcagaaaggatccggagctctgggctcacgtccttgaggagaccaacccatccaggagacagctaattgaccaggtggtacagacagcattgtcagaaacacgggatcctgaagagatttcggtcactgtcaaagcctttatgacagccgacctgcctaatgaactgattgaactgctggagaagatagttctggataactctgtcttcagcgagcacaggaatctacagaatctgttgatcctgactgccatcaaggcagaccgcacacgggtcatggagtacatcagccgcctggacaactatgacgcactggacatcgcgagcatcgctgtcagcagcgcgctgtatgaggaggccttcaccgttttccacaagtttgatatgaatgcctcagcaatccaggtcctgatcgagcacattggaaacctggaccgggcatatgagtttgcggagagatgcaatgagcctgctgtgtggagtcagctggcccaagcccagctccagaaagatttggtgaaggaagccatcaactcctatatcagaggggacgacccttcctcttacctggaagttgttcagtcagccagcaggagcaacaactgggaggatctagttaaatttctgcagatggccaggaaaaagggccgtgagtcctatatagagactgaacttatttttgccttggctaaaaccagcctgggtgacagagcgagactccgtctcaag

SEQ ID NO: 397980 - DNA, 137 bp, Homo sapiens
ttttttttttttttttttttttggtcagttggattgtccactgcaattaagctgtgcaagagcaaaataaaatttgtttgtttgtttgtttgtttctctataactatctcatgctctgcaggaacctctacccttct

SEQ ID NO: 397981 - DNA, 476 bp, Homo sapiens
gagagatgctgaatatgcaggagtgagaataaagcaatgttcttgagtagtggtacaatacaaatatgctgaatgaattgaagctatagaaaaacattttggggctcaatgttgtaaagaggtctcaaaagaagggacaagctaactcaaggaggagtccccagttaccaagtaaacttactcagaagttaaaagaccatttgttgggtatgttatccagggacttgaactggggttagtttaaaataatctatttgggataggagacttttaaggtcctcccatactggagcttctaaatctatgatcagtgccacagtcaagagagccatcattctgagagcctatgtcacagagtgaatggtgactcccacagttgtggacaaaggctaaaaacagatcacaaacttataactcatttggttgggtgtggcggttgacacctataatcccagcactttcggtggctgaggtgg

SEQ ID NO: 397982 - DNA, 648 bp, Homo sapiens
ttcgacggtgtcttgtgtatataccatttccctagcattgttatctaggaatgaacagattaatctagcagctcagaataaagatccagagtcttttaatcacaaaaaccaagtccaacgtttccaaagattatcaaagcgaataaaccatattatggtaaatgctgtacctttcctcctcaagccctgggactctactacatctctgttgaatgattgttcaaggtttttttattttttgagacagagttttgctctgtcactaaaaaaaaacaaaaaaaaaaccaagtgttgacaaagatgtggagcacaccattgtgcactgctggtaaaaacgtaaaatggggccaggtgcagcggctcatgcctgtaatcccagcactttgggaggccgagacggacggatcacaaggtcaggagatcgagaccatcctggctaacacggtgaaacctcatctctactaaaaatacaaaaaaaagaaaaattagccaggcgtagtggcaggcgcctgtagtcccagctactcgggaggctgaggcagaatggcgtgaacccggaggcggagcttgcagtgagccgagatcacaacactgcactccagcctggacaactgaacaagactccgtctcaaaaaaaaaaaaaaaaaa

SEQ ID NO: 397983 - DNA, 153 bp, Homo sapiens
ttggaaagattcattggcagggccctttgggaggaagtggaggagggctggaggggcatgggcgagaggaaggcgcctgcctccctgccacgtgggtgttccccctccctcgacgtggagctgaaatatccctgtaccacctagacctgagtc

SEQ ID NO: 397984 - DNA, 474 bp, Homo sapiens
actatctaggagttaggggtcatctgaggacactacttccaccgactgcaccttctgaggatttaagcattcttctttagcggctgctctgtcaggcactgctggtcaggttgggcttgttctgtgtgcctatgtgggtgtctgtctgttttcctagacaatttttcctgccaggctaggagaaatctgccacttctttttctatcatttaatcaggttttgagagcacaatatttgatccttcttttaggtacctgcttctggcaaagtgcaaagactatcctttggctaatgattactgccttcttttagttggatctacttctcaggacgtgaagtgaaactcttcttagctaaccttctcattgttgagtcctgctctcaggcatctgtgcatggctttgtaggaaagaggcaagcatatcatgacaaatggtcccactttattctgttctggtaattggctaagtttca

SEQ ID NO: 397985 - DNA, 512 bp, Homo sapiens
cagatgcttcctcctggccaaatcccaaatcccaccctcagcacccacaccctgagcagtgggcaggagaggcctgaaaacgtctgtacaaatggcttccgagaagccctggagataaaggagccagaggcagccacacatggttcccagaagctgaatgctgcgcagacgacaggaatgacttcacccatcctgcttccacccgccatagcagtgaccaaagcagcactgggaccacagctgagcacctcagaagataagtcctggggtgattcttgtcatctccgtgaaaaggagaagacaaaaaggcagaggctgctgcttgaggatcccttcacctgggctgcatagctcacccatgctgaccaacttccccatttcaagcttcagactcacagccgcgctagttagggtaccacttgttcagacagctgttttcattcacatctccaaaggtcctctaccttagaagaagaaagaaagagggaaagagaaataaaagagattaatta

SEQ ID NO: 397986 - DNA, 395 bp, Homo sapiens
ccagctgtcctgtcaggggaacctgctatttatttcatgccatccggtcatggcatcctctgtctgttttgacagcagcctctcctgcttgaggtcagtgagggcctctttagcctcaagttgcagaacaggaatctcaatgacttcttccccgtggaagaacttcttccccttggcccatcaccagggggcgcagcccgaccaaacgtggaaaataaaggaggctgtgaataaagacaggataactgactgctcatacttccagaacagtttttaaaatgtcagcatattacctttttttctgtgtctatacacaactgtgactttttaagaattttgatcatactgattacatgtgaacttacaaacttttctgaaaaaacacatttttctca

SEQ ID NO: 397987 - DNA, 424 bp, Homo sapiens
aatatcaccttgatttgttaggatgcatttgacctcctgtcactgacaggagaaggggtgaggtcttcttctgcagacagtaaagagcaggcagttttatttctcagatccttttacaagatttgaggagtaaggaagagacagcagatggttttgaagagattcaatcacccatgggtactgctgcagaatgtgggtcctgcaggcacgcaaatattcaaaacaaactaaacctttaaataaatagagaccatgccattaccttctcaatttgggacgatagacattgatatatacattttaacttaatatcaacatgaaatcaaagggctatgttcatcttttagtgaccacagatggtacaaataccaaggtagatgccaaatataccaagcgatggtgggctggggtaccggttactcca

SEQ ID NO: 397988 - DNA, 534 bp, Homo sapiens
tcaaggatagtttgacaggccagggggtctccttgtgagtgaggcctcatagctggttggtgggtccgagtggagccattggtggtcagaagtgcaaaaacctgaaaagacatttcaaaaggccagtcttaggttctagtacacaatagtgttgctatctgcagaaataattgagcacgttgaaatcttgtttcctctaggataatggctgataattgtgtacgtctgttccttaacataattcaggtccctcattctcctaacctgtgttcttgtattagttttgcaaaggccgtgtaggtttgggaaaggctgtcatgcccaggaatgactaaaggcggtttggaggttaaaggcaaagtggggattgtttagatacgttctctttcactgcaataattttctcactgttactatttttgcaaaggtgatttcattatgatggcttcttgggtttaatttcacagatgctaaagtccacttacttttttgtttactgacacaaaataaaaaagtattagaataagcagaatt

SEQ ID NO: 397989 - DNA, 364 bp, Homo sapiens
gcagggtcagcagactttgagatcccacgtggtcacacaatgggattctgggggctgcgacaggggagacagagggcactcgaggggcaggcaggacagcccagcccagaaaccagccaattgacctgttgctaggcaggcaggggcacgccgtgcaggaaactgcatatattttgggttattctgctccgatgaccatcacagcaggatattccaacttctacaagtccagtctcccaacctaagagaagacaaggttggcgatgccagagcaagtatgggaagcagaatcgagaagtggccaaggctcctggcccaagctgggtgggattttgggcccactttgaggaaaaggtggcacctg

SEQ ID NO: 397990 - DNA, 141 bp, Homo sapiens
tatttcaacaatattgcctttgcctaaaatgtttcagggactcacatttcaatcaatcaccttcagaatccatgattcattcccttgaagatgttcaacagctgtacctctttcttcattaaagatggatttaatttctgg

SEQ ID NO: 397991 - DNA, 1622 bp, Homo sapiens
caaatgtagaccctgcactcaatgtgcttaccctgtaggagcagagacagataagtcagatttcagtctggggcaggtggagccatgatgaagccttccccacacttgtgagaccactttgggagatgggaggcatccccaagctgggtcagcttgaacccaccagcaggggtgagcaggtcttctgcatacagggttttcagagacaccgggctggcccgagacacctgagctgcatcagagaacaataggttctggggcctgctgcggctgaggtgccgggtgggcacgcagctgggggcacccaacaatgaccaccagggcactagtgttcatcgggtaccaccccgtgtgccagggaatgtggactcagtgcctgccatgtcccttgctccgtgcaagcagaccacgtctgtgctctcactgaatcctctggagggacacctctctctacctctgtttccctttggtagacgtctgataacacacgtcgtattctcttcactcagaattcatagatgtcggctgggtgcggtggcttatgcctgtaatctcagcactttgggaggccgaaggggacaggatcgcttgagctcgggaattcaagaccagcctgggcaacatggctaagtctcctctctacaaaaaaaatacaaataattagccaggcatggtgatgcataactttaaccccaactaatgggggggctgagatgggtggatcacttttgggcctgggaggcggaggtagcagtgagtggagatcacgtcactgtactctagcctaggagacagagcaagactccatctcaaaaaaagaaaacaaaaaagaattcatagatgtaacattttgcctttgatacttctgatctttgttaatcatgaaaaatactcactgggcacagtggctcacgcctgtaattccagcactttgggaggccgaggcgggtggacctcctcaagtcaggagttcgagaccagcctggccaatgtggtaaaaccccgtctctactaaaaatacaaaaattagctgggcatggtggcacacccctataatcccagctacttgggaggctgaggtgggaggattgcacgaacctgggaggcaaccagctctgctcacgtgagctgagctcacgccactgcactccagcctgggcaacagagcgagactaagtctcaaaaagaaaaaaaaaaaagaaaaataccagaggttgaagtcctcccatccccctttcttacaggaagtaactgtcgagaaattgtgtgtctgacaacccctgttgtcctctcagtcaagcagtgtgtgccgtagtttcagatgtttgaccctttatgcagatgacgacatagtgtgcgttttgttccaagcttttttctcttactcgacgttattttttttaggtctagatggtccaactaaatctcattgagttctgtaagcagctggttacctccatttccacactttccatttaggaagctaaggcttaaaaagatgaagcccctgccaggcatggtggctcatgtctgtaatccctttgagaggctgagctgggaggatcgcttgaatctaagagtgtgagaccagcctggacagcctagcaagaacccatctctgc

SEQ ID NO: 397992 - DNA, 611 bp, Homo sapiens
cgttcatattctctccattgttcaggagcacaaaggatgttagcaagaaaagacacatgacccatggccgcccacacacccacatctctccacgccccgtgccatttctgcccgccgctgcgtgctgggcggtttcctctgcacagagtttcccttgagctgctactctgaggtcgtgtgcctgttgtcatctttatgatagaggtcagtgtcaccctcctgccagacacttctgccagctcctctgcctcttcactcgctccttcttgcccatccgatggctgcagcacagagtccatgaagggggtggtcagtgccagcccccctcggcgggggagatggggcgggcaatcacagggttcagtggccaacggagaggtagggtagccagagattgtcctaccccaatgactttgctgtagtcacagagctttgaggcagcctctcccctgtgctcggggaggccccatgcgtgaagagcccctcagcccctggggagacagagccataaacaaatgattacggaaataatggctaaattagaggcaaccgtggaggactgggagcccagagaaggaggaacttatttggcctggggggccaaagcaggc

SEQ ID NO: 397993 - DNA, 482 bp, Homo sapiens
gcctggaaaagtcatggtgggcttcccggaggaggcgtccttaggctggggcttgaagacgaggtatttaccagacaaatagtggagaagaaggctgtcttaaacagaaaaaacttcttatgtggtcctgggttctgagggcccagctcttctcaccctccttctccgaggagtgggggaacggaagtgcagagccttcgtgttttaccctccttctccgaggagtggggaacggaagtgcagagcctttatgttttgtgacagtggaatccccttcgcgggccacctcctcgatctgaaaggctctatctgcagctactgaattcccttcagctcgtaagtcttaatagcaatgtcatccccttctgaaaactttcctggactgctccttatcttgctgccggtgattgaaagcaatcctttcctctctcttccctcacacctgcctgtttgcattaaagttcttgagttggactccatca

SEQ ID NO: 397994 - DNA, 482 bp, Homo sapiens
ccatggtgtccggcttcacttggacagaaaccctggatctgtaaccgcagcctcaccctcagcactgctgccagccgagaagggtctccggctcggcccctctgtgccccctcagcagacagaacataagggacttcttatctccaccccaggacattccagttatttagttatttaaaaaaataataatacagtagttgttttgccaggaaattcagcttcggaatacaaccttttaaggctgaggcaggcagatcacgaggttaggaaatcgagatcatccttgctaacatggtgaaacccgtctctagtaaaagtacaaaaaactaggtgggcgtggccaggcgcagcggctcatgcctgtaatcccagcactttgggaggctgaggccagcagatcataaggtcaggagatcgagaccatcctggctaacacggtgaaaccctgtctctactaaaaatacaaaaaaaaaaaaaaaaaa

SEQ ID NO: 397995 - DNA, 605 bp, Homo sapiens
ctcaaggacatttactattgctgtggttcattttcattctgtatttttcttctgtttaatgggatttgggaggaagaaaaagatgaacttggttttgatccaagtaacctcagagaataatgacgtgggagcattttacaatgcaaacaataaatggaaaagcatgaatttatgtactgtatgtgaaatatatagacacatacatacatataggctgaacatcccaaatccgaaatttgcaatgttccaaaatccaaaacttcttgagccacctacatgatgctcaaactgagtgctcattggagcatttcagatttcgtatttttctatttgggatgctcagctagttgatatgaggcagatattcccaaatctgaaaaagattcaaaacctaatccaaaaatccaaaggctctctggtcctgaacctttcagataagggattttcaacctgtatttaatattgggaagcaatataccaataccaaaaacgttgtctgtgagaggtgagatgacaaatgatttttattacctttttaaaactcctaatttgaatttcaacttttctatgactgtggattgtttttataatcagaaaaaaagttc

SEQ ID NO: 397996 - DNA, 559 bp, Homo sapiens
gtttcgtcggtgccgaggacatgaggggtgtagatcaggcctgtttcaaacacaaggccttttggccagagtgtaatggtgtgaggacttgggaagaccttacctacttaactgtctctctcaaaggacaaaggtatgagggggttaaaaaaaaaaaaaaaaaggcaaagctatgaagaacatgaagttcttaagcccctagacactcttccaaggtctggcctgtatcccagagtccactgctgaaaaggggcagagatgtgtgttatatgcgcacatacgtacgcatagtatagctagcatatggcattctggtggcctcgacggagctcacaggcaatataacagcattgactgctttcacagtttccacttgtctcaggaaaatagagaaaattcaagatgaaatacagtgagtttaggacaactcagtttcctaaatatggaagatcctgtcccttcccaagtattgaaagagatgaaaattttcccttagttttcaagctcaaagtctatcttatctttgactaaatagccctgatttggatactgttaactt

SEQ ID NO: 397997 - DNA, 299 bp, Homo sapiens
ccatcagttgccacttcctctcattcccaatggataatgaattcccaatacccaatgataatgacttacttaaaactctctgacagtaccaggcttctcacctgtacaatatctttgtacatgctattccctcacttaaaacattctccttatcactcctagtcatctgttgagatccggattatgtgtcagtgactataacatgggaaaggctgacttagggcgtcctcttctgcaactctatcacagtgttcactcttaaaattttattttttttttagagacagggtttcgatata

SEQ ID NO: 397998 - DNA, 485 bp, Homo sapiens
ttttgtcctagttttgctttcttatatatatggttttggattcatgaccttaatacctgtgtcatttttaggaaatagtttaatttttgtgtgtgtcatgtgatgacaaaatggaaaagaaaagttaaatttgggggataaaatttaggaacctgcagttataaagagtaaggacagtgatactaatattgagggtaggggagagccatctcagatcccaagacttagagataaatggtgaaactctgagaaatcattaaactagcttgccctgttgagaccctctgtagtactatgtaaggaagaacattttgtattttctcagttaaaaatgatctattttgtctattttctttgcaaaactggctcaggtgagaggacacttaaaaaaattttccccatgcaaaagcacaattattggttttgtataattttgtataatttttgcaggcatgagtcttgatgcatgacagcccgagcttttg

SEQ ID NO: 397999 - DNA, 589 bp, Homo sapiens
attatccagcacagagaagcaaacaccagaagcttctctccaactttcagtttttctctaaacttccagtccttctcatactgtgtcctggttataatagttgctgggaccttattctattctgaatccccagcccctaaagaaggcttggtactgacgtgtacagcgtagttacccagtgactttggggaaggcaggaagagtgtggaaaggacaggaggaaggaagggaggggccgtggctccgagctgcctagaaagcggctccagggagccagggcaccgtgagcctggtggttggcagctggagccacgtcggagggggaagtgtcgcagcattctctgcaggcatcacagacctgaggcagtggcctccggagggcactggacagaaacagccatccaagtggctgagtggagggaccctgctcaagtgcagctgcagtggccggggtttccctcaggaggcggttcggaggtttgatgaaatcctggaggccagtgatgggatcatggtggctcgtggtgatctaggcattgaatcctgcagagaagtcttcattgctcagaagtgatgattgacgtgctga

SEQ ID NO: 398000 - DNA, 1254 bp, Homo sapiens
attatccagcacagagaagcaaacaccagaagcttctctccaactttcagtttttctctaaacttccagtccttctcatactgtgtcctggttataatagttgctgggaccttattctattctgaatccccagcccctaaagaaggcttggtactgacgtgtacagcgtagttacccagtgactttggggaaggcaggaagagtgtggaaaggacaggaggaaggaagggaggggccgtggctccgagctgcctagaaagcggctccagggagccagggcaccgtgagcctggtggttggcagctggagccacgtcggagggggaagtgtcgcagcattctctgcaggcatcacagacctgaggcagtggcctccggagggcactggacagaaacagccatccaagtggctgagtggagggaccctgctcaagtgcagctgcagtggccggggtttccctcaggtagggatcggggcgccttgtcgccgccagccacgtgtggcgtccggtacagtcagcagagtgcagggtgcgggcaccaggaaagggggcgcaggggaactcccgcgggcctcgcgtttgcaaacttctcgcctgggcaggaggcggtcgtgggaaagaaggtggaagagcgagctttttggaactgtgcacgggacagattggacgcacacccctcgggaggcgcgaaggcatggaaaatttgaagcatattatcacccttggccaggtcatccacaaacggtgtgaagagatgaaatactgcaagaaacagtgccggcgcctgggccaccgcgtcctcggcctgatcaagcctctggagatgctccaggaccaaggaaagaggagcgtgccctctgagaagttaaccacagccatgaaccgcttcaaggctgccctggaggaggctaatggggagatagaaaagttcagcaatagatccaatatctgcaggtttctaacagcaagccaggacaaaatactcttcaaggacgtgaacaggaagctgagtgatgtctggaaggagctctcgctgttacttcaggttgagcaacgcatgcctgtttcacccataagccaaggagcgtcctgggcacaggaagatcagcaggatgcagacgaagacaggcgagctttccagatgctaagaagagataatgaaaaaatagaagcttcactgagacgattagaaatcaacatgaaagaaatcaaggaaactttgaggcagtgtaagttatcatgtgccctgctgt

SEQ ID NO: 398001 - DNA, 515 bp, Homo sapiens
gaatatgataggtaaaaaatgatatctcaacagttttaattagcattttagttttgattggcgtgtgattttaatatctattttgagcatatactgcccttttttcctgcagataatgaaaaaatagaagcttcactgagacgattagaaatcaacatgaaagaaatcaaggaaactttgaggcagtgtaagttatcatgtgccctgctgtttctgatggcccccaaactagaagtcatcagtttactgggaccccagcctcccgctacccctgcatttgtccattttctgtgctggatggctggaagcagcccacaggtttggggatccattcatggctagcccaggcttctgtccatggaataacatgtggagagagcttcttgaccagtaagataccttctagcagctgtcaaagtacttaaaaacctctatgaatagaatcaaagcttcagttcagttgctgaatttccaagaagaaattcaaatcaaatttaaaatgcccactcattcat

SEQ ID NO: 398002 - DNA, 1114 bp, Homo sapiens
attatccagcacagagaagcaaacaccagaagcttctctccaactttcagtttttctctaaacttccagtccttctcatactgtgtcctggttataatagttgctgggaccttattctattctgaatccccagcccctaaagaaggcttggtactgacgtgtacagcgtagttacccagtgactttggggaaggcaggaagagtgtggaaaggacaggaggaaggaagggaggggccgtggctccgagctgcctagaaagcggctccagggagccagggcaccgtgagcctggtggttggcagctggagccacgtcggagggggaagtgtcgcagcattctctgcaggcatcacagacctgaggcagtggcctccggagggcactggacagaaacagccatccaagtggctgagtggagggaccctgctcaagtgcagctgcagtggccggggtttccctcaggaggcggtcgtgggaaagaaggtggaagagcgagctttttggaactgtgcacgggacagattggacgcacacccctcgggaggcgcgaaggcatggaaaatttgaagcatattatcacccttggccaggtcatccacaaacggtgtgaagagatgaaatactgcaagaaacagtgccggcgcctgggccaccgcgtcctcggcctgatcaagcctctggagatgctccaggaccaaggaaagaggagcgtgccctctgagaagttaaccacagccatgaaccgcttcaaggctgccctggaggaggctaatggggagatagaaaagttcagcaatagatccaatatctgcaggtttctaacagcaagccaggacaaaatactcttcaaggacgtgaacaggaagctgagtgatgtctggaaggagctctcgctgttacttcaggttgagcaacgcatgcctgtttcacccataagccaaggagcgtcctgggcacaggaagatcagcaggatgcagacgaagacaggcgagctttccagatgctaagaagagataatgaaaaaatagaagcttcactgagacgattagaaatcaacatgaaagaaatcaaggaaactttgaggcagtgtaagttatcatgtgccctgctgt

SEQ ID NO: 398003 - DNA, 929 bp, Homo sapiens
aagcaggcgtacggtctcgagttctaggatgacctgaggcagtggcctccggagggcactggacagaaacagccatccaagtggctgagtggagggaccctgctcaagtgcagctgcagtggccggggtttccctcaggtagggatcggggcgccttgtcgccgccagccacgtgtggcgtccggtacagtcagcagagtgcagggtgcgggcaccaggaaagggggcgcaggggaactcccgcgggcctcgcgtttgcaaacttctcgcctgggcaggaggcggtcgtgggaaagaaggtggaagagcgagctttttggaactgtgcacgggacagattggacgcacacccctcgggaggcgcgaaggcatggaaaatttgaagcatattatcacccttggccaggtcatccacaaacggtgtgaagagatgaaatactgcaagaaacagtgccggcgcctgggccaccgcgtcctcggcctgatcaagcctctggagatgctccaggaccaaggaaagaggagcgtgccctctgagaagttaaccacagccatgaaccgcttcaaggctgccctggaggaggctaatggggagatagaaaagttcagcaatagatccaatatctgcaggtttctaacagcaagccaggacaaaatactcttcaaggacgtgaacaggaagctgagtgatgtctggaaggagctctcgctgttacttcaggttgagcaacgcatgcctgtttcacccataagccaaggagcgtcctgggcacaggaagatcagcaggatgcagacgaagacaggcgagctttccagatgctaagaagagataatgaaaaaatagaagcttcactgagacgattagaaatcaacatgaaagaaatcaaggaaactttgaggcagtgtaagttatcatgtgccctgctgt

SEQ ID NO: 398004 - DNA, 420 bp, Homo sapiens
taaaaaacctgcagttttgtttgtactttgtttttaaattatgctttctattttgagatcattgcaaactcaacacaattgtaagtaatgatacagagggatcttgtgtacccttcacccaggctcccccaatggcaacatcttgcaaaactacaatgtaatctataaacaggatattgacattgataacgtgaagatccggacatctcataacacaggatccccggaggcccacttccctccacccccacaccccagccgtgtccctaacccctggcaaccaggaatccactctccatttctataatgttgtcatttcaagaatgttattcaatggaattatatagtatgtaacctgttttgagcttaaaaaaaaagtatacatgactttaatgaggaaaataaaaaaaaaaattgaaa

SEQ ID NO: 398005 - DNA, 362 bp, Homo sapiens
cgagatcggttcactttgtgcttcacatgtccttcacatgtcacctctctactccgtgaacttgcaagtctcacctgggtctctcactttccattccctgtctctcagatctactagcacaaggctacagccacaaagcacttatatagttgggcccctttgctgacacgtgacatgcaattcagggatgcctcctcctccccctagaagtgatgagtgcctgcagctattgtaaatgttaaagtaaaattaatgttggttgtacacccatgttcatagcagcatgactcacaatagccaaatgtagaagcaatctgtattagtccgttctcaagctgctaataaagacatatctgagacta

SEQ ID NO: 398006 - DNA, 386 bp, Homo sapiens
acttaactactgaaatcaagactttgataaatattatccaacagagtttgggctgctctctgtagctagtacatggtatttagaaagttcatattggataaaggacttatatccagaataaaaaggactacaacacagtatcagcaaactccaattttaaatggacaaaaaatctgaataaacatttcactaagatacatgaatggctgaagagcacataaaagatgctttgacattattcgccatcaggaaaatcaaagttaaaaccacaaaggaatatcatttcaaacgctaggatgggcataatttttaaaaaacagacaacaatgactggcaagactgtagagaaatgggaagccccacacattactagtcagaatgtaaaa

SEQ ID NO: 398007 - DNA, 372 bp, Homo sapiens
tctacccccttacttttaattcacccattagccagcctccttgtgtcttcacttccttccctctgtagttttagttcatggcttatcacttcaatcattcctttgtcaaatttttttgtccctttttctctccgtgaattcaactattaactatctgcattctcttttactttacccagactaccaaatgtgcagcctagtgcctctacatacactcatgatcacacacctcaactggacccttagcttttctcgatcctactattccctagaaagttagtcttcctgtttaccattagcattttaaaccttctctacttttcttaaacatctgacccactctcagcagataatcctatctcatatataaag

SEQ ID NO: 398008 - DNA, 946 bp, Homo sapiens
caccagcgacatttgccttccaccctgagtagagcagcacaaggccctccccagatgagatccccaatcttgaactttccagccatccagaattgtgagccaaataaccctctttttctttatagatgacccagcttcaggtattcccttatagcggcacaaaacagactaagacaagatataaaatccacaagtccgtattggcataaggaaatcatttagtaaagaaataaataaatgggagagaagaaacaaaatgtcctgtgcagaattccaggttatttatgcagctactccttacttaaggagatggccatagctccccactccgtgttgagtggtgacttccttccagagagcacaggggtggggagcagctctgcagcagagaaactgacaggcacgaccccagccaggcacttaaggtcatcatcaacagtgatcagtcgtgaagccttggaaggatgggaagagaaggggtatcacctctatggttgtcctcccttaaacacataaccacagtctagtcgtgagaacaacgtcagacaaacccaaattgaggtgcagtctacaacacacctgatcagcactcctcaaaaccatcaaggtcacccaaaacacagaaggtctgagaaactgttgcagccaaaaggagcctcaggggacaggacacttaatgtgatgtggggtcctgagtgggatcttggagcaggagaacagtagatgcaagctgaggccacctgaatcaagttgtgctgaatgaggtgtgagctttagttaataacaggtcagtattggtttattcattgtagcaaatgcactgcactgatgtattaataacagggtaaactgggtgagaggtgtaggagaactcttcacacactcttgtcttcttttctgtaaatgtgaatctattctgaaattaaaaggttattttaaaagttta

SEQ ID NO: 398009 - DNA, 233 bp, Homo sapiens
tgcttcaacccatctgacctccattttctttttcacttaaaaattttaaagtatttgttttttggtaaaaatggaaagactatagaagcacagcagctaaagataacttctgttcatattttgatgtatactcttgagtttttcattttcatttaaaaaacagaggtagtatatattttaacccaattactttcacttacaaagtatgttgtgaatttattttaatcacttca

SEQ ID NO: 398010 - DNA, 544 bp, Homo sapiens
gtccacagcagcatatctcttcacttagcttaagaactgtcctactcctacagcatacatttagatgcaatcacaccaaagagtgatatgtcaagtctccaccacttcagcaagagtgagtggatttaaaaatgttatctgtgatggaaagaccagacgaccaggccagagtcttggggcaggtggtgtgttaataatagaaattctactccttttatgccctttcaccctttattctaaggatgattccagggaaagccaaacatccaggagaagaagccaacatagaggaataagaaaaatcactagtctaggaataagagatctggattccattctagctctgttttaagaactagtatatctttaattaaatcttttctttcctgcaagcttaagtcccacatctgcccatgaaaaactttgacacagttaacttcatagtacatgctgactaaatattgtagagcttccttaaaaagaaagaaagagagagggagggagggagagggagaagagaaaaagagagaagacaaaaagagag

SEQ ID NO: 398011 - DNA, 353 bp, Homo sapiens
gcaaattacgtgtttgctcaggtggttttgttctcctggatattttgagaccatttctccagatagagaagacaagttggtctcttgttaatttgaaatctttgagaatccaggtttttcttttggagagggggatgtgattacaagttcagggtccttccctacctcccaccacccttttgagatgaactgaaatcatttaatagtgaactggcaaaacagctttctatgctttcacatgttgttgacgcttgtcctggaaaacggaatagcagacaagctaattaaaattcaaccctttagctctttggttgcccaagaaagaacactttgatactgagtttgtaaagtac

SEQ ID NO: 398012 - DNA, 501 bp, Homo sapiens
caatatagtgagcctcccttctctacaaaaaataaaaaaattatctaggcatggtggtgtgcacttgttagtcccagctactagggaggcaagagaatcgttgagtctaggagtttgaggctgcagtgatttccacattgcactgtagcctgggtgacagagtgagatgctgtcttaaaaaataaacaggaaggaaactcttgcacaagctacaacatggatgaaccttgaggatattatgctaactaaagtaaccagttacaaaaagacaaatactatatgatttcacttatatgaggtatataaagtagtcaaagtcataaagacagaaagtggttgccaggggctgggagtagcaaatagagttattgtttttctttttaaaatttttttagagatggggtctcactatgttgtccaggctggagtgcaagggccaatcgtgaatgaaatcatagcacaccacagcctcaaactcatgggctcaagcaatcctcccac

SEQ ID NO: 398013 - DNA, 443 bp, Homo sapiens
tggcaccactgcactcctagcctggacaacagattgttgccctgtctgaaaaataaaaaaaaatttctgaactatgccagtgataatctggtaaattataaatgttgtctgacttttttctttggaaaatgaattaattcagtcctaaccttctctcttaatcacaggttgcaataaattaccagaaacgactggttcataccttatacacctccagtgtaaatgttaagagtttgtatattcttaacagactcttaacaaacatcagtaattctttcctagggataagtgaaaatgtactaacattaattctattatatatatgcaaatatctagaggaaatactgtttataagttactaatacatgtatccatggtagtaggtcttgaaaagttacttttgttgcctattggacaccctctattctcccttccttaataaa

SEQ ID NO: 398014 - DNA, 497 bp, Homo sapiens
ttatttttcttaggcagggtagtagattactttttttatgtatctgaagtcattcatttttaaaaagctattagaatttctcagtttcttttgaattcataaaatgacagccttggaatatgcaggtctagagtgtagaattctgcaacttttgttaagttcacagtttaaaaaaaatacaaaaattagctgggcatggcatgtacctttagtcccagctactcagtcccaggctgaggtgggaggattgcttgagcctgggaagtcaaggctgcagtaagtggtgattgtgccactgcactccagcctgggcaacagagaaggaaaaaagaagagttgctgcacccttgcaaaaactatgaaaattcccttagaacaaaatcatggtccactgtgagttttgtaccaggcaacatacatagtattacctagtgccaagagtttgatcatagagagaagggttttaacaaaaccaggaggcataaggtgagcacttt

SEQ ID NO: 398015 - DNA, 445 bp, Homo sapiens
cccagaccctctggacaaaggtccccactccattttctttacctgtaaagcaggacacagctccccatcccaaacttgtctggattgggctaactggcttttatgttctacttggattgctgtgattcgctaactgcccccaggcaggggcattagctgggcaggactgaggaggcctgggtggggtcctctgagctgcagtgcactgatcgtgtgctgtgcgctaaaatcggagcacttctcttccagagagttctgagggggggcccatctgttgtcttattagctctcaaaacattgctgggagctcagggtaggggaaggggtgcaccatgtttttagctccacaattcagattttactttccaaccgagattgattcttgtttggggctgatgtccccaatagatagatgaagcctgtgcctaggacatcaaagtgtcaa

SEQ ID NO: 398016 - DNA, 509 bp, Homo sapiens
ttcatgggtcctttgactcccacgtttataaagatgctactggagttccacgaggggtaccagataaatttaaggcccgaaatcaaacagcttcaggatttgaatctgtgctgttttggtggtcaactgtaaataaaaatgtagatcggataaactacatttattacaaccaacaaaggtttgttaactacacaagacatgccattaagggaacagcctcccaattaggtcccattaactaaatagtctgggaaaacaggatagccctagatacgatgctagcagaaaaaggtggtgtctgtgtcatgattggagtccaatgatgtacttttattcctaataacacagcccctgacggaacagtaacaaaagctttgcaggacctaacctccttatccaatgagttagcaagcaattctggaataaatgatccctttacaagtttaatggagaaatggtctggaaaatggaaaggcttaatgtcctcaatatttacttctcttgcaatc

SEQ ID NO: 398017 - DNA, 440 bp, Homo sapiens
gaggattgggattgattgccaggggaactaaccatatgattagaagattaaaactttcaaccccatccctcaacctctggggaggggagaggtactaaaggttgatttggtcactaatggcctatgatgtaatcagtcacacctatgtaatgaagcctccataaaatctccaaagggcagagttcagagaacttcaggattactgaacacatggaggtgcctagatgtttttgcactgggagatggcatggaagatttaccctcctttccacatgccttgccctgtgcatctctatcatctggctgttcatcagaatcttttgtaatatcctttataatcaatcatttcatgtgtttctctgattactgtgaattgtcttagcaaattaatcaaacctaaggagggagtcatgggaaccctgatttacagccactcagtc

SEQ ID NO: 398018 - DNA, 311 bp, Homo sapiens
cagaatggaatatcagagtacattttcatgaagtttaaaaatcaaggactgttcctgattagatgacgtatttattggtggccttcttatctaagcacatgagtagttggctctgaactttgtgtatttgaaaaaggaaaattcagtggaggcttttgtttgtgtgtgtgtggctttgaaaacaaattatttgagaaagaccataacacagtgagtagcctatatgtgcatttactgaattgttaatttaaggatatatattaatagagtatgtttaaaataaatattgttttcatcactgactttaggaa

SEQ ID NO: 398019 - DNA, 130 bp, Homo sapiens
gcaagaggaattgccaagggccagagaagtgtattgaatatacctcagtgtagtttattgttcccagcctgtctgcctctccctgttggccaacatggaaaatcaatagacatctaccagtaaatctaat

SEQ ID NO: 398020 - DNA, 434 bp, Homo sapiens
ccctgtgggcagagactggatgtgcttgtggacgtgtgcagatttctctggcttgctgtcgtcaacctccccttcggctgccgcagtccaagttcactgagaacttctctttatatcctagatgctgtctcctcgtgactcatcttccttcttcacagatacctcctctgccttcctgcatggacaggtctgtcttgccttgatcaggcagatctcaggaagttccaatcaggaagcagctttagtttccccactgttgccctccgtcacgctgtgacagcgtgtcttcccgggacgactgccttcaacctggcagaactccttgctttctggacacttttggttattggaactgctattaaaggttcattgcagtccagaacaaaatatcactctctccaatttacatgctttcgccctctacccagctcaag

SEQ ID NO: 398021 - DNA, 417 bp, Homo sapiens
tgcaatgacgcgatctgggctcactgtaacctctgcctcccgagtagctggttcaagcgattctcctacctcagcctcccaagtagctgggattacaggcatgcgccaccacgcccggctaattttttgtatttttaataccgacggggtttctccatgttggtcaggctggtctcgaactcccaacctcagatgatctgtctgcctcggcctccccaagtgctgggattacaggcgtaagccaccgtgcccggccagtgctacacactcttaaccagatcttacaagaactcactcactatcacagcaaggggatagtgcaaaaccattcatgagaaatccacacccatgatccaatcacctcccaccagaccccacctccaacgctggggattacaatgcaacatgagatttgga

SEQ ID NO: 398022 - DNA, 519 bp, Homo sapiens
cctgactgtttagaagttgatcaatctatttgaagatggggaaataaggctgagggagatattttatttatttgagatctcatgatgatataaattaaatcagatatttaccagtacctgaaaactgaggtatctaaccactaataaaattagtctgcagcacaggtctgtttagaagaaagactagggattacaaaatactatcaagccatatggtataggaagttataaaaactattttttgagcagagtagaaattaatgcttatttattcttgcctctttagaacatgatttgaattcagcattacaaacagctgttggaggcctgtttctttaagtatgatatggtccttttacttctgtatgagaagcaccaggagtgcataggaaatcagcctggttccattctcaaaaaagcttacatatagagaacagaatgtgcacaagcaaaggagagagattaattcgttccttaaaggactaggagggacttctttaggatctagtatttaaggca

SEQ ID NO: 398023 - DNA, 151 bp, Homo sapiens
tacgataacaccaatgttgtttggccgaagggcagaacttacagtaagtacctgctctgacaccaggaactatagagaaactggaaatcttagaggcctggggtgatatgatttggttgtgtctccactcaaatctcatcttgaattgtag

SEQ ID NO: 398024 - DNA, 168 bp, Homo sapiens
taaaattttgttgtaggtccaaaaataaacaaaaaggtagctatgattcccaatttctgtattgtacaaaagttattaaatcctaccaatgaatactattatttgtctaaatagtttataaaaaaactgctcagctacaaactccctgaacacagcaaatagcttata

SEQ ID NO: 398025 - DNA, 240 bp, Homo sapiens
tatctctaacattaagtaatttactgtccctttggaaggtaatatatattcccctaaacaggaaaagtaagtttgcaagggagcatggtttatgtacagtcacaggagtagggcttgtaaaagattctgtagatattgaggaggaggtatgtgtgagacagagcatgggatttaacatgtatagtaatgacctgcttggagatggaaggatttgagccaagttttgtaatgttagagata

SEQ ID NO: 398026 - DNA, 495 bp, Homo sapiens
tttggtagctggagctggcaagaaatctttcttattttctgtaatgtgttttataaattatgtgtggtctaatgattatatggttgtaagaaaaataccataaaggaagagtgtttgtccttagttttcatctttagttatccataaaatctgaactctaccctgaaaaatttgtcgtcattgtatttttcatctttcctcgatatctacttgttagttcaatactatcttttatcaattttaatgtactgttccaaagaacatatttgttactgttttcatagggaattgagcagtaggacgtttttcttacagaattaaacttacatttttctccatccactagatggctcaagtgcaccactttggcagctcagattgatccttgcttgctttgcttgtagtttctactttgagtactgtttgctttttaaaaactggatgagcccttacctgaacctagctttacatatatgtgatggcagatttcctcgc

SEQ ID NO: 398027 - DNA, 976 bp, Homo sapiens
cgcgcgctgcgcccctgctgagcggcgcggagctaccacgccctgccagactcgcccttgggtccctgtctgacgagctctaggcaatctgccctcgttcgggacacaaccatcggtctcacccctcagtttctgccagagaaaaaggaaaagtcaccgagaggcctgaccctgacgggtgggggagatgcgcgtgcggagtagcgggaagcgactgaggagcggggaatgggcagcatttgaatggatgcgggtgccgctggcacccgggaagacgctgggggccggcgctgtagagccgggcatgggctgggatgtgtttggattccaatccgggcctgacaccagttcagtgacctcgggaagttccccaaccctccgggcctgtttcctccctctgaagtggcgacagtagtagaaccgacctcgtaggctcatcgggaggtcctgatgggagaacccatgcaacttgccaccatagagccaggcccgcggcggttggcgcctggtgggtattaaagacgagtcgggaaagaagagcaggttgatagactggatgctgctatggtaatctgcctcaggaaaatgccggactgttgtttgcaagctggttaagtgagcaaatcttgggaagatttcaagcacaccaaacattggcacattgtttaccgtatgtagcaagacccttgcacatttgtgcaccattgtaccccttaggaactttagacgtgtaaccaataatcaccactttttttcaacaacaagagcacgcgataccgagagagcttgcgagggaactcaatatgtcgcggttggcgcgacacacaacggacggtacttgacccttgcgccagtggtgcacatacggttgtttcctggaacccacggtttctttgcacaccagttggcaagatcggcccgggttcccctatagagggcgacggaattaattccgatacgccgggttaccgggcta

SEQ ID NO: 398028 - DNA, 392 bp, Homo sapiens
cccctcacttaccctccccctcaattctcacagcaaccctgggaggtaggccttatggtttctgttttgcaaatgaagaacctgagattgaagaagagtagagattggaggatcagatcctgagaggtcccatgtgctttccaataacagttcagtatattagaagacagtgtggcatccacggccaagtactactagttgatagactggatgctgctatggtaatctgcctcaggaaaatgccggactgttgtttgcaagctggttaagtgagcaaatcttgggaagatttcaagcacaccaacatggcacatgtatacatatgtaacaaacctgcacattgtgcacatgtaccctaaaacttaaagtgtaacaataataaaattttttta

SEQ ID NO: 398029 - DNA, 1766 bp, Homo sapiens
atggccaacttcacacctgtcaatggcagctcgggcaatcagtccgtgcgcctggtcacgtcatcatcccacaatcgctatgagacggtggaaatggtcttcattgccacagtgacaggctccctgagcctggtgactgtcgtgggcaacatcctggtgatgctgtccatcaaggtcaacaggcagctgcagacagtcaacaactacttcctcttcagcctggcgtgtgctgatctcatcataggcgccttctccatgaacctctacaccgtgtacatcatcaagggctactggcccctgggcgccgtggtctgcgacctgtggctggccctggactacgtggtgagcaacgcctccgtcatgaaccttctcatcatcagctttgaccgctacttctgcgtcaccaagcctctcacctaccctgcccggcgcaccaccaagatggcaggcctcatgattgctgctgcctgggtactgtccttcgtgctctgggcgcctgccatcttgttctggcagtttgtggtgggtaagcggacggtgcccgacaaccagtgcttcatccagttcctgtccaacccagcagtgacctttggcacagccattgctgccttctacctgcctgtggtcatcatgacggtgctgtacatccacatctccctggccagtcgcagccgagtccacaagcaccggcccgagggcccgaaggagaagaaagccaagacgctggccttcctcaagagcccactaatgaagcagagcgtcaagaagcccccgcccggggaggccgcccgggaggagctgcgcaatggcaagctggaggaggcccccccgccagcgctgccaccgccaccgcgccccgtggctgataaggacacttccaatgagtccagctcaggcagtgccacccagaacaccaaggaacgcccagccacagagctgtccaccacagaggccaccacgcccgccatgcccgcccctcccctgcagccgcgggccctcaacccagcctccagatggtccaagatccagattgtgacgaagcagacaggcaatgagtgtgtgacagccattgagattgtgcctgccacgccggctggcatgcgccctgcggccaacgtggcccgcaagttcgccagcatcgctcgcaaccaggtgcgcaagaagcggcagatggcggcccgggagcgcaaagtgacacgaacgatctttgccattctgctagccttcatcctcacctggacgccctacaacgtcatggtcctggtgaacaccttctgccagagctgcatccctgacacggtgtggtccattggctactggctctgctacgtcaacagcaccatcaaccctgcctgctatgctctgtgcaacgccacctttaaaaagaccttccggcacctgctgctgtgccagtatcggaacatcggcactgccaggtaggcaggcaggagtgccctaggaggtgctggtgttgcgtgcgtgtgctggggggaccacacggctcacttgctgtggggaagagttgcaggcaccattctgcgttcacgtttgctgaggaggaagttcagaagaggctctgtggctgcattcagagaccagatctctgctcaggctgaggaggctcaccccagggagtgtctgaactggggctgcctggcccacctctgtggccctgcttcagcgagctgcggggcactggcctgggtgggcacctgccccactgtgaccaaccatcagcagtgctggaagaatggacatctggatgg

SEQ ID NO: 398030 - DNA, 335 bp, Homo sapiens
ctgtttgagcgatttcaccttagaggaattttcccatgagtctgttttatagtgttttacaactttataatgattgcgtctgtgttcacttctctcttaaaatggagaaattctgcccttcagtactttgcctaagatgctgcactttaattcttctgacagccggctcagagtttattataccattcttcttttaaatgtttccccgtagagtggttttattagatgtaaaatactagttagacttggacaatcatttcatccttcctgccaccttttagagtctgacttgggaagcctttattatcatgtcttgggataagtagggatggatg

SEQ ID NO: 398031 - DNA, 426 bp, Homo sapiens
ctccacataaaaccaagaaaaacaatgtgaggcaaccatcaggggatgtcaaaattctaagtaagactaactgttttattttattttattttattttatttgagacggagcgagactcgtactcaaaaaagggaaaaggccaggtgcggtggctcgcgcctgtaatcctagcactttgggaggccgaggcgggcggatcgcgaggtcaggagtttgagaccagcctggccgacatggtgaggccccgtctctactgaaaatacaaaaattagctgggcgtggcggagggtgcctgtggtcccagctgcttgggaggctgaggcaggagagttgcttgaacctgggaggcggagtttgcagtgagccgccgagatcgcgccattgcactgcagcctgggcgacagggcgagactccaactaaaaaaa

SEQ ID NO: 398032 - DNA, 161 bp, Homo sapiens
cgctcatttaatcttgtccccctaggaaaaccattgatatcattttggtacgtcccagttatctatccattgacctttatgtgtacatttatatatgtatttttaacaatgatttgaacctgttacctagtttcaatttggttttgttttggttgttgttt

SEQ ID NO: 398033 - DNA, 587 bp, Homo sapiens
  misc_feature (545)..(545): n is a, c, g, or t
  misc_feature (553)..(553): n is a, c, g, or t
  misc_feature (565)..(566): n is a, c, g, or t
tacgctgcaccgtggtcaaatttggggttagggttgggattagtaccatgtcagatgaagggatggattcagggctgagggtgagggccatttgcagttagcaccgggcacagctcggggttgggtgaggctgggtcagggcgagggcttctggggtaggatcaggtgcgtggggcctgctgagagtgtccgaggatctgctcgttctgccctgtggtgtccctgatgggctttttctccctttttgcagggttgctctcagctatggccttggttggagacccagctggtggccagaccccaccacccttttgggtttggaccagggctccaggaggtggcatcctgcagtggagccccagactctccagggatggagtatcagctgaagcaggggcccccatttcacactggaaagggcctggggtttggggttcccccctgccggggaatccagggtccccacccctgcctgctgcctgccctcctgcctcggcctcactctgggtccttgtctgggaaccttagcaccttctttgagccgncgtgcgcntgggtacgagtnnattcgatctgctagggggcca

SEQ ID NO: 398034 - DNA, 452 bp, Homo sapiens
ggatctgctcgttctgccctgtggtgtccctgatgggctttttctccctttttgcagggttgctctcagctatggccttggttggagacccagctggtggccagaccccaccacccttttgggtttggaccagggctccaggaggtggcatcctgcagtggagccccagactctccagggatggagtatcagctgaagcaggggcccccatttcacactggaaagggcctggggtttggggttcccccctgccggggaatccagggtccccacccctgcctgctgcctgccctcctgcctcggcctcactctgggtccttgtctgggaaccttagcaccttctttgagccgctggtggtgttggcgcacttagcagagcaagccctggcccctttcctcacaaacctcactcccaggtctaggcggggaggctgggctgctcctcattgtct

SEQ ID NO: 398035 - DNA, 422 bp, Homo sapiens
ctcctcctggtgattaggacaccactaaacaacaggatgaaggatctgtccccagggccgaagtgatgatgtatctaatattatatcctagaacattcacagagtagctgcagaatgtcttgagctggaacatccccaagaggccatatatatatcccagggattttacagtggacctcactaggccggagtaactgtaaagtcagatggataatgagaattcaggacgttagccacacgtggactgtggcaaaaagaaagtgacccactgaagaagactgtttttcagctctctcatcaattgctgtttccaggagcccacagctccaattactcaaaagaacgttgacttttttttttttggtaaaatatcctgattttcaggttaggcaagcaattcattaaaaaataaaagactgcac

SEQ ID NO: 398036 - DNA, 526 bp, Homo sapiens
acagatgtataagtaaccaagttgaattatagttaactacatgcccacaaagaaaagatctgagccaaatggcttcattggtgaattttctcaaatgcttaagaaacaaatgatatcaatcttacaggaaatagagacaaaataacacttcccaaatattttacaaggccagtattaacctgataccaaagccaggcaaacacatcataagaaaactataaaatgagaaaggtacaactttttaacaaagtgattgcagattaaatccagcaacatgaccaagtggggtttatctgaggaatgcaaggttgggctaacatctgaaagccaattaatgtcataactcctcaatagaataaaagaaaaaatccatatgaccttctaatagccacagaaaaagcatttgacaaaaccaaccctttcataataaaaactcccaacctaagactacaaagaaactttcacaacctgataaaggtcatctataaaataaacctgcagctatctaagtttcagagaatcatct

SEQ ID NO: 398037 - DNA, 593 bp, Homo sapiens
aaggggtccaggctctggttggggctgtggactgaggtctgatctccaggctggtatgtggactgtgggcagtttgaactgggcctgggtcccgggttgagttctggcaatgggctgtgttctagggctgggccaagctctgcattctgtgggcaggggtggtttctaagcatggccctgggctcggagtgaagttctgggcttggctttacacttggtcttggggtctagggtgggagttgggttctggtttagatccagacaaggttctagacattgggctggggcttaagtgttaaggtttggagtggattattagctgcttctgggctctggaggggatcagggttgaaatcagagcttctggctgggttccgacctggcttcttccctgacatcttggcaatatgttgtgttcaaggtttggggccatgctgtggtttgatctgtgcgctgggatgacatgggggttgctgtgctgtgttctaagccaggctttgtcctgagtctagcttctgacccgagctctggctgagctgtggcctctaggtcgacctttggccctgggctctgtggccgtgggcaggggccag

SEQ ID NO: 398038 - DNA, 392 bp, Homo sapiens
ccccaataatacaatgctgttaagaacttaattttcagtaaatgttactcttggcttttagtcttaatttaaccccacaaaaatatgtacttaataaatttttaatacagaaaaattatcactggcttatcatggctgacgtcataattggaagttttgttcaacactaccaaatgccgtgaagtaaagaaaagtgaatgctgagtaggttagccaggcttgatttagagcataaaaggataactcaggatttcagtaagtctggttattatttatatacatcattacaaatctgtttttggggtttcctggcatactgcaacaaataatgtggaagggtattattggaggcaggaatattgatgccattgtaaaccacaaagagcagttag

SEQ ID NO: 398039 - DNA, 520 bp, Homo sapiens
tcaaaagttaattcctaggaagaatttgattataacagtctgttccattataaacacactgttttttagccaattccaaggagattagaggtaggtttcaccaatcatgcatggcaggatcagaggggatgcaaagtcctggaaactgacctaaaatactgccagtaaaatagtgggtagttgtgggtgccctgctcttatgaacatctgctgaacccttccttggtctgattctaacccagggtacagaagccctgacactctggtaagtgttcaatctgagcagcctaatttgacttcattctgtttgggcgtcagtccaactggcagatgttcttatagaagctgatctccgacactttccctttctaattttctggcaccgttgcctctgttgcatgggctattatctctgaaactttatctcgggttatccaggttttgcttgttttgtaggctttagttttcccttaaatctttctgccccaaagaagttcatttgaaaaatactaaatcactg

SEQ ID NO: 398040 - DNA, 400 bp, Homo sapiens
ttgtttttgtttcaattcctgttgcaaatttgccaaattattttctagggttaatacatactaaacataatagaatctttctttgataaattagaacattatagtgtcctaggatcatctttctgattatcggtgatactgttagggatatgaagattataacattaacagtacctgagacattttttgtgtatatatgtcagatggcttgcatttttatcagttgttgtattctagaaaaaaatgaagtgaaaaattacttctgattgagatgttagtataccctacccttgtttagtttttaagaataatttttcaattatgaatactcattaatttttgaaggatttaatgaggtatgaacaaaactggtggttaccaaaactatccctattctcat

SEQ ID NO: 398041 - DNA, 535 bp, Homo sapiens
agctccagcctattctcaccaggcccattccctccttccctcctcattttcctttctgcctccctagctgctctcttcctcacctacaactttgtcatgtaactgttgcccttctgttaaaagtctgcagtttaatttcaggcccgagttcctgccacttcaagacttcaccacctgagacaatgagcagcagcaaagggagaaagcagctgctcaaattctccagtatgtgtggatggagtgaggagggatgctgggataaaatacttagagaaaaaccccagcccaggggcatgggcccaaatactgaggggcaaaacctgaaccagaagcacctatatgatgagaaagtgaagaaaaaaaaggatgacagtaaaatggtactggaattagggacatcataaaaattgacctcggttttagatgttgaagaaatgacaaaatgaatagaaaaattagtagagttaatatttatgtctaattattatgcagtatatttctatatataatgtgttaataaaacttaaatgtatta

SEQ ID NO: 398042 - DNA, 263 bp, Homo sapiens
tcagaaacgatcatagactggaggactttaaggagacatggtggctaaatgtgctgtgatatcctgagtgcagaacggaaaaaggacattcggaaaaacgggtgagctctgaataaaatgtggattttagttaacagtaaagtaccaatgtttcttccttaattgtgacaaatgtaacataataatgtaagagtcagcaacaggaatcactgagtgaggggcatatggaaactctgtactatctttgaacttgtcttcaaatg

SEQ ID NO: 398043 - DNA, 423 bp, Homo sapiens
caacaacagaaacctctgggaccacaagacaggtgtgatggtgtcacatagtatcctccaagctttgttctaacaacaaagctctcttggttaggaatttctggtttacagtttaaaatgttagcgtaagacactgatgttccaaaaaaaaaaaaaatacaagcctacttcatgaaaccaatgcctgttgtgcaaataaatacagagttagtgtttacccctggcagggcatttttctttgagttggctgcagagcattaaaaaagacattaagtagattatacatttacatgaagtcccttgttatttttaaccataaaaaaaaagcatttttctttttgatgatatatatactaattgtgaatgattacaagaggtgactttgtaagacagtgtaattgtgttttttcccccacagaaatt

SEQ ID NO: 398044 - DNA, 462 bp, Homo sapiens
gggttggtcctgtcctggggctcgcacagtaatgacagcccagggggactggggcattagagtagctttctctcaaagagaagtaactgggtggccccagttcccccagatgctcctgggggttgggggtaggactgtctcaagctgatattgactatgccaccttcactgttatggatttgattcctcacagaacaaggtcagcaaagacccttcttcctatgtcaaactatctgtaggcaagaagacacatacaagtaagacctgtccccacaacaaggaccctgtgtggagccaggtgttctccttctttgtgcacaatgtggccactgagcggctccatctgaaggtttgatggaagaagggctcttgaaacagagttaagaggtttttaagccaggcgggctgggaagcttgaagtgcaccttgagcaggttctcctggcagcgtttaaagtcagcc

SEQ ID NO: 398045 - DNA, 465 bp, Homo sapiens
cagactcttattgagtacttacattgtgccaaacactaagttaagtgctttacatggattatctcattcagtaatttggtaatctctatttttcagcagaggacactgaaacctagagaaattatgtgatttgcttcaagtcctacagagggacactcatagagccagattttaaaccaagatggtctagtccagagccagtacatgcaggatttagaatatactcattttatttttccccttttccagtttttttttttaagtactatgagctttcttagaatagtctctttcctttatatctgcatccttatcttttagtatagggctaggcaccttagtaagtgtttgacaaatgtttgtgaaaaggataaatgaaagacagagcctaaggcataaaattttaagacaatacactgaagctgttacagtttatgattgaataaataaagtactcagctctcc

SEQ ID NO: 398046 - DNA, 520 bp, Homo sapiens
aaatgtctattctcctggggaggagggattctaaactttccttccgtcctcaatttctacctccatagaccggccagaatttagcttcacttgagagagatctggaatggtcgccatgattgaaaccacgcaccattacatcatcattacattaattacatcaacataaattatttcttcccccttcccttttccagcactcaaccaaggagcaaagctcatcccaccccacacccctcccaggtctgctcactgccaggctcctctcccctttgttcagtggagctggcttttctcccagcccctttccatgcctttcactccatttggcaagctctgagggggagcctggggacgggtttgggtccccaggaggagagccttgggtataatctatttttctaggagcctcttgccttgtcacttgcagctttcgccctctgctttgatggctgaggtgaactcatgttctttgggaaaagggaaggcgtgctgtggaaataaaatgtttatttgcttc

SEQ ID NO: 398047 - DNA, 194 bp, Homo sapiens
atgacacttctggagttagattgccattcaaagtgactacagtgaatctatcagttacagctggaatccctctgagcatagtcaggtggtacaactgtgaccactgagaaaaaaggcattattaggaaaatggatatagccttagtgtaaactgaaagtgagatggcttttaccatggacaaaattgttaataa

SEQ ID NO: 398048 - DNA, 366 bp, Homo sapiens
agacctcatcttccatgactgcttgctccgccctctacccttcaaccactttggcctacttgaactcaccaagtgtggtcttccctcgggggagtcatgatagtctcctggagatggcagggtctgctgaggtgactcttctgctgccccagcttcttgagtctgtggctccactcctgcagtgactgtgccatcctccctctgccaccctgccccatggtcatgagctgggcttgttgttaccagtactgcgccctttctgtaatctcaattccaagcttcccacctgtcaaaatttctagcttgtttcccatcatagccccacgtaaactcttctccagcctcaccacatctatattgcattgt

SEQ ID NO: 398049 - DNA, 645 bp, Homo sapiens
tttcttgttatttctgtgacagtataagatctttacaatgtaaggtgtataataatgaactaatagatctgagtaaaacctgagagagtattcacaacaggggtgtattctataccatcacagtctcttccaatcaaatcactgtgcactctgattgttgggctactagaccataaatgagctctgtgccattctcttctcttatactcactgcagttcagcctccatgctaacaatgttttagccacttttctcttaacagccaaaagctcatcccatcttactgactaacagagctggtaagaccttagaggtaacatattctaattgccatattaaaaataataaaaaagcaaaacctgaaatcctgagaggttcaatgacttgcctaagttcacataacttggacgggttagcaccaggactaaatctgggtgtggctcccactcctgtggcttctccctctattgagatgtaactggaatttcagactgtggggagcactggcccaggctagcaagtaagtccctcagctcagatacttggtggatgagcctcaaaagcatggatcaatttggcctctgaagggatccccagggtctgtctctatgtgccgaaccacttgcgctctccagccagtacact

SEQ ID NO: 398050 - DNA, 293 bp, Homo sapiens
ttatacgtgtatatatatgtgtgtatatatatatgtgtgtgtatgtatatgtatattgcagcccccttccattgatcaagcagtgggcaagtgtatattaagcatcaaatgctgtaatatctaggctcaggggctgaacaaaaggagtatttggcacaggagtttgaccttaagaaggaggtagcttggctgatgggggcaggttaagatgcttgaaacaatttgaaaacccttcagcactaagctgtgtggttctggttatcagtacagtgggggttcagagcagggagcct

SEQ ID NO: 398051 - DNA, 751 bp, Homo sapiens
ggactgcccatatatgggcaatctatgcttctggggaacatgatggaagaagttatggttatcacacaaatgtacaggtcagagacaataaactttggtgagggtatggatctatgaatccatacgctcaaatacagttgtgctgttggagtttgtcactgaattcccgaagccctatatagacagcagatgtttttgtaggttgaggcaaggctccattttccttctgtatatgttcagctctctgggtatttcattcatcagatggcagcttggcttagagaaggtgttggtctgtattaacgcaatggctgccaccaagtcactacaagcactagggttctatcaatgatgatctagctcagtggctttgtcatggggactgccaggggaaagaatctggggctggttccgtcagaagctcctaccagctgaaaggaaatggcagatattcaacagataatctactgtatgctggtctctgcatgggtattttatttcttataaagaagatcctgcttcttactaaataggggttgtcactagaaccctgtaatctcttcaatctttatgcccttatttaaaagaatttagaataaattcattctaacagtgagctaacatcatagaccaagcacacaaactaacagttaattctgcagccctgggaactttttttttttttttttaaatgacagagtcccgctctgtcacccaggctggagtacagtggtgcgatcttggctcaatg

SEQ ID NO: 398052 - DNA, 476 bp, Homo sapiens
ggatgtggtcacactgcaggactggctcttgccggccatggaaactagccaggtattatgctgatacacgtatctccatcagcagctaacaagacaaggaatcaaaatcactgctaatttacccacaaaactgtccatcttttcccctggtatcattcccctgggtctgctatggggcatccaaattccatcagtttcttttatgcaaacctacaccttttcctctttcacttaccatccatgctaccctcagggtaccatttacaccaccttcccacatccccagggtcacccaaactctgagcttctcgggttttcttccctaatcggtctcattttcttcacacttcaccagtgctttaaaaatgcagctttgtctcgtaaatacctgccttttgaaaggacatactactaaatttaaaacaccaggctgcaagatcctggtttttataaaaacaaaggaagaaaaacagcaa

SEQ ID NO: 398053 - DNA, 230 bp, Homo sapiens
acaccttgatggggtattttacatccaccatatggatgtaaaatccatctacttggagcaaaaggaataggagcaatgttcttggctgttaacggtcacccttggcctggcgcggtggctcacgcctgtaatcccagcactttgggaggccaagatgggcggatcacgaggtcaggagatcgagaccatcctggccaaaatggtgaaaccctgtctctactaaaaataca

SEQ ID NO: 398054 - DNA, 239 bp, Homo sapiens
tatagattcgatgtgctgaggaaaccctgaggcaaaaagaaaattatggaaaaacttgggaaaagttaacatttaatacatttcaatatgtctaactgtcaacacgatgaagagggcagaggagatgcaggtgagactgtaagctagccacacaaagttcatgattctaatttttttttttttttttttgagacagagtcccactctgttgcccaggctggagtgcggtggtgtgatct

SEQ ID NO: 398055 - DNA, 172 bp, Homo sapiens
ggcgcccctgcactccagcctgggtgactgaccgggaccctgtcttaaaaaataataaaacaaatgcagaatgaaaactttttttaataaggaaaagaattaaagtaaggaaggagaaaaagaatgcgctatttccctcaaagccctggccttcatgaggtgttgagatgta

SEQ ID NO: 398056 - DNA, 298 bp, Homo sapiens
ctaaaaaatgtaacgtttgtgacaaagagggaaaagagggaagagcttttggggtggaggggacaaaataagcaaaggcccagaggcagaagggcccaggagacttgcaggtctacagaacatacaaccggaagccagctttccaaagggtagggaaggagagaggatggcttcagaaagtagtctcagttaagactggaaggatatggggtctgaacttaaagagccaaaaatgtaagcagagggcttgacattttattctgcagattatagagagaccttgaatgtttttaagcaa

SEQ ID NO: 398057 - DNA, 569 bp, Homo sapiens
tttttccacagcagcagatagaaatgtcagttttcagctttcttgaagggaaactgtaagaaaaggaacagttggggcatttttcagtgttgatcacccaggtgattgtttgagttgctcacagcaaagtgggatgaagcccttgtggtgctgtctacataagcccttaactataagtaggtagattgagattgacagcttagaagttcgtactgctttccacttgatatgatgtctgagattgtaatacatgttacctttatcatctactgtggaggttctcaactttcaatctcccccaacatacttgagcaacatgaagccttcttatcactgtttaatgaaaacattgtggttattcccaaccaggaggggccagtatgtatagatgagtcattaggcagaagacagggggtaacggagtttgaagaagcttccaaatgactgtgacattcatagacactgccacccttactatgaggggctgggatgggggtgataatgttcctcaggaatattcacatataggccttgagaattactgatatatggcatcatttactcttttc

SEQ ID NO: 398058 - DNA, 354 bp, Homo sapiens
aggaggcacctgtgcccttttaggaacacaatgttgtacctttatccctgacaattggcagaacataacagcagccctgcaaggggtctcacaggagattaaggtagtcaagagccttactgatgaccccctgcagagatggtagacatccctgggctctggcctacgctgggccctgatagtcataagtagcatagctggaatcctagtcatgagctgttgctctccgtattgttgctgtggattatggattcagggctccaccctacgggcacatgtccctacctggaggatgcccctggcctaggggtggagtgtaaggaagatggctgcgctttagtcaggagcaggctg

SEQ ID NO: 398059 - DNA, 419 bp, Homo sapiens
caaaaaagagataatatgggcttagaccaagttgataacaatggggaagcagaagcgtaaacagatttttggcaaggagtgaaagagagtgctaagaatcaaagaagactcccaggtttccgacttgagagttgatcattgatctatattgctaacaatggtaacaacggaggtaaaatatatttgtgttgaacgtgtgggatgaaaatgatgagcttattttggatttatacatgtttaaagcttaggagagaggactggaatggaaatatggacctggaagactttgcaatttggatgattaaagccttgggagtgggtgaaattacttaggagctaatggaagttaggagagaggctggaatagagctttgaggaggttcaatatttaatggcttggtggaagtggagtagccagc

SEQ ID NO: 398060 - DNA, 672 bp, Homo sapiens
atgaccctcccctagtcactcatccatcccctggctccagagatggtcacatgacccaggcctggccagtcaaagtagtctctcccctggccacagtaattggtcatgtgatgcaagccagcttactagcactttgagaatgagtctcctgttgagctggtaggatgtaagcctggagctaatggcgatcatctttgccaccacctggggagagcctgcttgggaatgaaattaacacaaaggaagtccaacctgagaaatggccaaatatatttcctgataacattatgtggccctctggatccagccatgcctgaggtctacccctgggcttttggattatgtgtacagttggttcatccctttttctgctaattcgagtcatggctaatttaacaccctttagaaccttaaagaaccatcagcatcacccgggaacttttttagaaatgcaaaatctctactgctttggatcctgggtcaaaaaaaagaaaaaaaaaagaaatgcaaaactttaggccctgccccagatttactggggatcctctagagtgcagcttcatcctcaggtgattgtatgctcatgaactttaagaagcagtgttttagaacaggtcttacacaaggaacaataaactcattaactaagtactgttaaaaaaagaaaacaag

SEQ ID NO: 398061 - DNA, 162 bp, Homo sapiens
cagctcagacctccttcaactccagctacctccctagcctctgggtttccattcttgtcaccccctactcaccccagtgcagcatctccacatggccctagaaacatttctttcctttttttttttttttttcccgagacagagtctcactccgtcacccag

SEQ ID NO: 398062 - DNA, 326 bp, Homo sapiens
cagaagagtgagatgctaaagttgtcatagtgcctctttaccctgcttggctccagacttctgtctttcacgctttgatatcccaggcaggtttgagggatccttcctggagaaatggaaccactgaagaaaaactgctcaacaggtactagtatttgaagacctcaaaaaagtgctggctggccactaccctgctgaagtccaccagttgacagcctgcagacacgtagtcacctttttattgttaacctctaaaataagaacaaaggactaaacattgttagccattttaggaaagtttccagtgtaacttagaaacacatacc

SEQ ID NO: 398063 - DNA, 608 bp, Homo sapiens
tgtctattgcctgtatagcagctgtgtaatccagaataaaaacataaatgagattatgttactccttttctcaatgcatttcactgagagttgaatgcaaagttcttaacctagcccacaaggctgcacatgcttgaatgtctcacagcctctctgatctcatttcctatcatttttctcctcactcactctgttctaaccatactagcttatctgccattccttgtacttactgagtgcattcctactacaaaggctttgcacttgttctctgcctgagaagtgctcctttgtataatcatggggctcattccatgacttccttcagtgctctgctcagatatcacctctcctaagatgccttccttggtcactccatatacaatagctgccagtcattcttcattgtccctattctgctttatttttgtcatagcacttatcacatctgacataatatttactgattttttgttttattattttccttcactagaatattggcttcatgagggtagggacattgatcactttggtcactgctgaatccccaaggcttggaacatcttgaaacacagctctcagtaaaattttgttgaatcattgta

SEQ ID NO: 398064 - DNA, 671 bp, Homo sapiens
aaatattttaagtttttttattttgcagtaatttcaaaactacacaaatgttacagaaatttagaaagaagtatcttcatctagactcaccaattgttaacattttaccgtatctgcctaattattgtgtctgtatctattttgttttagttttttttttgttgttgttgttggttttttgagatggagtctcactcttgcccaggctggagtgcagtggtgcaatcttggctcactgcagcctccacccccctgccaccctgggttcaagatattcttgtgtcttagcctcccaagtagctgggattacaggcgcccgccaccacgctcagctaatttttgtatttttagtagagacagggttctgccatgttggccaggctggtttcaaactcctgacctcaagtgatctgcctgtctaggcctcccaaagtgctgggattacaggcgtgagccaccatgccctgctgtgtctatatctatttctatatgtatatactaacgtagtgggtttttctgaagcatttgcactcatttcccttatccctgaatatttcagcatgttttcttaaaaacaaggacttttcttaaataactataggatagttattaaaatcatgagatgtaatattgatataatactattattacttaatccaaagaccatattc

SEQ ID NO: 398065 - DNA, 261 bp, Homo sapiens
ttcgtgtccgtctcagttgggcacgagtcttagcagtgcaagaagacatagcatctgggctttggttataaaaagtgctaaagttcaaaatctggcaatgccacttttagtgtgtgattatttaaattttatgagcctcagtgacctcatttttaaagcagaaatacttttttaaggattcaataattccatgtgtgtaaaactctgtgcacagcattggtaactagacgaaatcaataaatggtgggcatgaatgatttg

SEQ ID NO: 398066 - DNA, 459 bp, Homo sapiens
ggctcccaggccctctctgatcctttccttctctgaagactggatgtttcaagggcagtgtcatgcaatttacgatttcagtctaatacttattgttttgttggctgctatgtcttgtgtattcatttatcttctacccccaactgagttgtaaactctttgatatcagatacatttcttcttgatctccaggggatccagggctgagaacctgggtggaacacaataaatacccattaaatgatttatggtgtggcctatttctgggccagccctgggaatagggggtaaggcatggtcatttgctatcaatcagtttctgaaaatatactatcatttttttgcttggatccctgatgataagacacaagtcaaagaaccaaaattttaccaggtgataggaatttttccaagtgataggaagcaaataattatgtaatcaagacaagtcatagttgt

SEQ ID NO: 398067 - DNA, 631 bp, Homo sapiens
acattgtggctgcaggatgagaggtgctgggacaggagaagggccagtgtttcctggaaagtggggccctagcaccacctgaagtaggagtgtgagatgcttcagggggaggtgcatgctcagagtgggacagagaagtgaattctgggggagagttcgtccatgcagggtgtactgggaggttcagcctggctgatggggggtggggagcaggatgtggagtgccagttctctgctccagagacaaggtggcacctgcagaactaggtctcttgggctggtcccaaagcctgcatcactcatgacagacctactatggagccactatatggggtgagtgggtttgtgaggactcagggggacccaggacagtttcctactagtggcaaggcctcaggagcatgagaaagggaaaggctcacacggggtccctcgtgcccctgcccgagaccccggctcatctccagtagtgcaaaatcgagggtacactgatgaaggctgttgcttgcactttcccagggaactatagaggccaagctccaacggatgacaaacgaatcaggtctggaatccttgcttcccagctttcaattttgtgttttcttccctgctgtagtgtttgccaaactgt

SEQ ID NO: 398068 - DNA, 453 bp, Homo sapiens
aggaaaggccgtcttttcaacaaatacttgtggagtaatagacaaaatatgaacttcagcctaaagctctcacattatacacaaattatttgaaaataggttatgagtttaaatgtaaaatgtaaatctatcaaacatttagaagaattcttagaagaaaatctttggaactggaggccaagtgatgagtccttacccatgacaccaaaagcatgatccttcaaaaggaaaaatgataaatttcactctatcaaaatttaaaagttttgctttgagaaaggctgttaagagaataaaaagacaggcttcagatttgtgagaaatatcacacacaacaaagaacctgtatctagaatgaataaatgatgctcaaaattaaaaaatatcccaaaagattgaattagaaaatatgcaaaagatatgaagagacatttgactaaagacggcaagcgg

SEQ ID NO: 398069 - DNA, 434 bp, Homo sapiens
aattttacttcagtgaggtaagtctactttgaattggcaggaataaaggaactttatataactcttaaaagatctcattatcagaatgaaaaatgcatctactttccccctaaaaagcatctttcccctatgaactcataaacccaatgaaaatgttaagttctagtctcttgactcacttatttagattaagtcttaataatgcattaggaaacccaattatagtccatctacccctaagatgcagctgtttcaacatttccatacaggattcttacacatctataaatgaaataaactatactggaggaatgaagcagccaatgcatgcaacaagttatataggcaataatgttgctttcaaaggagtttttgttttgttttgctttgtttttcaaatggagtctcactttgttgcccaggctggagtgcaa

SEQ ID NO: 398070 - DNA, 376 bp, Homo sapiens
tcctaagcggattatttctgcctaagagcagttactaatagtattactaatattaataataatgagatttgctgagcacttgctacatgccagatgtttggtatacattttcatttaatcctcacaaagcacgttataggataggtaccattatgatgtccatttacagataaggaaaaggactcaggaaaactgcccaaagtcacatagctaataaccaccatctcatactgtttagtaaaaagtagtaaatgggctgggcatggtgacacacacctgtaatcccagtgctttgagagaccaaggtgagaggatcatttgagaccagcagtttgaatacagtgagctatgatcctgccattgtactccagcctgg

SEQ ID NO: 398071 - DNA, 352 bp, Homo sapiens
ttgttagggacctccactaatcagatacctgcaaagaagtccttgaagttctttcccaaggacacacagctagtaagttgcagaggccttttagtttcataatttcataatggcataaagcagagaataaagagtgaactatactgccataatgtcaattatccagagagaaccactcaaatttttacttttattcattttttactttttaaaatatttgtaaacatttttatatatttccttctactcagttctctacatacctacccatttttcctgttataaaactggaatcacgtgaaaactttcaattgtaccttctttttgctcaggacagagtcttgaagacacc

SEQ ID NO: 398072 - DNA, 254 bp, Homo sapiens
taactgttcttcaaactagaagtgagagctgtcatctatggctctggtaaactctcctacccactgggacaagaagagtgttctggggccaagatttaaaattagtgaatttggacaaccttcttcctctctgaaatgagcccactgtttctcagcctggatggaaccttctataaggtcgtacaaccaatgtgactgccaggggacaatatgaattcagcttctggattctggtcatggggagagcctgctgg

SEQ ID NO: 398073 - DNA, 523 bp, Homo sapiens
taggtgtggtgcttggtgcacggtaggtgctcagtcgaggtgctttccctgagcttttgccctggggtactggcgacattcaaagctgagcttgagcagctagcagaaactcaaggctgatcccttgattgggcaaactgatgtcatcccatcctctcctgaggtgtcagccagaaggtggcctttttggtaaattcatgaatgatgatggcttcctaatgggcccccaaaggagccaaagctcctttcagatacttttctgccttgggaagctgatgtcaagaaggatctgcaagcccttgaactccagggtgctgaaggcaggtttgtgatggggtctcaaagaacaggaccggctagaggaggagggggaaatccaggaaatctcagggaagcctgagctctcagaaccttttttttcttagtagctttaaaaaagaaattgacgcagggcacgatggctcacacctgtaatcccagcactttgggaggccgaggcgggtggatcacctgaggtcaggag

SEQ ID NO: 398074 - DNA, 102 bp, Homo sapiens
taaacacggaaggttatgtaatgcagtgccatttccaaaaatatccactctgaggcattacactacacggtggaaggctgattccccttctgtcgtcttctc

SEQ ID NO: 398075 - DNA, 1298 bp, Homo sapiens
tagctagctgtggggtaggggtaggatggagactaatagatatatacatacatacatacatacatatatatcattttggaacttcattagtcatgggactatattgctattcaaaacaggcaattaaacttaaagagaaaattacaagtatacattaaaaacagtgacacacaccttgtcatgtcatattcttgatgcctggaggatgaacaacacaagtcaattttttagaatgtcaaaacttgaatagacagagcagtgaaagagaagctggaagttcatttagtcactgattcagcaaacagataatttataaagtgtgcagagtgcctgtgctaggcagtggggaatataaaggaacttgagtctgaccagacacaaacatataatacaatacaatgagttttttgacagagcaaacaaaggggactcgccactcataaagcaggggacccatcttaggctaggaatcaaaaggagatacagcagttagctaggttagttagaagtggagtgttccaagaaagttcagcttgtctggagtatagtgtgcctcaaataagcagcaagaataagactgaagaggcaggttagtttgttcagggtccaccataagccatgttagacttgggcttcataaaaagggcaacagaagtagagaacactttcaaagttttaagcctgtgatcagagggtcaaacctacatgcctgaaaggttactctgaaacagtaattaaccaaattattgttttgggttttttgttgttgttgttgttgttgttgttgttaaccaaattactctcctaggtagagaggcctattaggaatttgttgcaacagcacaggcaagacataatgctagcatgaccaaaagttatagcggtaggtacagaaaaagtgcaggaagagttacttgagtcattaaattaagagaccatggtaataaggctataaggtcaagaaagaataaggagtcaaggaagacaaccaagtttctgactggagcaatagagtgaatgagaaatactgaagtaaacttgaggaaggggtgatgggttcaattttggacatgctgaatttgagtgtttatgagatatccaaatggagatatgcagtaatccatgacatatacgaacagtacatgtctgtagccaatgtgggctaaagagaagcatttagtttacccagaaagagaatactatgtgagaagtactgcaggggtaggatcaagccctgaagaacatcaatacttaaagagaatggggaaagaagcacctgtaaagattaaaaaggaaaa

SEQ ID NO: 398076 - DNA, 137 bp, Homo sapiens
tgagaggactggggaggaaagacttaggtaggaaaggaatggacctacctttgtgtgttacaaagataactgatggttctctggaggatcagattagagatggcaagattgcaatcttgggtgccactgcaataaga

SEQ ID NO: 398077 - DNA, 450 bp, Homo sapiens
gcaagggaaggaaacctgcaaaagtgtggccaggactatttttaaaaggctttctttccccttggtcctggtctgtatcccagaggcaaagaagggctatttgaggagagaaggcaagtgtgacttgagctaagcccaaaccgctgtccctccttgcttcaactcaaggattctttggaataattgagaccgactaaagaaggagggaaagaaaccaagtcatcaattgcccagctgttgctcagcctggttgtggacgggagagaggtgggggctggtgggtaggaggtgggcagggggcagaaagtgctccttccttttccttagcagactctcagaaacactctcaagcctccagcaggcagcccaggaaactgtacccccgccatgggcatcaccggattttaaaaaagaaataaaatttaacaactgtgcaaccttggccaaatc

SEQ ID NO: 398078 - DNA, 343 bp, Homo sapiens
cgtcttacactttgctacttcttacatacctgtcttcttacttgttcctattgtttacaaatctgcccaaagatataatttttatgatattaagagctgaattttgcttaagaaaatctacatatcttttgtgattcttctaaatctagtaaatcaagtaatcaacagtttattctctgcttgtaaaaaagggtagtaatttttccacataaaaatcaaatatataagcaaaactaatatatttgttgacaaagttgctccagcaagccttgaatttttcattataatttagctataaatagacccaaggaatctgacatccaaggatcattaagcaatcata

SEQ ID NO: 398079 - DNA, 410 bp, Homo sapiens
gggtaagcagtgggcagatcacctaaagtcaggagtttgagaccagtctgggcaacatggtgaaaccccgtctctatgaaaatacaaaatattagatggagccactgcgcctggccggtgtgactattttctttcaagttgaaagtcgggttccatgaaactctagtattagatggatttaggtgaaggttaatacctctgattgtttgaggcctgaaatataactaattaagcagtagtgaatctcttactacatttgcttcaaagcagctacttcataattgaacgtgtgtgtcattaattctagaaatctgttacacattgatttggtgttgtatcagaggaggatacagaagaggaatggcactgactagtggttttaaggcacaatattggaatcacctggagag

SEQ ID NO: 398080 - DNA, 523 bp, Homo sapiens
cagctactctggaggctgaggcaggagaatcacttgaacccgctaggtggtggttgcagtgacccaagatcgcgccagtgcactccagcctgggcgactgagcgagactccatctcaaaaagaaaaaaaaaaaagaactggaggagatatttgtaaaattcatatgaacaatttggaaagttgaaggaggggcttgacctactagatatcattataaagctaattcagtaattacataagtaattaaggcagtggggtactagagcagagttaaactcatggaacaaagtagcccccagacagatccaagccattattagtgctttgtatttaatagagctggcataagaaattattgaggggaagatgaactcttcggtatatgatgttgagatgactgggcttctaattggaagaatgactagagccctccttcacactacacacacaaataaactccatggctgggcgtggtggctcatgcctgtaatcccaacaatttgagaggccaaggagggaggat

SEQ ID NO: 398081 - DNA, 393 bp, Homo sapiens
ctgcctggattgctttttcctcagctcctcagtgactggcttattcttatcttttagatctcaactcaaacatcttctgttcagagaaaccttccctgagtaaccctatctgaagtgtccttcatcatctctggtctttctttcatagtatgattatatagtgtaattgttaacttatttgttcacttgtttactgtgtctcccccatcagtgttccaggagaggtggggcattttttctggttaaccaaatcctcaataattaccacaatgcctggcacactgtaagcacactgttatttctccaacaaaaaactcaatgaatgaatctaggatacttccgaaattatgacttaggcagaagtagagcaaatgtaaagaaaagcctacacag

SEQ ID NO: 398082 - DNA, 481 bp, Homo sapiens
gttacctcctgggaaagcaagacgctcccttaagttttagaatggtacagagagtagtcccttctaccagagtttccatttagacatgggagtgtagggggccatgtttcggcagaagcagggcatgtatcagcattagtggactcctcagtattaaaaggaagaacagcaaacatgtcatgtgcccactttgtgcctcaggagaggtagcccgtggacatcgctagggcagaggttttaatatctgggacaaagttatctcccacggcgaggtcgtggctgggaccatgtcatcttcagccgtgagctgctgggctgggcaatgtcttctgggatgtgagacgtggggtctcctttctaagcggacccccactcgtgctgatgtgggtcccagcatttgccgcgtttggttgaaacagtggcttacctggagggtctgggtctctggatcataaaccagcgaaagcccccacatcagtgg

SEQ ID NO: 398083 - DNA, 290 bp, Homo sapiens
atccgactcaagctaaggtaaacagtggctgctgcatctttgaaaaatgctagccatgtccagttttcatcaaaatatttatctagaggatacatggtcaaattatttttgcttaactactctcatgaataagtaagtactcctgcaagttgcagggggaaaatttatgcaagatttttcttcaaatgacagattcatggttggaagtctgtctcagggttatttatttattgtcaggatggcagtctccgctggcagggctttatcgaggggtgtgtcaagaattaatt

SEQ ID NO: 398084 - DNA, 274 bp, Homo sapiens
cccaccttggcctcccaaagtgctaggattacaggtgtgagccaccacgccccgctgggatgtcggttttcaaggctaccacagagctgagctggggaagggaagatggaaacaagagttaaaacatcacaaaatgggctgggcgcagtggctcacgcctgtaatcccagcactttgggaggccgaggcaggcggatcatgaggtcaggagatcgagaccatcctggctaacacggtgaaaccccgtctctactaaaaatataaaaaattagcc

SEQ ID NO: 398085 - DNA, 191 bp, Homo sapiens
cttatcttactaccagctaaagaattggtgaacatcaattaagattattttgatcatatgtagaaaagccaatattgttctatagacataaaattttactttctctttaagtattgttacacttttaagttttgattctttgcatatgataatatcaacctttgtttgatggaagcttcttaggctggtgc

SEQ ID NO: 398086 - DNA, 287 bp, Homo sapiens
gttttaggatactttaactactacgcccacactaagagtttcttctctgcatatgtggtgggaaccttggtgtacagtgtggttttgtatagcaaacaagatgcatgtgtgtgtaagaatatattgcatgtattcagtcagttatatagcaaatggtgagggagagcttgctacgtggctgacactgttctacgcactgaaatggggcagcaaagaagacacacgcaaattctgtccttgcggatttttacatagtaattgggcaaggaaggcctggaggagtttca

SEQ ID NO: 398087 - DNA, 421 bp, Homo sapiens
catgactcaccgtggcacaggggacagaacagaacaaggaagaatccatcaacgaatggaaacttgtctttttaggggacaggaagctttttttgtgtggttggcctggtggcttatgaggagaggtgaacatttgagacaaaaccccaggccactcttccagctgcatctttgacaattttgagagttttaggaagtagttaaaaaaagaaaaagagaaaccaaaagccaaagacctcgtttactcacaatacctgtgtacagccagccatgtgggctgcgatcggccatgtgtctagaggaaactccttcacttgcatccctccctcctagacccctaaaccagagggggcttttgactattcttagaagaagacttaggcggcctcaaatgaccagaccttgtctcaagcatctaaca

SEQ ID NO: 398088 - DNA, 544 bp, Homo sapiens
tatttccccttctagactacaagctacatggccaaaaatccctgtatgactcttctctcgatcctgcatagcgcctagcaaaataccttaaacttagtaggtgtacaatacaaatttactcactgaatgaataagtgattctatcaatcaatcaatcaatcaacaaaattgtttatcttcttggttcatatacagtaatacctgtgtcctaaacaacaaccataaaatctactgaggctgactttttttttttttggtattttaagtagagatggggttcaccgtgttagccaggatggtctcgatctcctgacctcgtgatccgcccgccttggcctcccaaagtgcggggattacaggggtgagccaccgcgtccggctaatctatttccttttttatagagatggggttccactattttacccagggtagtcttgaactccggggcttgagcaatcctctctcttgggcgtctcaaagtgctgggatttcaggcttgagccattgcacctgatccttttaattaaaaaaatttttatagtc

SEQ ID NO: 398089 - DNA, 516 bp, Homo sapiens
agccagagttttggagtgaacctgaaaatgtaaaattctttctctgcctccttgactcctactatctcttatttgaagggataattcctgccaacctgatcggagccccattttagccctactcaagacagaaaagaaaggctggcatagttttatttcccccaccccgaccacctactccctggttttttaggtataactgaccagttttgcatttaatttgtcttgtttggtcttgtcttttcatacaatattttattgaattgtgattcacataccataagaacaatcatttaaagtatataattcagtgatttttagtatattcacagagctgtgtaactgctgtcacaatagattttagagcattttcatcaccccaaaaagacatgttttacccattaatggtcacttcccatttccgcctcctacccctaggcaactactaatgtacattctagctctatagctttgcctatgctggacatttaatatcaataaaatgattcaatatgt

SEQ ID NO: 398090 - DNA, 282 bp, Homo sapiens
tgtcttctgcactcactatgtgaactggtctagttaattacattagtaacattaattgctagatccaaaaggatacttacagtctttgttttcttgacctactctgtggtatttgatattattgataattgctctttgaaactcttccatgacttcatttttttccagttttcttttttttaagcctctttttttttttttgctttttttcaactgtccactccctgaaatattactgttttcttggattctgtctttgaccccttctcgtcttatgtatct

SEQ ID NO: 398091 - DNA, 467 bp, Homo sapiens
aggaggtagctgaggagacagaatatggtgaaaaaggtagaaatgcaggccaaacttctaaaaagcatttttaaaagatctgaagttattttgttagtttatgaacttaaaatgcattatgttaaattcctctgctcataaactttacggtattgggatgtggtgagtagaacggagatcggggaggaactgccattgctcctttcaaagttcatgaacaaatcactaacagaagtcctgtggagaaagaagttttaccaattcggttttcttacttgcctactctgggcttttcatctttagctacaacttaactattctccttggcaacccagtaagtattgtcattttaggtaaaaataaatcttttgtgttagaaatgccactacataagggcctggcacggtgactcacgcctgtaatcccagcactttgggaggctgaggcaggcagatcacaaggtcagg

SEQ ID NO: 398092 - DNA, 379 bp, Homo sapiens
tgttcctggggaatggtgagtacattttctagcaagttccttgggactcctgaccaatgtcagcatgtccgcaatgccccatctagattctgccctgaaagagccaaacaggagagcagtagtgtctgccacatctttgtggaatcctgcccttttgcggtcaacctcaactcagggaaagtaaaaagtgcattagaacctaatgaaaatttcaaaagatcttgaaagatgcccaccagcagcagacagtgacatgatcagtgcccatggccaggcatatcacggaggtgtgcagtggccacgagaaacaagatgtttgtaaagcactctgagctcttaactgtgaagagtcagagaggcagaggcaccacagtcctgg

SEQ ID NO: 398093 - DNA, 166 bp, Homo sapiens
tagtggcaggaagatggagctagtgtgtgcgcttgaatgtgaacagtgcctcccaaggagggcagctctgtgtttaatgcaagccataattagttggtcaattcactgatggggaccaagctacagtgagagagagatgctggcagagatgtcttgctgggaacta

SEQ ID NO: 398094 - DNA, 1205 bp, Homo sapiens
  misc_feature (914)..(914): n is a, c, g, or t
atttgagtttatgtctcctaggggagagataaacgtgttaactactatatatctttttgggaaattccaactataagttttgaggatactttgataacaggagagaagaaagatgagataaaagcagaaaagcagtgttaaagttgctgtaagtgctttgtttcatacaaaatatatataaatgcctgtgacacataatatagcccaacactaacatctttgacaagtgtaggatagactgaaaaaaaaaaaaaaggctgaccgcccccctaccgccaacacatacaaatttacaaggcagagttcagataaggttacgtatcattgtgaaaatgagctctaacatatttaaactaaacttccggtactatttcatcccattaaaaaaagtactatctcttgagaccatggtgaaaccccatctctactaaaaataccaaaaaaaaaaaaaaatcagctgggcgtggtggtgggcgcctgtagtcctggctacttggagaggctgaggtaggagaatggcatgaacctgggaggcggagcgtgcagtgagctgagatcatgccactgcactccagcctgggcaacagagcgagactccatctcaaaaaaaaaaaaagtactatctcatcccattaaaaaaaaaaaagtaaaatctctgatactttaaaaaagttaaaatttaggccaggtgcagtggctcacgcctgtaatcccaacactctgggaggctgaggtgggcgtatcacttgaggtctcaggagttcaagaccagcctggccaacatggcaaaacctcgtctctactaaaaatacaaaaattagcagggtgtggtggcgccccccttgaaccaagtttcttggaggcttaacaagaaaattgttgggcccaaagttaagacccacttgacaattggngaaaaccttgtttgggaaaaaaaaaaaaaaacatgggcttatggcaaatgcctttaggggcgtttaaaatactggccggttaaaccgcgattggaaacacgggtcccaattataggttgagaaaccctttttcgcgggcataaagaaggcgcccccagtctttccaaagtccacccatgtgaagcatctggccggtatatttaaacacgcatattctaaaaccttttttaccagtggcgggcgatcttcttataaaaatcccctgtgggggttttccttccccttctggcg

SEQ ID NO: 398095 - DNA, 591 bp, Homo sapiens
ctccttggaggaggtgaggggtgggccggtgtgggccagaacctgaaggtggagccctcgggacctcctggtggctggatgtgggccatgaggggaaggaagccctagggatcacctccggcatggcctggcctgacctgatggagctgctgtcgaccgagatggtcaagtccaccaggagagcaggggtgggggcagctggagctcaattcgggacacgccaggcgtgagatgatgtcccatctcaagatgtttcctggacctgctgtaactaagtacacaaactgagagctgaaaacaacaggaatgggccaggtgcagtggctcatgcctgtaatcccagcactttaggaggccaagacgagaggatcacttgagcccgggagttcaagaccagcctgggcaacatagtgagaccccatctctacaaaaaataaaaataaattagccaggcatggtggtgcacgcctgtggtcccagctactttggaggctgaggtgagaggatcccttgagcccaggagtttgaggctacagcaagtgatgattgtgctgctgtactccagcctgggtgacagagtgagacactgtc

SEQ ID NO: 398096 - DNA, 100 bp, Homo sapiens
ctgctgccttcaggggtgacaggagctcaggtcaaacacaacttcggatcacaccttcttccaaatcaaccccatgctctgcagacatcactcacaacac

SEQ ID NO: 398097 - DNA, 354 bp, Homo sapiens
agaaatgtcctttcctggttttacattttgtctcctttttagttgccttcagtacctgacagttctttttgaaaaccctagtctactttgtctctactaaaggggaaactagaaaaggaacctgatgagtcaccatagggccaatagcgcagagaggcgggggtgcccctggtggtcagacttggttacacaccctgcaactctagagattgacccttatgagccacaaattaggaagggctccttcagttcttgcttcttctctgagtgggcaatagctttgcatataggtaccacttaaggaaaattcatttaaaaaaatagcctgggcaacatagcgaaaccctgtctcta

SEQ ID NO: 398098 - DNA, 753 bp, Homo sapiens
gggacgtggggttaactctttccaaataaggagctttccaaactgccatttccgtattctaaggcttgacagcttttgaaaggatgaaaagagcgtgtattttccagaaatccttcatgtgactatttgcttcatttcaatgcctcagaacaccaccaacaaaaaacccactcacacccttgctggtggttgctacagtgcaattggctgcaggcttttgtttagaagtttgcagcagtccgggaaggaggttttcttcctcccggagctgagaaggcctgtcttcagcaccaacgtgtcttctggccttgccaataaagaagtaagaagccactgtgaaaaaaccatcattctcaacaataggccaataaacggttggcagaaatgccatgcgcgcccctccgaggacggggcagcgtgtttgaagagtcaccatggtagtgatattttatgagcatgagtcacttgtctgtttttcagggagcgctttgctcggcccatctcttttagtacatttccatttggtgtggtttggctgctgagtgcagtgtggcagcaagttacttaaaaacatttcacaaaaagccagattccccaacgctggcatacctgtggaccacatagatggctgtaattgcaaacagctgcccacccacccacggaacagtgagaggtcattttaaaacatgttaaaaatagcctgccccaggagaagctggttcatttgttgattcaaaaatatttgccaccaag

SEQ ID NO: 398099 - DNA, 134 bp, Homo sapiens
cggacgcatgggttaaaagatgaaggtacacagaatgtgggctggctggtgggcaaaggggtaaaaatgttctctatattgtatctgaaaagatggggtgtctgaataagaaaatgcatctatttgacagacct

SEQ ID NO: 398100 - DNA, 1020 bp, Homo sapiens
gtagaatatcctccattctggatttctctgttgccttctaacttgttcctgtagcctctgaatttcctgcgaactaaaagttggcttgaaagacttaattagtttcaggttcagctttggttttggtgttgaggatggaaggcatgcaggaatactttgcacatggaactgtttcttcatactgcatcacatcaaggagcatataatgtctgcttgtcatactcttatcaatgctaaaattgggcagtggtgccaacccaatctctctattgagagttttctaccaatctttcctcccgtgggaaaagttgctgactgttctccaaatcaattctgtcattagggtttgcaagagaatgaatttttaaatctgccaccccttacacatttattagtggaaattcttctgtaagaagaagtttccttcataaattacacctttttgatttatctgaaacaatgtatactggaaagaagcctggtgtcttaaatatcatctgttaatacctagtgtaacattccaaaggtaacttgagatactgcaaggaccacatagcaccttgagtacctattttacatgtgactctgaggactttcacagaataaagatatttcttattttaatgaacgttgtcagtatcaggataattttatgtagtcaacatatatacagtgttggtcctataggagttggagaccttttgccagttttatttggtcaaatacattatttgtgatgaaataactgtgagtgatgagttgagcctcaaagaacatgatacttcattaaatcaacaagctgaacagtatcatctaaccaaagctgtagaataaatggtgataaacttaaattcaggaatgaaacaatcaccatttttgttacaaatttgtccacccgtcatcactaaccccatttttatttaatactggtaatgaacaaaacctgaagaagaaataaaactaaaatatttcatttgtagatgacatgattaattatctagaaaaatctacagcaatcag

SEQ ID NO: 398101 - DNA, 305 bp, Homo sapiens
ttgcactccagcctgggcaacaagagtgaaactccatctcaaaataaaagtaaataaaagagtcataaataatgatgggttttggaagccatgattaaagccacaaatcaaagaggaatttccatgtctgcatggcatagaaaggatggctgctcatgaattaggctggtctttccagccagcccattgcatagtgctagtaataactatcagtagccctcaaagatttgcaatataaaacattatgcattggatggatctgctcatatgagagctaataaatcagtgtgggtcttgttagagaa

SEQ ID NO: 398102 - DNA, 622 bp, Homo sapiens
gtgaggaacaggagctgagcaagtgcctacagtcaccacgctgcctacagtgtccaggggattctagcctggataggaaaactggcttggctgagtggactgtcccagggtgaggatctgggaatgagcatatggggatggcagactaccacacgccctggaagctggagaggaaggaggcacccaggacagaaggtgaggttgccccaggtcaacaacttccagatgagatccaccttgagtcatgatcctcagatgccaagccacaggaacctcatcacccacctcatcatccaaactggaacttgatggaaatcattccacaactatgtgttggtgggttgtcttcttaatacttggaaggaggtcttaatacttatcccactgaaatcatgctacctacacctagcaaaacatacatcaaagaaaaacttctaactgggtatatcacatgcccactgtactaacacactggagaacccccaacaacaggaggcccggggagagtccctgacccacagggacttcaggtcaagaccacacccaccatcctttcaaggtggagacagtccccgtaggaaccaaactgatgtataataaaactcatcatttatttctcttc

SEQ ID NO: 398103 - DNA, 800 bp, Homo sapiens
aaggcatgtgtggagacaagacaatatgaatcaaagacaacacagattttaaaatatgcttactcagtccaaggagataaaagtcaagatgaagaatttagcagatatctggaaaattacagaaaaatttccaatgttatatagccaaaaataatactagctgaaatcaagaactcaatgttcttgtgacagcttactcacagctgaagatagaattcgtgaactgaaagactggtgagaagaaaatagaataaaacaagaacagaaaatatagaagataagaaatgtttatcaaatttaacaccgcaggaaaacagcagagagatgcaaaagcaatatattgatagataattactgagatctttccatagctgtcaagataagcaactgatttggggaagcttctgaatctcaagcaagaaagaaaaattcatacctaagcatattataatagaactgaaaaccagagagaaaaaatcttaaaagcaaccagagagaaaaaaatcactttcaaaattctactacttcactaaaagctacctaatcaaaacagaaacgaaaatatagtgaaatggtatctttacctagaatttaatgtctaacagaaatcacctttaaaaatgtcaaagttgttttcaagaaaagtagaaaattctcctacaatgaaatactgaattatacttttataaatccgagggtttattaggaataatactgaaaagagattttcaggcaagagaactatccccaggtggaatgttgatacataagaatgaataaaaagcaacagaaatggcaaa

SEQ ID NO: 398104 - DNA, 563 bp, Homo sapiens
ccatgcaacttggccttcccttccaggatgctcctggtaaatctcagaagaaaagagcagacaagttttatctgtaaaggaagtactccagcacaaggatgtgaagatctatgaaaatagagcacatgtacaccaatgtgtgggtcttctttgcaagcatttcagaggcagctgcctagtctgctgatagctaatgctggtctggtttctcctattcgggatcatatctattttagtctcctctataaattattcaaatgagcccagaagcctttctgtatcagatgggtaaagaagtggctggggattaatttctgaaacattaccctccaagaagaatacttttaggacagtgcttggtacaattttttaagtacaagttactctcccaagcaggctgcagcactaacaacaaggtgacaggtggagtgtgggtcatcctggaagtgacgtggcagcctctgggctatgtcagttctccaggcctccccacccctaccccccagccccactccaaagggtgttttagctctattaagcattctttatgccagacagttaaa

SEQ ID NO: 398105 - DNA, 470 bp, Homo sapiens
aggttgagatgagatgagcttaaatccctgcctcttgagggaaatcagcccagtttcaggacgtgcagttcacaaaactgccccatcttccctttattttttctttttattttatttatttatgtatttattttgagatggagtctcgctctgttgcccaggctggagtgcagtggcgcatctcagctcactgcaacctccatcttctgagttcaagcgattcccctgcttcagcctcctgagtagctgggactacaggcatgcaccaccatgcccagctaatttttgtatttttagtagagagggagttttaccatcttggacaggctggtctcgaactcctgacctcaggttattaatcattctttattccagtgttttacaaatttgtggtagctatgaaataattggtggactattatacatataggtggatgacctatatgtaaaataaataaaagtaatagata

SEQ ID NO: 398106 - DNA, 300 bp, Homo sapiens
  misc_feature (38)..(38): n is a, c, g, or t
  misc_feature (51)..(51): n is a, c, g, or t
ctctagagagtccccctctatccttaatccctatcctnatctctctatccntaatctctcatccttaatctcctatgaaagatagatgagctttttcaacttctgcgagcaaaaaccaaagtaaatctgggagtcaaaaaccaagttaaagtctaagaaactgtcaggtatcttgttcatgattttctaagtctgactagactttataccatctgatatccttgttagtatgggttctccaacttcaaatctgtatactgataattattttggaaacaagctttcctagattaggtaaaa

SEQ ID NO: 398107 - DNA, 309 bp, Homo sapiens
gaactgggtgtacctagagtgcggggtgcaaggaaaccagggtggaagtcattgtaaatacctttattcaccacgttccatctgtaaggatcttaggaaatgtaataacagccaacgtactgaacttaaagggcttgcaatgatgcaggcttttatgaactactctgagagtaattttccttaatatttgatctgttctgggccttgaggaaagtgatgtgtacatacaatgtatttttcccctctttcacccactctcacctggccccactgcttcctctgtgcttaagcctgtgggtggaaactcag

SEQ ID NO: 398108 - DNA, 455 bp, Homo sapiens
tctttattgtcacctgctttctttattatttttgacatgcacatgcaataatcattgatctcactttatacatctattgtttgccaggcaatatagtaggaactgaagtaaaactgttatacacaaacagtacataattaatggatatagtttggcaagtttgcacatatatattatcttgttaccacaccaatatccaggtaataatatatccatcacctccaaatgtttcctacgtccctttgttgttgttgttgttgttgtcagaacccctaagatcgaccctcttaacaaattgttaaatacaaagtacctcattgttaactataggtactatgttttggagcctatctctgtaattgactcattttgtatagctttaacccttgaacaataactccccatattgctctttccccactcaataaaacactaaactcttttaaagcacattc

SEQ ID NO: 398109 - DNA, 621 bp, Homo sapiens
actcccaggctcaagcaagcctcttgctttggactcgcaaagtgctgtgattgccagcatgagccactgtgcccagccagattggtgggttttgtttttttttttccaacaattctggaacattttcaaggattttattgttatcaaatattgtacctttcccattctctcagttatctcttcggaactttgacattttttagcccttctcattttaacctccacgtttcttaaccaccctttcctgttttttagcttttattgcctctatgggttgaagcttctatcttttctttatatctatctttgagtttacctaattctttttctgctatgcctaatctactgtttaatctatccactgagctttagattctaatttttatgtctatcacttatagaagttatatgtagttgttttacaaaccacacggttattttatattttaagatgttctttttatttctttaaaaattttaaatatttgttattttatattttgtaccagctactttcaagatctgtagtctctgtgggtttgattctggtgttatttctgctgactttctctcatggtgactgatttccttatgtggtctatgtttttaaactgtgaccat

SEQ ID NO: 398110 - DNA, 455 bp, Homo sapiens
aaaaacaaaaaagcttgcttgctagtagaaaacagagtattaaaatagaatctaaatcaatgtttctgatcaattgctgcagaaatgtgtatgagtagccgcaaatggagtcatatggcacacagatgtgcttttgcaatggtataaagttgttataaacttgcccctgccccatcacacttccgtgcctggggatttgctcgcacggacacagatctgagaaaatttcctggtccaattaataaatgcttattaggaaacgtggcacaaaatgtgcccacagtaaaagcaaattcacgtgatttaagaggccaggactttttctcatcctttctcttttaagcctaaagggagattagtcttatgtcagtctatctatttcaaacagatctctttaagaagatgttaaccagaacaaaaataaaataccttgatgcctttggaaataataaata

SEQ ID NO: 398111 - DNA, 431 bp, Homo sapiens
ccccccccacccacacacacacacagccacctgctatgcatgttcacaattacaggtcttgtatagttaatgagctcatcagtcaaaacaccactttccaccactctatgatgattgagcccctactgtgtgcaagcaccatgtcaccaaagggcgataaggcagggttgctgccctaaggagcttttactccctgatcaaggcagacagccatgactcatgaagctccagaccagcagtccccaccggtcagtccctggctgctacacagggtggatggagcgcctgtgtgcactcacaggtgcatgcactgtgcccctgagggctgggagctccatcttctctattcccaaaaagcacaggagctctctacactagaaagcacaggagtgagggattttattaaagatataaacttgaatccactcatt

SEQ ID NO: 398112 - DNA, 453 bp, Homo sapiens
  misc_feature (150)..(150): n is a, c, g, or t
  misc_feature (154)..(154): n is a, c, g, or t
  misc_feature (160)..(161): n is a, c, g, or t
  misc_feature (165)..(165): n is a, c, g, or t
  misc_feature (172)..(172): n is a, c, g, or t
  misc_feature (174)..(174): n is a, c, g, or t
  misc_feature (179)..(179): n is a, c, g, or t
  misc_feature (185)..(186): n is a, c, g, or t
  misc_feature (195)..(195): n is a, c, g, or t
  misc_feature (198)..(198): n is a, c, g, or t
ctaaatttgaattggaatatgaatatggacttataatatgttttctcttaaaaaacatgttttctggccaggcacctgtaatcccaacactttgggaggctgaggcaggcagatcacttgaactcctgacctcatgatccacccccttancctnccaaanngctnggattangngtganccaccnnacctggccnatnttttctttaatgaaatttataaatatgcttcttgaataatacacattttgggaaagggaaaaatgtctgttcaaaaagtaaaggtctcttttatagcttttccaaacttaattgctaaatttttctttgaggttctcctgaattatgtcttacaaactaaaagcaaaaatttttagcagaaattttggaatacattctatctagcacaatttgaatttttaattatcaagatttttgttaaagtttctctccttt

SEQ ID NO: 398113 - DNA, 500 bp, Homo sapiens
tgagatggagtctcactctgtcgcccaggttggagtgcagtggcatgatctcggctcactgcaagctctgccttctgggttcaaggaattctctggtctcaccctcccaagtggctagtattacaagtatatgccaccacgcaggctaatttgtatttttagtagagacggggtttcaccatgttagccaggatggtgtcaatatcctgacctcgtgatctgcccgcctcggcctcccaaagtgctgggattataggcatgagccaccgcatccagccttcctactcttacactcaacacagcacagatacttttctctagcagataccaattaggcgtcctataattcagagcaagcctgacattgtctactggagtaagagtcaaatcccatgagctaagggctcagtctcacaaggctgcccctgacttcagttgccaatcacaagtctggacctccagaatttctgaccaacgatctagctactctgttcaattaa

SEQ ID NO: 398114 - DNA, 472 bp, Homo sapiens
ttttccctaatatctacacccaataataacacatcagtcccttctcatcctttggaaaatccctcttcccagacttttaatcaaattaccagagttccttgctccctgttcagcagcaaatgtgtctatggctggtcaccacagtatcctgagccacacactgaaatcagtcaatgagtcccgcccctggacagatgtatgtgtctttatcatattgccttccaataaattcatatggtcactagccatgtctgaaagtacctaccaaggatatgctatgaggttaattattgtttagctgtttgacacggatattttcccctatgatatttacctcatctgatgatgtcctgcatttccttgttatttcttttccatggctggaaaacataaactgtcttttagtcctaaaaacaacttttattgccatctgcaatttactgcattgttgaataaagtatggtttatttca

SEQ ID NO: 398115 - DNA, 325 bp, Homo sapiens
agtgtcaaactttgatctgattacattttaattttgcttcaccaacagtagatagaatgtgaagctaagaaggtcatgctgtgcagtacagaatgtggtacaaaccactaggggataagacacaagaagcagaaagtaatattatgccagctccccaagaaagatcacaggtttctttgaacatgtgaaattctttagtggagatttttggctcttgtagaatgtaagctacctaagggcagagatttgttctgtcttgtttacagtcgtattccctaggagcaagtgcagtgcctgacacagagtaaacaataaataattgata

SEQ ID NO: 398116 - DNA, 662 bp, Homo sapiens
cctctgcagcaacacttcgctgcctccatctctccgccggaatctcgcaggctcgcgcctttcctcggctcagccccgctcccctcctctcctatcccctcctctcctatcccttcattcccccctcacccggatttgcttcccttcccccttctcccgcccccccctcccccggccgctccctcctttcccccggcctccgtcgggcggcagcggcagcagcggcgcggccggccccagtcgccgtcggtctcccgccttcgggggaaccaggtctccgtccctcttctctcctccagcccgcaccgccccgctccccagctcggtttttccgcaggatttccctcgctctcccctccctgcttggcccccgcgctcccctccctctccactcggcaccatgccccctcccccgggcgctcccccgggtttctgacggccctctgcgccgctccgaccccgccgggatgcagagagacccctagctcctcgcgatggacccaggcatcctggaccttggcgttgccgctccgcggacccccgatttcccggcgggatccagttgattttgttggctccggaccgaggcttgggccctggtttacctccgcttcatccctaccccgctcccggagctcggagccggaggggggcttcgcggg

SEQ ID NO: 398117 - DNA, 384 bp, Homo sapiens
ctctgagcttcagtttcctcgcttacatatgggaaggataacagttattttaaggattaaatgatagttcatgtaatgtttatattacagtatacattggtggtagttaacatgtctagccattatcactattattctttgtataaataatttctccctctatttcataaatttttaaaaattgtcatgagattatgtaatcaaaaggtgctgccatttttaatttttaattttttagagacagagtcttgctttgtcacccaggctggtgtgcaatggtacgatcatagcttgttgcaattttcagccctgggttcaaagtgatcctcctgctacagcctcccagtagctaggacaataggtgtgagccatcatgcttggggt

SEQ ID NO: 398118 - DNA, 325 bp, Homo sapiens
gggtcgactctcaggatctggtcgctcggacattgcataatttaaatagttggaagcttttaataactaagacctttaaagaatataatttgaagaacaaatctcttgcatctagtttgtttcctccatcttcttcccttttcttcctgaggataatcttccaaaaacccagcctagttgggtttaaacttcagaacctcatctggcttcaatcaaggtgtcagctgggcttcattttcatctgtaggcttgaagagacaagaactcacttccacgcttactcaggttgaaggcagaattcattttttttgtgtgtggctgtggg

SEQ ID NO: 398119 - DNA, 183 bp, Homo sapiens
ctactatgtgccaggtgcataggtcacaatctgtgtgctccagccaggaagtcatcaaggtgaagttcagagaggtgggtgcgtaggcgaaggctgcctgtcatgttggtgacccaggagaaagagatctgaatcatgccaggcagacttctcagggcaggatgagggcacacttgcgagatg

SEQ ID NO: 398120 - DNA, 393 bp, Homo sapiens
tcaggtcctcagtaatggagcaaactgatacttgaatggcatgtatggttatgacttctatcacttgactttgaatttcttaaaaataggcatgagtcttattcctcttcttttaccaacccctgtcacagtagctggccagagtagtgagtcagacactttgcattacgttgatctgaaatcaataacaaaatattgatccacattctatgaattttacacctctcagtatgattcacactcactctggagagtgtaagacaagaggcaaggcaagattgcctgtactttgactttggaatttatttgtagggtgaaacgaggtgttagggtcttggcaacagatttctttactaattgtactttgtttcaggaaaaaaatagtttggattt

SEQ ID NO: 398121 - DNA, 563 bp, Homo sapiens
gaaacccagttcaccatatatgtgtgggcctacttctagactctgtttcattgatctatatgtccttatgccagtttcaccctatcttgattagtgtagctaataaagtaattagtgtagctataaagtaagtactgaaatcaattaaatataagtcctccaacctggttttttgttttgcaacgttttttgcctgttctgagtcccttgtgttcccatatacattttagagtcaccttgtcaatttctaccccaaaaaaatgcctgatcagattttgattgggactgcattgaatctttaatttggggagaattgatgtcttagcaatatggagtcttcccaattcatgaacatagcatatctcttatttatttattcctccatttaactttctcagccatttttttagctttagtgtataggtcttgcatgattttgtttaatttatccttaagtgtttttctgatttttggtcccgttgcaagtggtattttaaatttttcaatttccaatacttcaatactagtatatagaaatataaaaggttttttttgtttgtttg

SEQ ID NO: 398122 - DNA, 503 bp, Homo sapiens
gtgaatattttttatgagatcgaaggaaattttcaattgttttgaaattctcaattgttttcatctttctcaatttaatttggacttaagagatgcttaagttatttacaatatttttcatttcaatttatttaaatttcattcagtatctcctgtgttatctttctacaggcctcataagtggatggactgaattttttatgaaataccagttaatggatagtctatatctatcctgtgtctgaaatctcaacctacatagtcatctttaaatacagggaagcaacagctgaaatccttgttattaagatgggaaatggccaggtacagtggctcatgcctgtaatcccagcactttgggaggccaagacaggagaatcacttgaagccaggtgtttgagaccagactggacaacaaagtgagacccccatctctacaaaaaaaattttttaattagccaggcaaaatagcatgtgtccgtagtcccagctacttgggaagc

SEQ ID NO: 398123 - DNA, 238 bp, Homo sapiens
ttgaaattcagtattgtttcttttttgaattattttggtgttagatagggatatctgagttgggggaaagctccataatcttttcaatgttccaaatcctaaaaatctcaatatcatagctggaattttagatttaaagagaggtaagaggcataacaatgcaatacaaaatcacgtcatctgcaaacagggacaatttggcttcctctctttttatttgaatactctttatttcttt

SEQ ID NO: 398124 - DNA, 295 bp, Homo sapiens
caaagaggaatggcctggagacttgcaactcactccatatgtagacttgaagaaataagaacaccaaaggatcggggtggagagcagtggctttaaacagagaaataaaataggctgagttcctatagcctcctacagagaagacacaaaaaaagtcaaagtaggagctgataaataacgggatttaattaacactggaaaggcccatgaggcttccctacatgctccctacaaaacctctgaactcacatctctcctcttcctactgtcctcagagcacaacataatcctgcct

SEQ ID NO: 398125 - DNA, 453 bp, Homo sapiens
agaccttgctaagggtgaggtgattactagaaggagcaccttttctagttaaaatctaactagattctccttggcaacttgtcttacagaaacaggtatagactatcaccttgcccagctgggcgcatcttcggagggaggcctggggccacgtgcacctaatgaaggtgcctgggagggggctggctttccactcagcaaatgctttcttacagaaagactgtggggagagtccgttttcttagagccgtatgaagaaatcctaaaaaccaactgcccaatctcaactcgtaacagggaacctggggagtgacatcagagattcccaatgttttcctcctcgttgatccctgcgatgaaggcacttgcccatgtgtattctgtagtaggagtttgcattctgaaactggtctttattaaagaacaaacacattatttacaaattaagtaaga

SEQ ID NO: 398126 - DNA, 300 bp, Homo sapiens
tacctgatatttgtggttctggctttggtgggcgagaccttggcctgagaactttggttcacaggaagcttcccttgacaatacttgagtgcaaagcttcatccaggtcccacctgggctgttgccaaggatgctcaagcgttctcttcagtcttccctgtgacttccaagaaacgacaagatctctagcccatccatcggtaaaccaagctgccaaatgtcctagaaaagaagtcagtaaacacagatgagactgacttttgttttttgggttttcttttttgtttttgtttttttttt

SEQ ID NO: 398127 - DNA, 268 bp, Homo sapiens
tcattctagttttgaaacactgagcttgagcaatcctcctgcctcagccttccatttaatagctgggactacaggcagcagttgccaccacaaagttaacttaaaaaaatttttttttagaaacagagtctagctgcattgctcaggctggtctctaactcctggcctcaagcaatcctcatgcctcagccttcccagtaactaggattacagacatgcaccaccacacccaggtgcacatggatgtttacagcagctttattcataa

SEQ ID NO: 398128 - DNA, 575 bp, Homo sapiens
attaaggagttttcctaaatagagggattccctcttatctctaagggttcctcccctcttccatgaggagaggtataaaccaactttttttttctaactatatttgagaacctctataagctctgaattaaatattgaactaacatttgaaatgcaaggataaaaatttaaacaatttttgaatttggaattgtatttataaagcatctcttcatcatgattttagcctgaagttttcatataaatagtaatataaaatgtatgaaagaggggttatcatttacatttgattagaatttgcaaaaaactattttcataaaacttattctgtttctatcctctgttttacatgaaattattatggtcatttttttcatcaaaaaatatttgcattctttcatatatctttatgaccatagagataacaaaataagttacgactacttggcctaatggaatgaaaataataataaacatttactgagtgaatgttttgttcttggcaccgtgcttaaaaattaaaccctttacatatactaactcctttaattaccttataattttagtatgtagat

SEQ ID NO: 398129 - DNA, 299 bp, Homo sapiens
aataaataaataaataaataaataaaaatgtggaatgaattaggcaagttgggctgctaatgccttgccactgaattgaacagccacagacaaaccagaatgcacttctcagggcaaaagaacaaatattgatgaagtcaatcccaacatgctcattccttttccctaatctcatctattagatgagttcctccttctcccaaagaggagtaggtgagaggaggtgagaaagaggccatgtcccactctcctgtgcttccagggatcagaatttccctccctattagggaaatgcgttt

SEQ ID NO: 398130 - DNA, 275 bp, Homo sapiens
aaaactatgatccctctcttgagaaaaatattgatacacagaaaattttgcatgtttgagggattcatagcattcctcagattgccataagttaagaactgctattctaaatagggttaaaaaaaaaaaaagatgagcattgatggaattgcccttccttccttcttcaattcaagaaagaaaaaataacgaagcttagagatgagccagccattgtgacccccgaactccaaataatactgtccttaataataatatccaagggtcatgctagt

SEQ ID NO: 398131 - DNA, 115 bp, Homo sapiens
tcctgggattacaggtatcagccactatgtccggcctttattttagttttacataactttgcagcaactgtgaatatgtaccttcctgatggagtcaattgggtcttgctttgca

SEQ ID NO: 398132 - DNA, 470 bp, Homo sapiens
ccagaaagggatgatggcacccgaagacagtggtgttcaggaagccaagggaggaaggtatttagacaggagggggagagcagaattggcaaagctgtggagaaagtgagatgagaactcctattaaaaacacacaactggtccaatgacatgggatggcatggaaatcactgatgaccaagcaggagacaggggtggaccgcaggggaaaaagagcaagctgaagccagctaaggaatgtcctcgggccatctcctagcggaggcggtagagccgtggttgaaggtacaggaagtggactgttagggcccaggttccccttaaccatgagacctgaagcaagttactttatttctctagggctcaattttctcacctgtaaaacaagagtaacagtgctcacctactaggttgctgtgaggttctttttctttttcttttttttttggagacagagtctcactctgtca

SEQ ID NO: 398133 - DNA, 344 bp, Homo sapiens
gaggcgagaggcggtttgagaagtcagcaaggcgggatggagcacgatgtggctttgaggagggaggggctggcccaaggaaggagcacgcccgctcagacagcgagaactggcgctccctacgggaggaacaggaggaggaggaggagggcagctggaggctcggagcagggccccggcgagacggcgaccgctggcgctccgccagccctgatggtggtccccgctctgctggctggcgggaacatggggaacggcggcgcaagtttgaatttgatttgcgaggggatcgaggagggtgtggtgaagaggaggggcggggagggggaggcagctctcacctg

SEQ ID NO: 398134 - DNA, 257 bp, Homo sapiens
cagaggctggctggtgtgggagtggccgggacagcagccctggaggtgctccgtgagctgcagcagagggggccgctggcttcgcttgggtacccactcttcttctccctgacttttcctgtgcagatggtggtccccgctctgctggctggcgggaacatggggaacggcggcgcaagtttgaatttgatttgcgaggggatcgaggagggtgtggtgaagaggaggggcggggagggggaggcagctctcacctg

SEQ ID NO: 398135 - DNA, 238 bp, Homo sapiens
gtatgcaggtgaatccgtgtgatagctttatttttttaaatttgtaattgtggtaactacgcataacataaaattgaccgtcgtaatcatttcaagggtactgttcagtggtgttaagtatactcacatggttgtgtaatcaatctccagaaatggttcattttctaaaagcgagattctatattcattaaacaataactccccactttcctctcccctccagcccctggcaacctcc

SEQ ID NO: 398136 - DNA, 663 bp, Homo sapiens
ctcctaattgtagcaaacagtgctgcagaatctgaaatgattttgaagtctgtcatctaacttttgctttgaacacctcctacacaaaagaaaattaaacaacagtgattcccctgacagctttgaatctagaataaacaactgggccacagtgaccaggtaacacagaccagggtgcaaatacaaaacaacaaataataggctatcattgtataagcaatactgtgagggcttcttttgtacctgggaaatagcaaggagcctctgaaaataatttgggtgatggaaggagctatctattgtcctcaggcagggaaggaggcttttataactgagtgtgcagtcctgaaggatggccaggagggaatgtggtctaaatggagacagccttccaggcagagggggaggactggactgtgggcagcagtgagaggttctgccctcgggaatcaggaggtgggaggtatgccgaagccagaactcagatatctaaagcttcgttcctctgagctgccaaatttgccagttgtttttggctttagagatagcataaaacctccctccctcccctccctccctccccacttccttccctctctccctccctccctcccttccttccttccttctttttgaaaaataagctctggccagttttattaa

SEQ ID NO: 398137 - DNA, 483 bp, Homo sapiens
tgctagctgcgactttgcatcattggtttgggctgcatattaagtgcaacctatggtgaaagctctgtgtggtggaagtagggccttgtgaaatgcacctccagcttggtgcccttcactaggcttttacagtgttctggtttctttctttccttttgaagaatacacagctgacttagggaagatggatttttttctgaattcagtatactggggtcttccctatgattgcaaaaggcaagcataactttttgatagacttgccttcgtagttttttgattttcaatgctgttctagttaaaatgctattcttaattttcttcatctatgtctgcaatatattgtaatagaactttcatgtcagttttaaagcttaagtttgctgaactaagtaaaaaaccagatgcatacgaaactctggagacttgcattcttattactgggcatgttgtcttcaggctgtgctataagcacaatgtctt

SEQ ID NO: 398138 - DNA, 503 bp, Homo sapiens
tcgggtggagaactggtggaccctgaacaaaagtgtggctctgctagcaagaaataaaggagaaatgaatgtctccaaatcatctggcagaattttccatagcttgtaggctataacaaaaacttgatctttaagacacagctgtttgtgtgaggtatatctctctttgggaaagagtccaattagttggccatgaggtttaattctgttttaaaaacagatgagtctgttctgacttggaggaattatgtttctggacaattctggcaaaataaggaaaaaccctgattctgtgtttcccaaaatttcttttaataggtgccaaccctactacataataacttattaattttttgaaaaagtttataaatttgaggtttaaatatataccataaaatgtatcaatcttaagtgtagagcttattgaatttttccacatgtgaatgctcatgtaaccactacccagatcaagatataaaacatttcttcccttctgaggttat

SEQ ID NO: 398139 - DNA, 461 bp, Homo sapiens
ctttgtgatggtttactgaaataagaagctagtacacagattacaagggtacgcaaaggcttttctacctttgggtagaaaaggggaaataagagtaaattctgggaagagcatgtttgtaaaatagttcccgtatctctcaattttcttccatcaaaatacacaaaacaacttcagtgaaaaaacaaatacacattgatagaacttccatttccagctaagacaaagtaatagaacctggaacaatcctcagctggaaacatgaactaaacatagtaaaacaataattttaaggattttaacaataggcaatggagggcagtgataactaagagaagggaaacaaagaaagtgagtgaaacagttgtcccaacttactgcctagggagtgtctggttgtggagaacaaacctgggtgtctagagaaaccaaggtagctacagtttactaggcagaatgtt

SEQ ID NO: 398140 - DNA, 1392 bp, Homo sapiens
tgaaaaattcagcttcttattgccacgtaacaaatcatttcagaacacagtggcttaaaaagcaaacatatttcatgatcttgtgggttaggaatttaggtcaggcttggctgggcagttctgctctgctggcatccaccagagtcatttattgctattcaggtgacacctgggctggtctagagggtccaagacagtttcattggttcatttttgtttttaaggcctaaataaagttaaatttcagaagaagatcaatattggtagaaataattgttataaagatgtatgttgtaatttgttggtttattttagtttcttttattaattgcaaaaaattccattaacatttaaaagttatgtaggaaaactaaaggaaatactgataacaactaaataaaacacctagagaacagttgacttccaacagttactattttttttcatttattagcagtctatcctgcttaaacaattactatttaaattaatgcccgcatattttttggcttttgacaagtattggactcttaagctttttgaatttgcattaaaaaatcacattaaatattataacagtaatgtatatttgtagaaatttatggaactgtgggtaattataaagagagtaagtcacctgtaaaagtgttaactctcagagaaaattagtgctttttttgtgtatttacttttagttgcttacattgttctgtgaaagcagcaactatattcatattattaatcagtgtcaatattttaagtagtttagtgaataaagatagtgttaataaataatttgctttttctaatatagtgctaatgttttagctttacagtacaattttgatgacattggatacactagattcaatgagatatatccagaaaacataactgtcaggaggcagacttctttcaaaagaagggagggacatggttacacaatttcttagctatgttttcttctgtagttttagtaggaagcaagcatgaaaagtattgccattctctggagttaagggaagtcagttattctatttaatagctgattaggctgggcatggtgatggtggctcatgcctgtaattctagcactttgggaggctgaggtgggaggataactggagcccaggagttcgagaccagcctgggcaacatagttaatccctgtctctaccaaaaaaaaaaaaaaaaaaaaaaaaaaaaaaattttgtggggcggctcggcgccagaaaaatttctaaacaactgggtgggggccgcggaccaaaggaatgcaacactggccacagcggcaaaggaaaccggggcctagacgggggggtttccccaaaaaaaccggggggcccgcgggttgaaaccccaggggttggggttgggtacacaggccg

SEQ ID NO: 398141 - DNA, 279 bp, Homo sapiens
ccagtctctccaaacccctgaggaactaaggttgtaactgggggagggaaggcgctggctcccggtcaggaatgtgggttctggacccaaagcttcaccaagagtggcagcagcgggtcaattgccaaatggggaggagaaaacacctggattttctgtcccttatccaaaggttcaaatgagttgatgggacaactctcttactcaagaaaagtaaaaagtgccagacaaaaccaaggtgtgactcatgttctttttggatgaattttccattttata

SEQ ID NO: 398142 - DNA, 156 bp, Homo sapiens
ggttttaaggggcagagggcagcagccctctccaactgcacttaggaaggctgagcttaccttgtgacaataagatcagctttctaatcttttgctaaatcgatcacaaaagaaagcaagaataagagacagagagagagaaagaaagagaaagag

SEQ ID NO: 398143 - DNA, 130 bp, Homo sapiens
cgctctcctctttccatccctacagagaaggacagagaggcaaagttccttgcatacccggggcgctgtccctgtgagctcccggtgtcctgcaaacgttggcccctgaatcaccgggccagtgtgtgtg

SEQ ID NO: 398144 - DNA, 371 bp, Homo sapiens
ctgctgaggatggcgaggtggggatggtaatgccagccttctgcacaaaggctatgggccaggggacgtgcactgtccgaggaagggctgtgcagactctgaagctggaccaccagacagtggcagggacagaggaggcgaagatgttgcgtcaccaaggagaagagctgtagcagagctgtgggttgtgaagagttgtgtggaatggatggaggtggtcagacacccccccgtgacgctgtctccggctttactgttggagtggccctgtgttcccacgcttcactcctgccaaagctatttcttgaagttgttccctcctcttgcctgtatttcttcattcatttattcgtcaacaatctgaagggtct

SEQ ID NO: 398145 - DNA, 523 bp, Homo sapiens
aaagtaccctagggccttggcctgagcagatgtgtggccctcttggaatgaactgctacgtgacatgctggtggtgtatttggtcataccttttaccatgttcaggctgtttgtttatttgagaatatttttctttaagttaatatgagacttttaatttcataatatgctatgtttcatagactgactgatgataaacatagactggtaatcattttgcagataaacgcagtcaacaattgtaatttagttttttataaaagttattatttagtcagtaattcaaggcttggacaaaatagttctcactatgtgtgtgtgcccctcagggtgtaacatacttttggactcagtctttttattggtttgtttttgtaagtagatgaagctcagtagagcaggccctcagcaaagttgtgatgtaaagaaatctggccgggctcgttgactcatgtctgtaatcccagcactttgggaggccgaggctagcagatcacaaggtcaggagttcgagaccagcctg

SEQ ID NO: 398146 - DNA, 417 bp, Homo sapiens
attcactatagaaataatgcatgacttcacatcacactggtgatcagagaaacaatgtattttaaaagtgacatatgaactggtttgtgaaatacaaatgaaattttgatgcaaaatataactagaaatgaccttagatatcagctggtacatcttagaaattcgagaaaaattaagacccactactagtgggataaatgttggtgtacagtttttcttggtgacagcttgagaatacatatcaaaagccttaaaatatgcatatcctttgactcagtaactttacttacaaattaatcctatggaataatttaacatatgcacagatttacatgcaagaatgttcttcatagcattggtcttaaattttttaatttttttaacttctcattttgcagcaaaaaaaaagttgtaaaa

SEQ ID NO: 398147 - DNA, 248 bp, Homo sapiens
agttcattacaaattataataatcataatttgtaaaaagaagggttgtaggtcagaagtacctatctttggctctcagtcatgaagagctgcaatggtggagccatataaacatatctaacagcccatataaatatatataacttctagattactgatgatacaaataaacaaacataacttctgtaactaggcagatcaaaactaacagtaggccatgtgcggtggctcacatctgtaatcccagca

SEQ ID NO: 398148 - DNA, 692 bp, Homo sapiens
agactgagagaggtgaaatgactttcccgggaacacttgcacaactgggtgagaccagagcctattctcaggcccagaacctgctggtgaaatgacttgtgtcttcatctttctttgttacgtccctgaacacacccgaggatctcttccactctgtcgatatgatgggacatgcttctttaatcttctgtttaaattcctgctatgctcaaacaactaaataacaaaacccactaaaatagaaatgctaacatcaaagtttattatgtgtattttaaagttatcagctgaatagcggttgaggaaaccaccattgggttaaatgtgaggctaaaatcaagtcatttttctaaaaagcaacgacagctactatctattgatatgcactgttgtcaggcacttggacatgcactttgtagaaaaggcattatctcatttaaatcatgcgaccaccctatgatgtaggtactcattatcattctcactcgacagtaaagaaactaaaactaggaacgctaagagagttgccaaatatgtcacagccaatcatttgaagagccaggattcgaacccagttctttctgactccacagtctgggttcttcttcctaagctgtgctgacaaaaatacccaggggagaacacaggaatgggatgagagaatgtgtttgttaaattgttgtagacattct

SEQ ID NO: 398149 - DNA, 602 bp, Homo sapiens
tgtctatcccccatcgtttcccaggggtggagttcgtggttcccaggactggcttttattgcaagctgtgtgggctgttctacacgagcgaggagacagcaaagatgagccactgccgcagcgctgtccactacaggaacttacaggtaaaaatccactctccttgcccagcatgccaggggctccccagtctccataaccgagccaggtgtctggcgtccttggccttgcttgcctctgagtctagctcctacctgcaaggcctactccaggccacaggttacttgccattccccaagcacaccaggctgttttctgcttctgtgtctgtctccttccgctacatggaaaacccctaatcttcccatagacttgattccatcaggctgctctcgacatggtggctacctcctgtgttgctcctagcacatgtctctactttaatacctaaaacatcctgtttgggttggctttggcaatatccacctctccctctatactgtgagtaactcaagttaggccagtgttcctctggcctgtgattgggactgaccccttcccacaagactcggatgttctagtttttctctgtttctgttccc

SEQ ID NO: 398150 - DNA, 261 bp, Homo sapiens
atgatggcatcattgcactccaatctgggcaacagagatagaccctgtctcaaaaacaaagccccaaacaaccaccaaacataggacctttatcaaaattaaaaacttttgtgcatcaaaggacactatcaagagagtgaaaaggcaagctacaaaatgggagaaaatatttgcaaaccatgtatctgataacgggttaatagccagaatataaaacaactccccaaactcaacaacaaaaaaaacaagcaacagaattta

SEQ ID NO: 398151 - DNA, 501 bp, Homo sapiens
ctgtggatggctggcagtgggcagaaagacaggcccagagagcagcaacagaaacagatcgtctctgctctgaacagaaggacttggcagcctggatggcaaaaggcaccacagtagcccaacagtagtcctgttggaaaatgcaaagcctgtatttacacgtacatcccatgaaagacaatcttttccacttttcatgggctacaatgccattagcagtgtcatctttaggcaggaaggacaccgagaggcatatctatatcccctgtccatagattaaaaaatatgagctctaattaagctgttaagaattcagaagagtccagaaatagacccatgcttacatggtcaactgatttttgatagaggccaaggtagctctatggggaaaggataatttttgcaacagccatgctgaacaactggatatccataggaaaaaaaaatgaaccttgactctcaccttataccatacacaaaaattaactcaaaatgggtcac

SEQ ID NO: 398152 - DNA, 713 bp, Homo sapiens
tgttcaagtgattctcctgcctcagcctcccgagtagccgggattacaggcgcccgccaccatgcctggctaatttttttgtatttttggtagagacagggttttaccatgttggccgggctggtctcgaattcctgacctcaagtgatccacccacctgggcctccctaaatgctagaattactggcgtgaggcaccgcgcctggtctcctcaagtattttaatgtcggtctaaaggtttcttcttacataatgaactgtaacctaactagatgtgtaaacagactgtaatctactcttgtaaggagtagcccagtctcagccaatcacagcagccgtacttcaaccgctcgcaggtgaccaactccaagcttgtccaacccatggctcgcgggccccatgtggcccaggacggctttcaatgccgtctaacacaaacttggaaacttccttaaaacattatgagattttatttttgtgattttactttatttcattattgtagctcatcagctatcgttggtgtttattgtatttaatgtgtggcccaagaaagttcttcttcttccagtgtgggacagggaagccaaaagatttgacatccctggaactttaaaccatgttcaaatgcagagctgtgaccaatccagctgtttctgtacctcacttctgttttttgcgtatcactttcctttttctgtctttaaattctg

SEQ ID NO: 398153 - DNA, 669 bp, Homo sapiens
cttgaccttgctgattgttccccatagtagtattaagatgttcctatgtctctttcctgtaaactggaattcgatctagaggcttggtcagataatttatgggttggtggtttattttgacaacatggggttctgttagtttttgttgcactgtatcgggagacacgtgtttggttgtctccattgtgagatgaccagcctgatccacctaatggttttagcagcctttgataattttttttccagaggttgcaaaatgataatttgttaattgtgtcattctttattcatttattatctggaacttttctataaagaagaatagctatccctcatcagtggtaaggttacaactgatgacagttcatgtaagagtcagaataatgcaagattctttcctttacttccagaataatattgatgccctagcgacttttaaaggtgactcgtgtttttatcctcatggttatctacaaatgggtagattttggggataattgatatgtttcagttcattgcagtgtaagacatcaattttatatctattttgggttctaaaattacaccttctttggccccttggagcccctttatatgggttctcctgttgacaacaacttggagagagaatgattttaggattaatagtttataccctgaaatgcagag

SEQ ID NO: 398154 - DNA, 213 bp, Homo sapiens
atgaccaagctgcagtggctctttggcttcctagaacacagccagcggcctgccatttccccagagaacttcctctccgcatcctggacgccctggttcagccctggcacccagcaggactgctcggagtatctgaagtacctgctggatcggctgcacgaagaggagaaacgggcaccaggatctgccagaaaggcagaagcagaagcggta

SEQ ID NO: 398155 - DNA, 392 bp, Homo sapiens
taatggataaataaaatgatgaatgagtaaaaaacctgcagactggtaattatgtgacaatttgcatttcatcagtctttcagaaacataattgctcattttaaaggtgaagatgatatcccattgttttaatttgcatttctttgattacttaagttgaaagtctgcatatgattattagatatttatatattctctttagtgaattatcttttaactactgagaacttcacttcatttaatttcaattttgtaaactcattagagaatatagctattaaccttgtttttggcatatatatttttaaatataggtttcctgtttgttgattatcttttaagtgggtttgtaataccttttgaagcatagacttattaaatattttgaatca

SEQ ID NO: 398156 - DNA, 322 bp, Homo sapiens
ttccttcttattatcttttgactctctccctaagtttccttcggataagcttttcttctgataagatcccaaacactagcatatagcttatgtttgtaaagtataaactaaattgtcagtcactgcaagtgttcttattgttttcccaggttttcgctttagacccagtcctgggcacctttctgatcctcaccagtgtcatcttgatggtacttgtggtaattaatcttttcgtttcggccattctcatggcctttggaaaagaaagaaagtcgcttaaggtaggtaactaaaagataaactagcatgctgttatatcact

SEQ ID NO: 398157 - DNA, 1360 bp, Homo sapiens
acttacattgggggagtttaggggcagtcaaatattaacctgccaccagcctgggaagagtttgtccacacattgagtccctcagctttcacagcttccaccgagggtctacatcctaaaactctcagctctgggagaagaagggattggcctatgcagatctctagacctctgcaggaaaaaagcagcagatttatacgggtgcagaagcacatcgctggactttattccccaggagaagtgcagagaaggggcttaaaatgtagccccctgtttttccccagaagggatttatgacatactcttctggtgactacttgccagcctggcttccaactaacttgcattgaggaattaaaggggtagacaaatattaacctgacaccaccctgataggcgtatgtccacacaacgagtgtcccaacttttacagctgtctcccaaaggattatatcctaaacatcttagctctgggagccaaggggactaggcatagatgagtttttctagatcacagaacaatgggggtggctttaaataggtatacaaataccttcagaggttatacctcctctgagcagtgagcagtgcagaaaggaagtaggaacatgtaggtcccatttgttctccagaaggggcttatagcacacacttccagcagctacttggcagcctggcttctaatgaacttacattcgggagctgatgggaaaacaaacagtagccctctagctaatctcagtgataaatccaaggctactcattcttcctggaaggagtttcgtcatgtctcaagtgccacaacttctataacttccacccaagggacaagctttgggagtcagtggagctttgcattcatgagtagccttagaccacagcaaacaaaaaggtggacgtacagtaggaccacttctacgagcttctcctcaggatcagagggtgcaacctgaatttgagtacaggtttttgccacagatcttctccttagcttagagcagacagagagtgggacataaatgctcaggctcagctgtgaagatagaaggaaatggaaaacccattcagcacctcaacatctccagctacatctagagattctggctcctactctacggtattgtgggggtattgatggaatgtggtacatcctaagctcgaggggaccatcaaaaaagagacagcagtctgaataaacacagagattagagagcaccttaaaatttttggctggatggattggtgagatccttctcctacatgaggccagtctgacaagtctgggagaggttatattcttatgtaatgcatagaagctaacacaaaaatcaaagaacagagaatctattcccaaaaaaaa

SEQ ID NO: 398158 - DNA, 483 bp, Homo sapiens
agaaatctccctcgagatctccgtgggcaccggaaatagaaactgctccctttgaagcatctattagaagatccaagtctctaacagatcaccatgagatttcaattcagttcctattaagcaccaactgaacgcatgtgagaatgtcagggaatcagttggtgaagaggcaaccgttttaatttaattttatttatttgaacagagtaagcctctgttcaatcctgactcatcttctttcttctcttactacccatttgcccttgagcagttcacttaaactttctgaccccatttcctcttcagtaataataattcttgtctcattgagatagtgtgagggcttaaagggaattacatttttcaaaagcatcttgcacagatctggcacagtcagtggtaggtcttcttagcataaggatataaaaagatctttctgtaaggttggtgtggggattaaattggatgacatatctttacttt

SEQ ID NO: 398159 - DNA, 531 bp, Homo sapiens
gacaagcttgggacctatttcggatgcaaaattggtaaatggagcgctcaaaagtgggaaaggaggtgtctctggtctctggctaggaaagccatgaaagtgccataagaggcttcctcagatcacctcccaggcagcccctcaggcctcctacgtctgccccacagagccctcggcaagcaaaatggatgaccatttggggacctattctaagaatgaatcccaggtcccatccacccaaatcctgcctcctacagctaccatgaggagccaagctgtaaacaaaagcaagttcccaatacctgttgaggcagcacccacacgtcgctggtgatggtgaaaacactggcgtctctggtatctgtgaatgcagctgtttgaactttcccttgggcacagagcacaaaggtgccctcaatccacttttaatttcttctgttaaccaatcaagaatttacatgacacgtccagtccctccctttagggattttcactttctgaggtttttgtttgtttgttttttcgtgttta

SEQ ID NO: 398160 - DNA, 696 bp, Homo sapiens
ttctatgaggatcccgaaggcgcacgatggcgcgtccacagtgacaagaatggtgagattgaccaccaccggaacagtatgaaaatctaaaatggacactggagagaaaacttgaggagctcgacggtgagcttgctctgcagagacaggaactgctgctggagtttgaatcgaaaatgcggaagagggagcacgaattccgtctgcaggctgacaacatgagcaacacagccttgtcccgggagcttaaggttaaactactgcacaaagagctggaggctctgaaggaagccggggcaaaggctgcagagagtctgcagagggcagaggccaccaacgccgagctggagaggaagctccagagccgagccggggagctccaggatctggaggccatgagccgcgcccgggtaaaggatttagaggataaacttcactctgtgcagctaaccaggaagaaggaagaggaaacatttaagaggaagcatgaggagctcgaccgtctggccagggagaaggatgcagtgctggtggcggtgaagggagcccacgtggagcagctgcaggagctgcagaccagggttctggagctgcaggcccactgcgagaccctcgaggcgcaactccgcagggcagagtggagacaggctgacaccgccaaggagaaggcgcgccctcgtgcgattgagcgtgtgc

SEQ ID NO: 398161 - DNA, 825 bp, Homo sapiens
ttctatgaggatcccgaaggcgcacgatggcgcgtccacagtgacaagaatggtgagattgaccaccaccggaacagtatgaaaatctaaaatggacactggagagaaaacttgaggagctcgacggaactgctgctggagtttgaatcgaaaatgcggaagagggagcacgaattccgtctgcaggctgacaacatgagcaacacagccttgtcccgggagcttaaggttaaactactgcacaaagagctggaggctctgaaggaagccggggcaaaggctgcagagagtctgcagagggcagaggccaccaacgccgagctggagaggaagctccagagccgagccggggagctccaggatctggaggccatgagccgcgcccggtgcgcgagtccttcatctcccgaggcgtgctctgtggcagcctcgcaggccaggactggagtctgggggattctaccttttctgctcattccaggctggtctttgctttcatctcacttgctcccttccataaatatttgtttcttttcagggtaaaggatttagaggataaacttcactctgtgcagctaaccaggaagaaggaagaggaaacatttaagaggaagcatgaggagctcgaccgtctggccagggagaaggatgcagtgctggtggcggtgaagggagcccacgtggagcagctgcaggagctgcagaccagggttctggagctgcaggcccactgcgagaccctcgaggcgcaactccgcagggcagagtggagacaggctgacaccgccaaggagaaggcgcgccctcgtgcgattgagcgtgtgc

SEQ ID NO: 398162 - DNA, 673 bp, Homo sapiens
ttctatgaggatcccgaaggcgcacgatggcgcgtccacagtgacaagaatggtgagattgaccaccaccggaacagtatgaaaatctaaaatggacactggagagaaaacttgaggagctcgacggaactgctgctggagtttgaatcgaaaatgcggaagagggagcacgaattccgtctgcaggctgacaacatgagcaacacagccttgtcccgggagcttaaggttaaactactgcacaaagagctggaggctctgaaggaagccggggcaaaggctgcagagagtctgcagagggcagaggccaccaacgccgagctggagaggaagctccagagccgagccggggagctccaggatctggaggccatgagccgcgcccgggtaaaggatttagaggataaacttcactctgtgcagctaaccaggaagaaggaagaggaaacatttaagaggaagcatgaggagctcgaccgtctggccagggagaaggatgcagtgctggtggcggtgaagggagcccacgtggagcagctgcaggagctgcagaccagggttctggagctgcaggcccactgcgagaccctcgaggcgcaactccgcagggcagagtggagacaggctgacaccgccaaggagaaggcgcgccctcgtgcgattgagcgtgtgc

SEQ ID NO: 398163 - DNA, 848 bp, Homo sapiens
ttctatgaggatcccgaaggcgcacgatggcgcgtccacagtgacaagaatggtgagattgaccaccaccggaacagtatgaaaatctaaaatggacactggagagaaaacttgaggagctcgacggtgagcttgctctgcagagacaggaactgctgctggagtttgaatcgaaaatgcggaagagggagcacgaattccgtctgcaggctgacaacatgagcaacacagccttgtcccgggagcttaaggttaaactactgcacaaagagctggaggctctgaaggaagccggggcaaaggctgcagagagtctgcagagggcagaggccaccaacgccgagctggagaggaagctccagagccgagccggggagctccaggatctggaggccatgagccgcgcccggtgcgcgagtccttcatctcccgaggcgtgctctgtggcagcctcgcaggccaggactggagtctgggggattctaccttttctgctcattccaggctggtctttgctttcatctcacttgctcccttccataaatatttgtttcttttcagggtaaaggatttagaggataaacttcactctgtgcagctaaccaggaagaaggaagaggaaacatttaagaggaagcatgaggagctcgaccgtctggccagggagaaggatgcagtgctggtggcggtgaagggagcccacgtggagcagctgcaggagctgcagaccagggttctggagctgcaggcccactgcgagaccctcgaggcgcaactccgcagggcagagtggagacaggctgacaccgccaaggagaaggcgcgccctcgtgcgattgagcgtgtgc

SEQ ID NO: 398164 - DNA, 1038 bp, Homo sapiens
ggagagactgccaaagccttgcagagacagaaaaaaaatgtgtggttttccaggactgaaaactcagtcgcagcagcccctctctcagttgtacctgtaggattttaatttatagaagcgactgactgatgacagagagactagtggctttgaaggaataatttatccacatttcctgagaggagggacacaccacgccatgcagggccacatggagaagaagcaccaggtttggtcaggaggcagaagggagtgaagggaaagcttaaacgagaacctttattagcgtttcagcagggaaggcaaggcagtgcagggaaagtttgggactgggtggtctgaataattctggtgggttttggagattagcggtatctctaggggttctgtagtacctagccttgggttaatttagggcaggggaaatattggctttgtgttagaaaaagggggtagttagaggtatggacttgggactagttggagggtttgtaatataattttttgggcgcccacaaaaacaagatcataggaaagatgtaaacaactttggcttttcgtttggtcctgtatggcctgagccacagatgcgtttggcataatagcagcttcctggcatgaaagagcccaaaaaaaaagacatcaaaaacactgccttttgcagtagacatctgtaatctttgcctggggaaaatcatccacttacagcagcctgacacggctttggagagccacttttctcaattcagccaggaaactcatgccaatgtgggactgacttctcaagcctggaacaccaggggtggccctgccacgtcagcctggccaatcagtatatcctactggcttggcctgatgactccagctgggccaatgagagccctccacaggactttggctagaatctaccgggaatgtggtaataggtgtgccctttctgttggagttcccaaactgttaaggtgtcatcctggatgtgggactaggaggggagcctgcctgaggatgcagccaccgagaggagagtgcaggcaagag

SEQ ID NO: 398165 - DNA, 324 bp, Homo sapiens
aaaattagccgtgtgtggtggtacacacctgtaatcccagctactcaggaggctgaggcacaagaatcacttgaaccgggggcgcggaggttgcaatgagctgagattgtgccactgcactccagcctgggcgacagagtgagactccatctcaaaaaaaaaatagtttaaatgatagctaataaggttaccatatgtaagggaagaaaacacaatttaaagctattttgtatgagaccagttaggatgagttttaattgatgaatatgaaaataaactgcaggcagataaatagaaaagcccttaaggttgtgagataatgga

SEQ ID NO: 398166 - DNA, 436 bp, Homo sapiens
ttgcctttcctactatcttaaatacttgagaaaatcaaattatcactcaaaagaagagcttaacttttggctatttctgtgaaggcaagcattcaaaaccctaatcagtacaagcagacagcattcccacactgccgcagtctctggaggagcacagagccactgtgtgcaaggccaaattaattacctaacagaaaacatctgaagatatgagtggccttccaagcaagtgggaaaataaacaactcagcaaagactctctgaaatccagtagaaacctgctgaatttaactgttgaactcagatcaagctatctagtatttattgattacttgaaaactatgagattataacgccagcaatgatctgttgcactaaaatgtatttatagtatctacagaatataagacattttgtccattctgtcatatcgcca

SEQ ID NO: 398167 - DNA, 905 bp, Homo sapiens
tcccatattagacatccctttccgtatattgctggatttgatttaccatattttgttgaggggttttaagagtctattttcatgaatgatattggtctgtggtggttttttttttcctttttttcttttaatgcttttatatggtttggatgtcagggtaaagctagccttacaaaatgagttaagaagtgttccctcctcttctgttttctggaagagattgtgtacaattggtattacttcgtatatatttggtagaatttgccagtgaaaccatctggacctgcagtttttgttttctttcaagatttttaactagtaataggaatattcagattctgtatttcttgagtgagttttgatatttgtgaatttcaaagtattggtccttttcatctaagttgtcaaatttatgggcatagagttcctttattatcctcttaatgtatataactgtgtctagtgatatcccttctttcatttctgatattaatactttgtatcttgtttttttattcttttgtcagaggtttatcaataaaggttagctagaggtttattgattttctttttctttttttgagatgcagtctcgctctgtgtcccaagctggagtgccgtggggtgatctcggctcactgcaacctctgcctcccaggttcaaggaattctcatgccttgacctgcagaatagctgggattacagacatccaccaccatgcccggctactttttatatttttagtagagacagggtttcaccatgttggccaggctggtctcaaactcctgacctcaggtgatccctggcctcagcctcctaaagagctggaattgcaggcatgagccaccatgcccagcccatttattgattttcttgatcatttcaaagaaccagcctttgg

SEQ ID NO: 398168 - DNA, 671 bp, Homo sapiens
tgtggtggctcacgcttgtaatcccagcactttggaaggccgaggtgggcagatcactggaggtcaggagttcgagaccagcctggccaacatggcgaaatcccatctctactaacaatacaaaaattcgccgggcatggtggcaggcacctgtagtcccagctactctggaggctgaggcaagagaactgcttgaacccgggaggcagaggttgcaatgagccaagattgtgccactgcaccccagcctgggcgacaagacctcaaggcaggtcctttaggaggtattccagaagaaggctttgttaccttaggagagacagcttcctgcatgttactgcctgtgaagacattcagtgggacaagatgtggaggtggaagacagtgatattaatgatcttgaccttgtgtaggcctaggctaacatgtgtgtttgtgtcttagtttttaacaaaaaagtttgaaaagtaaacaaacaaacaaaaaaccacaaaattttaaaaataggaaaaagcttacaaaggccgggtgcggtggctcatgcctgtaatcccagcattttgggaggatgaggtgggcagatcacttgaggtcaggagttccagacctgcctggccaacatggtgaaaccccgtctccactaaaactacaaaaattagcctggagtggtg

SEQ ID NO: 398169 - DNA, 397 bp, Homo sapiens
tggccccaattttttgtccttccctgtatgcacaccctttgccaagtgactttgcagttcctcccacaaaaacagagtgtatttcttctcgccttgactttggacttgaccacatgactaactttggcatgttagcagatgtgatgcaaaggagggcttggagagtatttgtgcagtggtgcttgccctcttgcactctgccactgccataagaatcctccactctgggtagcaactccttccattctgggtcctagaatgaaaacaccccagcacagatctaaactggccagacccatattttgaacagagccattcagttgaacccactctggatcagctgacccctagctaacctgcagaggtgagcaaataaatgttgctgttttaaatcatt

SEQ ID NO: 398170 - DNA, 227 bp, Homo sapiens
caattggaaatgtgttggaaatgtaagtgatcaggacctaccaaatcagaactctggggatgggtcccaagcagtccaggttttaacaagccctgaatgtgattgtgatgtatggtagagtttgagaactactggtctagagaaaggaaacaaagcttaagatctcagaggtgaccagtatcatctaagaaggaggtacaggggcccactgtactgataagtggctg

SEQ ID NO: 398171 - DNA, 134 bp, Homo sapiens
ggcttgattgccatggaagattctcacacagccaaatttattgctatcttagttaaattatgccagaacacaaaatatgaagttattgtcaaagtaatataatctcagctgtaactgagatagtcagaaactgt

SEQ ID NO: 398172 - DNA, 454 bp, Homo sapiens
ttttttttttttttcaataacaaccatgtatttagctcatgattctgtgggttgacagtttgggctgcacattagtggagggttacctgatttgtgtgtgtgtgagacataattcaaacacataaacttcaccattttaaagtgtataattcagtggtttttagtattttcacaaggttgtggtatgtttggtttttaaacaaactgccaagctgtttttcagagtgggcataccattttacattttcatcatgatgcatgagtgatctagtttttctatatccttgccagcattcagtgctgtcctttttttttttttttttttaattttagccatagggattgctgcttagtgatctctctttgtggttttagtctgtgttttcctaatggttaatgatgtgaacatcttttcatgtgtttatttgccaactatagtcactctggtgaaacg

SEQ ID NO: 398173 - DNA, 301 bp, Homo sapiens
tcagtaactgggaggtaatttgacactaataacagtcacaagcacagaagtttgtggatgctttggtgccttacattacagccgattaaaagttatctctataatgaggtaatttccatggctcaccaagtgggtgtgaaaggagcagaattcttgctggcgggaaggatggagtacaaactacaggctgtgtgagccaagcagcagcccaggcaagcctgctatggatgtgccctcccggctattgtaattagagatcctagaagggcttgggaagtgtggtttcgcagttatttccact

SEQ ID NO: 398174 - DNA, 311 bp, Homo sapiens
caacccatggctcactccctgggaaagccaggagcccagtcacctccagtctccctgtgtgagaggaggggctcttccagcaatgcctggctgaagcctctgaagagcacctgcaggaggcggtttccacaaggaagagccggcctcatcttgtgcagatcaatttgggagacggggtggccggtgctggtctgtgccttgcaggaggcacccatttctgtgggaagagcaggcctttggttgcgagttctaatctggactcaccaacaggctctgcaaccctagacaaggggctggccctcaattaccct

SEQ ID NO: 398175 - DNA, 318 bp, Homo sapiens
tctctcttccccctgctctgcttgagtcttatactctgtgaatctaggacacgtcttatagcatatttgatcctcacttcacctagagtccccattagctcaaaaatgactgagaagtaggctagaaaagggaaattagctgggcatggtggcgcacacctgcagtcccagctactgaagaggctgaggtgggatcacttgagcccagcaatttgaggttgcagtgagctgagatctgccactgcactccagcctgggcgacagagtgagaacctgtctcaaaaaaaaaagaaagggaaggcaaggcgggtgcttttg

SEQ ID NO: 398176 - DNA, 192 bp, Homo sapiens
ctgagtacctagtcatccgcaatcaatcgatgctaaatcaataagtataatgcaaatattctaaaattttaaacaatctgaaatccgaaacaagcactttggataaaggatactgaacctatatttactcttataaagaattaaggttttttttttgtttttttttttttgtgagacggagtctcactttgt

SEQ ID NO: 398177 - DNA, 350 bp, Homo sapiens
taaaggcttttccttttaataaaagcaatccccaaaccatttattttctaacagaaaatggcttgaagggccaggctggcaagatttgatatgcaaatcatggccattagaaatggtccacccaatatggcgattcctgcctccttcttgtcaccaggtgtgccaaggagtcatggccacctccaaataacaccgtgtgttcagaacatcatggcgactcatatttgcacattaaaagggtaaggtaggagggccaggtttttcacaggctacataaatgacacacctcatcaaaaccaataccctgggccctgtgcaaaccagacaccgcctcctacagcatcccagta

SEQ ID NO: 398178 - DNA, 270 bp, Homo sapiens
ggtaccaacacaggtggtaaaagtataagaaaaaacagggcaaaattaagccaaaattcaggaacctctttgggtggactggttgtgagactggcaaggggcacaccacccctaaattacctgcaatgttttattttttcagctgggaagtgggtgcattgttttcacttaggttcttaagtttaagtggtagatcattgggtcttacatattccataacaaaatttttttaaattacaaagagaaataaacaagaaggactcagctgca

SEQ ID NO: 398179 - DNA, 390 bp, Homo sapiens
caaccttaagagctctccttgaacaaagatgggacaatatgagcatcaatgaagacaataactgcagtgaattgaaaaacatcaagtatgtttaaacctatgaatacctaatgatacttgaaagcaaaacacaaaaaatgaattattaccagtggactatgctaatgaaccaattcattcttttgaaaaattggtaactaaatagaatcctttcctatgaattgcactactaaggaatcagaaaacgtgaggaaatttctctatacagaagtatccaagctaataaatgaaaaagaaatattagagtagcacaccattttgcaacccctgatgaattagagtctaggcactaagctgctaacattacacaagacagccaacctccaggca

SEQ ID NO: 398180 - DNA, 264 bp, Homo sapiens
gagaaaaacctttcttgtcttggggtcaagtgacaagcatttagtcccagccctgccacttaaccatctgtgtgatttgaggcaagttggctggagttccgtaacctccattttctcatatgtaaaacagggctaatgattcccatgttgcagagcatgtgaaagcatcctgtccctttcctggtatgcagtggacattgataaatagtggtgaactctagatcactttagtatttcccggggttaatccagtaagtcccaatt

SEQ ID NO: 398181 - DNA, 542 bp, Homo sapiens
acctgtgaaatggagtataatactgacttcatggatttgttaagatggttaaattagataaaatataactcatttagcccatgcctggtttattattaacataatttagaatgaaaattctcctgttgcaaaaaggcatattcagaagtaaattcaaatactatattctaaaatttcacagcgtcttttggaagaaatagctacttttctttaagcacctgtcatatgtgctttcacattgccaacagaatatatgtaggcggtactaaattgttgttttggggttcattttcagtccttcttactggatcctgggtgcaactttagaccccaagtagctagagaaaagtttctctaggtgcctgtcgtctctggttacatgttacactataatctgctttggagcctcacagccacatatgttattgttccacgtgaactgagccagcttacatacacagctctgtggggagaaagaccataaacgaacactccccgtttctagcccatattctgcataatacatgtaagtctctcaacag

SEQ ID NO: 398182 - DNA, 315 bp, Homo sapiens
atattcgctgtattccttttccttcccattcttttctttttatttaaaagtttatatataaatttatgaaaatataaatatatatacaatttacatagaaataataaacactaatgttttcatccctgaatttaagaaacaatattacagtactgttgaaaacccttgtgtactcttcctttaatacacattttttcctcccctcaaaagtaaccattactggctgggcatggtgggtggctcacacctgtaatcccagcactttgggaggctgcagcaggaggatcatgtgagctcaggaatttgggaccaggc

SEQ ID NO: 398183 - DNA, 292 bp, Homo sapiens
agaatcctccatagagtagaaacagtaccttcactatggacaggggccaactgtgcttctcttacacacagatacccaatgaaaaagaggtactctggacctcacactagaccaggtccaatctagtgctctattgctttctttcctctcagtcttacatctagaacatcccctcagcctctagctgatcacacttttggtactggcccataggctgcaccccacaaccaaactaagaggattaacaggagcctttcaattgctgtaatccccttcgtcacttggaggtggc

SEQ ID NO: 398184 - DNA, 266 bp, Homo sapiens
agaccaagctcctggcccaaagcagggctccgcatttggctttgggggatggcaactggctgctccaggcctctgtggagcttgcaaagcagtggccctgggaggaccccacctcacagatgtgtccctttggcccaagcagtcagtgggttactgttaatggtgttgttactattaatttattggcaacaatttaagttggaaggaattgcgcattaagtttgaatcacatgggattactatttctgtgggttaagaaatgatca

SEQ ID NO: 398185 - DNA, 138 bp, Homo sapiens
gctggtgtgaaaggtctgtcagaaaatcatgagattagattgaggtacctcaaaaaatgagagctggtatgatgagtgggtaagaatcataaaagcgtagagtgttgatgatttttatagtttataaatggttcttgt

SEQ ID NO: 398186 - DNA, 441 bp, Homo sapiens
ctaaaggaagtttttgaatgctctctctagagaaaaatctggcttggagaaaggcagttggaccaaatgacatagtaagctggaagttttctggctctttcacaaatctgtgcatcttatgctcttcccataacatgtttcccattaaaagtcactgactgtccgggtgcggtggctcacgtctgtaatcccagcactttgggaggccaaggcgggtggatcacctgagctcaggagtttgagaccagcatgaccaacatggtgaaaccccgtctctactaaaaatacaaaattagccaggcgtggtggcaggtgcctatacttccagttactcgggaggctaaggcaggagagttgcttgaacctgagaggtggaggttgcagtgaggcaggatcgctccactgcactccagcctgggcaacagagcgagactctgtctc

SEQ ID NO: 398187 - DNA, 326 bp, Homo sapiens
agcatttaaggcatgagcaatggaagttcaaaaaggaatccaaaaaaagagtatccagagaggtaggaagaaaacaaggagagtgttattacagaaactaagtacactgaacacatctcgtgtgtcagttcaaagtcatctctacgccacttcttactgcagccacagaatcgatcacagtatacctcttgcttcccacactggggcttttctgacactgctacttgcaacatggagagttctgcctccagttttcctaatagaattaaagtggatggaatcagtaagaattcatggattttaataaataaatatagatatatgta

SEQ ID NO: 398188 - DNA, 423 bp, Homo sapiens
ttaatttttgtatttttagtagttacagggtttcaccatgttggccaggctggtctcgaactcctgaccttaagttatccaccccccttggcctcccagagtggtgggattacaggcataagccactgcgcccagccttaaggataaattcttagaaatagaattactgggtccaaagaacattttcaatatttctgcccttcagaaagatgagtcagttagagggcttcttggcccttagcctcgtaaaacctgggtgttttgttttggtttttaattgccaatttggtaaggaaaagctgagtgttcttaaatgtttgcattcttttggatattttatgaaattgaatctttcttcatgtttgacaatttgtgttttttcttttgtgaattattttttctgcttcctcctgtatccttttt

SEQ ID NO: 398189 - DNA, 230 bp, Homo sapiens
ccggccttctggaggtttacccaaagtatgcacagtttaatattcagcattcaataggctcaaggcaatccttttgcagatttccaaagttccttgtctgcatatctcccttcctccggtattctacctgcaaattctactgcctcatctccctgaatttcaatttctatctcctaatctcagtgtgatcactgtgctctgtttaggtttcccttctgtacattatgatc

SEQ ID NO: 398190 - DNA, 356 bp, Homo sapiens
tgaggtcattgctttgttgaattttattgaatatcagctatgaaccagcggatacaggcacatgtcttttctcctttaactggtgagactggtgcattatctgggtaccttttgtaatgttttactaaacctgagttcctgggacaaaatccattacttgattaattttgctaatattttctttgctgttttgaaaagtatttttctaataattaagattggccagtaattatcctttcttgtaatgtcctcatttttttgatgttgagattacattatctcataaaatgtgttggtcacttcttttcaaaaagagaggccgggagtgatgggtcacgcttgtaatcccagcactt

SEQ ID NO: 398191 - DNA, 518 bp, Homo sapiens
actattaagagcagctttgctgctgcagaggctgacttgatttggagtgcagagcaaaaaactcccatatccaaataggaaaagaataatgaaagccataatactacaatacaagcctgaagttgttatccttggtggggtgagcaacagaaccgagagcaccgtagaagagctagctgaggtcttcacaacacatcactggcagactggaaggccatgcatatgtacagagaagacctgtaaggacactgcaggaagtaaaagtctgatatgtggatgtgctcccattgcacaaacagatccatcaatggggtataagccctactggctcaaggtgctggagcacaacatctggctagtcttgggctgaccactaagctatacatactctgttgatccccaatttagtctgatggagaaaaagcaagagaagacactaattattgtagcaaattcaagaataaaagcacatcactaccacccctcaaaaattaaaataattgtaagaaaataaaaaa

SEQ ID NO: 398192 - DNA, 552 bp, Homo sapiens
acttacaggaacaacacttcattttcagtaccattagctgaagaagtattaaggcaaggttgccttcttaatgattatttcatgtgttctatcctcagtacatcatttacaatattcagacttggaacaaagtactttgaactctccagcggccagtcagaaaatgaggaacaggttgtgaatagaagatacaaaggagtattagatctgcattgattaaatggtgactacaaatagacttaaaatacatcttcccaattatgaatctctacaggtggttttgtcctgttcacccaactggaatggttgcatcgaagcaagaaaattttctccaaaaattaatacccagatctacgccaaaaacaaagtgaagaatacagcttctgctctcaccaagtcatctctaatagagagaagatttccttaaacataaatatcttcaaaatgcttgttcatttgagagaaagatacagaatattttacatgtgcccttcactggaatatttttatttatttaattcaataaaaattgactcccagttctttatggta

SEQ ID NO: 398193 - DNA, 432 bp, Homo sapiens
tcagtccctggttgctcctggctaaagagtcttattttggagaagtcctggctggagagccaggctgcaggaactcagaaaccagcctgctgacacttccactgcagctgctggaattcagctgacttgatttgactctacttttcatgcaaaggtggttttgtcctgttcacccaactggaatggttgcatcgaagcaagaaaattttctccaaaaattaatacccagatctacgccaaaaacaaagtgaagaatacagcttctgctctcaccaagtcatctctaatagagagaagatttccttaaacataaatatcttcaaaatgcttgttcatttgagagaaagatacagaatattttacatgtgcccttcactggaatatttttatttatttaattcaataaaaattgactcccagttctttatggta

SEQ ID NO: 398194 - DNA, 471 bp, Homo sapiens
cctactaacatatgctttctggaaaaaatatatacacatacagacaacaaatgtaattggtggaatccttgcttaaaggtctctggagtcttagcagaaagttgtaagtaaaccaagaaacttgcatacaaaattattcatttattctactcttcgagtcaagtgtaagacagtactattcatcttggaaagcaatctggctattctttcctttaaaagcaatttcaactggtgaacaaatatgaaatgtactaagtttttcttaaaagacaccaaaggtgtatcttcatatgttttgaaagtaatagtgtaacaggcccaaaagtctttatctgaaaaatcatcatgcaagaaagttgcttgatcaaaagtgattcttacaagatgaatataggtagcgtcttactataagtacagccaggatgtgattataaaagtataaatgcattcctataaatagtaacacttcaa

SEQ ID NO: 398195 - DNA, 310 bp, Homo sapiens
gtctgtcagtatattgacatgtatatagagctgtcagactcacttcacactgaaggataataatggataataatttggtctcttagggagactaggcatttaaataatcagttcatgggccaaccatgtatagaaaacactttgccctatccctttgccctgcccctaggagacccactaagctgctgcttgtgaggggtggggaagagagatctcaggatgatgtctaagttctcagtgaaacctggtcttcctctctctaaatgtttcccacctccagctccagtgcagtgtcgcagacatccaccaa

SEQ ID NO: 398196 - DNA, 591 bp, Homo sapiens
ttgagttcagtctgcgaaaccttttcactgtatattggtcaagtatcattatctcattgaaaagtatagtaggcctggaataccttatacaatgcagatgagatagaaatgagaactctctaaattgtgaaggcctacttagccataagcttattattattattaagagacagggttttgctgtgttgcccaggttggtcttgaactcctgagctcaagccatcctcccaccttggcctcccagagtgctgagattacaggcgtgagtcatcatgcttggcccatgaactgattatttaaatcctagtctcctaagagaccaaattattatccttattatccttcagtgtgaagtgagtctgacagctccatatacatgtcaatatactgacaaacgtttatacccatgtatagaaaacactttgccctatccctttgccctgcccctaggagacccactaagctgctgcttgtgaggggtggggaagagagatctcaggatgatgtctaagttctcagtgaaacctggtcttcctctctctaaatgtttcccacctccagctccagtgcagtgtcgcagacatccaccaa

SEQ ID NO: 398197 - DNA, 606 bp, Homo sapiens
  misc_feature (13)..(13): n is a, c, g, or t
  misc_feature (17)..(17): n is a, c, g, or t
  misc_feature (21)..(22): n is a, c, g, or t
cgactctagagancccngcannaatgtctgcgacacttttcactgtatattggtcaagtatcattatctcattgaaaagtatagtaggcctggaataccttatacaatgcagatgagatagaaatgagaactctctaaattgtgaaggcctacttagccataagcttattattattattaagagacagggttttgctgtgttgcccaggttggtcttgaactcctgagctcaagccatcctcccaccttggcctcccagagtgctgagattacaggcgtgagtcatcatgcttggcccatgaactgattatttaaatcctagtctcctaagagaccaaattattatccttattatccttcagtgtgaagtgagtctgacagctccatatacatgtcaatatactgacaaacgtttatacccatgtatagaaaacactttgccctatccctttgccctgcccctaggagacccactaagctgctgcttgtgaggggtggggaagagagatctcaggatgatgtctaagttctcagtgaaacctggtcttcctctctctaaatgtttcccacctccagctccagtgcagtgtcgcagacatccaccaa

SEQ ID NO: 398198 - DNA, 583 bp, Homo sapiens
ttgagttcagtctgcgaaaccttttcactgtatattggtcaagtatcattatctcattgaaaagtatagtaggcctggaataccttatacaatgcagatgagatagaaatgagaactctctaaattgtgaaggcctacttagccataagcttattattattattaagagacagggttttgctgtgttgcccaggttggtcttgaactcctgagctcaagccatcctcccaccttggcctcccagagtgctgagattacaggcgtgagtcatcatgcttggcccatgaactgattatttaaatcctagtctcctaagagaccaaattattatccttattatccttcagtgtgaagtgagtctgacagctccatatacatgtcaatatactgacaaacgtttatacccatgtatagaaaacactttgccctatccctttgccctgcccctaggagacccactaagctgctgcttgtgaggggtggggaagagagatctcaggatgatgtctaagttctcagtgaacgtcgtcgcctctcctatgacctttgccacagctatgtccatgagtctacgattgcgaca

SEQ ID NO: 398199 - DNA, 574 bp, Homo sapiens
agtcagaaatagatgaaaaataaatcttgtagcagtaaaaataattctcattccagcctgccttttgctaataggaggaggatagtgttgcaattgaaagttagggagcctaagaggaataggccttagttgagatggaataatttccaaccgagacatattgaattgcagatgaaggctgggtatacagtttaatgtgcagtaggaaatgtaggtctaaaacttgggaggccttggcaatgaggtgataggtgaagctgtgaaaatagttgggactaacaaaacagagaatagagcagaaaagaggaacactgagatttaccttggggaaggcccacacttaaggaacagaagaaacagaggaactaaggagggagatgaagaaggggagtagtcaccttcgcagagagacccaatatattatcagagcaacgaggcatttcgagatggaggaaactaccattggtgtcaaaaactagcagtggcacactttgggaggccgaggcgggcagatcacgaggtcaggagattgagaccatcctggctaacacagtgaaacccagtctctaccaaa

SEQ ID NO: 398200 - DNA, 263 bp, Homo sapiens
ccacgacataaataacagcactagaggaattgcaaagccacagccattggtatatgagaagtagaacagatactcggtgacggcactaggcagtggaaattggctttcatggttccagtcttttcttctagttgccaggacgcttgggcatatggaagcatcacaagtcaaaggtgctaagattgactcatcggtctcattttcaatttcattttgttaggctgacctttgggtgttaattaggttcaaagtgaacttaatta

SEQ ID NO: 398201 - DNA, 487 bp, Homo sapiens
gttacttaatgcctcaagcctcagtttcttcatctttaaaatgggagtgctaataccagccttaacaagctacagtgaggatggaatgagtcaatagatgtaaggcatatagaacggcaccctgaacactgtaaaccttttgtacttgtctgctgatatttgctgtcatctgcgaggtcactcacctgtctaggtttgtaactgagctgggtggggctccaggttgcagtaggatgggaagttgtccttcatgcctttgaggaagtgacaggatagcctccaggtggcatgtggcaacaggtgtagcaaaaagcctttttgaactacatccagggactcttaagcgctcaaattaaaccgtcttttggattctctcatttttaaaaactcaaagcctcgttcccaggcttcggttcctaaccatctttctttactcccttgcaagagattcgggctgatggttaccgtcatgtctaagtaaacgatg

SEQ ID NO: 398202 - DNA, 465 bp, Homo sapiens
tgctgtcttatctcaccctcctcaccactgcaagtatgcctgtcttgtggcactactttctgccaggctgccaggaaccatagttagttccttgtgtatgcctgttggtctccatattagattgtaagctccttaaaggcagggactgtctgatgattatagtcgagtagttgaaaaagcataatcaggccaggcatggtgactcacgcttataatcccagcactttgggaggctgaggtgggcaaattgcttgagctcaggtgtttgagaccagcctgggcaacatggcaaaaccccgtctctccaaaaaataaaaaaattagccgagtatggtggcacaagcctgtagtgtgccaccactgagtgtggtagcatgagctactcaggaggatcatctgagcctgggaagttgaggctgcggtaagctgtgatcatgccaccgcactccagcctgggcaacagag

SEQ ID NO: 398203 - DNA, 136 bp, Homo sapiens
ggtggctggctgtcagcccattggctgggccctgtgcctctcatcttccagcaggctagctgggttttgcttacccagcagaggtggagcccaagagataacagcagaaatgtgtacggcatctcctggcccaggg

SEQ ID NO: 398204 - DNA, 397 bp, Homo sapiens
tggcaacttgtgggaaaaatcattactaacaattaacagcacaataaacaaaagggaagaactgtcaaccacccaaaaggttttcatgtcactacaaagaattattaggtttctggcaagaagctgttgaaataactatattaaaactataataatggctctgtaatcttttactctatagatgctatcgtcatcagggaatgaagatatgaaaaaatgggaaaacctatttttttttttggctaagtctgataaaaaggcggatagtcatggagaactctgattggatacaaaatatgatctattggtagtaaactgaagggagcttagcaaggcctgttactcaccaagattattctccttgtccctgtgtcttcacagataagaattccctctt

SEQ ID NO: 398205 - DNA, 259 bp, Homo sapiens
cttgctctgttgaccaggctggtctcgaactcctagatcatcctggatcctcctacttccacctcccaaagtgctggtattacaagtgtgagacatcatgcctggccggcttcatttcagaaatctttccccagcactccatatattacgaataattcctttcttcttctttagatagcattgtagtcatatctctattacctcacttgtcacatgataatcagttgctcacccatccatctcccttgattgctcatga

SEQ ID NO: 398206 - DNA, 411 bp, Homo sapiens
ctttcgccatgtttcccagtagtggcttaatgcagcctacagggttgcccaacccattagttttggtcagttcatctctgttatgactgccctctcttacctctcttttggagaaccaatgatttaaattctaggcatttaagatcacagtaatagtttcagctagcttgtttacagttcattcccagtgctcaccacatgtgccaccatcctaagtgctttaggatcacctgtgctttatgtatactaagtcatttaatgctcataacaacaatctttcttcttctatggaagagcacagaggaatccatagtcttagtttttcaagagttgattctgacagttcatggaaagaattaacagattcaactttgtgggttagactgatatttcaaaatgtgtggaacaact

SEQ ID NO: 398207 - DNA, 261 bp, Homo sapiens
cacgtgcccaccaccacgccgggctaattttttgtatttttagtagagatgggatttcactgtgctggccaggctggtctcgaactcctgacatcgtgacccacctgcctcggcctcccaaagtactgggattacaggtgtgagccaccacgcctggccttgtaagtgtatttctgtgtcaatagatgtattttctgcagcattattttcttttcctgggataaatcacatgtagtcataatgtgctgtcttttttattta

SEQ ID NO: 398208 - DNA, 271 bp, Homo sapiens
ttcaggaactttagtgattatcagcagacccatggttccatctgtgaaaactgtatctgttattcaggtaagtagctgggtgagagatcacaatgagaaaaaactttcaaggtctgcacttggcttatctggaacactaacaggactctttttccttgaaggctgaagctcatgaccacaaataaagctcatgctattagaaagggactccagtgaagataaacatttattgatgtcaaggataacatttaaaaattcctcttgaagctgg

SEQ ID NO: 398209 - DNA, 161 bp, Homo sapiens
tcaattaaagtacttatttcagtaaagttagctgcttaatactgatgaggtaatacatgcaaaacacttagaaggatgcctggcacacaataaatcctcaataaatactgattattaatattattactattagtcttatccaggtattttaatgattttct

SEQ ID NO: 398210 - DNA, 532 bp, Homo sapiens
taaatatacagtatatatctatgttatatgtagtatatataataatcacaattgctatatataataattgctatgtattatgtagtatactctctctatatatatgtgtgtacataaccaattaataattactaagtattttggacctgaattatcattattcattagtagagataatatagccaaaaggaatgagaaggggacttgtagtcaagctgacttaagttcagtcctcaaatttcttgggcctaatttcttcatatgtaaaacagaagtaacgatagtttttatatagctattgtgtgtaagctgcaaaatatgctaaatacctggaatagtgtctggctcatggaaataataagtggcagcaagtatgatttcgtattatgcaagttgaataataattattggcatcctaggcccatccttatgggggtcacggtaatttttattttttgccatagaacctgtgatgagagaaatgtaacacttaccccaggtcacccaataagtcactctatgtcattaggac

SEQ ID NO: 398211 - DNA, 521 bp, Homo sapiens
aagtatgtatattataggcaacactaactaggtgtattttctgctttaaaactactatgccagaaaaggattaaataatgggctgattgatgacttagaaaatgtttgattgcattactgcatcatgatgagacttaaggaatccgtgtgctccttggcaagcaatgactttgtcaaaggagtgttggtcctgctttcaaatgagtaagaatgtgatgtgaccactagagatgttttttcaatgtgagcaaaatcattctgaagggaaggatgaaaatcattagtgaaagttgggtgaggtaactaaacccagtcttaaggagtttggagagaacctcggccctgatctttcagtaggtatctctgaaactgattgctagtgcatattgatagaaactagaagcaaagctgtcaccttcctctcacttccatagccagctcagcacatccaaggaatcccccatctgtagattttatgttaaatgtttgattttacttaataaatatttgtaaatgtgtgt

SEQ ID NO: 398212 - DNA, 465 bp, Homo sapiens
ccgagctggaggtgagccccacagcctgcagagcagccctggactcgtgagccccatcgcaccagtccggtgggacttcagagatgtggaatccagcctcctctagtattgcagagctgggggatgggagctgcggattctgacaccacagctgccttatatatgccagatgggctggggcaagacacacccctttctatgaaatgagcagtcagtccaaatagatgagctaaagaaaggctgtgggagggacccagctctagcctgaggctacagactggcttccagggtactcaagcagctgcctctgggggaggggtcccaggtatgagaggcagggctcagaatctaggccaagcctccacaggacccccctctggagagctcggagcagtcttggggggagggtcagcaggcagcaagtgcactaggagcatctttcacaaggcacccaatattgcatct

SEQ ID NO: 398213 - DNA, 563 bp, Homo sapiens
cattaatatccccagatctggggccttccaagggagtcagcagaaaaaaaatatataataatttcacagatgaggagacaggttcagaaagggacagctacttgcttaaggccacacagcagggagtagcatcactgggccttggaccagctcccaaagcctgagctcactgtttctctgtttcttactgaccatgtgttcatttagaaaggttatttaaaagcggaagcaaacatttcataaaactataaaatgttaactatatataacaatttataacaagatggggcgtggtggttcatgcctgtaatcccagcactttgggaagtggaggcaggtggattgcttgaggtcaggagttcaggaccagcctcgccaacatggcgaaaacccatgtctctactaaaaatacaaaaattagctgggcgtggggtgcacacctgtagccccagctaatcgggaggctgaggcaggagaattgcttgagcctgggaggcagaggttgcagtgagctgagatctcaccactgcactccagcctgggggacagagagattccgtctc

SEQ ID NO: 398214 - DNA, 314 bp, Homo sapiens
gtctcttttagcattgtacattggctaaagtggaggggaatctgtccccaaaaatggcagagtgggaatattctgacccttctgagcacggctgacagtgtgagccatggagaatgatgacatttttcagcaacagaactgtcaatggatgtgttacagctattttagtgccttctcccctcctggagaaaagccattttcaaacccgttgcttgcaatgcattaagtgatgaaatacagataacaaattgcgcatttgtttggcttcatgcttattacacccccggttctggaaagcattgcacttagcccct

SEQ ID NO: 398215 - DNA, 279 bp, Homo sapiens
  misc_feature (10)..(10): n is a, c, g, or t
  misc_feature (19)..(19): n is a, c, g, or t
  misc_feature (23)..(23): n is a, c, g, or t
ctctagaggntcccccaanagancaccctgaaagggtaggaaaggctttagggtgggcttgaaaatgagcgggattttgagggttgagttaggggagtggtagatgggaacatcatgttctcgtacagggaacagtgagcatgataaggaggtagagggcaggtgaccctggagtttggggaactttgggacatctgattggccacagcatagcattggagcagggcagtaggggtggtgggcttgtcactgagggcccagaactctctgtccttaatt

SEQ ID NO: 398216 - DNA, 693 bp, Homo sapiens
gtgacatcatcctcctggacaggcagaggtgtgtactggcagctttccctgctttctgaagcagccggagtgccatgtgcaagtaatctttcatttccaagatgaagagcctgtgtgcacactcatctctctgagagaagcatggctttcacagaggcactcacggtcatgaaactcagctcattaaccctccggaaattcatgaggaggctctgctgagaagagtcactgatgacagaattttaaactttattttctgtccccaataatgttggtgattatgcccatgaaaacgcatgggctttctgtggctgtcaaggactttctagagaaattggtcttgagcttgccatttcgtcagtgctggctctgtgctttgttaactccagggagcttgaagcctgtttttttgttgttgtttgttttgttttgttttgttttgttttaacagatttggacaaaacagaatccagtggtagtgacagtgatgatggcagccaatgtgattaactgaagcatcatttttatttattttatttatttgcttttgcttatttggtcttaaataccaagttgagatatcattcaatgagatttcagacagcgttaaaagtgaaatggcaaattccgtgggattccatatgactgatgagacatgattatttgtcaaataaagcaaaatagaactgttct

SEQ ID NO: 398217 - DNA, 317 bp, Homo sapiens
ccccggccctcctgttcacacacaaacttcaccttaggagacttggtcatttttcaaatcacacttaacttgagcacatactgaattcaacgcaagaaatatcatataaatatttatatttatagaaatctaataatgaattggacttctgaaacttttggtaaaattcaatacttctatgaaatctcgcttttcagggggactctcacagtcctgcccatctctgtgtcccccctttaaatgtttaagtgtcctgtattcatccaggagggacaagaagatgcagagttccactctcaaaggccaaagaccgccaa

SEQ ID NO: 398218 - DNA, 410 bp, Homo sapiens
cgttattagattctagtctcgtcagttgtttttgaggttttttttttccctgcaattcagactaaccccgcttattcttgtgaaccaacaagtgatctctggctgctgctcagaagaaacaagacagatgggtaatgtaaaaatctggattagtattctaattctgggcaggtattggaatcatctagtgactccatattagcttggtttcaacaattgcccagttcatggaaagccttcttatttagtttacttgggatagtattacttatttagctttactcttgtggaatatattgttattgtactctatatgtaggaatgcaggataagcttaatcaatgttctcttaaattgaacacattaattttcctgatattactttctgccagagctcaagagttatgagt

SEQ ID NO: 398219 - DNA, 636 bp, Homo sapiens
tgttttttaacagtgagaaaaactacatattcactatcatcatacttagttttgaaaccatctgttcagaaatgatcctattaatttaaaaaagaaagtatttgaagtccagctgattataataaaagtgatactgattctagcaatgcttttgacctctcatacacctttagttcttttgtttgggtcccagacaggagaaagcctttaaatgtctatagattctttaagacataggagtcaataacgattcactgactaatggaggaaatatttttatcacataagattcaaagtttggtaagggaaatctcattataaactggtgtagttaatctgtaactatatttggattgaataaacatgttagtaatttctcaaatgcatacttgcctccctgcctgctgccctacaaacctacagtcttcctgaatggtagcacagctgcacagaccacagaggttttcaggaagaaaactctgcctgcctatccagaatgggtcggtgaatgcagatgtcaccttttcttttttgtctacaacttttgtgacagttataagccgattaagatagctttaaagcgttcagactttgccactgactgtctttcttccttaaaacacatgagaaagttat

SEQ ID NO: 398220 - DNA, 840 bp, Homo sapiens
tctcagagagagagagagagagagagagagagcacaatgaaaaaaataaacctgatcttgcacagagcatgtaataaaacctgtgcgttcttggctatctctctctggtctcctccagggtgctgaataagctcttctctctccattcacccaggagaactctcttctgctgattttctgtggagctagatcaggctgtgactcagaatctccctccacctccaccctttcctattttcccaacaccagtgtcaatctcagatgtcaacaaccccacgagtgagttcctcctgttgccaatacatccaggtcctgttctccgctgctgtctctacccaatcccttcccttccttcctcctgccaatcctgctttccctgtttcttgctcctctgacctcctccgcattgcttgactgtctcagatacactctggcctcagggtcttggcactttctgttctccctgcctggaagggtcttccttagtcagatactgaggtcacccattgtgttcaagttcctttaatttatctgaaatgagtctgggcgtggtggctcacgcctgtaatcccagcactttgggaagccaagccgggtggatcacttgaggccaggagttcgagaccagcctggccaacatggtgaaaccccatctctactaaaaatacagaaattagctgggcgtggtggcacaaacctgtggtcccagctactcaggaggtcgaggcaggagaattgcttgaacctgggaggcggaggttgcagtgagccaagatcgtgccactgtactctagcctgggtgacagagtgagactctgtctcaaaaaaaaaaaaaaaaaa

SEQ ID NO: 398221 - DNA, 405 bp, Homo sapiens
tttttaacgagcagatatttataactgctaccaaaaccaggaatagtttactaaatatgggggtttgaagatattgtctttagctgggaaaagcttccaggctacaagagaggataaagacagtgagtaacatttgagatgtactttatttcattacctaacaaacacctatccagcactcacaatggacaggctgtcttccaagcaggaaaagattatggagcatatgctgtacatatgacctcatttaatcactatagagtatatgttcaatgtctggatgttttcaatgtctggattaattcagccgtccaggaaagaagtttgtgctttgctctccatggacaacatctagtaaaggagacttagtctcatcgttcttctctgaggaggcaggattcacga

SEQ ID NO: 398222 - DNA, 485 bp, Homo sapiens
atctccttccactgtctgtcagcacaggcacccttgggttctccaggagccctgctggctggaggcatctattttcataggcctggagcaaaccacaatgccccaggtgtggtagatcctctctagagccaggacccactcctaacgccagaagacactgcagctgcttggagcccacatggtggccaggcccatcctgtccccgcagcccactgctgtgtgtggctggttttcctggcgttgacatctcctccaattctagcacatcgggaccactttgggcactgccaattccattcagtgctggagggccccaggtctggcctgccagggatccacaggcacatgactgcaacagcctcccacccaactagggcagtgccttcagcacctgctgaggctgacctgggcaacggtaggctccaggggctgtggtttatagaaaccacctgcctgctggtgggttcagaggatggctcacggat

SEQ ID NO: 398223 - DNA, 829 bp, Homo sapiens
cggccgagattctcttttatgtataacaaaaatgactgagcttcatgcatattaacttttagctcattccatggagatgggacactcctggctgcttgtctagcaacagggctgcctgtctagcatgcctggctttggaacaaggattcccatttcagaatgatgagagtaaaagcccttttactgtgtatagcacatgtgaaatgattttcacatctgtgaacttacgttagcttcacaactttgttggttttatgattcctgttttataaacgagaaatgtgggctggagaacatgaagtgcccaaatgaagaacatataagtgacagagcaaggaaaatagactgcactcctgcattcgtcttgaggctgattgggttctaattctttccaaagatgcaggtgtgagttgattgatgaactcagctcagtctttagtcatatttgatcaactcctagaaatagtttgatgtaggagggcaaggtgggaattgtcaagagaagagactggagaagagactaagggcctttgcatcatgttaaagagcttagattctatcccatacgtgatggggaggcactgaagggttgagaaagtgcaatcaatttccattgtataaagaccactattggccctcaacctttcatctaaaattgttgggactagatgtgaatgagaaatgagaatttttcagattttagaagaataaaacaatgcatatgttgtttattttactaacgttaagttggtaaagccattttccaaggagtagtactcaaattaattcaggtaagctgctttgtgattctctaaattgatatgggcac

SEQ ID NO: 398224 - DNA, 305 bp, Homo sapiens
caacttaaaatggattgaagatttaaaagtaaaatctgaaactatacaattctagcagaaaacataggggaaaagcttcgtaacattggtcttggcaatgatctcttgggtaagacaccaaaagcaggcaacaaatgcagagatagacaagtgggactacatcaaactaataagatgcacagaaaggacagtgaaaaggcaacttagggatggaagaaaatatttgtaagccatatacactcggccctttctatcttgacggttcaaccaagaattcaaccatccttggtttgaaatatttgaaa

SEQ ID NO: 398225 - DNA, 419 bp, Homo sapiens
tctctgcattctcatgccggagtttattctccagtgcactgtggttcgttctctctgtgtgtgtgtgtgtgtgtgtgtgtttgtgtgtgtgtgtgtgtgtaaatatgagcaaatgaagtgaggatgaatggaatgaatgaatgaatgaaactcaaagagcctcagtgcaggaagacatgtttttcaatctttctgaccttcttgtcaatatggactagcatcagacacctcctcttagcacatatagggcctttcatgtgagtacaaagctcttttccctttacagcccatttctatcactacgtctctctttccagagtctcaatttagtaaatgtttaccaagcacctactagctgttgagccatgtacccgacacttcatgcaggagtatctcatatcaccctcaccagccccacg

SEQ ID NO: 398226 - DNA, 236 bp, Homo sapiens
gcggtgaagcccagcaggtaggcaggtgtgacatcacacttagtgttgggggtgagcactctggaggccacgaggagatgactgtgctaagtgcgtggaaagatgaggggccacagtgacttaaacagccattctaccaaaaaatgtcacaggagaccccaaataataggaacaacccacaggcctcttgactaaagagatggacaaatagtggtctagacctttgcacaatctgg

SEQ ID NO: 398227 - DNA, 321 bp, Homo sapiens
atgagaggcggcccatataggctattgattaccaaaacacagaagtgtaggtttctgcaggcccaaactctttcttcttggatactggatcaattatatcactatttgatcaatgtcaaatctccttcttatatcaacattgatagaaatctatgtcaatgtcctaatctaataggcattgtctagcagactttctattatgtagtagattcttttttcctgagatggaactttctcccctctgcattgactcaatcaatggggaaatacatgaaaaaaataaaaatactttttgcttccacctataatatattgctgaag

SEQ ID NO: 398228 - DNA, 436 bp, Homo sapiens
tacaaatttttaatccagattgtttccttgtcatctagcctgcttctgagccttcatcctactccttaaaatcattgtgtatagagccatagcaaatagattttaataatatcctaagcagcaaagtctgtcttttaaatttgttaatcaaaaggtgtatttttattttactaaagtataaaattaattccctttgcctgttgctgccttctattagtatagatcataagactttaatatattaaaagcattgttcttgaatcagtgttattttaggtatgcttattgaacgccagtcataagggtccctttctagggattatttagagaacatttttttcttttttttaatgggacaacacttcattctataaaacagaataagtgttccagaaactattgtttaaaaaagtcattctactggccaggcacggtg

SEQ ID NO: 398229 - DNA, 336 bp, Homo sapiens
tcctggcttcactttccgtttcatagaaagggccacactattgactttgttcaaagtttttatctctatgtaagtagaattttagaaatactaggaatggataaaacatcttacaatctcctttgccttcaggtaggactacactggacctagttattgagattctttaagccaagtacaagacatttcttactaagccattccaatgtaatgataatgactaaggatctcatttacaaataaaggtactcagattgtgtttactcacagtatgtacacccaggaatctggaaatgagtattacttggacagagtggattggaagaaggctgacac

SEQ ID NO: 398230 - DNA, 487 bp, Homo sapiens
ctgacttggacaggcatctgaaacggcacaaaaggctgtgatctggtgccagcttctttctacagctttatctcctgcctctcacatttcatttcagcaaccccaaatggcttgtcatcccctgcacattcagagctgtttcttgcctgttgctttgcttactcagaattttctgctttgactgccattcctcaaattgtcgcttggctgacttcccctcattctttaacactcaatttagatggcaccttctccagaaagccttccttgactccctctttctccatgctggattagtgcccctcttccatgctccctgagtacctgcaaagcccttgatccacatagttacagtgatttgttcctgtgtgtggtttctccactaagtttgtagagcttagttctcagcaagactagttcatgatgcctagcacaaagtaggtgctcaagaaatcttggttgagtcaataaatgactgactgaatga

SEQ ID NO: 398231 - DNA, 370 bp, Homo sapiens
tgcggccgtgggccagcccgtgtcactgtggccagcctggtagggcatcctcaggacagcgcagccggcccctgtggtcactgctagcccagtgccgggggtaccagcccccacggccactctacaccctctgaccacggcgacggcccgccagtttcctcccaggacagtgctgctgcccccggtgggccttcctagccccacgtcagtacggccagccccgaaggtccctgctgagccaggccagccgccccggcggtcgctgctgcgcctcaggtagccccagtggttagtggaagccccagagctgtagggcccactcacgccttcactcctgggcccgggacagccaaggcagcagaagcggccg

SEQ ID NO: 398232 - DNA, 255 bp, Homo sapiens
caatagtaagggaatagataaattaagatacaactgtaagacagaaaatgatgtggccaattatgtctgaaaatattttataacatagaaaatgcttatcataaaatgttaaatggaaaatgataaaaataatatgtagaatatgaatctaattttttttttttctgagacagggtttcgctcttgtttgttgaccaggctggagtgcaatggcacaatctggcctcactgcaacctccacctcccaggttcaag

SEQ ID NO: 398233 - DNA, 712 bp, Homo sapiens
gccgggcgcggtggctcaggcctgtaatcccagcactttgggaggccgagacgggtggatcacaaggtcaggagatcgagacgatcctggctaacacggtgaaactccgtctctactaaaaatacaaaaaattagccgggtgcggtggcaggcgcctgtagtcccagctactcaggaggctgaggcaggagaatggtgttaacccaggaggcggagcttgcagtgagccgagatcgcgccactgcactccagcctgggagacacagccagactccgtctcaaaaaaaataaaaaaataaataaataaataaaaataaaataaaataaagaaataggtgaattgagcaaggtcattgtaatacagaagttattaaaaataatttgaaaaaaaaaaaaacaacactaacaacattaaaacttaaaaaataaatatacaactttatatctacactatcaattacttctcattcaattctattaaaccctcaattcccttataaccaatattcttcctttttctcggggcccaaattgtggccttttttggcaaattccctctattgggggggctgtaaaaaaataagggccgctttttaaaacgctcgtgttgtgaaaaaacctggtggttccacaatatacaaccttggggctctcttttgtccgcgggggggtaatcaggggcctcccatgtggcttttccacggtgtgtccc

SEQ ID NO: 398234 - DNA, 334 bp, Homo sapiens
aatggttaagacgacaaattttgttttgtctattttagcacacacacacaaacacacctttaaataaccaggcaaatgagaagaaaatacttattaggaagccaagaagtgggaaaaaagaaataactagaagaaattcagacaatggagttgtccgtcattgaatttaaaataactatgcttaatatgtttgcagaaattttcttggctcactgcaacctccgcctcctgggttcaagcaactctcatgcctcagcctcctgagtaaatgggactacaggtgcccgccaccgtacccggctaatttttgtatttttagtagagatgaactgaa

SEQ ID NO: 398235 - DNA, 303 bp, Homo sapiens
gtgtttgtgtggggaggtagggctctgtgtgtgtgtctctgtgtgtggaggcggagctgtgtgtgtgtggaggcggggctgcgtgtgtttgcggaggcagggctgtgtgtatgtgtggaggttgggctgtgtgtgcgtgtgtggaggttgggctgtgtgtgtgtgtggaggcggggctgtgtgtgtagaggcagggctgtgtgtgtgtgtggaggtgtggatgctgtgtggaggtgtggatgcggtgtggatgtgtggaggtgtggggttatcccgtccccgtatttcgtagtagtagcgccc

SEQ ID NO: 398236 - DNA, 417 bp, Homo sapiens
ctaggccactgactatgctgtaaaataggaagaatatagcacttatcccatataaaagtgttaaaatgagaatcattccactatctgagcttagttgcagaaactctagtggccactaagccccagtaatggattgctgtcacacagaaatagttatgtgcattctaaaatcagtgggtaggcacatttacagatgtatcaatttcttggcttgggtcactattccagtatgtaataattttttaagatgatgtacagatctatggaggaagaggttgcttcaagcaaactttatagagttgcaacccaagcacatgtattgagctctgcttcccacttcagatccaggataacaaataggtatcagctcatctgattctttggtagtgttttctggagcactttaataaagaggtt

SEQ ID NO: 398237 - DNA, 443 bp, Homo sapiens
tttatttaaagggcttcctccctaagtgattaaagcagaattttaaaaggacactttgatttaagatatcaattacttgtgttgcatgactccattttttttcataaatgaaaatttctccagtgagaatcctgagcaattcctagaacactgctgtatttaattctgaattctcccttctagaaggactgtagatcacagtgttcaaacaagacttatgtgcctgtgggcattccaaattcctttgctggccttacagtgcagaggtgaatatagaactgttcctcaatcctttttcttagagtacaggttgagcatccctaatccgaaatgctccaaaatctgaaactttgagcaccgacataacacaaaaaaatgctgattcgggatttccagattagggactttgagtcagtgagtgtgatgcagatattccaaagtgg

SEQ ID NO: 398238 - DNA, 201 bp, Homo sapiens
agagaaaactgtctggactcttagcagaaaggacggtggttagatagcaacacagacttcccacaagaaagggttattaaggaaaaaaaggctggggccgggctggtggctcacacctgtaatcccagcactttgggaggccgaggcgggcggatcacgaggtcaagagatacagaccatcctggccaacatgttgaaacc

SEQ ID NO: 398239 - DNA, 713 bp, Homo sapiens
attttttgactagccttgattaaaaagggaacaattgtgtacttctggttagcctggggaaagttatagcagcctaaattcaaatctctgcatatatcaaccaacaagtacagcaatacaaccacatacatggcaaaaaacttcaaattacctatgaatggaaaaggaggcaacgaatctatagagttatacctcaagtccctgacctaagcctttgcagagaatgaggggagacccataaaaggataaagaagaaaaggaaagacaggggtcaaaattggaaataaaataacccaagaaagagaaaagtccatcctatgtgtaaaaagagctctgggagattggtaaatgggagtacagagcattaggcagtccctaagagtgagtagggacaaaaacaccgatgttagaaagccatcatttctggaaagaaaggaggataaaaaggggagtgcaagaaggaaaaagtatccagcaggaaaaatgagaacccaaaccaaaagactatccatcactactgccatcaagcacaaaaaaagaagaaagttattcattgaaaaaaatcacactatgctacattttcagaagaggtttgcacctggactagaaaacacaaaataattaatagatgaaaaaatgcctatataaatatccaaagcttctttaagaagataacaaacatgaaagtcaaatatttcagctaatgaaatcca

SEQ ID NO: 398240 - DNA, 292 bp, Homo sapiens
agttggtggtgatgagcttcggaaattgctgaccttgggttctgcctgtccttcggaatgatgtcatccctgtgctggactgctgtccttagggcctgggccgcagagattgagttcttggtctcttgatttgtcagggtgggtgtggtctggggcatctggatggggccctgagattccagaacttcatcgttgagctttacttcagacatgtctgccaactgttaggagacattgttttagttaatgaagtgtatctcaaagatcatgtagtaaaattgacagatgaggc

SEQ ID NO: 398241 - DNA, 477 bp, Homo sapiens
gtggacagctttccatatcaatctagaaacagctactttattcatcttccattataacatatgccagacataccaaaaaggaaggcacacctgatgcttgaaatgatcctattatatggatgcttcaaaatttgtttaacctgtcccctattgctcaacattcagaattttctcaattttccttacaaataaaaacactgcacaacaacaaccactagagctaataaatgaattcagcaaagtagcagggtacaaggttaaccaaaaaaaatccattgtgtttctatacatcaacaatgaataatccgaaaaggaaatttaaaaaacggttctggccaggcgcggtggctcacgcctataatcccagcactttgggaggctgaggtgggcagatcacgaggtcaggagatcgagaccatcctggctaacaaggtgaaaccccgtctctactaaaaatacaaaaaattagccaggcgt

SEQ ID NO: 398242 - DNA, 320 bp, Homo sapiens
gtcttttcaggtgctgaaatgtgtttaattatttctaccttggcatccactcgtgcccgtatggagggtgttcttatggttccaactggttcagtttgcacagatatctctgctaccgtttgaactgctatgctggagactttggaaaggggtttggtcttgtcagcctctgtcatgctgtcaccatatttccctacacgagctttcctccttgatctagtaggcatatcccactcatcctgatcttcatcatcagtttggacgcttgtatccacactctttttagttctccttctcctactcacatagctccgatctgt

SEQ ID NO: 398243 - DNA, 707 bp, Homo sapiens
tataatcccaactacttgggaggctgaggcagagagctgcttgaacctgggaggcgaaggttgcagtgagccaaaatcacgccactgcactccagcctgggtgacagagaaagactccatctcgaaaaaaataaatacatgaaataaaatccaatcaagtaacctgacttaatcgcaatatatttgacttagacattcattgaatctcttctttaattcttctaatagctatgccacaaaaatggggtgctgcctactcaagcatcatcaattttccttgatgaaaacacaaaaaatgtacttggagatattcttttcctttttgaataaaaatttaatcaaaagggatcttacagtcccataagcagcagaaaacaagacactcgtgaactatctcaaacccacagaagggaaataaatcccaacttacactgtttataccacacatttcctccgattctcactgacaagtttatcgacttgtaaaattcaattttacaaattacaattaaaaagacaattcaaattcggcacacaagttggtgagacaactcagataaagatgacacctttcattttcatatcactgaagatgactgtaaatatattcgcacaccaaaaaaaaacctctaagcaaatcagaaatctgcaaccatcactgcaacttctgcctcctgggttcaagtgattcttctgcctcagcctcc

SEQ ID NO: 398244 - DNA, 652 bp, Homo sapiens
ctatatgaaacttaaattatgaaacttctggaagaaaaaaatggatatagtctttgcagtattgggctaggcaaatatttcttagacagcatcaaagccataacatgtaaaataaactaataaatttgacttagtcaaagtttaaaacttctattctttgaaaaacgttaagagaatgaaaagataagctgcagactagtagaaaatatttgcaaattgtaggccgggcgcagtggctcacgcctgtaatcccagcactttgggaggccgaggcaggtggatcacgaggtcaggatcgagaccatcctggctaacactgtgaaaccccgtctttactaaaaatacaaaaaaattagccgggcgtggtggcggacacctgtagtcccagctactcgggaggctgaggcaggagaatggcatgaacccaggaggcggagcttgcagtaagccgagattgcgccactgcactccagcctggatgacagagtgagactctgtctcaaaaaaaaaaaaaaaaaggaaatatttgcaaattgtatatctgacaaataatttgtatccaaaacttaaaaataagaaaataaataacctaatgaaaaatgcaaaaatttgagcagccatttcactaaggaagatacccaggtgctcactg

SEQ ID NO: 398245 - DNA, 468 bp, Homo sapiens
aaggacattggtagagatccagatgtccatcatttggttcagcccaggacttgaagcttctgaaggccctgtgcacgttggctttgccctttctgaggctatgtgcccagtctctaccagtctcacgtgcccagcaagcctcttggagtgtggacagaatctgctgcttgcttttttctgcctttgtgattttttttcctgattataaaagtgtgtgtgtgtgtgtgtgtgtgtgtgtgtgtgtgtgtgtgtgtgtgttttaaagagattcaaacaactcagaagtgtacagtgtgaatgtgaaggcccctagtgattccagtatgcccctccataatccctaagagtttgctatgtccctgtatgtccgaattttttcctattaacatataaacatatagtaacattttcttatgattttgcagcttgccttttcgctggacaaaatttaatggaaggtgtggtgag

SEQ ID NO: 398246 - DNA, 319 bp, Homo sapiens
ctttatcactgcactgagccaaagtggggagcagggggaagtgcccacatgcttattaaaaaccgctctgaaaatatttgaagtaacagggctataacaattattattttaaaagcaactgctgttttggtttgtgtagccccagaggtttagcagatgctgggccctgtcagctcaccaaaacagggaaattagaaaccagtctatctggtagtatctagagaagttgtgataccagataggtggtccaaacccttcactcctcagggatagactaagagatgggagttccttcccgatcatatggcattgtattagg

SEQ ID NO: 398247 - DNA, 500 bp, Homo sapiens
atggtggcgtgcatctgtaatccgagctattcattcgggcggctgacacaaggattgtttgaacctaggaggcggagtttgcagtgagctgaggtcgtgccactgcactccatcctgggtgacagagccagactctgtctcacaaaaacaaaaaggctgggcacggctcacaactgtaatcccagcacttcgggaggccaaggtgggcggatcacctgaggtcaggagtttgagtccaacttggccaacatggtgaaaccccatctctactaaaaatacaaaagttagccaggcatggtggcgggtgcctgtaatcccagctacttgggaggctgaggcaggacaattgcttgaacccaggaagcagaagttgtagtgagccaagaccgcaccattgcgttccagcctgggcaataagagcaaaactccgtttcaaaaaaaaaaattggccaaatatggtggcgtgcatctgtaatcccagctattcattcgggcggctg

SEQ ID NO: 398248 - DNA, 207 bp, Homo sapiens
agggtctccctatgttgcacaggctggtcttaaaatcctggcttcaagtgatcctcacatttcggcctcccagagggctgggattacaggtgtgagccatagcacccagccctatggtctggcagtttcttaaaaagttaagcacacacttaccgtatgcctcagcagtcccacttctaggtacaacagtcctatccccacccatag

SEQ ID NO: 398249 - DNA, 1030 bp, Homo sapiens
agactacaggttgagtatcccttattcaaaatgcttgggaccagaagtgtttcagactctgtatatgtttggatttgagaatacttgcacatatataaaatgagatatgtgggggacgcgacccaagtctttcttttaggagggggggaaaaaaaaagcttttttttttttgggagacagagtcaggctgtggtcaccggggctggagtgcaggggtgcgatctcggctacatgggcacacctctggactccacgggttccagaaattcatcacgagcaaacaagacgcactccacggagaagctgaagatgacagcaacaaacatgacacactaacaacagggcataaataatagcacttgaacaagtcagagacatggggcaatcaacacaatgattgcgcaaaggaacatgcgaacaaacacgcagtccagtgcacaacaccagaaatgaatccaaacacgaaagaaaaatacccaaaagaggagcagagaaaaagacgaaggaacacaagacaaaaaggacaaaaaaacagagatgaaaaaaggaccaaaactaagccacaaaggagaaaaaaaagcagaaacaaataaaaagacaaagaaacaagaacaaaaaacaaacaaaagaaagaccaacagacgactaaaaaacacaaaaacaataaaaaccaaaaagcgacaaaagccgaacgcgagaggatacagagaaagaagaaagaacaagaaacaaagagaggagaaaaatagcaaggaagcaaaagaaagacgagatgcagacaacaagagggtaagcgagcgcaaagacaagaagaaaagcgcagaaaacaagacaaaagaggagcagagcgaaggggaaggaagcaagggaccgcgagcgagcagagacgaacagccgaaaacagcagaagcggacagaaaaggaagaaacagaagccaagagggaaagatagaaaagggaaacaaaagaagcggagaaaacctgaaacagaagacacagaaagggaagcaaacgaagagaaatagaaaaa

SEQ ID NO: 398250 - DNA, 1719 bp, Homo sapiens
cgataaaccagatatttttttaaaacacagcatacagattccaaatgatcaaggatcaaaaagtgttggggatgtcaggaaggatgcaaggatgggcttgaatgatcacaatgagtcaacccagaaatgtgcagtagaatagtttgctaatggtgacatctgagttgcatctcccggaaatattgtttcttattattacactttgggtcgggggaaggggtgttaagggtaaaaagaggaaggagcaaatagataaagagaaaaattcatgcctccaggaaacataagcagaaaaactatagacttgtgtctctgcttatttttttaagtacagtgtttttaatagaccaaagagaatctctatgagttaatatgtatgtgaataatgtttataaaaggggtataatgtgttagtcattatggaatattgtataaataaaccttccatatataaaacatataaaaaatgattgcttagggcagtggacacttaaggacttccaaacctttcatatcttcatcccaaaaaatagagcgttccagggctggcaacttatttccttagtatattccactgtaaagccaagaggtgtgggggcttgttttctggttttgtaatttgtaataatccgtatggattactgtaaaatgtctgttgcatgtgtgttggtgttggtgttggtgttgtttacccacatggagtcatcagagatttgttccacactttgtatcctggaaaaccaaaaggaattttcttttcttcgagacagagtctcgctctgtcgcccaggctggagtgcagtggtgccatcttggctcactgcaacctccgcctcccgaattcaagtgattctcctgcctcagcctcccgagtagctgggactacaggtgcgtgccaccttgccctgctaattttttgtatttttagtagagacggggtctcaccgtgttagccaggattgtctcgatctcctgaccttgtgatctgcccgcctcggcctcccaaagtgctgggattacagacgtgagccaccatgcccggcctggaattttctagtaagaagaaaaacatacagaatatgtcttcactgttgggtaactctcaaatttgtagcaatccagattttttgtaaaactgtgctaatgggatatttaatgtcagagttattgtctctcacttcaatatctagtactggataatgtttctcctgggagcacgtatttttttttcaagtcctcttttcctggacttaacatgttcttctagaagacaccagaagtcatgaccctaagccccctcccttcaggaccactttctaccatcggttttcaaaaaactatccacatgttaattctgttttatgttctgtgattctgtggtagactcagtgctttcagagtccagagcttgacttgggttagtggccttaatgaagtgctaaatttgctctttaccgcgagactgatcagaagaagcaaaaggggaaagggggctagaggtccactcgcaccttttacatcagacaagaggaggactgtgccagaaatctgtgcatgaaacaccatctgctcttcatgcagggaggggtcaaccgtgtgaacgtgcagagattactcgagccttctttgccaaaaatatgcattcttcccagctgtaagcgtgtgaagccaaatatgtcttttagcatgaaacaataaaaacatgtttattttcactta

SEQ ID NO: 398251 - DNA, 482 bp, Homo sapiens
ggcgcatgccaccacgcccagctaatttttgtatttttagtagagacagggtttcaccttgttagccaggctggtcttgaactcctgacctcaggtgatgcacctgcctcagcctcccaaagtgctgggatacaggcatgagccaccgcgcccagccaagaagaaggaattgtctaacaactgtggtgctctccataggagatggatcaatggttcttacaagtttattaaaatgtagattcttgaaccctactcccagcgtacagctcaacatgattcagctgactatgtgagggactgaacttcaaggtacaaaaaatgtagggtatgctttaaaaagtcaggatcagccaggcgcagtggctcaggcctgtaatcccaacactctgggaggctgaggcaggagaggagcacttgagctcaggagtctgagatcagcctgggcaacatagcaagacctcatctctacaaaacaaacaaac

SEQ ID NO: 398252 - DNA, 351 bp, Homo sapiens
acgaggcatggagaggatccatggctcgcccaggggcacccggggaaatgggttgccgagcgcgaaataatccagagcctgcccactcagccacaaggctcagcggctccacaggtccagacacctccttcacatctttgtaggttctgctcattcagaacagccagaactccactcaaacacactttctgtaaataagtgttgatttttttttactaaaccttgcagaatatgggtaattcctgcttcttttatctttctctgtgtattaaatgctgctctcacgagatttaagttttgtttattttttagttaataaaaggaagagggaattactgaaatttaaaaaaa

SEQ ID NO: 398253 - DNA, 320 bp, Homo sapiens
acacgcacgccccacgcaccacacacaagccacccatcccagagcccgccccccagaccaccagcggctcagcggctccacaggtccagacacctccttcacatctttgtaggttctgctcattcagaacagccagaactccactcaaacacactttctgtaaataagtgttgatttttttttactaaaccttgcagaatatgggtaattcctgcttcttttatctttctctgtgtattaaatgctgctctcacgagatttaagttttgtttattttttagttaataaaaggaagagggaattactgaaatttaaaaaaa

SEQ ID NO: 398254 - DNA, 219 bp, Homo sapiens
ctcagatgtcctgccctttccccaacagtctgtcccgtctaatgctatgggcctgtgtctcttttctctatcttacccaggaagaaagagttttttcatttcccttccctcagctactagaggtctttgctgtgctctgggaggttgtttttctttctttttaagttatgctttcttgaaatttataaacccttgcaaactgccttatgccctttttga

SEQ ID NO: 398255 - DNA, 348 bp, Homo sapiens
ctccatgcgttctggaaaaatcaatacttaataaaaattacaggacttacacactggttacacactggttacgtgtaatctattgtaaaattgtctgccctcgtttctgccgccatgcagttttgcttactgtacaaattgatttgacaactcaacttatagatggccgattcctgctgcagatgagcaggccacatattacggttgagctcaaaagatgaacaattacattctgttgtgttcttctcgggttgtttgcttgtacttattggagtattcaagaaatatttgctgagcatttatgtgtatatatgcaaatatttagtatgtgtctgataagatgtgagg

SEQ ID NO: 398256 - DNA, 563 bp, Homo sapiens
cagtgcacaccaaagtttgaaaccactgttggggtgtggagttcttgcttccagacttccagggcctatggattgaacaacagcagccacagtagtaattagaattttcagtctgaaccacaagcctgccatgcaacaagggtttcctcccgttttacagatgagggacctgaggcttcataaggctgttattgacctgaggttgcacagctgatggctcctgggttcttagcgttaagttttgcagccttatttctgttgtatatttgtttctcatatttctgtgtttattgcactgcaattgtgatatcctctaaaagccaaggatgaactcactgctgaccttggttttattcgtttgtttattttcaccttttcttgtgaaatgtgcaaacatactcaaaagtcaagagaatcatatggtgatttctcatagtcccctttggccagcttcagcaaagatgacattttgccactcttattccatccatttctgtcacgccacccctgacatacacacatgttctttctggagtattttcaagcaaatacaggatttttaa

SEQ ID NO: 398257 - DNA, 308 bp, Homo sapiens
tggctgttgtcttctctgatggccaagagaatggcttttgagtcaggggtggtgaaagtgtggtattgagagaattcttcgcgcttagtgttctctagtttgatggtgcccttgaaatgcatgcctgccttataccttcatgcctgggtatatctgtgcataagtccccaaagagaggtcacccatgggaggtagatatagaatacagcatggcaggaggaatggcatggcccttgcaaactgtgtacctgcctgcctttctcaagcacacctgtttttcctctgcacttcccaggtggcatgggcat

SEQ ID NO: 398258 - DNA, 358 bp, Homo sapiens
cccaagctcaagcgattctcctacctcttggaggcaggggagttactgggttagataaactctggtttcaggctatcctcctgcgtctgtctctggaggagctgggactacaggcatgcaccactgcactccagcctgggcaacagagtgagacccagattcattcatgttcgtatctccagctgtggctcattcttttttcactgctgtatagtatttcctgataggaaattgccacaatgtatttattcatttttctcttcattttaggtagctttcagctttttgttgttaacacaaggcatctttggctttcatctgagtacctcagcccctgtccagccccttttccttccta

SEQ ID NO: 398259 - DNA, 809 bp, Homo sapiens
ttttcctccctctgcctctacctctacctctttcaagattttctctttctctttactatggtaaataggcctttagtgagaggagttatgtcagcctggctaggagtcaggctgcatttcaggtttgtgatagctagaggtaccagaggcagtttcatggaattttacctttgcaacactgagagcctaggcagcctcagagtcagaacacccacagttgaatcctcagcctgacagacactgaatccagggcaaatcttagctgaatattcatggtctgtagaggtggacatgagctagatatgagctaaggaccatagccagctcatggcttttgtgatgtccaacaccgctatcctctaagatgtcacaagtgtccctaggcttttattcccatggtctctcctggctctgagttctatcttccattaaggttcttcctgttcctcccctcattcacactgattggcatctcttctgtctgccctcaccaactcacatacagaacccagtctctttcctcttatttccacccaaagccctcccacaagccactgttatatgttcacatccctgtaataccagtgagtaataattgctaatgagacatttttccttttatggaacaaaggctgtcccatttctcctcaggcaccagcctcccacatgttgtcatgcctctttcccccactttccctaaaccttctttctctcttgcactccttattccctggttcctattgatttctcatttagcacaaggaactaggtctttcttttgtggcccttttcccaatccaagcctgctg

SEQ ID NO: 398260 - DNA, 457 bp, Homo sapiens
ctgcatcctgttcttgtcttcataggaaataattactcttctctcttttgtgttactcagtcacattattctaaagaggtactgggtcagttcccagtagctcaaagatggtgtgaaaacagatctttctgttagtttttcaggcttattcacatgtccatggctgttgggacttgtagagaagaaggttttcctgggagcaaactcagcagtagaatagtgtgctcaaaaccacctccccagccctccaataactgagtcattgagacaaaactcatggtgctgaccttctccttctttaggatatgatttaaaggccccttcccagcccttcctacagactgactgatggagccttcagcctgccagtcaccccaaaccagccgtacctgattatctcctgggaatcctaccacagctcaatcagaactgctccccaccctcaccccacctgcct

SEQ ID NO: 398261 - DNA, 313 bp, Homo sapiens
agaaaattgacttggaaacaaatatggaaaggattattatgccacccaataagaagaaatctaaatgcagcaaaaatggcttatattataaacacataaaaaaagtatctggatgtaaaagcctggtaagctttattgtgctatttaaaggaattctgaaagcttattttaataaagtcttaaatccatcacaaatgcatatgaccagtataaggtttccttcttaaattgttctataaaatacacatttgatgtaaaagctttaaatagctgcctgacactggaagcaaatatactaaattacagtggcaat

SEQ ID NO: 398262 - DNA, 441 bp, Homo sapiens
atttgagtggtcagttgagtcccttctaaagtttttttggtagatcactgttatttactgggttcttcctttgtatgctaagtgtgttggatgctaataaaaaataataactccagtttaaagcaaaaactctcaaattaccaccctcccccaccatggtgtgtgtggaaagtgccttgggaacagtatgctcaggaaacaccactgattggagccctgagaaggtgtgggtcatctctggcttgggggtgtggggagtggagatgggtaagcttttgacagacatggagattagcatgcatttcaggtttatttttgtagtctctccctttgcagtggaaattgccattcctcctactccggatggaagctgatgtggtcttgctggctgcccatgtagtcactacaaatttatcaaggtatcgggtccatggcttaatt

SEQ ID NO: 398263 - DNA, 312 bp, Homo sapiens
agcaccgtgaggaaggtgaatcatgccttcatgttactatgacagcagtttcaatataacagaccccttgaaaggtctagggacccccaggagttggctggctaccgtctgagaacttctgcccaggagggatgatctcctgccacaggcctgtggcattcccatgggaagaggcatctgcagatgacctcacagcagacgaagtacaaaccaagcagagaaggagtgcgccgggaataaatgttagcgattgctctcgttaggaggatttgtacccagagacctgagacactagaacagcgatttgaaagg

SEQ ID NO: 398264 - DNA, 354 bp, Homo sapiens
cagtgtttccacctccctgataacccctcttatctgacagctcattttgcagagagcttctcacgtgccaggcactgtgatagtctggagatgcaattgtgagcccatgtcctgcctgcatggatcaacccatccattgagcgacagacattaaatgatcaaatccagtacagagtgaaaaggggtgtgcttgggaaggaacagtgtgttatgggagcacacggcgaggacatccaattcattgaggagtctcaggggaaggcttcctgggggaggtggtgtctaagctgagacctgagcaatggaaacaggaggaggggtctatttcaggcagaaggatcaacacatataaag

SEQ ID NO: 398265 - DNA, 419 bp, Homo sapiens
ttacatcacagtagtctggtttttcctgtaatatcttggggtcatacatgagatttcatttgaaaaaaaagaaaaggatcccatggctgtgaaaaatgtgtgtgaagaccacgtcacggaacattcccgcgtagcctgtgcaagccattgaaagtgattcaaggctctcgactttacagaaacaattttgcattaagaaatgcacagagcaaactccagggaggtcccgcaggccccggctggctgccaggggctctccctcatttgccgtccccttggctgtggagcagaatctccatcgagcagttgctccgctggacaagctcgttctggatggggacatgaatctacgctactaccaggacttccgtggccttcagttagagccaaaaatgtttaaaataactttttctgattga

SEQ ID NO: 398266 - DNA, 584 bp, Homo sapiens
cgtggtggcgggcgcctgtggtcccagctactcgggaggctgagacaggagagtggtgtgaacccaggaggcggagcttgcagtgagccaagattgcgccactgcactccagcctgggtgacagagcaagactctgtctcaaaaaaaaacactgtgtaataaggggtcccatgtgttggctgaattcccggcaagcccaagaagggagccccgtctcacagtgcccagcacagaggcgtgttaaaccatccatgctaagaaatcccccagcagtctgtgagcactgaaagtttccctatcacagagccaaccggccttccagctaagccactgctccactccgctctaagactgtgtcttaagtcttaactcttctgaataagattacttggtgacataatggattaggagcttccatcattggttcaaactaaataacagtttcaatggggacagactacagcatttcagggtaaatctgcctggtctattcaattactataataatgttattctcactcattagaaagacaaatgcatgaagctgttttccagcactgagacagggcacctggcccatcctc

SEQ ID NO: 398267 - DNA, 467 bp, Homo sapiens
ctagaaattgcatcaggcatttgatatagtggtgatgtttaagtcttctctgctaaaaagatttgttctgtattgggcatagcactctgttgatatgtagatattgtaattaagattgccctgtcttgtgatatggtcatctcccaaaatatccctgatttactaagaattacctaatatgataaatagattgctgttgggctatataattctctctggtgccagatctaatagtgccaggtatagaaattttgaagtctggccatgataaagaaatgagaacaggaaggggaacatcacacaccggggcctgttgtggggtgggggaaggggggagggatagcattaggagatacacctaacgttaaatgaagagttaatgggtgcatcacaccagcatggcacatgtatacatatgtaacaaacctgcacattgtgcacatgtaccctaaaacttaaagtataat

SEQ ID NO: 398268 - DNA, 461 bp, Homo sapiens
gagaggcaggaattttataattgagattattacagaagagtgtcctgacataactgattgactttagtgatgtgccttgaaagttcaaattcaaggtgtgcacttatttcagtcagcttgtcctgaatgtttaaataagaaatactatttctgggtattctgaataactcgttgtacatttattcctaatagtgagcatttggactaatgatggattactaatgagcatgtaaatgtaccacctgattacattaatatatgatcttccatgacgaggtctgaaatgaacatttctaatatgtatttcttttccccaaatggcactgtggtgtatactgagtgggactgagacaagggtgttcttaagagccactgatttagtcaattatcaaaaatcacattataataaatgctgttctaagaattttgattaacctttaaataaatgttactttggagaa

SEQ ID NO: 398269 - DNA, 483 bp, Homo sapiens
aaccccagttggtcatttagatcgtctctgccaacccagcctggctggacgtttacataccaaacagattcccatgtttggacatttaggatctgaccgggccactgtagttggtccctgggttgtcccaaacaatctcatgtggggatttaggatattgcaagactctccctatggctggacagtttttagttccaatcaagtcccatatggttgaacatttaggttatgccatccatgcccctgagtctggactcttagcttgtccccaccagtctcttataggtagacattcaggttgtaccaggcggtgtactggtggctaggcatttagattccattcaaatatcttatgattgggggggtgggttaacaaatctcccccgagttgaacattcagattgcagtgttttgccattataatggggctggaaaggaattacaagtaaaaataaataaaacaacaggaacaagcaatttctg

SEQ ID NO: 398270 - DNA, 482 bp, Homo sapiens
agccaaagaaaataattcaggtatcaagttggactagctcagatgactacaaaatggtgagtacattcagatatgggagattatgataaataaagggattagtatctgcccaaaagagaatgtgagctgactagtgtctttataagaagagatgaggacacatacgtgcacagagagaagaccacgtaaagacacagagagaaggcagtcatctacataccgagaagatgggtatcagaagaaaccaactctgccacaccttgaccttggacatcaaacctcgggaactgtgcagaagccagtttctgttgtttaagccaccaagtgtgtggtgcttcttatggcagccccagcaaactaatatactgtttccattcatctttaggctatattacagtacagatcgcttactgtattttaaagtcacttaaaataattcatctctgtaaaattaaatcactaattcaatacacagttaaaat

SEQ ID NO: 398271 - DNA, 450 bp, Homo sapiens
ccaagagacgtgaggaggcagaggctgtggttattttaccaaaaaagtctagttacatgtcacattcaccatttagagaactaaaccagtacacacacaatttccacatcaagacctgggctcccctgaatcatctctttctagacaccatctagcgcccagttctagttatgggaaggaggaagtggtgggggctggggagtcagataataaccttctgccacccttgcctctctgaaggccactcctttaccctggaatattggagaagtttagagagcaggaccagggcaagagccagtgatatcccctagcaccagtgctccagcattcaaaatcaaaccagccgtactacatcaccacaccaacctcagcaacaaccaaaacaaatgacagacaatgcaaaacaatcctcagcctgccactctaaaggtgaaatgagacatgtaa

SEQ ID NO: 398272 - DNA, 582 bp, Homo sapiens
tagctgagctaggtttaatgcctcggattcttagttaaatctcaaaatctgacttgttaagtcaactaagaaaagaaagacctagcagtggcaggagaggcaagttcagacctcagagctgaaatgggccactgacccagaacaggctgggttccagcctagctcaggttccctggcccttctcagtgccactcaagtacagagcccagagcaaacaggggaggaaccagacaccccactgcttttccttggaaggctctgatttaattccatctctgggtggaggagcagctccgaaacaacatgcttcatttcgtctcccttggccagaaagaagaggtcataaaaaaacaagagaggctgtgtgtggtggctcatgcctgtaatcccagcactttgggaggctgaggcaggcggatcacctgaggtcaagagttcaagaccagcctggccaacatggtgaaatgctgtctccataaaaatacaaaattagccaggcatgctggcgggtgcctataatcccagctactcgggagtctgagggggaagaatcgcttgaacctgggaagcagagtttgcagt

SEQ ID NO: 398273 - DNA, 259 bp, Homo sapiens
aaagtccacataattaccttatgctgtacatttaatgtccactatatttatagatatagtgaccagattttaaagaaatcaagtaagcttccctattattgatacataatttgaaaatacatcaacaaaatctccatctacagaagagtgaatgtgaacttcagaattcctagcttcatagtctaaatagaaatcctctaagatcataaaatgtccctaagaactccatgccttacattaatttttttggtattttttc

SEQ ID NO: 398274 - DNA, 198 bp, Homo sapiens
aaacagaccaacactttcaagagtgaggggactctgacatccactcctctaactatggtcaaataaaaagtaacatctgggactacatggtgggaccagcatggggatttcaaacagacgataaaaccatgaagaaaactgggctctctagtgctcctcttctcacctacttcttttaaaagtagtgtttgggggtaa

SEQ ID NO: 398275 - DNA, 440 bp, Homo sapiens
atctcactgaaaatagataaataaataaataaaggaaagaaatagaaacactaattctaagatagaaatattaagcattgtaaaggcagtagttggttctaaatctataaatttagagtggcggttgaatcctagcaggattctcttttggagtgttatagtattgattataattcatgtgtaataaaattttgaggagaataagtaaagaggtggataggagatttgtcctatcagactttcaaggaatattaaaagcacaatatggtattgacaccagagtagattgatggaatcacgatagattcccaaagtatacctcaggtaattggggatttagcatataccttagtgtatgatgcatctcagtagtaaatggtgttgggagtagttgactggccaccaggcacagattttgtaaatgcagttatcagttgctg

SEQ ID NO: 398276 - DNA, 381 bp, Homo sapiens
cagcatgttctcactcataagtgggagttgaacaatgagaacatatggacacagggagggaaacagcacacatgggggacctatcagggaatggggggctaggggagggatagctttaggagaaatacctaatgtagatgatgggttgatgggtacagccaaccaccatggcacatgtatacctaggtaacaaacctgcacattctgcacatgtaccccagaacttcaataataataataaaaagtaaaattaaattttatttttcattattatttttgtttaaattttagacatttaaatcttaaaaaatgttttatatcttgtggggaaggttttggaaagactccacttagtgctaataaaaatgtaaagtcacctac

SEQ ID NO: 398277 - DNA, 556 bp, Homo sapiens
ccactcacgttacctcaataaaatgtcagctctgcctcagcaggaaccatatctgttctgttcatgcaatatccccactgcctagcatagcaccaactggtgtgggggcccttgtcttccttggagtcatgatcagagattctgtagttatcagaacactgaaggaatcaaagtctattaaaacataaaaaaaagtttacgagtgcaggaagtctgtatacagatgagtccctgtcctcacgtggcacacaattctaagatggctgagcaaaaatatgcaattaacaaaagcactttgtaatttcaagtagtgaaagttaccaggatgtgagttttaaacagtctactgtactgtgttcagtaaaatacccgttcaatgggtgatatataggtgttaaaaaaaaaaaaagaaagggttctgtagctagtatattgggaaagtgctggttaacccaagttaaatcgatttctttatggttaaacttctctgagcctttaatatgatgtggatatgtgggactctatttggaacatgcatatttggagatacattgcc

SEQ ID NO: 398278 - DNA, 371 bp, Homo sapiens
tatatttctatattattctaaaaatatttattatatttatataaaaattgttacaaccgtgtacaagtgtgcataaataaatagtgtatttatgtagtctttatttgaatgtcaggccagttagagaagctagacatgtataaccagtttagtcttaacaatcaagttcagaaaataatatgtagacttccacctagttccttttctgaataatattatagacttaaggaagctaataagagtccaagattctctgagtgcctttgtgaattatttcgtctgattcatgtatgtaccttcatataatggcttttaatattgaggaatatttggagattaaaagattagagtaattctgagctcattaaatt

SEQ ID NO: 398279 - DNA, 512 bp, Homo sapiens
agtacaaaaatgaaaagataacagactaggagaaaatatctgcaaatcatttacctgataaaggagttgtacacaaactgtataacaaattcacaagtataagacaaacaacccaattaaaaaaagatctgaacagacacttcaccaagatatacaaatgtttaatatgaatatgaaaataggcacatcactagtcattagagaaatgcaaattaaaaccacaataaggtatcactatacaactaactagaatggctataattaaaaaaactgacaataccaagtgttgaccaggatgtggaaaaactagaagcctctacattactggtgggaaagtaaaatgattcagccattttggaaaacaacttggcagtccttaaaaatttacacaggccgggtgcggtggctcacgcctataatctcagcactttgggtggccaaggtgggtggaccacttgaagtcaggagttcaagaccagcctggccaacatgatgaaaccctgtctctacta

SEQ ID NO: 398280 - DNA, 252 bp, Homo sapiens
gtaaaggagggatcgttgacctcgtctgttatgtaaaggatgcgtagggatgggagggcgatgaggactaggatgatggcgggcaggatagttcagacggtttctatttcctgagcgtctgagatgttagtattagttagttttgttgtgagtgttaggaaaaggcatacgcccaggaagcaggtaaggaaaatgattatgagggcgtgatcatgaaagatgataagctcttctatgataggggaagtagcg

SEQ ID NO: 398281 - DNA, 181 bp, Homo sapiens
gtaaaggagggatcgttgacctcgtctgttatgtaaaggatgcgtagggatgggagggcgatggagccctcccttaccatcaaatcaattggccaccaatggtactgaacctacgagtacaccgactacggcggactaatcttcaactcctacatacttcccccattattcctagaaccag

SEQ ID NO: 398282 - DNA, 603 bp, Homo sapiens
  misc_feature (227)..(227): n is a, c, g, or t
  misc_feature (239)..(239): n is a, c, g, or t
  misc_feature (250)..(250): n is a, c, g, or t
  misc_feature (416)..(416): n is a, c, g, or t
  misc_feature (419)..(419): n is a, c, g, or t
  misc_feature (421)..(421): n is a, c, g, or t
ccctggcacagtttttgaagcattttctagccagagatgccattgaaagcaagggaaaattgacttgtgctaccccacatcaattaagcgtactctgtttgaaacggggaacccttccacctgggattgagtttgttttataatttacccaaaattaagacaacttttaaagtaagtgtacccttataaatgttaccaacgagaccagaatactttaacttaaaacntgtggtatcgcncgttacctgcntgggtaaccaactcccctagaactcagtggtgaacaatcacatcattaggatgatggcgggcaggatagttcagacggtttctatttcctgagcgtctgagatgttagtgttaatcattttccttatctgcttcctatcctgtatgcccttttcctaacactcacnacnanactaactaatactaacattagttcagacggtttctatttcctgagcgtctgagatgttagtattagttagttttgttgtgagtgttaggaaaaggcatacgcccaggaagcaggtaaggaaaatgattatgagggcgtgatcatgaaagatgataagctcttctatgataggggaagtagcg

SEQ ID NO: 398283 - DNA, 266 bp, Homo sapiens
cgttgaatggccgaggcgttgaatggcccggaggcgttgaatggcccggaggcgttgaatggccggaggcgttgaataggactaggatgatggcgggcaggatagttcagacggtttctatttcctgagcgtctgagatgttagtattagttagttttgttgtgagtgttaggaaaaggcatacgcccaggaagcaggtaaggaaaatgattatgagggcgtgatcatgaaagatgataagctcttctatgataggggaagtagcg

SEQ ID NO: 398284 - DNA, 506 bp, Homo sapiens
tatcagggatataagatgtagcatttcaatgtgtaagatatatgtactaaacatatgtttgctatcttcatcattaacatccttcttttctattgcttggctgtaatttatgtaaagataaattatattgtttttttgtatgtgtgtttgtagtatatgttcagaaggcaagcatcttcattttgctagctttgcagaatcttaaaatgtgtactcgttatttctaatgatgtaaaaaaaaatccctagtcctgtttagcatttgacttttttatatgttttaaatgttgctggatttttgtgctgatatgccattcttgctcagcaagaatggcatatcagtagttcagacggtttctatttcctgagcgtctgagatgttagtattagttagttttgttgtgagtgttaggaaaaggcatacgcccaggaagcaggtaaggaaaatgattatgagggcgtgatcatgaaagatgataagctcttctatgataggggaagtagcg

SEQ ID NO: 398285 - DNA, 299 bp, Homo sapiens
cgttgaatggccgaggcgttgaatggcccggaggcgttgaatggcccggaggcgttgaatggccggaggcgttgaataggactaggatgatggcgggcaggatagttcagacggtttctatttcctgagcgtctgagatgttagtattagttagttttgttgtgagtgtcattactatttgtgcggggacctgggtctccgggcttggagattggagagagtatgaaatcagtcgacagagccagagacgccaagtccctggacctctgggaaccagatgtgtcatctgttcttttaac

SEQ ID NO: 398286 - DNA, 207 bp, Homo sapiens
gtatatgtccctgaatgttgctaatggtcttagggcaaactgctacttattctgcattatgtatttcttagttaattggggttaggatgtcatttttaatgcaatgatgttaatggtgtttgtaaaatgaacgatgtgcaaccccatgaaaaactctgtgctttttgaaggagtaaaggaagcaaggaggagtgataaaaattttga

SEQ ID NO: 398287 - DNA, 728 bp, Homo sapiens
atttgatagctttatatcgtgttttgttcaaagttctcctcttctgtcaagtcggactaagcttgtgtctctagcaatttggaattgacatgagaggacctggattgtttccatctatatctgtcccctgcctgctttcctgactgaacaagtccctgatgtggggctgggagcgcaaaagtgggaaaggacaggggtgtccttgccagggagcccttggtgagtttgcagtcctctcctcggtcagccatggcggatgtcctattggtgatcggtgggatagatacgggcatgcagtggccccaacagccccacaggtaaggggctgtgccccctatagctcactggggtctgctcagcccctgacatgatatggcctcatctcacagttgatcctcagcgtgtggcttcatgccgcattcttctggatcccctccagagccatttgcttaaagtctcaattcattggtgagaaatatgcatgtcatggtttgtttttatttctcctaataactgctattaattgtgctcagttgaatcaccctttcactctggtagcaggcttccttactagcatgtcgacccatttccatcgctttccagttaattttggtcatttaaacagtcacttaccattttttaaacacttcgttctttgcattttgaaatttgactctcatgtcagaatcaaagctctctcttctctgcccactctttccctgaaaagg

SEQ ID NO: 398288 - DNA, 375 bp, Homo sapiens
aagccaaaaccaaatatgctcatttttattgaaacaatataaattcccaaaactaaatgcaaatgtggatatttaagaaattagcagtttccagtagctgcagatttctcagcccttctgtgttttcatttattaaaacacaactgaaggtttctcctgacatggattcacagcagcttggatcagaaacgcatcatactgtagtgtgttgttagaaggacttacttctgaggattccacaactcctcagatgtagtcaaggaagatccttcacctcaacatatataaatattcaaaactgagttgctgcaatcactcacaatagtgagcagcatgtcctagcccagtaccgagcacttagtgggagtagctgga

SEQ ID NO: 398289 - DNA, 360 bp, Homo sapiens
gaggccgcgcttcagcgccccgaccggtttcctccctcgaaagttcaaactccagaacccttccagcctccacttctctctgttgggctctcatcgttttaggtggtagaaggcatatgaccataagagttctaactgtaactgactgaagatcaattgaggtggcttaccaccgtccgaccagccccagtacatggcttcacatttttttttttttttttgagacggagtctcgatctgtcgccaaagctggagtgcagcggcgcgatctcggctcgctgcaagctccgcctcccgggttcacgccattctcctgcctcagcctccccagtagctaggactataggcgcccgccaccac

SEQ ID NO: 398290 - DNA, 2310 bp, Homo sapiens
ggaactgccgcggccgccaccgccgctgccggcgccgctgctgtaggggaccagcgcgggtgcgcagacgaaaggcgctctttgccagctgaaagttcccacggaaaaactaccatctcccctgcccaccatggcagacgaaattgatttcactactggagatgccggggcttccagcacttaccctatgcagtgctcggccttgcgcaaaaacggcttcgtggtgctcaaaggacgaccatgcaaaatagtggagatgtcaacttccaaaactggaaagcatggtcatgccaaggttcaccttgttggaattgatattttcacgggcaaaaaatatgaagatatttgtccttctactcacaacatggatgttccaaatattaagagaaatgattatcaactgatatgcattcaagatggttacctttccctgctgacagaaactggtgaagttcgtgaggatcttaaactgccagaaggtgaactaggcaaagaaatagagggaaaatacaatgcaggtgaagatgtacaggtgtctgtcatgtgtgcaatgagtgaagaatatgctgtagccataaaaccctgcaaataaacggaaacatcaggcatgaacactgtttatgtctgaatcaactgcagatctaatttggttctaagttgtcaccaaagctatagccttcataagcaacctcatttctttttttaattgttttcagattgtgctgggttagttttgcaagcaattgataatttttaaaaaattatcaatatgtataattttttttgaattttgtagatatgtttcctataatattcctgtggttttcagtatgtcagtccaagaaacaaacaagatagcttcagcagatgtgatttgtctgagcaaatcattcctgtgttttagttagatgataaaccagggttttaaatcaaacaatgtagcataaagtggtattgaagtaccatatttaagttgaactgctctgcattaattacagatttaatataaaatgaactgattatatattggaattgttgcactttcagcctgtgtagggcaaacacaaatccttaaacaaaaatcatgttatcaaaaactgtcagttattttggtggccacatgcaaccatgtgattactttggtcatactatttaccaaattgttggcaaacttgatgtaaccttatatggtggttttagtcccttcttatggttggcagaagggcactgaactgttgggtgaaagttagttagcaagtaagattataaggaagacacaaaagacagtggcaaagagggttgattaaatctataagtttttatgtgaggactttgtaagtcagcataaaaatgaaaagttgtttctcagttgtttttgcttttaactttgcccccaacgtttaaagggagtgatctgctttacatgatactatgcaatgcttgttttccaactatgttgaataaatagtaatatttatcagtaaatactcctttccaacttccttttttttttttttttttgaggcatgagaattgcttgaacccgggaagtgaaggttgccgtgagctgagatcacaccactgccataaacatgacaggcttttggactttgtattacctgtatgttttataatggatcatgcataatttctcaggagaataaaatgagaattcatatatacgttcatctttcaagtcagagcaatgagttgggaaaagaggtggcatttctgatcggataatggaatactctcatttattttatgacattctctgtctactcagatcatagtgaaaactggaaacaaaaaaaaaaacagcctcttcttggaaagtgacagcagaaggtggcatggagcttgtgtccttggacaacaaatctggatatactaggattaattatcagaagacagctcaggccaagttttgatcgttccatacagtaccttgtttatctgcttcttaaagaatcagccgagacaccataaaagaaataggctttttgtgccttttgctgttaatgtttaatttacaaactgttttggtaaatctcttaatgtaagtagctatttgactttggaattttgcattcgaggtatactgtcatttcttgaaatctttttctcgtttagttgctctgtgggaaatgtgaggaagcctaagtttgtatttgtaaatttcttatgccatcctctagtcaaattttttttcattgtttaaaaatacggaagtgttccaatataattttttcctgtactggatggctaggattctagagaattgattataaaatattttcaatacatccc

SEQ ID NO: 398291 - DNA, 444 bp, Homo sapiens
tcttattatgcccaaggctgctgagcgagacctctccaatttagctgtttgaaattatgtctttcagcaatgtgtaatctccagaacctccttttgactacaggccccaacagttgttcttagaagagactggccctgcacacgtggagttcggcattcagttaaagattcagaatgatccccataaaggtttctgaagcttctctaagcagctcccttccttccagcagaagccttacaaatccaactgcttcagcagccatgcactccaatcactgtttcctttatcctactaaacctctagtctctatttgggcattatttccctcagctacagtttggatagccagggtgagcttacctattggatttcccttctcctaaggatcatagccctatggttggctatctaatgccaaataaaacccagttgcttcatgtctt

SEQ ID NO: 398292 - DNA, 472 bp, Homo sapiens
cactgaaggcagtgctgacctgagggtctccctaggaggacaggcgtgagcagagaatctgtctgaagacaaggcaaaactgaaggtgcagatgaggacttagtttgttagataagaacagtggattcacgagatctgaactcactggcccttggtgcccttgagacagggacattcagacctgtgttagttcatcctcttcccaaggagctcttcacaacagaaggtgacaaggacagacggacacacagaattgttgttaggagcaaagtagtttccacaaggatcaaaatcttcatctcatcagataatcaaagcacacgtaagaaggctttctcaatcctggaacacaaggagctttcacaaaagaaaaccagagggtcacggggagagtgctggttccagtcgcaggtctcaggccatcctggggaggccgtctcagccgaatcccatgggaacatttaggaccatt

SEQ ID NO: 398293 - DNA, 682 bp, Homo sapiens
gtaagtggctgggttaggatgacattcaaactcaagcctgccaccctaaagctttgtgaccgtaagttccacaccacagctctactgctttcatgtcacacagtccccactacactgcatgtcatctttggtttatccatctccccacactggactgtgaattccctgaagatgtccttgtttttgtggccccaggatctggcatggtgccacctggcacagagtaggagctaataaaggctgatgaacaagtgattatatgaacaagtcaattacactggctacaagaagacaggtgcctcttttggcccccccgcccccaatgcccacataagctttgtggctgtgtactacacacagctctaatcccactacatgggctgagtagcaagaagcatttatttcataagggcttgaagggccgaagcatgccagcaccatcccccaaacctggacatagcaatgttctgtcttccccatccacaaaacctccaacactagagaggtttactctccattgctcctggagactagaggctgagctgtatgtactcagataagcattggctgggttggtccctggtgacaccaagaaggcacaggtcctgtgtggaggagagttgatgccagggtttctccagagttcctcagctctctggggcttcatttaaaacattctctc

SEQ ID NO: 398294 - DNA, 648 bp, Homo sapiens
gcttatcctttttactgtttgatgaacgtttaggttgtttctagtttgcagctattataaattctgcttctattaacttgattatactagtttggcattagtgatcactgcatagagggggccagctcaaatgtctttctttttcccttgaatctttctttctttcttccctccccttcccccagtctcttctcttttcctgtctttgtggcacctctgtcttctgatgaacatgccacaggtcaaggagagtggaaacaaaagacaaaatcctttctttcactcagtttttccctgttgtccccttctaacgaagtgttgacatagtcttccaaaccatgcctatatttacatttgatctgtattcaaattctattgtttctctattcttgatatctcatggacagattcctttctttcatacagttggcagtgctccgatcttctagagactccgtgtctaaggggaccaaattatttgtagaagcaatcaccgtatgttaaatctagttataccaattcatcataacaattatcagctaaatactccgactgcttctaacagcagtaagcagcaataacaatgaaaacagtgtttgttttttggtctgtgtaaatctgtagtgtatacccagtagagtaaaaaat

SEQ ID NO: 398295 - DNA, 519 bp, Homo sapiens
cactcatatgcatcgtctcattaccccttagccactctctgcagagggggcgggggccacgagggctgcacagaggtgagactttgaggctagagagtcagtccaggcagagggtcagcaagtccaaagccagtgaggcatggaagcacgcaggttgcaggcagactgacttccagcatatggtgtgctgggtggagactagggagctgcagcgggcgggactggcatttggtgtggctggtaagtccctcttaggccacaagctgcacatctgcatccatgccccctcccagctcagtgccctgcagcaggcatgcacatgggtagtgtctgatggcaacaaccaattcacaaccaggcagccaggacatttatttttatttatgtatttttttgggacggagtttcactcttgttgtgcaggctggagtgcaatgatgtgctcttggctcactgcaacgtccgcctcccgggttcaagcaattctcctgcctcagcctcctgagtaactgggattac

SEQ ID NO: 398296 - DNA, 557 bp, Homo sapiens
ttaggaatgtgtttcaaaaactagagtcgtaatagcatttctagaacttacacttttttagagaaagaaagagaaaggtacaaaaataactgattgttataatatacagagccgctttgcattgggcaccctgctggggccatcacagttaatcctctaaggtcggagtgccctattagaagaccctgggtttccaccgcattcccttgtctccagtctgtacataccctgtgtgccttgcttgccctcttaacgtctctacctggatttttaacgcatctgaaacactcttcagtctgctgctccccaaggctaagctggaggggtggagaatgaggtatagatagataaaatgatcagatgtctggggtttacttcagaggactctattggcagaggaaatagtatggggagtataaatgaaacaagtttggccataaatcgataagtgtagaagctggatgtgggtacacaagggttcataatgctattctttctactttttattatgtttgaaaaattctataataaaaattttaaatacctgtctagcattt

SEQ ID NO: 398297 - DNA, 685 bp, Homo sapiens
tcgctatgtatatcgatgcaccccaaattattcatttcgtttcaatgttcccagccaacatatatatatttttaaaaatgctggatcttgatatcgctttttccaaaagccacaattctcaaatcctcaccctcagcagcagaggctgtctcagcacaaggattagtagaggggaaagtgactgaaagcacatactgacttccaaggatggaaaagggccaagcatgccgagtttcttctcacatttaacaaccatgcctccattccctggtgctgagtacatggagagataggagaccttacgagttcttgtagttgagcttccgtaaaatgggagttaacaccaatgaagaagtggttccctggcccttacaaacaagagcagtgtctatttatctggcccttatctctttcctaaactggtctagaaccctttttagaaatcactcagtgacttcccattgcttttaaaggtcaaaatgctttaactaggccgcaggccctgcataaactttccccaatctggctcaacttcattccttcctcatcttccctgtcgctaccacacaccagccaaatggactttctttcatatccttgagctaagcaagcttatttctgcttatttcaggacttttgaatgtgcctagaacaatccctgtgtcccacttcccttcacccattg

SEQ ID NO: 398298 - DNA, 447 bp, Homo sapiens
ttatatacattaaatgaataaatgtataagtcgtgccacgtgcactctagcctgggcaacaacacaaggctatgtctcaaaaacaaaacaaaacaaaaacccggttcttcattcaacatatgcttaatgcctccaaatactgacctactattgtttctgttatagatttgctactatatagtattcaaaaaaaccaaaaatctataaaaggtatacttttcacattttaacctttctgaaattgggctgcttctcatgaatgacagtgtcttattatcactgtcaggcgacagtcatgattttagctgatactttctaagaaggccaaggaaacagtggttctccacaaaggctgcacaattcggatcagtaggggagcttttggaacacaaggcccatgctggactcaatctctgaggctgagatctgaatttattactttttatt

SEQ ID NO: 398299 - DNA, 436 bp, Homo sapiens
cgaaaaggccccaaacccgtgagccttaattgctctcattttccccattttacagatgaggaaactgagtcacagagagggataagtttcaccaattcatacaggtataaagtggtggaggcaggattcaattccattctgactccgaagccagactttttttcccctacacaatttatcagaatttgaaaaggttgctggatacgacagtcaaataaatcaatttcatttctatatatcagcaaacaaattactattttaaaagataatcacttataatagtatcaaaaacaaagccaccagaaataaaatatgtaacgagaggactagttaagatgttaaagatctgagccaggccaaagccagacttctagtcactgtgcacttgtcggctgtggagacaacagctcctccgtccttatgatacagcgagatc

SEQ ID NO: 398300 - DNA, 389 bp, Homo sapiens
cttcccgtgctgtggtttcctaacgtaaaacgggccaatagtagcacttacctcaccatgttttggtgcggatggaatgaatgaccacatgggaaatacttagaggccgggtgcggtggcttacgcctgtaatcccaacactttgggaggctaaggcaggcggatcacttgaggtcaggagttcgagattagcctgaccaacatggcaaaaccccatttctactaaaaatacaaaatttagctgggtgtagtggtgagcgcctgtaatccctgctacatgggagtctgaggcagggagaattgcttgaacctggaaggcaaatgttgcaatgagctgagattgtgccactgcactccagcctgggtgacagcaaaattgcgtctcaaaa

SEQ ID NO: 398301 - DNA, 330 bp, Homo sapiens
tcggtccacatgattgtctcacgctccttaggcaacctggtggtcccccgctcccgggaggtcaccatattgatgccgaacttagtgcggacacccgatcggcatagcgcactacagcccagaactcctgggctcaagcgatcctgggaggttgaggctgcagtgagctaagatcacaccattgcactccagcctgggcaacagagtgagaccctgtatcaaaaaagaaaaaaattattcacctaacaccttacagagaccaagaagctaagataacaagtcagacgggtcaagtaaggacatggccatactaaaatattagcatggctg

SEQ ID NO: 398302 - DNA, 600 bp, Homo sapiens
tttcatgttgggcccatagggcggtcttggaattcaccctttcagaggccatacatatatgtgtattggtgcatggcagaggctggtgtacacacattagtgtatggctgagccataaccggagcatacctgagactaaccctatggtctaagaagaacttacgtttggagtcctgggctaaggaatccaggagtagccaacccagagattcactccttatctatgaaggacatccacatccctggcccgtatcttacgctgtacagatcaaggccctttggggttaaatggaggttgctagaaggagagtgctaagtgaaaatgctatatagactacgtgctttttacaaatggtagcagttctccaggtcagccctccaccaccggaccacccttgtatgtaaatcctgaataaaccttgtctccttcactgactctgcctctcttcttacagtgccatcccaactggagtcagtggggtccagaaggacaattggccatttagataacatttgaaaattaaccaaggtaattcacagtaacattaaaaaatacaaatgaacatttcaataaaggcagaaaaagcagttgatattcaa

SEQ ID NO: 398303 - DNA, 310 bp, Homo sapiens
ctctcttttcttctttcataaagttacaaaagaagtagcttattatataagtaggcatagtcaagcagtgcagttttgatcacttggggatacattgttcatgccagttagcatttgcagagccctactgtatgcacagcattataggtaggctccatggtgggcaccacacagcaggcatgaatggcatacaaaagcaaaaagtacatgaaatgatattttaaaaaatacagagcagagagcacaatatttaaaagtacacaggccaagcgtggtggctcacaccttgtaatcccagcactttgggagg

SEQ ID NO: 398304 - DNA, 501 bp, Homo sapiens
gatgcttatcaatttgcaaatgggcagaaaccaaggataagtagtttgctctcacatgtggtggtgagtgatgagaggagagaactcatcctttcaaattttctgctgaactcaggtcaacagctctctccggcacctaagcagatcagcaacactgcaggggtggccctgaggtgagcatggttcagtggactggaagggtcaaaataacttgacccagccaaactgcaatcgggcttcaaacacaaccatccagtcaaccccatctttccttcccagaccctgttttggttttcagagacatcagtgctgggcagaaccataaataaatctgtcacaggagcatgtgtgtaccccaggcttcacggtgcaagaaagaacggaatgagatgaaaatgtatagaagtgatgcagggaggcttctgtggaaagaacctgattttggaaagttattaatatttgctgggctctaatgtgatatctcatggctcagccacagat

SEQ ID NO: 398305 - DNA, 262 bp, Homo sapiens
ctgaggtcaggagttctcaaccagcctggccaacatggtgaaacctaatagtataaatgaaagcataccaagtgctgtccattccataggtacaactatggaaaagtacttttgtattctaagaacgagacgatcacacaaaaaaatgaaaacagttattttagagtggtgagattatgggcttctgtttttctccaaaaatgtattttatattgtcatgtcctttattctacaataaaaaatattaagataaaagtatcaa

SEQ ID NO: 398306 - DNA, 582 bp, Homo sapiens
atacaatgttacattcatttgtgaataatatatatgatatttaaaatagggtacaatataataataatttttgtatctttagtagagacgggtttcaccatgttggtcaggctggtctcgaacttctgacctcatgatccgcccacctcagcctcccaaagtgctggaattataggtgtgagccactgtgcctggactattacattttctagaattttatatgaatacaattgtacaatatttactttttttccccagtgaaaatagcttttattcaaatgtccttacttttatctggattattttacttggactaattaatatgagatccagccacattgctgcatgtagtttaaatgggtgaattctatgctgtttgaatcctctctcaataaagttgttaccaaaaactcaatgagataccactgcattcccagtaggatgactaaaatgaaataaataaacagatggctgggtgcggtggcgcctttaatcggcgccggcgccgatcacgaggtcaggagttggagaccagcctggcgaatgtggtgaaaccccgtctctactaaaaatgcaaaattt

SEQ ID NO: 398307 - DNA, 674 bp, Homo sapiens
ggacctgaaacttaatcgtcgggggttatcatttacatccaacaaaataatggagacttgagcaggcttgtgaatctggaggctggaatctgtggcaggtcatgcacttgaacagccaagttgtagaaggactgactttcccgatccaaagcttttaggactttgagtacaccattcttgtcaacagtaaactgcccaaggctatcacctgaagcaatgctataagtcaattgagagttgatgcctgaaattaaagggaagaaaaaattttcttaaacatatgctgattgcagaacaagctataccaaaacttttagcaagtaatttggcatgtttgatatgccgtgcatccaaacacactttaggaaatcctgtgaacaaatgatctatatactgcttgctatttactagggtgttgaaatgttaaattacaaaagtaaagaggagaaaaatattccagagagcagatatttttctatatatttccttgtttctatcacataattcctgatggtccaacactaacagtgccacacgctatactattagtcaaacatttgtaactttagtaatttagggaggctgacaccaattttcaagaaagggtaataaaatgttctgatgtatggcattagtcatgaatgctgtaagtgtacttctatatttcgtgtcaa

SEQ ID NO: 398308 - DNA, 274 bp, Homo sapiens
gtgttgatagcttctgtctcaagtcttctcgaagctaataagagagttaatgcgaacttggcagcatcaatgccctattggatagtcaataagagtacctgaatctggatgagaaatttggcctggcagctgggggaatttctatagaaggcagtcaaaggcagaaaagggagctgcattttggaatgttaaaacaaaaacctatcatttaaatatgacaaacatatcacaataaaaattagaatttccaccacgggctttgggcattcttggg

SEQ ID NO: 398309 - DNA, 469 bp, Homo sapiens
agctgccatttactgagatagaggcaggggaaattgggaattgggtcttactcatgtgaagtttgaaaaggccattaaatatctaagcagtgatgtcaggtaggaagtgagaataaaagtctggaatttaggaataagaaattggctagagatataaatttgagaatcagaagtctagtgggtatcaggccaggtacagtggctcacgcctgtaatcccagcactttgggaggctgaggtgggtggatcacttgaggtcaggagttcgagatcagcctggccaacatggtgaaactccacctctactacaaacacgaaacttggccaggcctggtggtgggatcctgtaatcccagctgctagggaagctgaggcaaatagtcacttgcacccgggaagcggaggttgcagtgagctgagattatgccactgaattacagcctaggagacagagcaagattctgtctca

SEQ ID NO: 398310 - DNA, 114 bp, Homo sapiens
gggcattgggaattgtcaaagctcccaggtgattctaatgtgcagctgaggttcagaaccactggcttcgagccttacacacagtgctcaagatgtgagaactgttcttactct

SEQ ID NO: 398311 - DNA, 520 bp, Homo sapiens
aagaccaacctggccaacatagtgaaaccccatctctactaaaaacacaaaaaattagccaggcatagtggtgggtgcctgtaatcccagctactggggaggctgaggcgggagaattgcttgagcccaggacgtggaggctgcagtgagccaagattgtgccattgcactccagcctgggcaaccaagagagattctgtctcaaaaaaaaagaacactgtggtgtgagaggcaattgtgggtcagcctgagggcacacccaatataactttcacaggtgttttgtttttctgagaagaaggtgacttttcccggttgctgtccatgcagactgtgagggatgttcacatgtcacatttctcaccggagtcctcgtcccatcgcctcctctctccctgccgcggttcggaagctccacgggggccagtgttgttcaggcctcaccagtccttggtcatgccacccgggctgagttcatttacctgctcattcatgtattcacttttcctccgattcaaca

SEQ ID NO: 398312 - DNA, 338 bp, Homo sapiens
ccgggtgcgctgctgaatacgcaggagaaggaaaaacagagcccctcatctggctgcctccttgttcttccaccaaataatttttaagcacttttgtttcttttaactttttattctcccgtaatttcagacttacagagcagctgcaaaatagcacagggcatccctgtagatctttcacccagatccctcagatgttagcacagatgttaacattttgccctgtttgttccccccagctcactttccgaatgtgaatatgggtgtgtgtatatgtactgtatatgcattttttgcctgaatcttttgaaagtaaacacttcagtgtgtttttccta

SEQ ID NO: 398313 - DNA, 282 bp, Homo sapiens
tcagaaatgcttttcattgagtgtctgtatttaaagttgcatttttaaacaatagtatgcagaaatcaagatttttgtctgtaatttcatattatgtctatcatcaaagaaaagcacatatgctggtggctaacccgggataaaagtaataagagacagacctgtgagactcagcagaacctgagcaacaaatgaagagaaattgggacaagaacaaataaagacagttcttttattcatgcctggccaaaggacttcactggctctatctaaaaaaaaaaa

SEQ ID NO: 398314 - DNA, 370 bp, Homo sapiens
gctgctgcagggggctaaccttgggggtgagggggcagcctcggagaggaagctgcccaggagcagaggctgggggcggagggccccgggcagtgcccccgtgcccacagcaggaccctggctgccagttctccgcagagggccaggtggtctgaagctgcccagcagggagagaacaggcctggcctggactggaaacctgccatctggcctctctgaacctggggactccgggtgtcctcgaagaagggcctgagcagcagcagaggaccccaggcgactgcctgagccgggcgccgacgacgactgagcacctgatacgtccccggcactcgcagccccgcggccggagtcgctgtgggtgagcggt

SEQ ID NO: 398315 - DNA, 407 bp, Homo sapiens
aacttcagacagagagagaccgtagtaatcaatcctggcacttttaagaagaaattttaactctgctatgggtgcacaggaacatcattagaaatgaaaaaaacaagctctgtcaagaagacagagcaaggtcttcgaagatctatacgacaaaaataattatttcctcacgtgttattcaaggtttttctactactggcacatgggaaaatagtaagttgagggttaactgtagcattagaaacatggtactatatgctttatttcaaggattctcaattataaaagactgacaagagacaaacaagcttctctcacatccagaaagaatacaggaggagacccttttctgatttgtctaggtcagaaaaacttccatgttttcctttgaaaggttatcctctgca

SEQ ID NO: 398316 - DNA, 151 bp, Homo sapiens
tagtactcccattacataggtcagtgcccttaatgatgtccatatttttctctgaggctgtgttcatttttcttcattcctttttctgtcttttgaattgcataatctttacctatctatcttcaggctcattagttatttcttctaccag

SEQ ID NO: 398317 - DNA, 513 bp, Homo sapiens
aaacaaaatagggattgtcattttgatcctgactctgacccaattgacagtcagttcaagcaggctacttttgtattatgcaacacaaacatttcaacctatcttcagttcacgtgtattcataatgatcgtctaagggcatatgtgtaaaatgcacattccaggccctcattctagactactaagtcagagtctctattttcaaaacaatgtttaaagagcaggggctttggagtcccaaagactgggtttgaaaactgtctcacccatttataagctatagtgcctttggcaatgtacttaatattttttgtttgtttgcttgacttcaatatcctcataagtaatgtaggaataaaaattcttacctgtcataaggttttggtgaacactaatttagaatgagggtctaattataatatttatattaatagcttacaaatatcgagtacttacaaagtattgagcactgacgccaatgctgtatctgtattatcttattaatttgtctta

SEQ ID NO: 398318 - DNA, 485 bp, Homo sapiens
actttccatttgacttcctgggatttctgttgtctctgaatggaagacattttctccacccagtgtaaacttcctttcttagccccgtctttaaaagcagttaggagtgagaattgcgtcttttacctttcacatctggtgggctgagcctcttttaagaccttaagaacgtacttttcttgatttagctcagtcactatccccttttttatctttctttttatattttatttttcccttgttatcattttctattttgacctctgtttatgttttgaacagagcctgtctcagtttccccagggtgcttctctgcacccagcagagggtctgtctgcctgtgagcaccagctggggctgttcctcccacgcctctcaccacctccccttacgcatgcctttagccttctgagactgccagtatgccatgggttaaaggaaggtttgggtggcatttggtgcattctctctgccagttgctgctg

SEQ ID NO: 398319 - DNA, 699 bp, Homo sapiens
tgaagcagaggtcacttttctttcactggtgaggtactttgacaaagacgaagaagggagacaatggtgtggcaaaatggctttgttgtggtggaagatgaattgtcgtctcaagggggcagaggactgcctgtgagcttccttaacatggagcccgaaaccggtgtttgcacagtccttgaggaaagggtttgctcagcaaattaacagtgtgaacaagactgcaggagggaccatttacctacctgagaacaaactgttttctagctcttcagcagcaccacttacgcacaattttcatgtgctaatggcaagtgattattacctagttagtgaatatacgtggaagacataaaatagcctttactatcccctggttgagacaactcgctaactcagacttgccaggtgctctgaattagagaggtgctacaggaatgtcctctcggatttttggcgttgagcatgcatgcatgtgagcagggtgccatttcttcagaagaaaaataaatgacaacattctgttttggggcttgaaactgcatgactgaaaacataaaggtgacaactgtgatatgcttttttaatgagggcagagatgtcaagagaaaccagccttctaggaacaaaagaatactctgtcaggtgcagtggacttaagacctttttctctcttggaataatgtccttaaaaataac

SEQ ID NO: 398320 - DNA, 165 bp, Homo sapiens
gtacaagggccagatggcagagaacagcttaaactgagccttcagcctcattaataggaggaagtcttggtacttttggtgactaagaaactggattatttaaaaccttaattatctcctttactcctggtttacagaaggcaataaatatacaactcctttaga

SEQ ID NO: 398321 - DNA, 181 bp, Homo sapiens
gcagcagcagctgtaagtccaccatggatgttactcccaggatgtagccagggctaagtggcattctatagcagagggaaagggacttcgcagtgtgttataaccaaggaccttggtcagctcgggtgtgtccacagggagattactggccaggcgcggtggctcacgcctgtaatctcag

SEQ ID NO: 398322 - DNA, 301 bp, Homo sapiens
aagacaagttagagaccaatacagactctgggcaggacatgagtggcctggattaagacagtggtagtgggaactggagcggttactagagtcaagagaaggtgaggaggcaggacctgtgggacatggtgactgagtggagactgggggaggatgagaaaagtcaaggtttctcaggttctggcctgagtgactgttggtgctgttaattccctgacatgggggacacttggttaggggtcagcttagagaaaagataatgaattcagttttcaacaggttgagtttgctgtgactgtgg

SEQ ID NO: 398323 - DNA, 396 bp, Homo sapiens
tgagacagagtctcgctctgtcgcccaggctggagtgcagtggcgtgatctcggctcactgcaacctccgcctcctgggttcgagcaattctcctgcctcagcctcccaagtagctgagaccacaggaacacgctgccacacccagctaattttttttttttttttgtattttagtagagacagagtttcaccgtgttgcctaggctggtcgcaaacttctgagttcaggcaatctacccaccttggcctcccaaagggctgggattacagacatgagccacagcgcccagctgcaaattcttcattaaatcctcaacagctaggctggatgtcccccctcctctgagaacactgacctcatacttccctgctgccagcccttctgtcgtcttctc

SEQ ID NO: 398324 - DNA, 493 bp, Homo sapiens
tggggaaaagaaagagagatcagactgttactgtgtctgtgtagaaagaagtagatataagagactccattttgttcatcttgtgagtcgatggcgcacgattgcggtgtttctgtctccgtggaggtgcttttctttgcatctccgatgggttcattgtagaacttcaaatgtctagtgggtatccaaacaggaagctgattttctcctggtgaaacacaagcaaaacctctcccccatgttaccaccttccctatttcccatgtcttatttttattatctttctaccaaatcagttttccttcatgtgggctgttctttttaccagtaagatgttgttctgcagaagtagtagtctgatttctataaatgtttaaaaaatataaagtgctagattaagttgcatctgaggcgtggtacattccttactgtctcccccttctttttatttaactaattgagttttgagtgttctattagttctttcaactat

SEQ ID NO: 398325 - DNA, 951 bp, Homo sapiens
gctcagcctcccgagtagctgggactacaggcacgtgctaccacacctggctaagttttgtatttttagtagagatggggtttcaccagattagccgggatggtctccagctcctgacctcgtgaaccgcccgccttcgtcttacaaagtgctgggattacaggtgcgacaagataatgaacctccattcctctgagagaagagtattttgaatattcgactttgcccatgaatttccctttccatggtcttgctctgttgcccaggttggagtaaaatggtacaatcacagttcactgcagcctcgacctctccagttcaagtgatcctcctgactctgccttctgagtggctgagactataggcatgcatcattatgcctggctttttaaaaaactttttgtaaagatggggtctccctatgttgcccaggctgatcttgaacacctgggctcaagggatcctcctgccttggcatcccaaagtattgagattacaggcatgagccaccatgcctggtcctaacatcattttttggatactgcacttacttcctaagatcaagaacaaggaaacaggaagtacaatcatgcactggggtaaagaagattcatctgctcttagctacctaccatgccaacactcctgagaaagctcacagaggcccatgatgcccacctggatctgaggacctagaaagccacaacaggcaaccataatctgggtcttccctcagaccaatcccctgcataaagtgaatgaatgaaaaacccatcttatattaatcagagttctctagagaaaaagaaccaatcagatgtgtatatatagaaagagagaattattttagggaattagctcacatcattatgcaggctggtcaatcaaaaatctgtggagtgggctagcaggctggagacccagggaaaggctaaattgcagtttagatca

SEQ ID NO: 398326 - DNA, 1048 bp, Homo sapiens
gctcagcctcccgagtagctgggactacaggcacgtgctaccacacctggctaagttttgtatttttagtagagatggggtttcaccagattagccgggatggtctccagctcctgacctcgtgaaccgcccgccttcgtcttacaaagtgctgggattacaggtgcgacaagataatgaacctccattcctctgagagaagagtattttgaatattcgactttgcccatgaatttccctttccatggtcttgctctgttgcccaggttggagtaaaatggtacaatcacagttcactgcagcctcgacctctccagttcaagtgatcctcctgactctgccttctgagtggctgagactataggcatgcatcattatgcctggctttttaaaaaactttttgtaaagatggggtctccctatgttgcccaggctgatcttgaacacctgggctcaagggatcctcctgccttggcatcccaaagtattgagattacaggcatgagccaccatgcctggtcctaacatcattttttggatactgcacttacttcctaagatcaagaacaagaaaggagatgtgtgtatgagttctgcagaagtccaccaaatgtgggccagggttatttccctggtgatgctctgaagcttttgccaaaggacaaatggaaacaggaagtacaatcatgcactggggtaaagaagattcatctgctcttagctacctaccatgccaacactcctgagaaagctcacagaggcccatgatgcccacctggatctgaggacctagaaagccacaacaggcaaccataatctgggtcttccctcagaccaatcccctgcataaagtgaatgaatgaaaaacccatcttatattaatcagagttctctagagaaaaagaaccaatcagatgtgtatatatagaaagagagaattattttagggaattagctcacatcattatgcaggctggtcaatcaaaaatctgtggagtgggctagcaggctggagacccagggaaaggctaaattgcagtttagatca

SEQ ID NO: 398327 - DNA, 722 bp, Homo sapiens
cattgcactccagcctgggcaacaagagcagaattctcatctaaaaagaaaaaagaaaaagataatacatggacaaatattaaaacagtattataattttggtctgtaactctactttttttcctacaggatttaaaatacacattcattaaaaattacaaatctatgttaatggccacacagtatataacaacgtagtttgtgaatgatgtcagtaacatagagggggtgaagctgtaaagaagtagcatttttttatgtgactgaagttgttatcaatgtaagatagaatgtcgtaattctaagatgttatttgtaattcctatggaaacaaacaaaaaatccgtagaatctgtgaacaggcatatgcaaacctacccccaaaagctggggaagctcagaggccaaagaaagaggctgacaaacccagtttctcagagagaaatattttataggaacttaaaaacagaagcaatgtcttgggtggctgtccacacctgccatccagaaagcattcattcattcattcattcattcattcattcattcatgtctctactaaaaatacaaaattagccagatgtggtggcgcgtgcctgtaatcccagctactcgggaggctgaggtaggagcatcgcttgaatccaggaggtggaggttgtggtgagccatgatcgcgccattgcactccagcctgggcaacaagagcagaattctcatct

SEQ ID NO: 398328 - DNA, 595 bp, Homo sapiens
tccccatatagatgtctaagctaaaagccgtgggttaatgagactggcaaattgttccaggacagctacagcatcagctcacatattcacctctctggtttttcattcccctcatttttttctgagacagagtcttgctctgtcacccaggctggagtgcagtggcatgatctcagctcactgaaacctctgcctcctgggttcaagcaattctcctgcctcagcctcccgagtagctgggactacaggcgtgtgccaacacgcccggctaattttttgtatttttattagagacggagtttcaccgtgttagccaggatggtctcgatcgcttgacctcgtgatccaccctcctcggcctcccaaagtgctgggattacaggtgtgagccaccgcgcccggcctcattcccctcatttttgaccgtaaggatttcccctttcttgtaagttctgctatgtatttaaaagaatgttttctacattttatccagcatttctctgtgttctgttggaagggaagggcttaggtatctagtttgatacataggtagaagtggaacatttctctgtcccccagctgtcatcatataaga

SEQ ID NO: 398329 - DNA, 297 bp, Homo sapiens
ttcacggcagttggggggattattatcaattataattttataaaagtattttaaagaataattgtaaattttccataaattacaacttcctgccatcttttattaaataataatcttgcttaaggcatatagacagacattattatgagtattccagtaaaaaaaatctacatctactgttccgaacactgatgaatatagccagaaggtcagttaataaaaataatgaaaaaggtgtagtatgttggcagggaggcaggtagggggctgaatactgaaaaaatttgcctattatta

SEQ ID NO: 398330 - DNA, 417 bp, Homo sapiens
aaaaccctttttaaaaaaggaaaaacttagcttttttttaatctgtgtaatttatttataagttcttgatttcttgttttctttgcaaaggagaaactgtggtattctatttaaaacatgggtttcagaaccagtcagatttgctttcgtagttgtgtgactttgggccatctgtttaatttgtctgaggccactgtcctcatctgtaaagcaataactcaatgaatcttcattgaggggtgacccttagccagcttaggtgaccccgagcatatgacacacctgtgcatgtgcgtctttccttctgttttcccacccaagtcctgccatggccaaaggcagtagaattctggccgtactcattgttacctttttttgtaaccatactacttttttgagtttctttctcttttatta

SEQ ID NO: 398331 - DNA, 371 bp, Homo sapiens
taagattaggaacagagatttcagttactacacatgactagaaatacagtctctgcaaaaatagtttggtaagccactaaagaaatggactactgtagtattcaacaataaaaaacaaagaaaaacaaaactcagcaaaccccagtaaaggggcagatctgttctccagtgttaatacattataacatccaaatgttcagtgttcaaataaagtcacaggcaaacaaagaaagaggaaagtattgtcattcaaaggaacaaaataaatgaatagaaactattcctgaggaagcacagatgttgaacttactgtacagactttaaaataactgtctctaatgtgcttaaagagctagatgaaaacatggata

SEQ ID NO: 398332 - DNA, 542 bp, Homo sapiens
gtttttgttttccttatttgtgtatctactgcagtgcctcactgtaccttgtacttaatagttgctcagcagtagtcactggagggaatatgtagacatatatttgaacctctggctggcaagtggcatcgaatgtgaatctagacctgacccatctactgtttgtaaattctatgggctggttgattaattttgccaagctgtcctcttctaaactcaaacctggactgtttaagttaaaatttacctgccttttctatatcccttcctgttctttcagtggtaccatcagcttgcaaaattgttcaaggttttcctttgctcctgatgacctgcttaatgtgtatgttttagttggagcagtggctacaacatcttaaaagagcttgtctgcaaactctaatgataacctacacaacacatgaaaacagtgtgctttgaggtaatctgcagttcagtttagcttttctcagcagtatcttcagcaactttaaagctctggcaggttttatcaatgtaaataaagtgcattttctttttgt

SEQ ID NO: 398333 - DNA, 683 bp, Homo sapiens
caacctttttcacacatgcacagtaggaagaaataagcaacatggagtagtaactcaggctaagaagcccacatgtgcactagaaacagtggggcgggggactcagaaattcgcaccttatgtaaatgaagcacccctcccaccagcttttctataaaaacccttgcatttcactgtaaaatggcaacccatctttctgggacccctctctgatccagagagctttctttcttttgcttattaaacttctgctctaacctaccctctggagtgtctgcgtccttgatttccttggccatgagacccagaacttcagtgatatctcagacaatgaggcaggtttcactgagacacaagcccagggttctgcagaatgggagggccagcagctatcactgcgtgtgtgagggcaggcagaggaagtcactgtgttttaatagtccagcaccacgggtagagatgttgtggctgactccatccaaggttcaatttctttgtagtaatcatttcagaagttagagcattaacaggctcttgttggggaagaaaggttagtaactccatctcctgagcccttgctaaaaagctcagcttcctgaattctccaggctcaccagattgagagggaagcccaccctgctccttctcccaccgcaaggctgcctttgtctgtaaatgacagg

SEQ ID NO: 398334 - DNA, 645 bp, Homo sapiens
gttttaagccaatcaaatctgtccagagtcatcttaatggaaatattatattaattattttctaatacaatttgtaaacctctgtatttctaaaccaaattcttaaagactccttaaattgtttaaaagatctaaatgtttctcttcccttcttatcttgtaacctagtaagccaggcaattagcttaacgatcagttaaacctttttttccccagagttgtgttaaaagctatttgcaacaggaacattcttcatgagagctcattgacttttctccctctttttgtgttagacctatgtatctgaactatctgggtgtatccataataacaagaattgagttttgatcaattaatagattaagttttctagaagacagagaaagaaagtgagatgattaccacaaatatgtaaagagttactgaccactataaaagtcaaatcaccttctctttgcaaagagtgggaaagccttaaatgcaagcaaacccatttcaatacatgagaaagaaaggaagtcattacaaccagttcaaatagtatcttgggcacttgataattccatcaagactataggattaattaagtctttaaaagtactttcaagtgaataattgtagtcatatcaaaagtacttcaaaatg

SEQ ID NO: 398335 - DNA, 395 bp, Homo sapiens
gcaacaagagcgagactcggtctcaaaaaaaaaaaaaaaattactgtataagacttcgtacttaataagaaataagtttgtgaggagctttaaaatcttcatttagagcctgggcgacagagcaagactccgtctcaaaaaaaaaaaaaagaacccagtttgtattttaactttggttgttttatttacagactatgttacacccatgtaatatggtcagtttagcctatagctgtgttgaaatgtggcatagcagttagaattaacatggtgaaatattactaagtttatctgtaatttttaacttaaaacttgcattttagcaggcaataggttgtttttcttttgacggagtttcgctccagcctcggcaacaagagcgagactcggtctca

SEQ ID NO: 398336 - DNA, 623 bp, Homo sapiens
tactgttatctctagtgccagttatctcgtgtagcccgagccagcatgatcgtctcagttaagtgccaccttccagttctcagcccctccagtccatgctccacactccaagagtcatctctgaaaaaacatcgaatggagatcagtgaccatccgtaccattaaattcacagtccttagcttgacctgccttggcctagcctttaatcccgcctcattgcctgccctttcccctctcagtgagctgagatcacgccattgcactccagcctggggacagagcaagactatctcaaaaaaaaaaaaaaaaaaaaaaaaaaaattgaaagactaaggtaacaattagtgcatgtttcctttggatccaaaaactaatggaccgtttagagagaaaggcagaacaaagaaagggagttcccagacagtgctagcaccaagcaaggaagtggagattgatttctcaacaagaaaatgagaggcaagtagtaaactttggagataatatcactagacagattatttactgggccaacagcaaggtgtttctgcctttcaatgttggccttgtttctaggaggcttgaagaatgcttatttggcatttgactcagcttccccatccat

SEQ ID NO: 398337 - DNA, 640 bp, Homo sapiens
ctaaaatacgccgaggactctgctaagtgttgggggcaccagggtgaagatgataaagttctcgacttacaaagcttagtttctggagaagacaaacagtaaataagcacttttaataagttacgctcaaattggcatgagaacatggaagaggtggggtggtgaattcttagtggaggcttctgccatgcacaatgcctgggctgacctgtgaagaagtgttttagtgggtgggaaaggtgatagaggcaaagtgaacaacacagtcagtctggtggtttagggaaacagcctagtgttttggcaatgaaatctcttgagttcgggtaaggtagggaaaaaggccagcacatgtctggcccctgtcaggtgccacagaaaagtaggaatttttcttgttccaaataagatctagtccctggccatgccctggtcttccaggaagatacaatccatagggccaatcccaaactacaccatcgaatgttccttgaagccgtcacggcttcaacggaactttaaggagtccttatcattaaggtagtacaagtatctatattgtaaaactgatgtgtagcttgatctctaggggacaggaccaccaacaaataatgcagattttgtgtttgtggccgaaggt

SEQ ID NO: 398338 - DNA, 512 bp, Homo sapiens
atttactgtttccaagtacgttatagataccagattccagtaagatttaataatgataagaagtttttaggcttatattaaaaacagaagtctgtggaaccataacttgttcaccaggtaataacagagcgagcgtccattgttgaggtcagtacttataacccacccgcaggccgtagaccacctcagagaaactcagctccagagggccccatgggctgctgctgtgcagttggctctgcagaggccagagccccctgctgttcccaagtgttctgtgcccagagaacccggctttgcccacctcttcagcactcatcgtttcatgagctgtggtcatgttcttagagagtgcccaggaacagtctgcacttagacatgaaagcctggagaccacattctcacctggtggaatccacatgaaggctcccccatggaagggagtccagggcaatggcaaacactgtctgtcgtcagaccagagcaactgtgggaccagatctgagtttgct

SEQ ID NO: 398339 - DNA, 564 bp, Homo sapiens
ccatagccccctgagtagctgggactacaggtgcatgccaccatgcctgactaatttttttttttaatttgttttaatgtctggcattttgctatgttgtccaggctggccttgaccttgtggcctcaagtgatcctcctgcagcagcctcccaaagtgttgggattataggcatgagccactgtgcccagccagataatatattcttgacgttgtgttaagtacttagactaccatctaaatcttacagctaacttgggaaatacagagtactatttttataaatgaggaaattgaggatttaaaaccaaatgtgattctaaaactgttagattctaagactcttgatattatactatcctgtctaatctgtttcatggtattgttgatgttttaataattaggagcacatctacttggtgttttagtgttccaaatctatacagaatagtctgtatgattaaaaaatataatttgtaattatcacatttattactaattttttctttcatttcctttgatgcaaaaacattactaatttgattatacatgggtacagccttt

SEQ ID NO: 398340 - DNA, 344 bp, Homo sapiens
aactgatttgcatttgtgtgtataagaacggcttgtttttttgttgtttttgaacagagtcttgctctgtcaccccaggctggggtgcagtggcgccatgtaggctcgctgaaaaacctgccttccgggttcaagcgatgctcgtgcctcagcctcctgagtagttgggattataggcatggggcaccatgcctggctaatttttgtatttttagtagaggcggattttgccatgttggccaggctggtctgaaacttctggtttcaagtgatccacccaccttggccttccaaagtgctgggattataagcaagagccaccgcgcccggccaagactgtttgg

SEQ ID NO: 398341 - DNA, 123 bp, Homo sapiens
aagcatctgaaaccacctccattgtatttctatttctacctgggtcaatgaaactatgagcttagtgttcttaggaaactctggggctggaggatccacttcctaggtggcttgctcacatgg

SEQ ID NO: 398342 - DNA, 225 bp, Homo sapiens
acctaagcagtgactcagagaagaaaaacacaaggactccggggctctctaacatttggaggttgggagattaaaaaaaaatagcaatggagatttaggaggagtagccagtgaggaggaaaaccaagatagaatggaatcatcaattgaaaaaaaaatgaaaacaaaaagccacaacaatgagtcaggtcagctatgagtaattaactcgattctgactcatgg

SEQ ID NO: 398343 - DNA, 266 bp, Homo sapiens
tctatcacccaacctttcattgaactctacctttcctcatcttccaaatatacaaaactaaaagtggttatgttttatataaaggatgtattccttaacatttttcataatttaaaactcccataattcaagtatcatgctgatagataatggaagcttgtttgtttactggctaaagaggtggtaccaccatctccaaaatcatcttcaagatccagagtgttgcttggcagtggcatacacagttcattatatccttgaccttt

SEQ ID NO: 398344 - DNA, 459 bp, Homo sapiens
acctgttagttttatggcagtatattaaactatagacagctatgaaaaatacaaaatattaaaaattaaagtagaagaaaacatcaaattagtgatccactaaatagctagtgatgcatttactctgccactaatcagctgactggctttgggccaatttctctaagccagtttcttacctatattcttacctatgaagaagttaaataagatcaacatgccactttaatttttgtgtagaagtaaattttattcgcttctcagacctctaagaactacctaatggtcaaagtttttggcaaactggaaaattactttttgtgatctaaaagataaaatctagcttagataacttgaataattaatttgattcacgtatcttacacaaaatatttgatatatctgaggaatggctggagttgctatgaaataaaataattttaagttaacgtgttaaat

SEQ ID NO: 398345 - DNA, 636 bp, Homo sapiens
gaatcctagtgtccttgtgcctccttctgcatatgtctggactttgcttagctgatgagatccagttcagataccaccttctgtacaatggcttccttaattcctttaatttctcttaattgcaataaagctatttgcagaggaatgaaagatgctcccctttgcgctgggtacaggatgcactgaaactttcagcatggggcgcggtggctcatccctgtaatcccagcactttgggaggccgaggcaggcggatcacctgaggtcaggagttcgggaccagcctgaccaacgtggcgaaaccctgtctctactaaaaatacaaaaattagccaggcatggtggtatatgcctataattccagctacttgggaggctgaggaaggagaatctattgaacccaggagacagaggttgcagtgagctgagatcgcaccactgcactccagcctgggtgacatagcgagactccatctcaaaacaacaacaacagcaacaacaacaaaaacccaaactttcagcaggagagtagcttggttcagcccagcaacatcggtttgaagattatatcaagttttccagtcaaatgtaaccagtttatggatctgtgtttgcacggggtctgaacctcccctc

SEQ ID NO: 398346 - DNA, 617 bp, Homo sapiens
atttgctgagtaagggccttttagaaaaacaagtctgtgggttgatattattggcacattccctccaaatgacagacatcatctcttctcctgaatttatggggctgagtttctcatttgtagtatggtgtgtgtctctgcatatggaactctaaaattagctttttaaaagcaggcataacaagctgctggcctgggttttatttcatctgtataatatttttaaaaataagaaatttgcacatgaaatccctgatttccaacttctctgggaagatctggcaaccctgggcttgaattttctcctgttaaacgttgcttatctcccatggctgtgagctctgcagtttgctgccacccttagaagtccctgttgtatatccagacggctttatttaaatggctggctcccagcagcctctgagtttgagacctgtgtcatagagtttcaattcattttggtgaaacgatttcttttttgacaaggataggtatttacatctattatggcaactcatgcactcaggatgccttacaaggagttttacattacatcattttatttattccttccaaattttacgataaataaaattattataattacttaaaaaata

SEQ ID NO: 398347 - DNA, 190 bp, Homo sapiens
tttgctcttttctttatccctcagtttttaagaggtatttatcaattagaggtattagccctttttctgttgcacatatcttctcccagtttttcagttgtcttttgatttcctttacggtgtttgggcatgcaaaaatgtttactgtttaaatgcatcaatcttttcttttttcttttctttcctctgt

SEQ ID NO: 398348 - DNA, 451 bp, Homo sapiens
tctgggcccccactctcccgcagcagcccaggaagtgagataatctgaagagttgccaacccctgagtgatccatcatgtcccttggtaatggaaattgtgattacgctcagggctggttcccacgaggcccataagatgtcagcggtctgcaggaaggccccagtattctgaccttgtggtcacctgggcttgtgggggcttcaccacacactgaggctggtttctaaagagtctctaggtgtttcagctgccgccctcagacggcgagatgtcctcagagcctctgagacaccgggcaccgtcctccaagtctcagactccaacagagcaggttgatgtttgtttcatgattctgtgttcttgaaaaggacaaagcaaaaaagagagataaaaaactttggacgcagaccaaagccgctcaggtttttagctctgtgtccccttgcagg

SEQ ID NO: 398349 - DNA, 501 bp, Homo sapiens
cattccaccaaagactctgggggagcatgaagtatctgtcagtgaaccagcaggcaggagagctgatgtttgcaagaatgcagcagaaactataatgcacattgctatcctaagttagcttgttcttactcaaatcattaaaacaataacctcattttctgtctcaatagaatccttctattaagagtgttatacattttatagatgtagaaagaacttaacctcatcttcagtgttccacctgggtgggtgtggctgatgcatttgcttcatttcagactccaaaaagcatattggtttatattcattagctttactggttccttttctctaaagaacccaaggtgctcttgagagctgcttcatataatgagcatgtagtgcctcttaaatcaggagaacaaagaggcagtcaaggagaaagacaagtaaatgaggaatgaaagaccttgaacatgaaagtgggttgagtttgatgatgccatacatttggcattgctt

SEQ ID NO: 398350 - DNA, 196 bp, Homo sapiens
agttcaattaatccaaagttactagaattagaaggaaattcttgaatctgagtaatcttgctgtggaggatacaaatttgatgtatttgttgtttgtttaagaccagtttcagagcctgtaggacagcaccttgaccttgcagggtgctgattctcagatggattctttgactttcaagaatagatggatggctaa

SEQ ID NO: 398351 - DNA, 156 bp, Homo sapiens
cttgattgctctctttcctttctaccaccccctttctgactaattcatcagcaggtcttgtcgacactacctctagcccttatcctgagttgtcctctttttcatctgcacagccatcgtcctagtcccagttatcccctctttcttacctgcatt

SEQ ID NO: 398352 - DNA, 529 bp, Homo sapiens
gggttatatgacaattctccgtacttcccactcagttttgctgtgaacctaaaactactctaaaaaaaagggggttttaagggacatttgttcctgtaattgtagactaatcaaatcaagcaagggtatgttagccaaagaaattcacatatggcacatgatgcagaaacagtgagaaatttagatcctcccaggtgcactatgattacaggataccttgggaaataaattagctagtttataatgcaacaatcttgacacccctcctccccccaaaaaatcatgtgccttgacattttgggagcctgacagcatggatgtggcttacagtaaagctgcaagtgttacagggaagtagaatgatgcttttagctcttggaataggatcatattccatctagcttagaagaaaagaagtttatttcactgttttttccactattgctatgccaagtgctggcacaaagaaaaggtgagagaaaggaaatcagcttaatcctaatcccatcaaaatagctcatctcagtcc

SEQ ID NO: 398353 - DNA, 458 bp, Homo sapiens
taaggctaaaagtagcgcagtttaccacgtaaagacgttagggtcaaggtgtagcccatgaggtggcaagaaatgggctacattttctaccccagaaaactacgatagcccttatgaaacttaagggtttcgatgagtcatcgaaaccctacctgatcccatttcccaaagcctggcttcgccaggcctcctcatctcccaccaagttctggtcccccaggaggctgaggaagaagtacagaaacgagtgtatgcggctcagagaggacaaagctgggaaggcccaggccagaggctgttaccgtaggggaatcggggggagatcgaaccccagcccctctggatgcacatatctgcatgggaaatccagggtgaaaagtcagctgaggaaattggcatggagcgggaagggggagagctagaggaacactattctcagggtggcatggtctatagca

SEQ ID NO: 398354 - DNA, 366 bp, Homo sapiens
tatcatctgtgaatgagtttgctaagttttggagcaaaagccattgaaacctaaggtcagggttttgtccctacttggctttatttactctaccctattcaaagacacagactacaactctaatctcgtttcaccaacttgaacctgcatataggctgcagggaaattggaaggattgtggatgagtaagtacaaatccatcaccattattaacacagccccttacccgtccctgctagacctactacacctactgccattgatctccactccctacgcttaccgactcaggtctccagtcgcctcctcgcccttactagacccctcctcccctactctcctactctccctcccctcgccctccct

SEQ ID NO: 398355 - DNA, 515 bp, Homo sapiens
agctgcttttgccctggtaaaactaacaaacttgagagtattgattttcaatgcctcatagtgtagatggggatagaaaatacaactctgcccatgatcaaggtggagagcccaacaggagacactcccattcagttgagactccctgctgccttaattaagtgtaagggagaacctgaaatgaacccagttccttctcctgttctaggagactgtgagcaggacattctactttaagctcgaaagctgaaagctctgctcaaatgggccagacttacattacctgggtgatattaaaacaaacaaacaaaaaaccctcaagtcatgaaattagttttttgtggttcttaagtaggcaggcctctaagcattcagcagaagcaaacataaactcttcctagagcagcacatcagtgtcctaggtctcgacttactcctataaatatttatatatacttaatgaacagttttagtcaaaaatgacaaaggatacaaggcaacaaagcaccataagc

SEQ ID NO: 398356 - DNA, 500 bp, Homo sapiens
gaaggtaggagtactgcaagaggatgaggttctgtatgagatcagaacctcattaaaaaaaactttaaaattagtttaatttatgtaaactcacccgtatatacaggtgggtgagaactacagaaattcaggttactgtagcaatgagtatttgtaaaatatttatctaattttccaagaggtatattctacactaaaataggaagtctattgaatagatcctagtagcctaataaacaagttatgtgtcttatcctaaggatgcacaattccttgctcccctctttgcttcagaagcattttacttggagttaccatattcatttttctttacatccagcttgtggctactcatacctagaaaccctgggctgacaaacataccaggactggcaagtgcctagagtggctgctgagtgctggctagctgcaggggcaaagcaggcatacctcacacacctagctgccttctcccaaagcagcacctgggctgagaggcc

SEQ ID NO: 398357 - DNA, 204 bp, Homo sapiens
aacctgccccagaactggcccactcaccttctccatggtggctccccaaccacctcgaacctctgtgccctcagtattctagaccagtggtccccaccctttttggcaccagggactggttttatgggagataactgtttcacggcatgtgcagggtgatagttttgggatgaagttgttgcacctcagttcatcagatattag

SEQ ID NO: 398358 - DNA, 714 bp, Homo sapiens
tgattttgtctgcatggacagtgtgtgtgtgtgtgtgtgtgtgtgtgtgtgtgtgcgcgcgcgcgcgcgtgtgtgtttgttggggttgcacgcacagtgatgatgggtgccactcaccgttctcactttgaatccaaatgttaggaaactttttttccttctgtattcactcaggagacaggccctggcaccaggctctggagaccccacttcctgactccagcggtgcgaagatgatacaatactttctggtgctgacattcagctgtctcccaaacaggttggctgatagccctgcccgtccttgaagaggggccgggggctgtctaaaaagacagttctgatgactgcttcgttggtagtggcagaggatttggggcacaggggtggagttaagtccaattgctgtttaaattggacttggcctcctttattttacagtcctaaggggtctccataggagaaaaagtagcgagagaaacttagaacacaggaaagcaagcatagggaagagtttcttgtctcaatcttggtactgccgtgccaaaatgaagcccagggatggttaaaaacggatcctagggaccgggcaccttggctcaggcctgtaatcccagcactttgggagatcaagatgggaggattgcttgaggctaggagttcgagaccagcctggccaacatagtgagacctcatctccaaaaataaaaactt

SEQ ID NO: 398359 - DNA, 393 bp, Homo sapiens
aaggatattgaagatctgaacagtaacttgacctgattaacagatacagggcactgcatacaatcatgagagaaattatatttttccaagtgtgtacaaatcatcacccaactgaccatatactggctcttaaaccaagccttatcacataccaaaaggcttctagtttattcagattatataatctggttacaaagaattgaggtagaataaaaaaacaaaagataggtagaaaaaaccacaaattgcttggaaattatacctcacactctaaataatctgtgtgtcaaagaagacatcacattggtaatgtaaaatctttttatctaagtctgatgaaaagatgagttatcaaaacttgtgggatgcagctaaagcagtgaatagatgata

SEQ ID NO: 398360 - DNA, 685 bp, Homo sapiens
atgcaatggtattatgacaaatggctatccatagcatgaagaaaaataaactatctggaggtacatattcactaatgagaactaaaacatcaacaaggtactactttttacccttcagattactactaatgattaaaatgagtgctaagtgttgacaagattaacagtgggtccactggcacatttctgacaaaaatataaactggtataacttttaagggaatttaatctggcactatgtatcaaaatttaaaatgtacaaaccagcaattctacttctgggagcaaagaatgaaacaagtgtacaaaggtatatatatgcaatgattttcattataccatcactttttaaaatgatgaatttaaaaactatcaatggaggttggttaaataaattatgcctatagtcctagctactcagaaggttgaggcaggaggatatggcttgcttgagcctgggagctggaggctacagtgagctatgatggcatcactacactccaggctgggtgacccagcaagatcctctctccaaaaaaataataaattattacacaaccctataaggtatcaaattttagacatttaaaaatgttttgatctatacgtattgatcagtacaaaaagcaatttacagtatatattatgtgattctgtttgtggattttatttttacaactaatgc

SEQ ID NO: 398361 - DNA, 382 bp, Homo sapiens
taccagacggtagaatataaacagatctttttgaaggaaataattcaacccactatagcatccctctttttccagcaccaaggttggtgcctgacacccagtaggtgcccaaaatatgtttgttgaattgcatcagtagcctgttgtgttagaaaagaagggaagagggtcttcgctaaaaggaaatatgatttgtatctgatatatggccctaaggtcaattttgggaaaggatttcacagttcatgattgctttcataaattcctttcaattagtatgtgaatcttatagtatcttatactcttgttatagggtctattgaagccgccctccttccaaaggagaaaagcaaattactttaccaggagaaattctaaaata

SEQ ID NO: 398362 - DNA, 495 bp, Homo sapiens
tatggcttcctgaggattaccatgagccctcctccaccgtcaagcggcagctaccagccaccagaccagatcccttcgaaggtgcccggagtaccagactgacaaaagcgcccgtacagtgctcagtcctgtaaccaaagctgtctagggtgcagacatcgctcaccggaccgggtagggctcgtgcgctaagggcgccgggtattccagttagtggagagggaagcgccctggaactgcatgggcccgggagagggcgcgggagcggagcagggccgggccggggcgggccgcggccgtgggcggagactgcgcgcagctagctcgggagcgcctcggagcccaccccgcagagccgcttctcgcgccccgcagcgcagcgcagcgctccgccgtctgacctgccgcgcccgcagcgtgcgggctgggaaaggaggcgctcaccgagagggaccacgcgccaggctcccagcccgacccgggacgcggcggccg

SEQ ID NO: 398363 - DNA, 577 bp, Homo sapiens
cttataaccctaatcgcaaagagccttagtgaattgttggaagaagagtgacttcaaaatgaaactgactccctgtatgttaggagtccatattctctgatacagttaacgttttccttccaacctcttcactgttcaagcaaagtggtattttagctattcactgtttgacactttaataggagttttgatgagcaatttcaggatgtggaattgctacactgcaccaggttcctgcaggagcagcagcctcagcctgtggatgggacgtgagatcttggtgtatctcctggaggaaacgctgtgctgctgtgttgatgacggggcgattagggttagtctgggccgtcctagacaagcatagattgccagtttcagaaatacccaggagtgggttaatttccttgtttttttaaatcctattcaaagaaagattatttccagttggtttttaaaaagcgtttatttctatttacaagcaaatattccctttcactgtgagctcagtgctaggggtacaagggcaggtggatggtgagaggcggggtgttggtgggcagactcactggaccaaaca

SEQ ID NO: 398364 - DNA, 564 bp, Homo sapiens
acccaactgaactgggtataggtcaaagctcctctccttccttttccttcctaggcactcattggctaggacctgtttgctcttttttttgtgcccagagatactggaacacgcttcatctaagtaactgtggggaggggtctttttgactctacaagtccttgagcaaaaagctgaaaaagaagcaggaggtggagaagacccagtgaagtgccccaagccccatcatggaagagggcttccgagaccgggcagctttcatccgtggggccaaagacattgctaaggaagtcaaaaagcatgcggccaagaaggtggtgaagggcctggacagagtccaggacgaatattcccgaagatcgtactcccgctttgaggaggaggatgatgatgatgacttccctgctcccagtgatggttattaccgaggagaagggacccaggatgaggaggaaggtggtgcatccagtgatgctactgagggccatgacgaggatgatgagatctatgaaggggaatatcagggcattccccgggcagagtctgggggcaaaggcgagcgga

SEQ ID NO: 398365 - DNA, 426 bp, Homo sapiens
ggagaaggagcagactgatggcctcagggaggatgctagaaggcagcaagattggcaggtttggagggctgccttctggtgtaggcctggagctgttgagtaggctcattgttggaactcctggcctagatggtcccagaacttgcctggtcctctggggacccgggaggaggtcatactgatgccagaaccttccagggggcagagtgggagtaaagggcatggggaggggttctccaaggacagaggtggttgtggtactgctgggacctgtggaacttgagattgtatttgggaatgtgcttaggctctcaggaagtgggggccttggtctgtcaggtctaggaggtagtggggtttgaggcatatgggggtttggggtctcaggcttggaaagtgatatgcttgtggaaatttggtgtggtg

SEQ ID NO: 398366 - DNA, 634 bp, Homo sapiens
tttgagacagagtctcgctctgttgcccaggctggagtgcagtggcacgatctcggctcactgcatcctccacctcctggattcaagcaattctcctatctcagcttaccaagtagctgggactacaggcacacaccatgatgcctggctaatttttgtatttttagtagagacgggggtttcaccattttggtcaggctggtctcaaactcctgacctcaggtgatccacctgcctcaggcgtgagccaccatgcctggcaatgacttgatcttctgtgaaaacttagaattattttcatctaactgtttctgtcagacaaaagaaattatcaaccccaaatttttaaggatctctaagtctccttctgcattaaaaacaatgactgagggaacagtggaggggtggggcacagggttttggaaccagccagctctgccctttcctagatgttttgactctgagtaagtggcttagcctctctcagcctcagtttcttcaactgtacaatgggataaaaatatttgcttgcaggattcctaatggctgattaagatattcacaaacaggctcttgctatatatattctgaatgaaagtacagaatttgtacaaactttctggaagataatgga

SEQ ID NO: 398367 - DNA, 567 bp, Homo sapiens
tttgagacagagtctcgctctgttgcccaggctggagtgcagtggcacgatctcggctcactgcatcctccacctcctggattcaagcaattctcctatctcagcttaccaagtagctgggactacaggcacacaccatgatgcctggctaatttttgtatttttagtagagacgggggttcaccatgcctggcaatgacttgatcttctgtgaaaacttagaattattttcatctaactgtttctgtcagacaaaagaaattatcaaccccaaatttttaaggatctctaagtctccttctgcattaaaaacaatgactgagggaacagtggaggggtggggcacagggttttggaaccagccagctctgccctttcctagatgttttgactctgagtaagtggcttagcctctctcagcctcagtttcttcaactgtacaatgggataaaaatatttgcttgcaggattcctaatggctgattaagatattcacaaacaggctcttgctatatatattctgaatgaaagtacagaatttgtacaaactttctggaagataatgga

SEQ ID NO: 398368 - DNA, 232 bp, Homo sapiens
tatgtgcccggtgcctaggagggccacgtccctgctcccgacaggtgggcactcaaaaaaagtttgtgaatggcccagggtgccaactttccaggaatagctggaaagcattatactgaaacacgtgcttccggttctctggggagcccttggtttttgttgctaaaacttgtggttacacactattggctgtttaagtgactctgtttttgtagagttaatgttatttagg

SEQ ID NO: 398369 - DNA, 237 bp, Homo sapiens
ggaaacaaagccataaagtggatgtgactttcacggcaaaaagtttcttttgcctctgaaagcacctcccagaaaggacccagtgggagtgaaaggatgatgttgaccataaccctgttgctttgatttggggaaaactcataaaacatgaatttcctggttttggtagtccctcagtacccaataatttagaaactgttcctttttccccaaagagtaagtggtgcactcatatta

SEQ ID NO: 398370 - DNA, 474 bp, Homo sapiens
gccattaaaaaataatactgtagacggagtggcccaaacgagagaaatttatttcttatagttttggcatggtagatttcatcctgaggtctcttctcttggtttgtagttggctgtcaatctccctgcatgctcacacgaccgctttttgtacatacagtaagaaaatacacactgtcatgtcatttttttgtaagggaactgatttcatcatgaggaccctgccactctcatgacctgatctaatcgtaattaactccaaagaccctatctccaaatgtcagcacattgagggattagcacttcagcgatgacttttgggaggacacggatatttagtccaaaacactgttttaactgaaaagagtttgcattatggacgtttatgtttgaaaaatcagctatttaggtagtggtggtctctcactttatttgccattgacttgttagggaaaccttttgctttctcatttc

SEQ ID NO: 398371 - DNA, 964 bp, Homo sapiens
gggggcggaaaactggcaggtcaggccggtgttagcggtggaaggctgaggacacaccttaaacatgtggaatcccaatgccgggcagccagggccaaatccatatccccccaatattgggtgccctggaggttccaatcctgcccacccaccacctattaatccaccctttcccccaggcccctgtcctcctcccccaggagctccccatggcaatccagctttccccccaggtgggccccctcatcctgtgccacagccagggtatccaggatgccaaccgttgggtccctaccctcctccatacccaccgcctgcccctggaatccctcctgtgaatcccttggctcctggcatggttggaccagcagtgatagtagacaagaagatgcagaagaaaatgaagaaagctcataaaaagatgcacaagcaccaaaagcaccacaagtaccacaagcatggcaagcatttcctcctcttcctcctcctcttccagcagtgatttctgactgaatacaggccctggacccttccctcaaggtctcaccagttctgctctcccatcaaagcttcagatgccatgtttgtactgggggaattgtagccccttgtgctccccaacccctaacttcacctgagcctcaacctgcttgtttgaagccctgagtggctaggggcaaactgggcagaggaattgcattggctgggcatcttgttggctgcttgcgtagaatcattattgcctatgaaattagggcagcggcacctattttttgaagaatgattgcactaacttgttgcagaccagttgacgctcttggtacaactgtgcattttaccttccacttatatactgtgattgcggccggttccgggcccttccattttgatgaaaacctattcttttgacaggtggcctactgtggaccttagggcaataacttcccacagcctttgttggtcc

SEQ ID NO: 398372 - DNA, 945 bp, Homo sapiens
attctgttgttggatcagattagacccttggaaatccaactgtgcgtctcccttgctaaaaaccctctggtgactctccattacatatagcacaacactggactttatctggcaataaggacattctgtatcctcctacttgatagatttcctcaagagtttagtgccagggaccactttttctgttctgaagggactaataagctttttctcaggcaataaggataaattaagaggatgtactgggaagtcagactactttgttcaaatcttgtcttttctacttactagttgtttggttatgaacctttctgtaccttgtttccctgtacaaaatgaaaatgaagacagcatctacctcatggcatttctatgaagaataaatgagataatacaatataaaaacacttagcatggtacttgatacgtaataagagctcagtgtaattatagctgtaagactttcagataactggaattgccacatttcattgattccaagatacacattttttattattgtaacttctctgaaatcagatattttgatggtgtcctatagtgttttttgtttcttactatttcataaaataaaggtgcatcttaagaatgatggcatcatagatttgatacaaaaaagtacttaggtgactcattgccagctcacagacatgtttgatgctcagttcagctgctgtgtcaaaaaaaaaagtggcatagagatataaatatgaatgtttaaacacagaaacatactaggtcagaaataacatcctgaaaaataaaatattttatttcttcacttatcttgatagtgacctcataaagtcaaagaatcatttaatcgtaaagatattcatatgtggccgggtgcggtggctcacacctgtaatcccagcactttgggaggccaaggtgggcagatcacgaggtcaggagatcaag

SEQ ID NO: 398373 - DNA, 1403 bp, Homo sapiens
gtcaccccgccccgggaccgctgtgtacgaccgatctccccggcgccgcctccgccaaggcacgtcccgggtggcgtgatgggcccgggccaccaggcgcccgcccgccccgaggccccgccccgtgtccgcgcgtggggccccggccgggcgggggcgggggcgggggcggtgccggcctccggggactggagggggatggggtcccgcatggctaaataactccttggcgcctcctgctctgctgtgccgccagggcctcccctagcgcgccttctggagaggctttgtgcggatacggggctggaggcctggtggggctgtgtccgggggctcgccgggggtgtggggaggtctgcgttcctcaccctccctccttccttccctccctccctccaccccgcgtgtgattgctcaggaagagacgggaggggagaggagggtcgccagaagttgctgaaagcgcttggatcctgatcattttcactgagtgcgttctagaaccaggagtcctacttcctgcctttacagatgggaaactgggctcagagaggtggagtgaccatcccccgagagttagctaggagtcacagcagggcccgggctgtgactaggcctgagctcttgtccacccttagaaccctagaacctgggagtccaggcccctgcgcagccccttccttccgccgcccacgttttaaccccaggtctgccagggctgtgatgtcctgggcgagggtgcccaactccaggggctgggctgatgaggcaggaatgccgggtataattattacatgcttgttaccactatcatggctgttagggcttaatgagccactattaagactggctgggaagggggtgtgagggaggagagatggacccaccccaccaatactcacaagggatccttaggacatctggatctgacctacagcctctgcatgcacccctccagctccccacctctgtctgaatggagcccacaccctcctttccctgacctccttcccctcactctctctgatccttggcctcccagttgcaggactaatcgtacctctgggcctttgcacgtgctatgctctctgcttggtactcccttcccccagtgcaaagatgtgtcttcaggaagtgccccaccctcagactttactcctttattgtagcctctgaatctgccagaatgatggagtggaccatagtccctgaaggtcagggacattgcctatgctgagcctgctgacagggcctcgcatagaatggatgctcagtattaaaggtgaatgcggggctgggtgtggtggctcatgcctgtaatcccagcactttgggaggccgaggcaggcagatcacttgaggtcagcagttcaagaccagactggccgaaatacaaaaataca

SEQ ID NO: 398374 - DNA, 677 bp, Homo sapiens
atttatgtttcatttgtgattcggttccaatttgacacaactgcctgccttcccccagcggttcgtgtgatagacacactcacgctgtcaatcatggagctgtggggcgcgtctgggagatctatagcaaaactccatccactccggttcccttgtataatacaaaagggttttatcagtcatgtatttcgcctcaaaactagaagcatggatttcccaacccgattcaccattaaaattgtgaatttttctggttctggtaaggatacgttgactgtataatggattacataacagtgtgttttcttcaccttagtaagtagccctgggagtttgtagcaaagaaagaagaaacccgagcctcaagaaaatttctccgacgatggtgcccagaacaggggtcaggggtcacgtgtgatgcgcgaaaattaaataagtgataattaagggaaaagaaaaactcagtgcctcattgcactaactgtctggcaagcgcccagtgtccagctgtggacagcacagttgtctggggcagggaagatatggactttcctgcagagagtgctactctgcagcagtgaggtacacctttcagggatgtcccatgatggtgacagagacaccagatacacaggtagcaacagtttcatttgaaaagatcattcccacagatggga

SEQ ID NO: 398375 - DNA, 543 bp, Homo sapiens
cttttcagcaaggtgtttggatggtcctgtgcaatgtctttgagggcaagatggtgctatgtggactggacagtagcagcatgtggtgatttgcagctgacccttgaatgcctggacagtggatggcggacaggtgttcatccagagagaaagttccagagaagcagaggactgattaaaacagcagatacgcatcaaaacagggaggaatcagcttgggacagtcaccaggtgggaggaaaggagtccaaggggacagccgagccaagaatctgaaacccaagctgtagagactcaacttgcagataacctggctgcgagtactctgcccccaactggtggaagggaggagatggtggcgagaaggtgcatctacttctgaagtgccttgggttggagtgaaacacctcacgtcctctcacatctcattagcaagaactaaccaaatagccctgctcagatgcaaagggagctggaaaaggtagcccgcaaggagtctacactatgaagggggaatatatggaattgtggtgtttgcctgct

SEQ ID NO: 398376 - DNA, 592 bp, Homo sapiens
ctgatgttaaagaagactagccttttcctacttcaggaaaagtgtactccctacttaaaaaattacccatgtcctttctttcttgtgttactgtggataaggtcaatttggagtagactatatctatactctcacaaactagaagaacctctactttataccttatagattaggcatcacacactctatcactgatttataaaaacatgtcctaaattcaaaagttagcataggacctactggcaagggtccaagcagattttgcttttagttataacctgcatgcagcctaagcaaccgtgtaccaaagagtataccattgtctgaattgtcctaattctccggggtgtagggaatttcaggccagaattgctctggaggtgcagaagtgctaaggtttttatacaatacactcatattcctttttttcaaataaaaacattagaaagaatgtaaaagatattgaaatatcaagagaggtgaccttttgtaagcccactcatgttctcctgggaaataaagaataaagtcattcaccaccaagtgtaatattcctcacttccactcgcctgatgaaaggagtcaacatagg

SEQ ID NO: 398377 - DNA, 381 bp, Homo sapiens
atatagagaggatatatttgtttgtgtataaaaccaaatggaaaagctaactgacatgaacgagaatgagtagttatttttgacttggggaacacttcctttggcaataccatacatatttaaaatgcatgcacatgcacacacacacacacacacacaatcccagacaacgtagaagtgaaaatgctgcatttcagaaaactgactttagactaaagagatggctttactgatgagtacaatgatggtaaaggtgcatgtgataaagcatttgaaataaacttgctttgtgacaatgggaaatacagtctttccaaataatctataacatgaatttaaatacatatgtacttgaattaaacattaaatattataagcaaa

SEQ ID NO: 398378 - DNA, 465 bp, Homo sapiens
aagaaagatgaccagctctacattagttggacgtgaacacaatttttaaatgctcaagatatgatgtcttataatttcccattctaaccaactatgtcagttaacagaccacttcctagtttcaactgcgtaaggcaagaacgtctctactgtgacttcacctagtcactgtatctcagggtgcagctactggctgtcatcatgtccactctacagccagcagcctaatcagctttccctgcagggagtgcgggcagaatcagattgccaggggtctcccgggtggtgctgttaccctgggcgtgagcacaagctgggagacacacacacgtgcgtgaaacacgcacacatgccacccaccacgtccttcctctgtgccagacagtcttattagtttagggggagataaagtaataaatccttcatcttgaattcaaagttaaactaacaatttacaaaaggaaa

SEQ ID NO: 398379 - DNA, 588 bp, Homo sapiens
aggactgtgagacaacaaatgtctgttgtttaagccatccagtctgtggtccctggcacactgacatcacagggaattcccaaatctggaatgcatgagtcatgaggatagactatatttctgtaatcttcacattagcacagttttatttcttgttctaaacatttactgagtggaaattttccagtgaacttccagtcatggggccactcccgacactgcagacgcagccacctgcattggcttggagcggctttgaagggcgggtgcaggtgcactgggggaggggttctcatctccagcccgtggttcaacatatttctgtgcttaaacgagaaatttcacataacaacaacagcactcacaaagaaaccgagctggaagtatttcagttctgtcattctgcatgacctcttggtgtttttattctgtgtttcaaatgtgagactgtgaaaccagagcgaaaacggagatgtggtgctgaagctgagatgttagctcatgcatgaaagaagtcactgaatttgaatatctttaacattgaaatgcattctttttctgttaattgctttaaagaatgaatcaaga

SEQ ID NO: 398380 - DNA, 798 bp, Homo sapiens
catccctcaagacctcacccaattattatttcaaactctaaatgctgatcaactatgtggagctgaccttttcatcctgtaaataagtgttattttctccttaagggatttgccacatgaaaactttgcaaacaaggacagtgtcttattcattttgaattctccattgtgcaatttctagctcactgtcatacagaacattactatcatatttagaggctgaataaatcattaaatggataccatcactgggcccatggaattgacttacttaactcaaatccatgtgaaagtcacttaataaatattaaataccatcaattctcaattattcatggggttattattcacaacttacttgtgatatgtccttaaaggtcatatttacataatgaatgattctgcctatttcattggcataaataggttcatttaaacagatttcattatttaattagctccaatttttcctttaccatctttttcagaaggcaagattttgcttttagctgtcttgcctaaatctgaaagctcatactgatcatttccatttaataagggaagatgaaaagggccggtcaggggactgggatccaaaaggtcaagagttttccattccttcttccatcagatcttcatagtggagttttgttaatttgtgaatttagttcaatgagccaaaaaaaaacttgctgatcaaaacaaagcccctttggtagggaggaaattctgtctctttgttttctcttcctttctctctgtgcgtgagtgagtgtgtgtgtgtgtgtgtgtgtgtgt

SEQ ID NO: 398381 - DNA, 348 bp, Homo sapiens
tgttgtggggagagtagtgtttgaaagggattggtccaggcagctttgtttttagagacttgtaagtggttgtttttgttgttgtttaaaaaggttgtaaccactaattaatggaaagcaaaaaaaaaaaaaaaaaaaaaaaagcttacaaagggattgtatttttcaactaagaaagtattgtttagtcacagaaagaactgggacgttccttttcccgtgcatgtttttgacataaactaagctgtcatggcttatatttgaaaatgacattatcatatgtgaaacatgctcttcagtggttttaggactttattctcccgtttccatttttttttctgtctcagc

SEQ ID NO: 398382 - DNA, 516 bp, Homo sapiens
aagaatggcttaaactcggaaggcagaagttgctgtgagctgagactgtgccactgcactttagcctgggtgacggagagagactccctctcaaaaaaaaaaaaaaagtaataaataaatctacaccggagaaactcactaacatagaacttcaaacaataataagagaaatgtttgctcataaaatctggtatactacattgatgtatcatcaaacaaaatttgtcaggcagggtgtagtgattcatgcctataatctcagcactttgggaggccaagggggacagatcacctgaggtcaagagtttaagaccaccctggctaaagtggtaaaaccacatctctactaaaaatacaaaaattagctgggcatggtggcacatacctgtaataccagctacttgggaggctgaggcacaagaattgcttgaacccgggaggtgaatgttgtagtgagccaagatcacccgacggcaatccagcctgggtgagaaagtgtaattgcttctcaaaaaa

SEQ ID NO: 398383 - DNA, 522 bp, Homo sapiens
tgttttaatctagtcaataatctgttacctatatgttttttcaatgtctaccatcttctctgtcaaagagtatttttatttctttgtctttttctctgacctgtgggcttggtaatcaagtctttctcaggatcactaacgtacttctatgcaattctgtgctttacagtctccagtgtgtttaatcatttttagttttctttcagtttttctttatcttgtccatctttctttatccatcaaactcttgcatttttattatgaacaattgcagacctgcaaaaccatataaaatacactacactgaacatctatatttactaccagggtctggaaattaaacattacaaatgaagtttgtctcactgcatcaattttggtatgtttttccaggatattgtttgtttcacctaaatgtatgtatctttctatgtatgtatattaatatatgtattaaattgtacatatctatgcatatatttctggataggtgtatgtaaaatattacatatgaaagccacc

SEQ ID NO: 398384 - DNA, 755 bp, Homo sapiens
aagctattgaagaatataatttgaaaaggaaggagattctttcgctgatttcttctacttccattgtctggtgaatctgtctagaaatattcctatgtatatataaatttatgtatataatttaacccacagataggatcacaaatctcagtggcttataaccactgagatttctttcctttttacacatgggccatgaggactgctgatcatatgcagccatatcaccaactctgctggctccacttggctcccaactgtctttccaggactagtagtcagcgagcagccactctctgtatcatgcatggcagagggcagaggctcagggatggggagaaagctagaccacaaagacacatttaaaacttctgcatggccaggcgtggtgactcacacctgtaatcccagcatttttggaggctgaggcaggaggattgcttgagcccaggagttcgagaccagcctaggcaatgtagtgagaccctgtctctataaaaaataaaataaaaaataaaatttctgtgtgatggtggtatacttgatgtctactcacatttcattgaccaaagcaagtagcatgaccaagcccaaagtcactggggtagcatttaacagacatttgcgaaaagtttctaatgaaagatagggcaaaaagcaaaattataagtataatagaaataaaggaagttggaaaaagcaaagacaaatctaaagaaagttaaaaaaaaaacaaacccatagctaattactat

SEQ ID NO: 398385 - DNA, 415 bp, Homo sapiens
ggacgcaggaccttgacgggcgtgaaatcagactcagaaatacttctggcaagttgtatttgttagagtggaatatgtctggatcccacagtgaactaggaacatgaaatggtgacttggtgggtgacaaaatgtgacaatcagggatgtctggcattcaagctattgaaatttaaatgggctattgcttttttagtgttggctcctgttcttagatttaaaggatttatatgaatcattcaggggctttttattaactttcagtttgtggttgagattggaattggaaggttcagaaagatgtaacagtagtttcaagtaaaggagcttaatgattgtgcctgtgagaatcatgccttcgtgccctccacggaggcacaggttgtttgtgttactggtttggtagggttcgtgt

SEQ ID NO: 398386 - DNA, 278 bp, Homo sapiens
aaagtgatgagagacaagaaaaggtatagaaaacctatttaatacagtaactgaaaacttcccaagtctgaagagagatataaaaaacatccagatccagaaagctcacaagtccccaaatagattcaacctaaaaaggtcttccttaaggtacattatagtccaactgtcaaaagagaattctaaaaacagcaggaaaaaaacgtcaagtcacatataaggaagtccctgttagattaaaagcagatttcttttcttttcttttcttttttttgaga

SEQ ID NO: 398387 - DNA, 434 bp, Homo sapiens
aaaaaaaaaaagaaaagatgaattaaagatttaaatgtaagacctcaaacttcaagaatctagaagaaaacctcagaaagaccctgtggacattggccttgggaaagaacttacgacgaaatcctcaaaagtaattgcaacagaagcaaaaattcacaagtgggatttaatgaaactaaagagtttctgcacagcaaaagaaactatcatcagaggaaacagaaaccctacagaatgggagaaaatattcacaaactacacatctgtcaaagatctaatacccataatctatacagaacttaagcaattcaacaagcgaaaaacaaataaccccgttaaagagtgggcaaaagacgggaacttctcaaagaagacatgcaggcagctaacaaacatgaaaaaatgctcaacatcactgatcatcagagaaatgc

SEQ ID NO: 398388 - DNA, 331 bp, Homo sapiens
ttaagaaccagtgaattatgttcattctcatgatgagaagagaactgaaacagtgacagaaatggaactaaacaagtttcctgccacttctatatagacctaagataaataaacctctcagacataaataaaaattattattgaatcatctgctactatcatcagtctttgtctaactcagtattcttagttagcctactgcaataatccacttccatatttgtacccctacaaactattctctacacagcagctagaatgatctttctaaaactcaaatcagaggatgccatcttctcctctcttcatcccaccccatctcagggacagt

SEQ ID NO: 398389 - DNA, 626 bp, Homo sapiens
tcagtcccttgctcaaaatgattttctagcggttctcttttattgtacaaatttgggatccagactacactctcccatatgatccctgtctattcatatttgacttaattatttaaatttaatttgataggggtcagaagtttatgacaattttaacaagtacaacttactatttgttcatgttgatttaatattcataacttatttattttcctcatatactatttaccttttttcatacaacaattcagaaaggtgattcaaacaagaaacttcacagcaggactatgtatttcttaagccaattctgtctttactgttagaaaagaactgataagccaggcgaggtggctcatgcctgtaatcccggcactttgtgaggccaaggagggaggatcacttgagcccaggagtttgagaccagcctgagcaacatggcaaaaccctgtctctacaaaaaattaaaaaaattagcagggtttggtggcatgtgcctgtggtctcagctactcagggggaggctgagtaggggaggatggcttaagcccaggaggcagatgttgcagtgagctgaggctgcaccactgcactccagcctgggcaacagagcaagaccctgtctcaag

SEQ ID NO: 398390 - DNA, 246 bp, Homo sapiens
ttgctaacatgtctgtgtcccgcaccaaaatgtggtctgatccctgaggacagggacctcctaaggccactgccatattctcatgtcatctctgagacataagcagcctctgagttaagcactctcaatccacgtcactctgcttcccagctcagcaactgagctgtgtgtcatgagaaaatccaaacatctggacaggattgggccaccacaaaatcccagcctcaggctgctcgaccaccagct

SEQ ID NO: 398391 - DNA, 510 bp, Homo sapiens
ttcacttaattgtgaagttctctgtgaggctttccctgtccatcccctttaaaatttggcatgcttctctcccactcccttatctcttcactgctttatttctttccggaccacttactgccactgcttttccacactagaacttaagttccttaaggatagggagtttttcatatcttgttcactgttgtgtttctagaatttagagcagcaccttccccatagaagactttaataaatattgttgactgaattgaatgaatgtcattgaggttttacattttcttgattattaatgaggtagagcattaatgaggtggccactttttattagccatttgtgtttccttttctgtgaaatggctgctcaaatatattgcttatttttctattgggttgtttaatactttcttattgattgatagcagttccttgtaagttcagatttgttaattactcatgtcatacatatacttatactttgtgccttaactttaagctttttttaaa

SEQ ID NO: 398392 - DNA, 1079 bp, Homo sapiens
tagtgaaataagcttaggaagtgttactgttatgtagtggtttgaatctctatgcctatcatttattggcagcttgccttgccagtcacagtaatgcttgtccattagccgtttcccacagcatgctgaatggaacgaaagctattttgtttgtagctcttatttcttgaaaacttgcccaccagctttcacatttaatgccagccacaaggatgtgtgttttaaaatatccatggctcaaactggataaagaactgaagaatctcacctgaggaaacttggcctctgtctgcgctcagaaaaggagctgcacatctgaatccaatataactttaggatttttccatctttaacttccattggttcccttcaggggaagttcacttgaaaagcgatttgagctgaaaaccgtattccagatcaatttgcaatgcattgaggtattaaatgcattgcatttgatttatagccttgtttactctgcatcaccaaaccctagtgggattcagagagaagctgaccacagctgaaaatacccagatctggttcacctgaggagagctcctatttgtatggaaaagaataagacatttcaagagttcacaaataaatgcaagcaaataaaaatcacccattccattttaatcccttggtttagaaaatgccttgactaactatttttctcttttcggcttggttaggtgtcagggtatacttttttatacacttggccttagtctccaatgtatcctacaagttgagcagaagtattctacaaatcatacagaagagtgagctttaaagtttagacactagagagggaaaaatattaggaaggtgtattagctcagattgtcataacaaaatgttataggcgagtggcttgaacaacagatttattttcccacagttttggaggctagaagttccacatcagaatttggcagggtcgggttgtgatatgggttctcttcctggcttgcagatggttaccttcttgttatgtctttatatggttgggggagagagagaaatctggtctcttttcctcttaaaggaacacctaatgacctcattta

SEQ ID NO: 398393 - DNA, 332 bp, Homo sapiens
tttcctcctgcctcagacttttgggtggaaatagagtcacgggtggtgtgatgccatcatgtcactgtagcacaagcatggcaagcatgcgccactcatttactattctctccttctaccctcgctcactgcagacatcattcatcaatcatggcacctgttggtgcagagcctacacgtgacttaataattttcctcatcataaagatccaggcacctattaacaattattttcttactagctgaaatatttattttatctccactgtagcattttaaatcattatgtacatatctacaattaccaatgtattttattaaagattctttaa

SEQ ID NO: 398394 - DNA, 455 bp, Homo sapiens
ccttgtttattttctctatggacagacaatattggcagccaggaattatttataaatcaaagagaccaagaacacaattggtaaaacaaaagtttttaatcaactaaagtaattgctatgaaatattaaataaaataagaaacaaatttttgaactccaattacattaatactttgagctatttcaggaaactatgtcagtatttcagtagcaatttcaactatttcagggagggataacctgatactttgcttatatctggatacattttaaaagttaatgccccattagaggttaagaaatgaaactttgcggctaggtgtggtggctaacgcctgtaatcctagcactttgggagaacgaggcaggcggatcatgaggtcaagagatcaagaccatcctggccaacatggtgaaactccctctctactaaaaatacaaaaatgagctgggcg

SEQ ID NO: 398395 - DNA, 472 bp, Homo sapiens
tttaatcactccatctacaggcatgtgtctgacatgcttaaggcatgtctcaacagggttagaaatttgattatagtggttattgatcatattgacagagatgattttaataaatgagattttcacaaactgtctctaatcccactttttaaaaaggggatgggggctgggcatggtggctcacacttataatcccagcactctgggaggccaaggctagaggatcacttgagcccagaagttcgagaccagcttgggcaagatagtgaaaccctgtctgtagaaaaaaaatttttaaattagctgggtgtggtagtgtacgcctgtagtcttagctactggggagatagctgagaggatcacttgagctcaagaggtcaaggctgcagcgagttgtgaccgcactctagcctggacgacaagagtgagaccctgtcttaaaataaaataaaataaaataaaataaaataaa

SEQ ID NO: 398396 - DNA, 719 bp, Homo sapiens
taatgaattttttctggtgatgtaaatatatacttcctagcctatttatgaatttcacacatggagttttctaaaagcagggcgtagtggaattgaatcttctaagaaaaatagcaggcactttgagatgacaggaactggttttcttcctcttgtttttctcagtctgtgttgtaggtgctgtaattaaaaaccaggctttggaacaggtctccactggagtggtcttgagtagacttacaaatggctgcaatgcttccaatggcagttgatctgtgtgagccaggagtggggtagaaatctggggactggaatttcagtctgagttcaggattgctcatctgcaactggcaacaatggcctcttcctcttttccctgcacagaaagtggtctgtgaaattaaagtggagaacagctgctaggagctcatgctggggacccacagtggaggccacattttgtgatcccagagggattcccaaacccacctgacagctgctccaggccttctctgttctcctgatccctgccctgatggaggcctgacccatctggccagagtgccttcaactcccaccttgaaatacctgtcaccgcccacatccctggccttcctcaggacttagaggttgaggggcttgtctttcccgcttgggcccttccctcccactccttccgtcttctgggttcctgatacctgagcaccctcatacgattc

SEQ ID NO: 398397 - DNA, 369 bp, Homo sapiens
aaaatacattgtgggcaagcaccattgttgcatcaggttggtttgttggaccttgaactcaatcggctgacgaaagcgctatttttggctttagttgctctttccattgttatggtaaccttacaaggatttgtgggtccatggtaccgcaatctttttcggttccttctcctcttttcttacatcattcccataagtttgcgtgtgaacttggacatgggcaaagcggtgtatggatggatgatgatgaaagatgagaacatccctggcacggtcgttcggaccagcactatcccagaggaacttgggcgcctggtgtatttattgacagacaaaacggaaccctcacccagaatgaatgatattaac

SEQ ID NO: 398398 - DNA, 723 bp, Homo sapiens
gtctgaggctgttgtgagctgtgactacgctacagcactccaacctgggcaacagagcaagattcctgtcattcattcattcataattaaataaatagaaaatcatctctttcaaaaagttcacagtcatgggaacacttatacctaaattagaggtccaggccagttcatccatgaagcagcaactataactgaagcacgccaaattgtggaatggagaacatatgcccagtctaaaggatgcagccactacctgacaccagcactcccatgctctgggagaatgcaaactcagtggtgtcacagcttctgattttctgagaagacagaaactttgaggaatgaacatttaacctagagaaatcagggaatgcttagcaaaagagctaacatttgaatcgagtcctataaaggttacgcagagtgtactaggtgtgaatgcagatgccttatttcctgtggctacagcttagggtggaaagtggggagtggcaagataagcaactagagaggaaagaagccatgcacaagctaaactctatgcacagaacacaagaacttgttgaagaagttactctataatacaacatacaagagcagaatttatctgtctgcagaaaactctaccaaactcccatacagtgagatttcaaggtttggtagacatacaaagaggcaggtatcttgcttttagtccataaagctagactggacactactgta

SEQ ID NO: 398399 - DNA, 206 bp, Homo sapiens
tgggtgacagagcaagactctatcagaaaaaaaaaaaaaaattccatctaactctaccagactgagttcttcaagtaaaataaaaacaataaacaaacaaacaaacaacaaacaaaaaaaaaaccctgaggctttcaattatccagcacactctgaacatggttttagtaaatattggttgaaatgaatgtgaaataaatgaaaca

SEQ ID NO: 398400 - DNA, 448 bp, Homo sapiens
ttctttactcactctactgattcaaatggtaatctcttctggaaacttccttacagacatgcctagagataatattttaccagccatctgagtatctcttaggccagtcaagttgacacattaaatttaccatcacagtctccttactcattattggtttcttcagattttccatttcttcataattcagtctttccagaggtggaattcaccttgcttatcattagcatgtgtattcagtcaacattcaggcatgatggtgatgtcagaaaactacagattatccacatgggtggctgagatagtgatactttggcttactgatggttcagtgtatacaaactttgtttcaaactttgcattccaaaatctaaaataaaaaatactctggtcccaagcattttgggaacagggattctcaacctatattcagagagagggggattaa

SEQ ID NO: 398401 - DNA, 662 bp, Homo sapiens
ggaaactcaatgagatccaagacaagattaaaaatcataaaagaaaccacaaaagcaattcaggaagtgaaggaagagataaatttttttaaaatatcaatcagaacttctggaattgaaaaattcacttaagtaattccaaaatacaattgaaagcttccacaatagactatttcaagccaaaaaaaaagaacttcagagcttgaagaccaatcttttgaactagtccagttagacaaaaatttaaaaaagaatgtaaaaaaaaaaacaaaatatgggattatgtaaagtgatcaaacctatgacttatgggcattcctgagagagaagaaggaaaagaaagcaagctgaaaaatatttgatagaataattcaagaaaatttctctaatcatgctagagagatagaaaatcagacaaaagaaattcagagaacacctgcaagatactatagaaaatgaaaaccaccaaggcatatagtcaccagactatccaaggtcaatgttaaagaaaaatatcttcgcgcctgcatttagcagctagagaaaagaatcaaatcatctacaaggaaaaccaatcagattaacaatggacttctcaacagaaatcctagaagccagaagagattgaaggcctacttttagcttccgtaaagagaaaacag

SEQ ID NO: 398402 - DNA, 374 bp, Homo sapiens
agaatacacatgactacctgatttggtttcgctgtcagcagataccaccccagagttactctcatggtactgaaaggcatagtcccgaagcctctggttgagttcttgaaataagtagaattttatatttcatattagggagagatctggttgccaaaagtgacacggttattttttaaattcttagataaggtactggatcaagcctctcttttgataggtgtggtaaagaattatactaaagaaatagcatcttgatctataaaaaagtatatgatgccttttaatatattggatagtcaatctctttatgattctctatttctctgtataattagttatatgtatttctttatttttgaaaaattgttcag

SEQ ID NO: 398403 - DNA, 390 bp, Homo sapiens
tctgtgaattcctgacactgaggtttattctattgttattagaactctcatttctttaggctgtttgagtgcatttctgtaaggcatattctcagaaactccagtgaacttttgttcaaggcctgcaagatccttcctggagatcctcctctctgaacaatgtattgcttaggccaaaagagtaagatataacccccttttggctcatcttaattccagcaaactgaagataattcctgctacagaattcccagaaataaatttaccaaaggcttatttagctggatggcttaccttaatttgcccatctagttacgtgttgtcctattggacatctcatttctctatgtcttatcaaatctttgtgcgtgtgtgtgtgtgtgtgtgtgt

SEQ ID NO: 398404 - DNA, 163 bp, Homo sapiens
aatttttctatttcatgctgcacaattggaatggaaactgtcctaaacaatgtgtcctctttccaaaacacagagctccttatgaattctaattctttgagataaatttctgagctccagtgcccagcagcagggcttccctagagattgactaacgtcttac

SEQ ID NO: 398405 - DNA, 524 bp, Homo sapiens
aagcttttctgactggacacgatgctgctatttaataataaacttttttgatcttaaaagaatccagagcaggtcccccaggagcaggttcgtggcgtatcaccagtggggaaggcttttctcagaggctctgaggcagtgtctcaagaaaggggggaggctccgctttctcagagttgcagtgctcaccttgctgctgctgccacacatctgtatgcgccttcctggtacatcaccatcaccacaggctctcatgatagtgagggcttgactccttcgggaacctcagtctccccagctggaagtaggagccataatgcctccctttcaggcttgttgggacaaagagatgaggtcacataggtgaagcatcagcaactgtgcctggcacagaggaggccctgaaagttgccaagctcagcgttttccttcacatcagctctgctccaccccctttaattactcacttttataataattcaaaggtaacccatgaccatggtagaaaaattagcacatataag

SEQ ID NO: 398406 - DNA, 296 bp, Homo sapiens
tttcatctgaaaatttcaagcaactttgttcaacattaaattgacaatctaaactaacaagtcttttgaatttatgcatggtagtaaacattctctctattaactgtattacctaaggctaaacctaaaatttttaagcaaaattagaaaaatagtcttcactcatcaaaaaataaagtttgttacatttagtattttcccaataaaattggtcgttcttggttttttatttggagagtctgtgcaaaatgtcactaaaaataaattagcactagaaattatttctaaataccaaa

SEQ ID NO: 398407 - DNA, 265 bp, Homo sapiens
cctgccagtcaagatgtgaagtttaacctgaggacatgcagctgctgttagctatgccaccatccctctggcttatgagatagaaagttattattactttgaggattaaaaaagttatatccaagcattaattttttttgtttgtgtgcaggtggagactgttttcttactaaaatattcaaaacaccatgtcactctcctttctctttgtcctatggcagaaaacaccagctgaagagacatttgcaaagctccgtgcccctcc

SEQ ID NO: 398408 - DNA, 227 bp, Homo sapiens
tgtagctttatgtatgggaggaagtgttttgcatcctgagggtggtggcctgagctgtggctgagtctcaaggctcatggttaagcagtgacgcttctgtggcctgtgaataccacttgcaatgtggacacattggtgggtgagagttactctgagcagagccccaccgcctggttcaaaagttcatgggcccagaaagagcaatgatagtgtagagactcaagaga

SEQ ID NO: 398409 - DNA, 297 bp, Homo sapiens
ccaagttataggtgcctggccagcctgtgggttggtgcccctgggtcaggtgcccactcctcttgtgtgctaaggattctgagcatgacaagctgtgtaagcaacagtctggagtcactttccttggaggttcaggggagaggaggagaagataagggatgagaatggaatggttagttctagaagggatcagtgagcccgctgatgttttcctatgaaaccattgttgttctctccatcacaagtctttgctgagtgctaccctttccttcacacctcttccaaattttctgtctc

SEQ ID NO: 398410 - DNA, 208 bp, Homo sapiens
aaaaaagccgggggttgggaaggataacagctgctggaatactgggggaaggtatgagagggaacaggtcagaatgaagcctgaggctgaatggagcttcaggtgctgccaccctcataggtgtcaaccctaaggagacatagcggactcattagtatgcccagtgatttcttgattgaagttttctgttaactgcatcctaaggaca

SEQ ID NO: 398411 - DNA, 508 bp, Homo sapiens
tatttttgtcggttttgatagatgtttatcaattgattgattttttcaataaaccagctttttgtttcacattttttctgttttcaatttcatgaatttttgttattgtcatgattatttttcttcttctgcctgctttcagtttactctgttctttttctagttttttgagatacaagtgtatgttattgatttgagatcttttctcatttttaatgaagcatttagtactataaatttctttcccaccacagccttagctgtatttcctatattttgatatgttgtatttttctttcatttgtttaaatatatttttggattttaatttaagactttatattgtatccatagatcatttggaactgtgttgtatagttgaaatgcatttctattaatatattaattatattaatatatcttccttctttcttgatgtgcaaaattccttttttttctttattttgtttgaataacagttttagtaaacatttaatggtaagcttgc

SEQ ID NO: 398412 - DNA, 583 bp, Homo sapiens
gttgcagggatgatcaaggaaaaaagggacttggtttggagcagagaaggtggttgtctccttggagcaattcaggtggaaaataagatctgtggctgggtgcggtggctcacgcctgtaatcctagcacgttgggaggctgaggcggacgaccattttggctgccacatgaatggtggacggtggaaggagcctgctgcagaaacgaggagggtttgaactgagcagaggccagtggagacagagaaaggcagatgggttgcagatatatcttgagtcatacatatatcttgaattcacaggttttgagatctgatagaatgtgggagagaggggcaagggcgagtctgggatgactctgaagtttcttattgggcaacaacttggtaaaaggatggcgatgccacttcccaagcatatgaagaggggtgaagcggggcgagctgcaggacagtgtcgacaggatgtgtttgggggatgctgctttggaggttcctctggtacctgcgatggatctgactgtaagacaagtggatatccattccagagccagagacacagatttaagaagcatttgcaaaga

SEQ ID NO: 398413 - DNA, 466 bp, Homo sapiens
aaaaccacaaggaaaattccagacccagatggcttcaccagtgaattccatccaacatttagggaagaaataataccaatttacataaatttttctagaaaatagaggaggagagaacacttcccaactcattgtatgaagtctatataatcctaatatggaaacctgatgacaggcatctctgaaaaatctataggtactcacgcctgtaatcccagcactttgggaggccgaggcgggtggatcacgaggtcaggagatcgagaccatcctggctaacacggtgaaaccccgtctctgctaaaaatacaaaaaattagccgggcgaggtggcgggcgcctgtagtcccagctactcgggaggctgaggcaggagaatggcgtgaaccccagggggcggagcctgcagtgagccgagattgcgccactgcactccagcctgggcgacagcgagactccgtctcaa

SEQ ID NO: 398414 - DNA, 376 bp, Homo sapiens
ccaaggctcctaaaagctgtatccatcccagtagtaaatgttaacagattaaaactagcattgaaagagttttagaatgtcttctttcatctggatagcccaggatatttcaatccttaaacatggattaaagttatcttgaaaggccagcacatccacgcacctgggaggcaaatacaaatcacctaaggaggaagataccctcattcttgtcctcaaattagctctacaaatagttctttaaacacaatatccagctcagaaaggcaaccatacagacaacacaaatacaaagatggaagataaactaaaacatacccacagaaacaagggaaaacagaaagaccaacaagaacttgagatattagaaataaca

SEQ ID NO: 398415 - DNA, 443 bp, Homo sapiens
aatgcaaaatgtatatagaaaatcatgagttcctgtcatacaagaagtttgtttcatttttccttatactcacccaaccaaaggtggctaggaatgaggtgaataggtgagtcatgtatacaggtgttgttgataaaattgttatctattcccaacgctgcagcaagagatgagacatgattctgttattaaggctaaaatactgcatttctagcaatttttctcctttctgatatccccttacactcaagtgtgcagtacttaaaatagagcctggattgcctataattgtggcttttttcaccctttcttggctatgaaatagttcatttcatacctcttggctttatacaacgatgtattgaatttagagaaggggcatgtgctatcttgcccacttacaaatgtagttctcggccattctatgttgtcggattataact

SEQ ID NO: 398416 - DNA, 422 bp, Homo sapiens
atcgggggatgcagatgaagctccgggacatgcggttctctgtcatacgcacccgatcaaaggtggctaggaatgaggtgaataggtgagtcatgtatacaggtgttgttgataaaattgttatctattcccaacgctgcagcaagagatgagacatgattctgttattaaggctaaaatactgcatttctagcaatttttctcctttctgatatccccttacactcaagtgtgcagtacttaaaatagagcctggattgcctataattgtggcttttttcaccctttcttggctatgaaatagttcatttcatacctcttggctttatacaacgatgtattgaatttagagaaggggcatgtgctatcttgcccacttacaaatgtagttctcggccattctatgttgtcggattataact

SEQ ID NO: 398417 - DNA, 384 bp, Homo sapiens
cattgcacacattgaggtcatgcatagtggaagaagatatattttgaaaaggaaaagaaaagcaaaaatgttgaaataaaagaagaaaaagtaaaaccatctagaaatcctgggtaacatggacagagaaaagaagagtcatgcaggattttggaagtttgggcttaacagtcaagggaatggaaaggagagattcaggaattagctgcattctgcatagaatcaattgagaaggggttagagagagagaggattttaagatagtttgctgcattagggacatacttccctcagagactgtgtaaagatttgaattatggatcgtgactttatgatgtcttcactatgtgtctctgaatatgatccagtgtcaaaattcatcac

SEQ ID NO: 398418 - DNA, 263 bp, Homo sapiens
gggagctccccagaggtccccccacaacactcccacccttagacttctgcatatggctcaggcttcaaacctggccatcccttgttgccagggaggctgagcagatgaacatgtggctttcaatctctatggcaaggtgaggtgaagggggcagaagctggaggggcttctgggggtgctgccatatctagagagcttgttggcttgcagacctccagttcccctctgttactgcgtgtgaggctttgtggaagttattttga

SEQ ID NO: 398419 - DNA, 406 bp, Homo sapiens
aaaaattctgagtaatgaattagttattgagaccactttctgtctaaaccatgctaggtcctctatagggagttgaacaaaatgtacagcattgttctcccagaccaaaagctcagaggccaggcgaggtggctcacacgtgtaatcctagcactttgagaggccaaagcaggaagattgcttgagctcaggagtttgtgaccagcctgggcaacatagcaagactttctctctacaaaaaatttaaaagttaaaaatttccaggcacagtggctcatgcctatagtcccaggtactcaggaggctgaggcaagaggattatttgagcccaggagtctgaggctgcagtgagttatgattgtaccattccactctagcctggccaacagaataagaccctgtctca

SEQ ID NO: 398420 - DNA, 181 bp, Homo sapiens
tctatgaagtctctcgccctatagacaggtgctgaatgaacacagcttaggagtctgaacatgatttaattcaggcctgcaaagaggaagactcaccagcccttgaatgaacatcactgggaaaatagcggatatggtggtgtagtgagggacctgagactagaagcaggcagcctgtttg

SEQ ID NO: 398421 - DNA, 349 bp, Homo sapiens
ggcctctcaaaggacaggaggttttgctcaagcattgatttactccagcaccccaagagagagaaaaagcatcacttgtacgttttcaaagtcatgtactgtgtgtgtaaaaattgtaaaataaaatacagggcatcagagagatttctctatggctgtgtgtggttttggcatatgcttcaaggtcttttctgtaatgtggaatatttagggggaaaaatataagaaatgctgacataatggaaagcatttgggtactaggatcagccaaacccaagttcaaatataacttctgccactaactacttgtgtaaacataagtaaattagcctctccaagtttcaatgtc

SEQ ID NO: 398422 - DNA, 420 bp, Homo sapiens
tagatcacctttaccaccagtgggctttggagagcttatctggtgcatgcaacagccacaaaaagcatcctttctgaggagtgggcccagccttcaagaacctttggtactatgggaaataagaatgtaccatttccagaaaacctggctgggaactcccctcttccacccgcatatctgccctgcctcccccaacacaggctcccctccaccgacccccaagcccccaagaaacgctgccagcaatggagtcaaatgccccacgtctgtggtccttgagtcgacaggacacactcaaatcagagccctcacccccaatgacaggcaaatcagctgggcctgtgtttctcctttactcgcctgacctgccccaggcaaaggacaccaggacaagacattggtatccggcagggctgcttt

SEQ ID NO: 398423 - DNA, 390 bp, Homo sapiens
aaaaaaagaaagtttttctgtagtaacattttcacaactagggcctttaagactgaggaaatactccaagctctgagcaaactcagtaagtataaatccatatgtagacataccacagtaaaatgcaagatactaaagactaatacaatattttcaaatcaaccagagatggaaggcagattacctgcaaaggaaggacaattactttatcacagacttctcttcatcaacgagaacagacaatacaggaataacatctcccaagttgtgagggagactaacagatgacatgaaattctacgaccaaataaagcataattcaatgggcagcagttaacagaattaagctgtttccagacatctatggagagatttaactcaaagatgtca

SEQ ID NO: 398424 - DNA, 827 bp, Homo sapiens
tgtagggcagaatggctaggcactggcatgcccattcatccccaaatcgggccttgttgaatgtggcacagctccagctctttccaaacatgactcctgccagtccctatgctgtgagataagaatgggctacacctaagcaaagttttgtaggcagctctcccttcctttatgtgcttatgcaaccttttcagcacgttggtacctacgtgtcagggacaatgtgtgattttggtggagatgcttataatccaaagtattttcatggtggttccccaaacaacactaggctcagatttcagtttatcctcctaatattaatgttgtattcaaggatagatttttccctcccaggtgtgacttctactctttctgctccccctcccacaagcagctggattttgcaaaaactcatcaagctacaggttgtcgaggcctaaaacattcttatttctgttgagcttatgagaggtatgagcataattgtgtttttaggtagtgatgtggaatgcaaattgaattttcggaaatactgggaagtacttctgaaggaggaggtagagagaaaaaacttttcattgtaactgtgacctctcccttcttcagcttaagctaaatttagtgatacatagaaaaagttggggcttatgatattgaattcatttcccaagcatactcattgtttgtaagaaatgcaacaaagttttcattttttaataactcggcaaaggtactgggtacaggggacccctttgccctttcattgagaccatttacataagtttttgtagtttctgtaacttttattattttatgttctctctcat

SEQ ID NO: 398425 - DNA, 500 bp, Homo sapiens
agaaagaactaagaacactggcttgggagtcaggatacccaagattcctgtcataaccgtggtgtgtgaccttgaccaagcctcatttgtatctcctgtgaaatgaaagggttattagacctttaatatctaaggttctttctggctacaaaagtctttttctacaaagtcttgtgttatggtttgaatgtgtccctcaaagttcatatgttgacctccaatgcagcagtattgggagctttaagaagtgtttaagtcacaagggctccaccctcacgaatgaattaatgccattatcttgggagtgggtttgttatcttggggctgggctccttgtaaaaggctgggtttggccacctcttgcactgtctctctctttacccttctgccatgggatgacatggcatgaaggccctcgccagatactggcacccagatcttgtacttcctagactctagagctgcgataaaataaatttatcttctttgcaaaaagccta

SEQ ID NO: 398426 - DNA, 1163 bp, Homo sapiens
acacaggttggagcagagaaagaggaaacatagaggtgccaaaggaacaaagacataatgatgtcatccaagccaacaagccatgctgaagtaaatgaaaccatacccaacccttacccaccaggcagctttatggctcctggatttcaacagcctctgggttcaatcaacttagaaaaccaagctcagggtgctcagcgtgctcagccctacggcatcacatctccgggaatctttgctagcagtcaaccgggtcaaggaaatatacaaatgataaatccaagtgtgggaacagcagtaatgaactttaaagaagaagcaaaggcactaggggtgatccagatcatggttggattgatgcacattggttttggaattgttttgtgtttaatatccttctcttttagagaagtattaggttttgcctctactgctgttattggtggatacccattctggggtggcctttcttttattatctctggctctctctctgtgtcagcatccaaggagctttcccgttgtctggtgaaaggcagcctgggaatgaacattgttagttctatcttggccttcattggagtgattctgctgctggtggatatgtgcatcaatggggtagctggccaagactactgggccgtgctttctggaaaaggcatttcagccacgctgatgatcttctccctcttggagttcttcgtagcttgtgccacagcccattttgccaaccaagcaaacaccacaaccaatatgtctgtcctggttattccaaatatgtatgaaagcaaccctgtgacaccagcgtcttcttcagctcctcccagatgcaacaactactcagctaatgcccctaaatagtaaaagaaaaaggggtatcagtctaatctcatggagaaaaactacttgcaaaaacttcttaagaagatgtcttttattgtctacaatgatttctagtctttaaaaactgtgtttgagatttgtttttaggttggtcgctaatgatggctgtatctcccttcactgtctcttcctacattaccactactacatgctggcaaaggtgaaggatcagaggactgaaaaatgattctgcaactctcttaaagttagaaatgtttctgttcatattactttttccttaataaaatgtcattagaaac

SEQ ID NO: 398427 - DNA, 320 bp, Homo sapiens
ccaccaaagaactcccttatgttacttttttgtatttgtgtccctgcctcccccatctccacttctttcccttgcttactcctaatttgttctctcatttctatagttttgtcatttagagaatgttataggaatggaataatacagcatgtaaccttttgagatggactgttttttcactaagcataatgcccttgacattcatcaaggttgttgcatgcctcgatagttcatatctttgtattgcagaattatattgctttatatggatgttccagagcttgttcaaccattcactcattaaaggacatttgagttgt

SEQ ID NO: 398428 - DNA, 339 bp, Homo sapiens
agacccgagtgcctttttaagttcaggttttctcctccatagtgtcaggaatagaaggtctgagttttcctctgagccattatgcagagcagcctttggtcaccaattacagcaaaataaacattccttacctgctccagttggtaagccgtgctttggcagagagccctcagagtcagagaaatgactgaagaaatgcttagattacaaagcactacaagcagctcacaagtggagcacttaatgaaatgatttttcagtaaagctttacatcagaaaattaaccagagaccttataaccaaacacacaggttttcctctttttgttcacatttctca

SEQ ID NO: 398429 - DNA, 479 bp, Homo sapiens
atttttagtagagacggggtttcaccgttttagccgggatggtctcgatctcctgacctcgtgatccgcccgcctcggcctcccaaagtgctgggattacaggcgtgagccaccgcgcccggcctaaacccatgttttaactgagcatcaggttggggtccaaaccaagaagagctgggcataggagttactttctcagtgctctgagagtagcacttttctacataccacaggtgtactgttatggaggcctattttgtagggtaattttgcataaagtttctgccccgagactcttgaggcattatcctaccatttattcagacccaggagacaactgctgatgtcatgaggcacattatgggcttccctggaaccctaacccagcaaccagcttttggtgtctagtctcacactcattttctcccacttgacttgtgttctcaaccagagcgctagcgaggggaactgtagatgag

SEQ ID NO: 398430 - DNA, 261 bp, Homo sapiens
gtttaagtccaatctaaattttcttttatttagctaagattttcttctatgtcagatgacagttgagtcttctcaatgaaggtgaggcttatagggatgaattcactgcaacttccatcccccaggttcaagtgattctcttgcctcaactattggggaggctaaggtaggatcacttgatcccaggaggcggaggttgcagtgagttgcagtcacacccctgcactccagcctgggtgacagctagaccctgtctcaaaa

SEQ ID NO: 398431 - DNA, 483 bp, Homo sapiens
agcttcttcaaagagtggggatccacactggcaccactttctaggcccttttcccttcctccaccaacttcagtctggattcttgccccaccctccgtgacaactgcttttgcttttttctcctgtgggtattaccactggaatttctgctgccaactccaaaggatgccattctgtcctcatccaatgggacttgtcagcagtatttgccatgattgactgttctctccattgtccaagtaatcttatcttgaatcctatgaagcaccttcgttcttcccttctttctcttctctgaaggctgattctcttcctctgggccatttgaaagcttgcttcaagggtcagtctttggcagtctctttgactttacacattcttcttaggaggtgccatccacaaccatggcttcatgtgatttaatatactcagatcacacacaggttcttatatccagcccagacttctctgaattctaaacct

SEQ ID NO: 398432 - DNA, 210 bp, Homo sapiens
tgaatttatcagtgtatcaaagagaagttatcctggacaagcgggtaaggaagacttaagattattgcaacagggatcaagactattgcaagaggagagagagagagaactgaactgtgctgaaacaaaagaagagttattgataactggggtgagcaagtggaaaagtattagaaaacttaattgggtaacgttggtcatcctgacgag

SEQ ID NO: 398433 - DNA, 551 bp, Homo sapiens
tcctctccttacaaagccactggtctcatcaggggccccaccccaatgacctgatgactaggtctctgctcctagttacatcccaaaggccccacgtccaattaacatagaaatttagggggttaagcttccaacacacgaaatgtaggggacacattcaatccacaaaaatatgtaaaggcaatttatattcaataaggcaatacaaaaaagtaaaattctgaagacaacagttatttcccaatgccttctgagtcactctttgtggttaagataaacaccgtggtatccaggctttggtgcaatttcatttcctcattagctattttttacaaacactgctaggcttcccgatgctcacacagggctggacaaacagacgatcagagaaacaccatacagtgagcctgggaaatgctgaatgtctatgtgtgcaacaaggcatgcgagcaaaaacaaaaccgagatgggaagggattgcaggaggggaggaaggggctgtatctgccacgtatctacacagccgacattttaattttttttagacagcg

SEQ ID NO: 398434 - DNA, 327 bp, Homo sapiens
attcatttatgttttatatgccctttaaacaccatagcctgaagttaatttaatataatatttttaatagttttgtgcatgaaacaaagttttgactgtttgactgtaacccattacctaaagtcaggtgtggaattttccacttgttacctggagtgcatcatgttggcattgaaatagttttggattttggagcatcggatttcagatttttggattaaggatgttcaacctgtattagatagcctggtgcttttctcctcataatcactccaataataatgaaaggataatcataaagatgacaacaattacaacaaagatgat

SEQ ID NO: 398435 - DNA, 403 bp, Homo sapiens
ccactaccggtttccgcgtctaggtggtagtggtcctccgggcccaactgtcttttcttctatctctttgtcttgtgtgtttatttctacgatctcttgtctccgcacatgaggagaaaaaccacagacccagtagggctggagcctatgctcttatttcttctgagagtgctggcatcgatcagtcccaagaggctctgggtgccttgccacagtgacatttctagatgcaaactacctggccatggcaatgagaggaggtgaccccacccagatctcctcggccctgcttgagagcactcagcggactgccctctgacctctactggaacaggaaaaggatgaagccttctgtgctgtgtcctcctgcacaggcttctaggaaacttgggaatcctttatt

SEQ ID NO: 398436 - DNA, 500 bp, Homo sapiens
cgagggcgcgcactggatcccaggctcctccgagagtgcggcgacctcggggctccgccggcgccggaggtggctctgagggcagggacgtgttggacacgctgactttgtaggctccgccaagaggcgccgcaggaggacttccaggattatgttgaatggaagtggtgagagtggacatccttatcttatttctgatgctagaggaaaagctttcagaggcatcctttgggaaaagcgatcaccttctccagatccgcattcaggtgatctttgccaatctctgactgagcctggtggcacatcacttctatctggccttgacctttgaggcagcaggatgactgcagggagtaggcagtgcttccatctgtgaatcacaaagcagatcaaccccaaagcagccacctgcacatgtggtacatcttctgcacctccatagacacttttacctaaggccagatgcatgtacaataaacttaaatccattgacttttcaa

SEQ ID NO: 398437 - DNA, 538 bp, Homo sapiens
aggcttgtcagagtttccaagctaactacattgtatatctcagatgagagaaaaagggtttctctcgttaattaagaaattcctttggagattaatgaggacagaatgcaggatgtacaagagaatattctcaaaccaaacagcttttaacctgggagaataaagagacccaaagggctagtctttgtctagagcagagaaaacacagaagaaaatttaaaaatattcctccattccaatatttgtataatcttgaggaaaaggcctttttaagcaaaagacaaaatctttaatccagaggatatagaagaagaaaaagatttatgtttggctacataaaaattaaaaacagcatagtaaaacatgtgactaaaatgttaaaaagcaaagagcattctggggaaaaatatttgcaacacttaagattggcacatatatttcttacaagtaataagtccaacaacttaataggaaaattggcattctactgacactcgtttgaatttgggaaaaaagtttttttaaaaagaaaattggc

SEQ ID NO: 398438 - DNA, 428 bp, Homo sapiens
aaacacttcatatacattatctttttaaacacaaaatgtactattaatccagttttacatataagaaaactgaggctcaaagaggctaagtaatttgtatgtgaacatgctttacactatgtaaaacaccttattagtagatatcactattattaagaacctatcagccggagaggaagaattggccttttatctttctaagatgcacagttgtctttctgtttaatggttttttaaaaatccccctgtgacaagctccagaggacaagtaatttatttcttgtggtgtatggctctctaaatgaattaattgataggcatccccttgtcagtctcagggatgtggaaataaaacagacatgagatgttttttaccaaactaatttgtgctttaaacacataaataataaatatatatatattaaagt

SEQ ID NO: 398439 - DNA, 537 bp, Homo sapiens
acctcaagtgatccacctgcctcagcctcccaaagtactgggattacaggtgtgagccactgcacctggccaggcgactgctttttgtaataagaataataatcccttatttatgtaatgctttgtaatttatcaagtgcttttacataaactctcataattaccacaacaccttttgataaataaatagggttatattaagaatctttgaccagtgagcagaaatcacttacacagagtcacagagcaagaaaataacaagccaggactagaacctatgtttctggctgctggtccagtattcttggtactatgttacatatactgtcaacttagccagcttcccattcttaaacctaactgcagatttactggactactttttaatggtctggtcactgaaggacttacttttatgaatattacttagtgctgtattattcagggttgcacagacttgatagctattcatgtatttgaatagccatcttttctttctttgaggttgtatcattcctttctggtagcttgtgttgc

SEQ ID NO: 398440 - DNA, 448 bp, Homo sapiens
cgccatccaatgtccagcttcagcgtaggacttggtgtccgcaagaatgaggcccacatccaggagcaggccagtttcacgtgaagcccagggctgaagccagaggccacgcagcaccacgtcggacagtgtttatctgtgctaatcatgaagtaacacaagtgaggtttaaaaatactacgcttatttcatttcagtgcaggagggagaaagaacacacagtctgtatgagcaactcaaatcaaaaataaatgaggcaaaagagtcaccaaaaatagtgtggcattagagacagcagcctgcgtggctcggccagctgtcctcggctctctgccggcaagcagcaccacagagagggctgcgaggatgccttgatggtgtttactccagagaagatgaacctgatgcctgcgatctgatgagaagtcacagttaccagcagggaagg

SEQ ID NO: 398441 - DNA, 324 bp, Homo sapiens
agcaacactttgggtggccaaagcaggaggacatttgaggacaggagttagagaccagcctggacaacatactgagaccccatccctaccaaaaaaaagtaaactaggtcatgagggttccacccccatgaatgaattaatgctgttatcgcaggagtaggttagttattgcaggagtgggctggttatcgcagagtgagattctgactaaagggtgagttcagcccaatttgcttgctctgtcacatgcttgcttctgccttccatcttccaccatagaatgaccctcaccagagcctggtgtcatgcgcttggacttcccag

SEQ ID NO: 398442 - DNA, 449 bp, Homo sapiens
tcacccccagaagaaatcctacacttacgggttttcccttgtgtataatacattgcttttctcttgctgctttcagaattctttgtctttaacttttgaaattgattatgatgtgtcttgatgtgggttgctttagatcagtcttattggtgtcctttgggcttcctggatgtggatttgtatttccttccctgggttgggaagttttcagtcattataggtatgcgttgcttaccaacagggatacgttctgaaaatgcatcagaaggtgaatttgtcattgtgtggacatcatggagtgcacttacacaaatttagatgggacagcctactacacagctaggctgcatgctatggccactgtgctcatgtggtctgccattgactgaaatgttgatctgcaactcgtgactgttatttctttggataagctttccatctcttctcac

SEQ ID NO: 398443 - DNA, 295 bp, Homo sapiens
tcaataaagaaaatagataatcacattgaaaaatgatggttatagtgaaaagtaaactatataaggtaataagactaatttcttgtgtggctcataaactggggctttaaagagtctaaatatttttgagtaatagcataattggaataagcctagagtccccaaggtgacaatttcaagggacaacacacttaagtaattagaattttggaatgcatgttttaaaaaatcagtttgcttgatttaatgagatatatttattcattcattcaaccagcctttattgaatgactac

SEQ ID NO: 398444 - DNA, 402 bp, Homo sapiens
cttggataaatgttttcagtgtttgtagcaaactaggaaaaccacttatacacatttgtaaaatcttccaagcatttgtaatttgcttgaccctgaacatgttatcctgttcaatgtgatttctgcacagggatttttcaatcaaaataagacatatgaaacccagaaacacatttcacaagcactttagagtttcgagatgttttttgtggggcacacagtaaataaggaaatgtcattttctccatttctttcgtgatacgtcacacttttaaaagaaattatttgggatggatgaagagagaagagtttggagaaagggaaggtttttgtgcaaatattataaaaccaaaaaaggttagtatcagggtcaggttagcctatagcactgtgaaagagaaa

SEQ ID NO: 398445 - DNA, 859 bp, Homo sapiens
ggcgccaggcccgctggggcaggtgtcccgtggaaatcgacggaggggctgccgtgggcggccgtgacagtcacagagaggggaagagaaaacagggacggtgacacacacagagagaaggaagagcagacagaggcacagcaggagacccccccaagcccgaggaggacagcctggggatgcagagcacatgccggccccagtggagggaaccgatttccccggagccgggaggcaagcctggggctcccctgccctgtccctgccggtagcccccccagccgtctccccaccatctgtcccgctgccgtcccaccaggtgggagccatgttcctgagcccgggcgaggggccggcaaccgagggtgggggtctggggccgggcgaggaggcccccaagaagaagcaccggaggaaccgcaccaccttcaccacctaccagctgcaccagctggagcgggcgttcgaggcctctcactacccggatgtgtacagccgtgaggagctggcagccaaggtgcacctacctgaggtgcgcgtgcaggtgtggttccagaaccgccgggccaagtggcgccgccaggagcggctggagtcaggctcgggtgccgtggcagctccgagactccccgaggccccagcgctgccgttcgcccgccccccggccatgtcgctgcccctggagccctggttgggccccggaccgccggccgtgccaggcctcccccgcctcctgggcccgggcggtgtggagggtctcgggctcatgcttgtccacttgagattgtcgctggagaggtctcggtgtgccggatgcgtctgaagctggcgctgatgggttcggcctttggcaccgaag

SEQ ID NO: 398446 - DNA, 2047 bp, Homo sapiens
ggcgccaggcccgctggggcaggtgtcccgtggaaatcgacggaggggctgccgtgggcggccgtgacagtcacagagaggggaagagaaaacagggacggtgacacacacagagagaaggaagagcagacagaggcacagcaggagacccccccaagcccgaggaggacagcctggggatgcagagcacatgccggccccagtggagggaaccgatttccccggagccgggaggcaagcctggggctcccctgccctgtccctgccggtagcccccccagccgtctccccaccatctgtcccgctgccgtcccaccaggtgggagccatgttcctgagcccgggcgaggggccggcaaccgagggtgggggtctggggccgggcgaggaggcccccaagaagaagcaccggaggaaccgcaccaccttcaccacctaccagctgcaccagctggagcgggcgttcgaggcctctcactacccggatgtgtacagccgtgaggagctggcagccaaggtgcacctacctgaggtgcgcgtgcaggtgtggttccagaaccgccgggccaagtggcgccgccaggagcggctggagtcaggctcgggtgccgtggcagctccgagactccccgaggccccagcgctgccgttcgcccgccccccggccatgtcgctgcccctggagccctggttgggccccggaccgccggccgtgccaggcctcccccgcctcctgggcccgggcccggggctgcaagcgtccttcgggcctcatgcctttgctcccaccttcgcagatggcttcgccctggaggaggcgtccctgcggctgctggccaaggaacatgcacaggctctggacagggcctggccgccagcctgagcctgccgccctcccgggccccctcctcggcccaacccgagaaccggggacgtgccctggtgacagccaccacgccttggcctaggccgaggtcatggagcaaccgtggtcaggccaggccaccaccactggggagcgggaccagagagacaggctgctgggttccctgcccccatcccgtctcccaccccatcgccacccctgtcagcccattctatagagagggaaaccggggcttaggcaggaagccaggtccccaaagtcgcacggccaggagtggatggagctgcctttcagacccatcaccggtcctaccgtccggggcacagcgacaggttctggagagagggtgggtcccgggccaggtgctggtgggcctccaggtggaggcgggctgatgctgggtgtgtcgtcatcgtcagaccgttcctcacgtccccacagaccccaggccctgtgcatgtccccagtggaggcatggccagcatctgctctgtccaacccagtcgcatcgcccaagagctctgagcaaggaggctgtcgcggggccgagaacccgctgggactggcaagcacggctggcccagtgcagcaggagggggccctgaggcatgggatgggacagtctgggccagcgccacctcccgggacagaagtgcggcaccagggcaggagctgcagtagctaccctccccgtctccagcctgggctccccagatcactcccagatcaccaggtcaccccatctctaggcggcacctcacacaccagtcctgtggtccaacgccccgccatcacccaatgtcaccgcacaccaggcagtggggacacggcagtaagcacaagaaagatttttttttttaaagctaaaccaggccaggtgcggtggctcatgcctgtaatcccagtgctttgggaggctgaggtgggaggattgcttgagaccagcctgggtgacacagcaagaccccatctccacaaacgtttttaaaatgtgccgggtgtactggtgcacacctgtcatcccagctacccaagaagctgaggcaagaggatcacttgagcccagaaggtcgaggctgcagggagctgtgatcacactgctgcactccagcctgtgcaacagagccagaccctgactcaatacaaataaaaaacaaatct

SEQ ID NO: 398447 - DNA, 2406 bp, Homo sapiens
ggcgccaggcccgctggggcaggtgtcccgtggaaatcgacggaggggctgccgtgggcggccgtgacagtcacagagaggggaagagaaaacagggacggtgacacacacagagagaaggaagagcagacagaggcacagcaggagacccccccaagcccgaggaggacagcctggggatgcagagcacatgccggccccagtggagggaaccgatttccccggagccgggaggcaagcctggggctcccctgccctgtccctgccggtagcccccccagccgtctccccaccatctgtcccgctgccgtcccaccaggtgggagccatgttcctgagcccgggcgaggggccggcaaccgagggtgggggtctggggccgggcgaggaggcccccaagaagaagcaccggaggaaccgcaccaccttcaccacctaccagctgcaccagctggagcgggcgttcgaggcctctcactacccggatgtgtacagccgtgaggagctggcagccaaggtgcacctacctgaggtgcgcgtgcaggtgtggttccagaaccgccgggccaagtggcgccgccaggagcggctggagtcaggctcgggtgccgtggcagctccgagactccccgaggccccagcgctgccgttcgcccgccccccggccatgtcgctgcccctggagccctggttgggccccggaccgccggccgtgccaggcctcccccgcctcctgggcccgggcccggggctgcaagcgtccttcgggcctcatgcctttgctcccaccttcgcagatggcttcgccctggaggaggcgtccctgcggctgctggccaaggaacatgcacaggctctggacagggcctggccgccagcctgagcctgccgccctcccgggccccctcctcggcccaacccgagaaccggggacgtgccctggtgacagccaccacgccttggcctaggccgaggtcatggagcaaccgtggtcaggccaggccaccaccactggggagcgggaccagagagacaggctgctgggttccctgcccccatcccgtctcccaccccatcgccacccgtcctgctggcagcggactggcccccagtgtcaggcaggaggtgacccaagtattctcaggccaggtgcggggacctcctcccctcctggggcctcagtctcctgtctgttaattgggcgtgggggcctccgaggttcgagggctgcgaggctgtgggtggcgggaccgctgactctgtaagatgagtgtaaatctctctgcttctcctaatccccatcagcagagctgcccactctccaggctcccagtcccctggaaataacaaatagcagcagctcccgcgagcctggtctcctctcaccgtgtgctcgccatgtgagcactcccctctccgttgtgccctggacctcgggcacagctgtcagcccattctatagagagggaaaccggggcttaggcaggaagccaggtccccaaagtcgcacggccaggagtggatggagctgcctttcagacccatcaccggtcctaccgtccggggcacagcgacaggttctggagagagggtgggtcccgggccaggtgctggtgggcctccaggtggaggcgggctgatgctgggtgtgtcgtcatcgtcagaccgttcctcacgtccccacagaccccaggccctgtgcatgtccccagtggaggcatggccagcatctgctctgtccaacccagtcgcatcgcccaagagctctgagcaaggaggctgtcgcggggccgagaacccgctgggactggcaagcacggctggcccagtgcagcaggagggggccctgaggcatgggatgggacagtctgggccagcgccacctcccgggacagaagtgcggcaccagggcaggagctgcagtagctaccctccccgtctccagcctgggctccccagatcactcccagatcaccaggtcaccccatctctaggcggcacctcacacaccagtcctgtggtccaacgccccgccatcacccaatgtcaccgcacaccaggcagtggggacacggcagtaagcacaagaaagatttttttttttaaagctaaaccaggccaggtgcggtggctcatgcctgtaatcccagtgctttgggaggctgaggtgggaggattgcttgagaccagcctgggtgacacagcaagaccccatctccacaaacgtttttaaaatgtgccgggtgtactggtgcacacctgtcatcccagctacccaagaagctgaggcaagaggatcacttgagcccagaaggtcgaggctgcagggagctgtgatcacactgctgcactccagcctgtgcaacagagccagaccctgactcaatacaaataaaaaacaaatct

SEQ ID NO: 398448 - DNA, 207 bp, Homo sapiens
tataaacatacaggaatagaacataaatgacttattgctacaacagtaataaaataatacatgatctgtgttttcagaccttacggccagtctagatgatctgatagtatgaatcttagaataaaatttgaagctaataaaataattccagatagaatagatggtatttcttattgggacctaaaaaagtcatttataccaaggagg

SEQ ID NO: 398449 - DNA, 338 bp, Homo sapiens
aaatttaccacttttgcatacttattttcattttattctattttccagtactagtaccatatatttatgttgtatagttgcaggatgtgctgctattttatatcccttcttttagaaattgaatcaatatcttccatgttaattttagactttttaaaacttttttatttcacaaattataaatattcattcgaaataacttagatgatacacttaattatgaagaagcaactgagaatgtatgtgtaattttactgcccagagatagatggacagataaacagataggtaggcagatagacagatatgcatacatacacatatatacatttggattg

SEQ ID NO: 398450 - DNA, 446 bp, Homo sapiens
atggccctaacagacatttacagaaatttctatccttaaactgcagaatatacattcttattcttattacatggaacattttctgagatagactgtatgataggccacaaaacaagtgtaataaatttttaaaaattgaaattatatcaaatatcttctcagaccacaatgcaataaagctagaaatcaattctaaaaggaactctcaaaactctacaaatacatggaaagtaaacaacctgctcctgaacgatctttggatcaatgatgaaatcaaaatggaaactaaaaaatttttcaaaataaataataaccagtgacacaagttatcaaaatatctggaacacagcaggagtgctatgtggggagtttatagtgctaaatgcttacatcaaaaaggccaaacaatcacgaattgacaacccaacatcacacctcacagaact

SEQ ID NO: 398451 - DNA, 697 bp, Homo sapiens
ataaatcagcttgatctaattgacattaatagactaatccactcagcaacggcagaatacacatccttcacaagctcaaaggaaacattcaccaagatagaccacattttggaccgtaaagcatgtcttaaaaaatttaaagaatagcagttagacaaagtatgttctcaaatcacaatggaattaaactagaaatcagcagcagaaagacagctggaaaatcccccaaatgtttggaaatttaacaacacacttgtaaataacccacagttccaggaagaattcccaagagaaattacaaaatgtttcaaactaaataaaatgaaaatccagcttaccaaaatgtgtgggatgcagtgaaggcagtgcttagagggaaatttatagcattgaatgactacattagaaaagaagaaagaacgaaaatcaataaagcttccacctcaggacactaaggaaggagagcaatttaagcttaaagcaagcagaagaaaagaaatataaaatttagagtagaaatcaatgaaactgaaatcagtagagaaaatcaacaaaaccaaaagctggtactttgaaaagatgaataaaattgataaacttctagcctggctaaccaagaaaaaaatgagagtcacccatataacagatgtggagatgatttcatttgaacatgtgaggtagtatatttggccttgta

SEQ ID NO: 398452 - DNA, 358 bp, Homo sapiens
actatattatactgttttttgtttatgaagtataagaattaatgctaaacttttcaatctagacatcaagctatatgtaagacttgatatttgtaggttcattttgtattacttttcaaaattcaagtcacaggtttctgttttatttcaaaaagatcttttaagaacaggaaataaaatacagcggttcaaacaggccactttttggcaggtatcttgaaataaaatcctatattttaccagcaagatttctgggggaatattatgactttttatctgctttcctgtacccttgggttagagaagtttttccatgtgtgccaattttttaataaaaatgaaacaaaattcaatataa

SEQ ID NO: 398453 - DNA, 489 bp, Homo sapiens
taagaatgtaccacatggttagcacgaacctacagaagtgtattctcataatgataaaaagaaattaaaacttaaaacacacacacacattacaaaagaaaagaaaaacatttgtaaaactcagagcctcagacaaagaggacttatggtctattatgccaggcagtgggacatcaaagctcccaaagacccgagtccacctctctctaacagtcacagaccctcactgcagactaagagaaagacccccgagtcacctctccaacagtcacagaccctcactgcagataaaagcaggggagtgtcctcactttcagccggagttttctaactcctgtaatgacctcaatgacaaaaaatcatggtgcaggatgtttactaaaaggattgacttgtaacaactgcaaatattcaaaatatatcactattctaaaactgtctcagtattcaccatgactttaatataagaatcatataatggacgttaac

SEQ ID NO: 398454 - DNA, 241 bp, Homo sapiens
atggtggtgagctccacagcttacagaagtcctagtggtgtttagcaggatgttttcctaaatcttgaacatggctttgaggaattcacagtctgacctccactcacttcttcaagctcatctttacatcccacctccttagccactcacacatcattcttcatccagatttatacacttgtggaccctaaaagtaccattttctctctagcccctatgtctttttactcaagtaaacctg

SEQ ID NO: 398455 - DNA, 281 bp, Homo sapiens
tcctgagtagctgggattataggcacatgccaccacacccggctagttttttgtatttttagtggagatagggtttcaccatgttggccaggctggtctcgaactcctgacctcaagtgatccacccacctcggcctcccaaagtgcagggattacaggcatgagccacctcgcctggcacccctcaccttctgaaaggagacagacatgccaagaggaagtttacaagctcctcgggctgccctgtcttgttttctggaactgtcttggtgtgagtctgg

SEQ ID NO: 398456 - DNA, 749 bp, Homo sapiens
tctcttgctggagtgcagtggtgcaatctcggctcagtgcaacctcccactccctggttcaagcgattctcctgcctcagcctcccaagtagctggtactacaggtgcccgccaccaacctggctgtataatgaaacatgagtaggaattagagaagtggaaaggagaagggatagttttgttcgttgaggtaaaaccatatccagagatctttatcttctgaactttggcatgactaccttgagtggttgttgtacaaatgtttccggtgctgatgggagagaaggagatggcacacacactcacaaaaatgagtagatggcacagaaatggtacaggttctatatttaaccatgcagtatattggggccccatactgttgtagaaaatgtgacttgctaggaattatcagaaggtttgttcttatattactcaactttcttcttgggtactcccaagatatggtagtggcaaaataaattgagtttaattaaaaaatctcaatagcttggaataacaacgttttagagcatggcacctttcctaaactcagttgtctaatctgctctagaggatgaatcactggctttcagagggaaaaaaacaatagagggtctggggcatacccagggttctagtgacttccaagggtgtattagtccattctcacactgctatgaagaaatgcctgagactgggttatttataaaggacaggtgtttaacggactctccgttctgcattgctgg

SEQ ID NO: 398457 - DNA, 360 bp, Homo sapiens
tgggggaaagggggagagggcgaggctggcgaatagggctggtcggcgagagtgagagaccgagggagaagtgctgggcctgggagccgaaaaggctgagtaggaggggagggatgtgggagctggaagtggggtgggaatagcggatgacccgaggcgggagcggggagatagtgggggatcttggggtgaaagaaagcgatctgacctcaaacagacgctcaggaattattaaatgaattaatgtgggtggatgaatggctgcagggaacagttggggagaggtaaattggcgggatgagagggagcagggactgcttcaggtcgacgcggccgcgaatttagtagtagtagtcgacc

SEQ ID NO: 398458 - DNA, 368 bp, Homo sapiens
acacatccttaagaagcaagcaggtgactgtgaccagggactccatgtgggaacatggcccaggaggggtgcagagctgagggagaagtttggctcagcaaacctatgggaaaatagcctgagagggttccatgtgactgccgggggcaggggtggacagtgggccctccagacccttcagaaggaccaggtggtgtggggcaagtgcaccagcagggaaaggcagttttccagttcccatgtggaggtcttcccctcccctgagctgcagggaggatgttacggctcagaatcccaggccaggattggagggagggcctgggctgagactggaagaggagaaagatcctggtctaacttcccacccc

SEQ ID NO: 398459 - DNA, 590 bp, Homo sapiens
ggtgtctggcttatgcccctgtgtgaacgtgaagcctctcattgacatgcaggttacaggagaaaaagcaggtttatttgggaaggaggcttctagaccatgacttccattttagccatgtagtttttgaagtgcttgtacaagttctaggtggaaatgtccaggaggcagtggggaactcaaagtagatctcaggagagaggcttaggccagagggcttggggaatcatcagcatgggggtgggaggagagctggtatttggatgagattgcagtggagcatgaacagagtgggaaaaggtggtgatgaacccagggactccagtatgcggtagctggctgtgagattaggaagcaatgaaggaggccgagaaggatgtgggggagaagcatcaataaggaataaatgagttgcacgtgctccagagaggccaaataaagactggatttggctctcgcaggtcatacacgaaagaatcttggaaccaaaaggaaaacggtggtggtttaaagggtatattcagtttctaggtctgctgtcacaaaataccagaaactgagtgtcttgttaaaacaacagaaattttttc

SEQ ID NO: 398460 - DNA, 281 bp, Homo sapiens
tgtacagacttgctaccttaggcctggtcgatctttgtacaatgttcgtgattggaaaaccccttcggagcccctggattctgcaatttacaatgatgcgagatgtgtctgaggccaaggccaacctctcttgcttgtttgaattttatattcctgtgaaaaagactttgaaaaagattttgaaatcattttgagatttttaaaaaatgtttacttaatgaagcacatgactctggtctcaattataattctgttaattttttctaacaatggaaattttt

SEQ ID NO: 398461 - DNA, 121 bp, Homo sapiens
gggaagcttcatgaagaataaattgaagttgtacaggtaaagggagaaaagaagggaagaaaagcattagagatggaaacagcagctcaagttgtcactgaagaaattacagtaagtttgg

SEQ ID NO: 398462 - DNA, 1056 bp, Homo sapiens
ggacacatttattcattttctgttacgtttattgctttctgtggcctgtttgtctataaacatttgcctgtctccaggttatgaagatgctctcctatattttctctaaaagttttatgattttatatttagccctacaataatttagaattaatttttgtttgtgacgtgagaaataagttaaagttttctttgtgtgtttacttctgaacatctagttaatacagcaccatttttgaaaagacttttctttccccatggattgattgctttggtacctttggcaaacaaatgaccatgtaatcatgggcctgtttccagctctcttctcagatccactgatctatttgtcagtccctatgccagtaacatactgtcttaattataaaaccaacaatgtcggtattataatgttttaaagtcatgtagtttgagcactccagatttattttcctaattcaagattgttatagatacgctagattctttgcatgtctatataaattttagaatcaatttgtaaatttctacaagcagattcctgctagcattattactgggattgcaataactctacagatcaatttgtggagaactgacatctcaacaacattgagtcttccaatctgcaaacatgatactgtgtgtgtgtgtgtgtgtgtgtgtgtcttctttaatttctttcaataattgtttagttttcaacatagagatcttgtccatcttttgttgtttattcatgagtattttatgctttttgaagatactgtaaataaaattgtttttctaatttcatttcccaaattcttgctgctgatatataaaagtataattgatattttaatattaaccttgtatcctgtgaccttgttcaattgatgtattagttgtaatagttgtttcttgcatttcttaagattttccacataaacaatcacatcgtgtgtggagtgagttgcaattcttctttttaaaatctttatgccttttttttttacttacattattgcaatagttaagactacctaaaataaattggtaagtgttcttgcctcc

SEQ ID NO: 398463 - DNA, 329 bp, Homo sapiens
tccataagcagaatgggggaaattgcccaatcgtggtcacagaccctccatgccactggctgtgtgcaattggagtcccggacccagcgaccagcaagacccctcccctctcagggtgaccctgggcctccaggtcacaggtctccactaaaaaggctgcctcccctcaatcctagaccccgagttttcttttgttcacgtcattgggccattgccctatgtctctttggaagaaatgacctatatgaaaagctttacttctgggattccctaattccttcatcccttaggacagtgcagtttttcatctcctgatcttggatccagta

SEQ ID NO: 398464 - DNA, 994 bp, Homo sapiens
ataatttatttaacaaatcccctaaggcatatttaggcttcttcgagtttttcactattataaacaatacagtgatgaacaccttgcccattagccatatccagaattacttaggacatagtcttagaaaataagatgcacccaaacttttgatatttactatcagaaagtttgtaaggagacaccttaattttgcatatctggttgacaaagataaacacgtttggaaacataggtgattggtaaaaatgaaaaactgggcatcttgtatacatcagtgtaaggtaatttggtattgtcaatcaaaactgttacaaactttggtcaggtgcctctgagccttctcaaccgtgcctcggccttggccttggcctgtgatatggtttggatctgtgtcctcacccaaatatgttgaattgtaatccccaatgttggagttggggcctggtgggaggtggttggatcacaggagaccaattttatttagatagtgactacctatcttttaactggatctctgagctctgggaagaggccacactgaatcctgggtctgcaaaaagggagaattattatgaggctcgaccacatggatgcttttacagtgtacttaaaaaacattaaaaaaatatttctaagtgtctaaaatatactcttccttaaaaatgcaggagtagcttctgttgcaataattaataaacaaaaaaatcaggtaacacaatacaaaagcaaacagtttaggagctgacatgaacttgtgtgtttacactcttggggatacacaaggaaaaacaattttctccacaaaagggagtctggtgccttctccattttctttaaggaacctcaggctattataaactattttaggtccctcatgcagcagagcgttcaagggaaaggagagacagcagaactatatgaagaaaatagcattcagtcaactgaaaagaaaaaaaacttttgcccaaaaaacacaaggtcctaggagaga

SEQ ID NO: 398465 - DNA, 199 bp, Homo sapiens
ggctactctgagcacgctgtataggagttagacctcatccacaaagagcagctctggttcaataaaagattgctgtcggctgggcgcggtgctcacgcctgtaatcccagcacgggaggctgaggcgggtggatcatgagatcaggagatcgagaccatcctggctaacacggtgaaaccccatctctactaaaaatac

SEQ ID NO: 398466 - DNA, 441 bp, Homo sapiens
attcagtccatagcacagtgggtactctccagtagaataaaaaaaaaaatttaagaagaaatatagtaaatgtagaaaaatacagactctgttcagcaaaaccaatgtattcaaaattctaaaactctagtgtttactgagatatttgaaataacttgccaggtgcggtggctcacacctgtaatcccagtgctttgggaggccaaggcaggtggatcacaaggtcaggagatcgagaccatcctgcctaacacagtgaaaccccatctctactaaaaatacaaaaaattagccaggcgtagtggtgggcgcctgtagtcccagttactcgagaggctgaggcaggagaatgtcgtgaacctgggaggcagagcttgcagtgagcagagatcgctccactgcactccagcctgggtgacagagcaagactccgtctcaaaa

SEQ ID NO: 398467 - DNA, 270 bp, Homo sapiens
aggggaaggaagacacctgccaaatgctggaggctgcagcctgcggcaccgcggctcgcctcactgtgggtggtggccgagatggcgactgcagtgcgaccggagtgatgctgtcctcacagtatattcaaggcatctgatggcattgatgagcaactgaggaatcatttaattaatcaccaagttcttcatccttacttaaaaatgtagagtcacaaaatcatgcatcaaaacacactctttttttaataaaatatggtcttttatcca

SEQ ID NO: 398468 - DNA, 114 bp, Homo sapiens
tgtgcgccaccatgccgggctaatttttttttttttttacttttaatagaaatgaggacttcctacattgtccaggctggccttaaactcctggccttaagcagtcctccggcc

SEQ ID NO: 398469 - DNA, 603 bp, Homo sapiens
taaatgtgccttgctgagaaattttctaagtgctggtttttctttgtggcaccgagcacttgtctgtaacatttgtgtgtctgtctccttcaatacactgaaaagtccttgatggcaggaactgtatttatcttttatctgtaaacccctgtagagtgcctgtaaatgtgtactgaataaatgaatgccaccaacaaatccagacccaaccctcaatggcacaaatcatatgttataatcaatgcctcccaacaatttgaatctcacagatatactttgcactaaagaagccagatacgaaacaggacattttgtattattccatttgaagttcaataacaggcaaaactaatctttgtgacagaagccagaactaagcggagtagggtagagtgaggggggggtcttatccaggaagggtcacaagagaaccttatggagtgttggaacagtctctatgttgatctgagggtggcagttacacaggtatatacatatctaaaagaataatcaagcagtatacttgagattagtaccatttactgaaatttatcttgtatttcaaaaacccaagttctatatatggccctcatctgcctcaac

SEQ ID NO: 398470 - DNA, 363 bp, Homo sapiens
tcagagtgaatgttgctaaatatcctaaagtgaactggacagccctcacaataatgaattatcctgcccaaaatatcaacagtgctaagagtgagaaatcctaaaggcatgttataatcaaatgtttaaaaccagtagtaatatcaggcaagagaaaaaaataaaaggcatccaaatagggaaataagaagccacattatctcttcactgacaatatgattctatacctagaaaacccaaaatactctgccaaaaggctcctagacctgaaaaatgactttactgaagtttcaggatacaaaatcaatgtacaaaaatcagtagcatttttacacaccaataactttcaagctgagagccaaa

SEQ ID NO: 398471 - DNA, 324 bp, Homo sapiens
ctttgccagctcattgttactcctttcatgcctcctctgtcttatgatttcttctttgatttcatttttgctcataattttaaacttactcaagttacaaaaaaattgttaactttctcttacatcacctgggggtaattttatttttctgtggttatactttctctgccttttgtgtatttgtgtttttgtgttcctttattctctttctgatttctttgtttcttactttttatggacaatgtcaacccactatctttaaacattccagtttattacttatttttgaattatggcaaccttttcttggcctgacttttgctt

SEQ ID NO: 398472 - DNA, 921 bp, Homo sapiens
tcactggcaaagtaaaaacactccccaccagacccaggcagacctcacactccagctgctccaaagtctcttccagcctgaattgcaggttctccagagccaggctacagggccagccacacgtgggaggcaacctccactggctcactgccaagagccctgccaggtggggcccagacacccccatggagcccaccctccagtctcccaggaacacctgcgcctcaggtcagtcagaggctctaagagaggaaaacgctgcctttccttacacacagccctgcatcctgtgtatccaaaaatcaaggacttgaagaagccatttgttttccagaaaaccacacaccctgacaatctttgtacacactgagcccccaccaatcacactgggctcgaggctccccagccactgtggaaacagtacttggatccacatcttagtcaaattattaaaatacagcagacaaggacaggatcatagtcctcatctttctctcttcccccacattaatacattattatttcaatgaaatgagccaaattttaaacctaaactacttatgtactcttgcaaattttctgataatttttaatataaattcaaaacataaattcattttgaagttggaatttgaataaaatcattgtggttcaaataagagaccaacgacgggttgttacattattttctaactctacagtgatgttaaatttagtagacaaatctgaaataagcattaataatatttcagccttaggacaggcgcagtggctcacacctataatcccagcactttgggaagcggaggcgggacggatcacctgagttcaggagtttgagaccagcctggccaacatggtgaaactctgttgctacaaaaaacacaaagccaggcctggtggtgggctccttaatcccag

SEQ ID NO: 398473 - DNA, 376 bp, Homo sapiens
gagcaagccaggccaagagggcactggacgtcgagtctcacctccttttcctcccgtctcctccctctcaccaagtgacaccgctccctctcaaacggaaggaaggggaagaggatgctaagctgacataatggaagtctggagctgcctgtgaccaaggtttcccctgtgtagaagcctactgtcggaaaaaatgaggccagcacacagagactgagaggagtggagaaagagagctgggttgggaggagaagaaaaggatcttgatggtgatcacgtccttggttctagtgcttaaagtccccagggtcctgcaactctctgagttccttctaggacattcaattttgggattaaattggtcacttcatcagaa

SEQ ID NO: 398474 - DNA, 524 bp, Homo sapiens
cggtagtcctggcccacagggtctttttgcccaaagctctgggtgaagaatgccactgtgaacagctgcaggactaggctggaattccagtcttatctgggcccctgggacacttgaggggagcaatttgctccaactggcacactttccctgccccttccctggacacaggagtctgtctggttcactcaagccctgccttactcttgccatctgcatctccaccctcttcctccctctttccttccttctttcatcctctcatccatcacacacattctttctccttctcttttctcttttttctctctcccgtcttcccttatccccttccacctagttatatgataaccccttcagtccttgaagatgtctccccaccagaagagtgggcattcctcatgttacataaattccacaactaaggggctgctgatgggagagccatccctattagggatgcaatctctctgaagggaagtttttttttttttttgggtggtggtggtttttccctcgggaga

SEQ ID NO: 398475 - DNA, 485 bp, Homo sapiens
atatatatataatgtacttggagccttagtaagcacttaataaattttgaattaatcacaaagaaggctaatggaatggaaggaacatttcaggcagagatatctgtaaagatacggagggttgacatttcatggtgtgtttagttaactgggctttcagagtggctcttgctcagaggaaggtgaagctgtgtagggtgggttgagttcagtttaaggactgctctgaaccattattaaaggcgtgggctttatccttaaagcccacagttgggaacattaaaaaattttttttcatagcttaccattttattcatttctagttatatgtgcatacattatatgaatttgtctttatcacctcttcctgccacagaaactgacctatatggggttctcagtaaatcagtttgagtacatgagtaaaaaaccaagtcattcacacaatgttctcccattagatccagctagagaagagctttagg

SEQ ID NO: 398476 - DNA, 457 bp, Homo sapiens
ctcttggaaggctggcagcagcgaacctcctcgctcctctgccttagatctcgtcaagagtttaacatgctgtgtaacctcctaaactttgaaaaggaaactttctaaaagaaagttaaggaaaaataatttgatgcttaagggaactttttttcttgcatgagataatttccctggtaggagacactgttcttaaatttgtccaaggaccggttaacccaagaccatgtttccagggcgggggaaacatctaaatcatatttgttcaactcctgctctcaaagtggcttgagaataggttctgcccctggcaagatgacgcttgctgtcttttcctctcagctacccagaatggcatttgcagcatcgctgagaacgttttgggaaaatatctgtgcagttttcccaactcagttttcaccatctgcagcctgcctttgctttggtaggttggtta

SEQ ID NO: 398477 - DNA, 355 bp, Homo sapiens
aatttctataacatttcataatataatatgaaaattcactgctgatttttagaggacaaaatctatagcatggtgaactttcacagctccagctttatctagttagagttatttaacccacaggttgacattctcccctcctcagggtctctctttccccagaaggtattgcctcttttcttgctttcctggcctccctcttcagtgtttcatgtttgtccttttgtgttaacctttggaattatcaaacaagttgttgccagaatctggggactcatggccgatgtgttcccggctaataaagcaaaaccaagagaaaataatcctcagcattgcatttcagaactatgtgggc

SEQ ID NO: 398478 - DNA, 468 bp, Homo sapiens
agcagaggcaagaatgtctccagggtattcatcatgggtgatggcactgaggctcatcctttccaattcaggccaagggatgagctgaaaacctccaccacagacccctggcatatccacccccatcttcccaccacgtgctgcactggaacccactagcaatggaatgtggcagcttggctaactgctgcagggcaacagcatatggctgattctcagccccgcccctgccaagatgtccgaacacaacctttctaaagctgggggtgagggggctggagggataggtgttaatcaatacaggactggcgaaataaaattatggtctgtgtatcacagaatatgatggagctgtaagaaaatcagggtgttgttctctttatgtattgatatggaatgatctcaaagataaacttaaatgaaaaatgcagggtgcagacagtgtgtacagtatactacatgtgtgta

SEQ ID NO: 398479 - DNA, 633 bp, Homo sapiens
ggggagaaaaaaatattatagaatgaaatatatgttctgtaacatgacttccaggtttctaaatatgtattcatgttacagaatacatatttagaaacctggaagtcatggtaaaaagtacaaaactggaaaatttgatatagtggattaatttcattttaaattttttatgctttaattttaatttttgatgttaaatttttttctttatatttcagtgaaaatttagtgttcaatttcatttatatcatcttcttattaccattgcgtttcctggcactctttgattgaaatgggagaggaagaaaccctgtgttcattcccctgggtgtgtgtttggcagttgtgtcctgaaactctattgcctggggagtgcttttatctccttgaagcctatttgatgaaaatattaccaatacctcatagttacacaaagatgactggaaaggtcgttttttaacgagaaagtcatttgggcataaagaattgaaatattttgcactttttcttagtaggaatcagagcagagcgacattggaaataagaacagaaagaaatgaaagttttctgtcccctacacagtgttgttctcctccttcccttcctcgttacttaatttagagaagggaagca

SEQ ID NO: 398480 - DNA, 393 bp, Homo sapiens
gacctctgttgtcggaggcttgcaggtctcactcgactgtgatttgggacatgaagctgttctgcagtgtcctgccactttgccctcagagggctctcggcagcctgtgagtatcccggccttccatcccagcactctcctgctccgagtcctgagctgcggcccgctgcggtattagcctcagcctgcaggaagacaccctcacccctggggcctgggaaccatcacggtcctggaactcacaaagccacgtctctcttcagcttacctgtctcaaaaacacctctgattttctttccagggtcaggcagaaaagtaaactctaggggagaaaagacggacaggttactaggaacagagaaaacagagactaaagaattgacttttcctctc

SEQ ID NO: 398481 - DNA, 653 bp, Homo sapiens
ctggggtgaggccgcatacgtctcgttactccagcccccaaagaggcttccagatgcagccaccccagaccacgactgagaggccagcgccacacctggtcccacccgctggctgcactgtcccaatgcttctgaagccaaattacccccaaacgcttggccttcggaggcccccaagtgaaaagtgacccaggccccgctgtgacaggagagtttgccgctggcttcgactcaggcactgatgcatcatgctcagaacgcctgcctaggcatcagtttggaaacctttcccgttgccatttcagggcagtaaatatagccaattatacatcagctgtctgatttaaccatctgcagtggcacatgggccaaacttaccttctccctcatttctgaggtccaaagttgtattttacagtctagctgctgaactattagcctcagcctgcaggaagacaccctcacccctggggcctgggaaccatcacggtcctggaactcacaaagccacgtctctcttcagcttacctgtctcaaaaacacctctgattttctttccagggtcaggcagaaaagtaaactctaggggagaaaagacggacaggttactaggaacagagaaaacagagactaaagaattgacttttcctctc

SEQ ID NO: 398482 - DNA, 439 bp, Homo sapiens
aaactatggagacagtataaagataagtggttgtcagagtttggtggcagggagggggcaagtgatgaatatggtggagcacagagaatttttaggcagggaaaatatgtagtggtagatacatgtcattatacagttgtccaaacccgtagaatgtacaacaccaagaaagaagtctaatgtaaactgtagactttgaatgagtataatgcatgaatgtaggttcatgtattgcaacaaacatatcactttggtggggggtgttgataataggggagtaggtaatgcatgtgtaggaacagtgagtatatgggaaatctctgtgccttcctcttaatttggctgtgaacctaaaaactgctctaaaaaaataaaatttttaatttagaaaaaattaaatagaaaaaaggaataattaaggttagaatggcaatcagta

SEQ ID NO: 398483 - DNA, 227 bp, Homo sapiens
gcccatttacatctattctaatattttcctttattcatgcttatgtttaccaccttatagttttaggtcactcctctcctcatcaggcatacctgcatggccaaagtctggtggtttctgagtgttaaccaattgccaactgtatgatcttggaccacttacttggcctctctgtgctttaatttcttcatatattaaaaagtcatggtgagccctatcttttaggg

SEQ ID NO: 398484 - DNA, 311 bp, Homo sapiens
tcctctgtcttaaaaaaaaaaaattgttctgagaattacctcctcatcaatcgtgaacttagagcagtagggcatatcacatagtgatcctaggaaactgctctcctgggctccaggtcatacagcccagtgtggtagaactactgaatttactctgtgcaataggagttggaatgacccatagcattctaaaaattggtgaagtcttcattaaaatatttatttattggccctcagtccagatgacccaaatctttattattttcttcagtaagtgatgttttagggggaaaaattttaaaccacccttt

SEQ ID NO: 398485 - DNA, 587 bp, Homo sapiens
gggattgggcatgtctttttttgggggaaggggacaccattcaacccactgcaacagataatggatgacattcaaatccaaacggcatagatgtatatatatagctaataaaatgacacatcccatgagtggactccgattttgagaaaatataagatttttttgttttgttttgtttttaaagaaacagagtcttgctctgtcacccaggctggagtgcagtggtgcagtgatagcttactgcagccttgacctcctgggctcaactgatcctcccacctcagcctcctgagtagagcttggggttacaggctcatgctcctgcacccagctgattttgagaaaatatcaaaaatctggtagggaagtaaggcaaataacgctgcttttattttccccagggacattgataaacacattcatccacatgagtaaagcagccatgtaaaggtctccaaaaactagtcactgaaaatcatttaaaatgtattttattttttagttttttttggagacagtctcattctgtcacccaggctggagtgcagtggtgcaatctcagctccttgcaacctccacctcctgga

SEQ ID NO: 398486 - DNA, 448 bp, Homo sapiens
tcctttcatgttctccagcaagccaagttctttcctgcctaggggcctttgcacttgctgtttcttctgtctgtaactctcttccttctgctcttcctataactgcctctttctcttcttttaaagcccagctcaaccatcacctttccagagatcacttccctgatcatctaattgaaggacctcacccttcaccctggtcactctcaaccctatcatcctgtttattcccttcataactcagcaatgtcgggagctcacttacttgttgacttgtttattgtctatccacctctcttccccagaatgttggtcccatgaaggcagggatttaatatctttcttattcagtgcattagatggaaaccaggtacacacagcacagtgcctggcacatagaaaatgctcaataaatattggatggatggatggatggatgagatggatg

SEQ ID NO: 398487 - DNA, 900 bp, Homo sapiens
aaaatttctagttctggcgtcttgtttatctttctcaaatcctgtctgcaggggcccaggacatgcagctgtttcaggaaaccgcccttgagatggggcagatgtatgctagttcatgggctataaaactcaacaccaaaaatcccatcgtcctaaacagtgacctgttatgttgtgtgaaggacagtggcgatgggggcctggccgccagagaggctgctggattctatggcagacacactcaggagctggaagtgtggctaagctttcagcagcaccatcacttccctccccatacacatgcacacaggtttcctttgtctcacagctgaagaggcagcgcccagcttcagtaagcactgtgtatgagaatggacttactctggccacactgtgcacacgcatgtgtgtgtaaaacactgatcacatttcccataaagactgttgatttgcagagtttccaggcccatacatctagggcgggatgtgtgtgttttcatcaggggagagtagagtggccttttgtggaagggataaaatggttgagctgctggagacttttctagctccatttatacagcagcctttctgcctgggtgcagacttgaacccaagtccaagttcaagccatgtgtgtagatgaccagaacttagccttcaaacttagccttcaacttcaggactctcctggagaaaacatccatctccttttggagatacagagaattcgtgatgagctttgagtacagaagttcaagttatattttctggcaacctacagaataagttgggaaaggatatgtaattatagaaataaccagcatgtcgccaggcattgttgtccgtgctttagatggtgtggatattttgtaatttctgattctttacctactgttttca

SEQ ID NO: 398488 - DNA, 442 bp, Homo sapiens
cttccatctatggcaggtggacggttaggactaaatgtttcatgtagcttcgcccttggttccagctcttccctctcacgcctcccagacttctccaggccggtttcatgttaaccgtcttacactctgacatcagccaaggcgtctccattctgttcttgtgccattcatgtcttggattcccagtaagtagaaccttggaaataatttgatcttgtttttgcataaatgaggacactcagaaccaggaagagccctaggctcccacagcaaaaccaaaactaaacccaggactgctatttcccaagccagattctgttattcgagcccagccttagaagggcttgatgtggagcaaaaggtgaaaatggtgaaactaaaatttgagtatcaaaacccattgccttctaatagaatcagaaggaaatgttgctaaatcata

SEQ ID NO: 398489 - DNA, 231 bp, Homo sapiens
tcaatatttctacacaatagagaacaaaaactaaatgattatttttaaactgtgctaattcggctctcaagttcattctctagtttacgaagagtcacctgatcaaaatcatttgaaaatcatttgattactaaatcaagtaagccataaaagctaaacccaagtgaaactagataattgtgcaattttcttagatggactccttcttaagttcacctggctctctactgg

SEQ ID NO: 398490 - DNA, 344 bp, Homo sapiens
gacaggcggctggcccaaaagaaagaaaatatatatacgaaaattattaataaataatgaatgaagaaatggataatttcccagcaaaacacaaacgaccaaaattgacccaaaaagatttgaatagattaccacagaacacatcagaaaggtgattaagggtttacccattgaaaaatggcaccaagaccagatggcttcacagattatcttacctttaaaagatacataatttctttttttttttttttttttttgagatggagtctctgtcgcccaggctggtgtgcagtggtgcgatctcatctcactgcaacctccgcctcccaagttcaagtgattct

SEQ ID NO: 398491 - DNA, 357 bp, Homo sapiens
attaaaagaggaatcttaaaaatgagagacacaaatgacatatgagagtgtatcttaatagatggactagagttttcaggtaaagttaaaattattctttgcctctctacttacgaaggcagggaggtacatgatatgttttagaatgcttttcttccaaagttgttaatgtttaaaaatttgatatttgaagaggtagagttacttagaaaattggttatgtcaaacacttcattttctaaaaactgcataaaagaagtattttattttcttaacattttcctcgaggtggcttgacgaaactaacggataccattacccattcaatatgttgactgtcttttgcctatagttagt

SEQ ID NO: 398492 - DNA, 320 bp, Homo sapiens
catttgcaatttgagacaaacctgtaaatggttactgttaaatgatcattcttcctcccctgtcatgtctgcgcacttgtatttatcagtcattgggcatattttgatatattatctattgtaggtaagtatctctttttctgttgggaagagttatattggtggtcacagacaaccagattattttaattttagttccaacaaagaattacagactgctagctgcatataaactttataatgcatagacattttctaatttgtggctcattatgaaaatttccacttacaacgatcctatcattggatctcaggtacaa

SEQ ID NO: 398493 - DNA, 365 bp, Homo sapiens
ttctgtagttcagtagagtcaggtgtgtagatctgggtaatcaggcctgggcaacttcaagttcatgctcttgttattttgtccaggatttgggcaccagaacagctccctaactgctgaggaggaatgaaggacaacagacactcacagctttcctatttcagggctggcagcaaaggattccaggctttaggaaactcctcagactgggaagctcaggggagatacttaccttgatgtaagcagcacctgttgaagggcagcccgtctttttttttttttttttttttttgagacagagtctccctctgccacccaggctggagtgcagtgaagtgatcttggctcactgtaagctccacctc

SEQ ID NO: 398494 - DNA, 422 bp, Homo sapiens
ctgccagggagccctgggattgagtgttttactcttccagcctctgtagttaaggcaaaagatattggggttgtgaatggcttttgaatagccagtccacactcttggctgcattcgccttccattcacctggtgatgcctgaggtgcctccattaaggttctgttttctttacattaaagagaaagatagtctaccagaaggattttgagtgtaacattgaaggaactgaaatgcagccagccactttgatggggctttttgaattgaaacatatagtaattgtttttcttttattaattgaaatctggttgagtcccctgcatgactaggaagcatgagtataccaaaattctggccatagtattgccactaactagttttatggcctcaggccagttatgtaaccttgctgggcttgtt

SEQ ID NO: 398495 - DNA, 496 bp, Homo sapiens
cctgtgtctggactttttagaatttccaagagctgctgtttctggaaccagattaatacaagtcagtcttccatttatttatttatgtatttatttgagacagggtctcactctgtcacccaggctggggtgcagtggcatgaacacagctcactgcagcttgggggctcaagagatcctcctgcctcagcctcccatgtagttgggaccacaggcacctaccacccagctaattttatttgttgtagaaatgaggtctcattttgctgcccaggctgttcttgaactcttgggctcaagcgatcctcctgcaacatcttcccaaagtgctgggatcactcttccatttaacatgctatctcaacgtcaagataaactttaaaatctttagataataggctggcattttacttaaaaacgaatctttttacttttttcaggaaccggccctattccttattaaatatggtggggtccttccaaacctggaagaagt

SEQ ID NO: 398496 - DNA, 500 bp, Homo sapiens
tcatggttggtgggactgggtgggcagcggccccgcccctgctgtcacactgggggacacaaggcgcgagggcagctcccagggaagcagcagatggagaggagagctgtgacagcgcggtgcaaggagccaccacctggagtcgcctcctcagaaagcaggactaccctacagcaaagatgggaattgtcctaactcccgggcaccagggagatgaggggacagcagttatgttttttaaaaggtatggagaaatatgcctgctttgagggccgaagtgggagtggacactcatgcctcttcctctcccttcaagaaataagagacagtcaacactaactccttcgcctcctcccgtcctcagcccccaggacattctggttcttcaagcacaggtgacacacagagacagaagggcacagagctgccagcagtctgcagtgttggactgatttatttccaagccctatcttgagaaacagaattttttttttcctgtt

SEQ ID NO: 398497 - DNA, 157 bp, Homo sapiens
gaagtggggatcggcttgtgagtaaatatgagaaccaatagcatttggaggaaagcataggtgagacttggagaagaaagaccagaaatatgctttggtgctaatgttcgtaggttgggtgtaacagaggaagacagccaatgaggctgagaggaga

SEQ ID NO: 398498 - DNA, 404 bp, Homo sapiens
gataagctacggacgctgagggaaggcacggtgttggcagcatgtgtgtctttctacccgaacaagaaactgatgcctgttaatagtgtttccagggaccttgccagtgaagaggagagtatcactgatgaatagatgagcaggggtgaatagtgtcgccctgtgctcaccctgtcatacccttgtgtggtcacaagactccaggcctcctaacacatccaaaatcttatttactaagaagcctaacctaaaaactgcaatccctctgggttttcctctctatgtagagttatccagaatatatctagactcaagcataaattatgtcacttggattttgctaccacctttttttttataattacattaagctacactcaagagggtgagttttacaattctct

SEQ ID NO: 398499 - DNA, 430 bp, Homo sapiens
tgaccacactattgaaaatagaatgcttttaatgtctctttcctctgctttgttttcctgcaaaacaattcatcacccaaattattttcagtacctcctaattgcaattcatttatctcctccattctcactctatgagatggctttttttcccaattctgaggcactgttgtgtacccaaagcctggaaaaattcactgtagatgcatgataaatatttggtgaatgaataagtgcacggatgaatgaatgagagggaggaaaaaagtacttataagaacataaggggagatacagaggttataaatacacaagaaactaaattcagtaacttactattttgtttagtatgactaatccacagatctcaaaagacatcaagaaaggagtatatctctgtaaaagacaacataggaaagagcaatcatat

SEQ ID NO: 398500 - DNA, 548 bp, Homo sapiens
atatgcaaagaacccttacaattcaataagacaacccaatttaaaaacaggcaaaggatgtgaataggcatttctccaaagatacggaaaaacggccaataagcacataaaaagatgctcaaaatcatttgccatttgggaaatgcaatcaaaaccacaatgaggtatcacttcacgcccattagggtggctatagatcagaaagtcagataacatgtgttggcaagcacatggaaacactgaagtccttacacactgctggtaggaatgtaaaatggtgcagccactgtggaaaacagttttccaatttctcaaaatgttaaacacagttatcatacacccaagcaattctactcttaggtatatacccaagagaaatgaaaacatatgtcttcaccagaacttgctgttcacagcagcattatgcataatagaccaaaagtggaaacaactcaactgcccatcaactggtgaatggataagtaaaatgtgatgtaaccagtcattggactgtcattcattaataaaaagaacaaggtactgattca

SEQ ID NO: 398501 - DNA, 292 bp, Homo sapiens
tggatttagtccctagcttctaaggaacagaatatgatacaggtgatgggatgtcacttcggagattactaaaaaaaaaaaaaaaaaagtagcttctgtcttagacttgagcttgcatgctttctctttcactttgaaagaaatcagctgtcttgtgaatggacagaggccaagtagcaaagaaatgagagaagcctccagtctctagccagcaaggaactgaagtcttcaatccaacatagctcacaaggaactcagtcctgtcaacaatcttgagagagctcttagaacc

SEQ ID NO: 398502 - DNA, 531 bp, Homo sapiens
gctttgagttccccttggagcccatctagaagtttcaggagtggtgaatgagtaccgaattttgacaactacatgagagaagaatgaatgaagtgcaatctgagattcaagcaactttgaaatcattttaaacatttggtgggggaatgacttatccatctgttgatttatctagtcatttctaaatctaatgcctatactctgtttccagagttcactttcaaaaatacagcattaatcatgtcaccccatgttttaaatttcccatggacatacaccatcagagagcctgaagacagttcctccccacccagcactgcccctgccagtgcctgcccacatcattgaggcctgggtaccaacccagcctgccggagtccagacacattgtccagggatctgaggattcacccgccctgtctaccaccactggtgtctgtgcactcctcccaggggtctaaggatgggtctgtcaagcctgccatcaccactgctgccagcacccacctgcatgagccacaggggggcctg

SEQ ID NO: 398503 - DNA, 357 bp, Homo sapiens
gggcatgagaacttcccttaaaagacctttctgataggatcagtagtgatattaacaaatgtaatttttttttggtgttacattgtgtgatggaaaatgcacatacctcagtgaattaatgctttccaaatgaccagtaatgatgttacaaataaacattggtcaagtgcaaaatagactgatggattttttttgtaggagaaattttattttttaaattaagttgtagtaaaactgaccatttttgtgtacagttgtatgaattttacctcatgtataaatttatatacccaacaccacaactaagaaacagaatagtttcatgacctcaagaagttccctgtgctgtcttttcta

SEQ ID NO: 398504 - DNA, 323 bp, Homo sapiens
gccacaggctgcacatgagtgggcttcccaagggtccttaagctgtaactgaaacgtctcatgcttaggagtataacagagttctctgttttaagaattattcttaattattggttattagtctggcaactggatttgagatttgtttgcatttttaagagtatgtgtggtgttttaaaagtgttagattatttaggcaaagtgctgggattacaggtgtgagccactgtgccaggccaagaatatttttctatgcctttttgtcagagagacaatgccgggagtgctctggccagagcagagtgaagcctgtgtctttggat

SEQ ID NO: 398505 - DNA, 510 bp, Homo sapiens
aatgatttccatatacagatactgttcctctctctccagggctctttgatgtttcattacagtttagctggcatttgaaatagactcacatttctagacctcagacaatggacgtttcgcagaactattgccatgttttcaacacattgttaaaaacaacaatacgagtaagtgaatagaggcttcacatgtcacctcgtgtgaattcagttatgcatatttgttagttcaaaacaggaaaaggagagagaggagaacaatgtatatggcatgggcattgcctgtgctgttatctcccatgagtgagtgtccttgcatgagcctgagataagagaggggacctcactcctcactgcggatctcagtcccacaggcctctgggtttgtgagtggtggggattcccatgctgcaaacagtatactcttacactattaaatacatgctggctaatttatctgattgtcagtggaaaaagtaatgatggtctggccgggcacggtggctcctgc

SEQ ID NO: 398506 - DNA, 867 bp, Homo sapiens
ttattgatggacatttagaaacaattgtttctatttgtttttataaacagtggttggttaaccatccttatcaatgtctttgtgcccgcatgcaggagacctctctagcataggctcctggaagtcggattgctgggtcccaggacagacattcaaacttcgctccccaaaatggctattccaatttatattcccagcagcagtatgagtttcttttcctgaaaatcctcactggcacatggcattaccagacttctttttaaaatatgaaatattgagtacataaagacatacggagggctgagcgtggtggctttcccctgtaatccctgcattttgggaggctgaggcaggcagatcttttgagcccaggagttcgagaccaacctgggcaacataaacctctacaaaaaaaaaatacaaaaattagctgggtgtggtggcacacgcctgtagtcccagctacttgggaggccaaggtgggaggatcacctgagcctgggaaggtcgaggctgcagagagctgagattgtgccactgcactccagcttggatgacaaagcaagatcctgcctgcaaaaaaaaaaagacaagacacgtggggagtaagataaggagtttccatatactgtctttccagctttagaaataaaactgcaaatacaaatggagcccttcctgcactccctgacttcatttccctcctttgccctccccgatgaacgtcatcccgagtttcatgatttttattcccaggcaggttttcgtagtttatattatttacacatgtgtctatccataagtatgccttacaacattggcaaaacgattttaaactacatgaactttataccagtaataacacac

SEQ ID NO: 398507 - DNA, 669 bp, Homo sapiens
attgaaatgtgtttgcacacaccagtggttgtatgggggatgaacacatagaaataaaacggataaacagaatagcctactattactattaaaatgataaagaggacataaatatatcaaatatgataaacctccaaaaatgtgttaaaatggtgaaaaacaggtacacgcggtataaattttaaaatcataaactgatatcaaataatgccactcataaaaacatagagggctgggtgtggtggcacacgcctgtagtcccagctacttgggaggccaaggtgggaggatcacctgagcctgggaaggtcgaggctgcagagagctgagattgtgccactgcactccagcttggatgacaaagcaagatcctgcctgcaaaaaaaaaaagacaagacacgtggggagtaagataaggagtttccatatactgtctttccagctttagaaataaaactgcaaatacaaatggagcccttcctgcactccctgacttcatttccctcctttgccctccccgatgaacgtcatcccgagtttcatgatttttattcccaggcaggttttcgtagtttatattatttacacatgtgtctatccataagtatgccttacaacattggcaaaacgattttaaactacatgaactttataccagtaataacacac

SEQ ID NO: 398508 - DNA, 539 bp, Homo sapiens
aaacaagagaagttactagaactgactgaaacgagcgatcagagaggcagggggaatcagaaggccagccttcagaccttggctccagccagttaaagtgaaataacctttgacaagttgaatatcttatgttctgttttctcaaccataagaaaagtatgtttataccagctaatatcataaacttgttctgagaaaagtgtgggatgattgttaagtacatattgccacacacacacacacacatgatcttctatatggaatatactaagattctagctatacataataatggatcaaatgactggatcatttcatatagactaaagctgtaccctaaagtcaaaaccatatcttaactcttcctagaacctagcaaaagataaaaataatgtaatggattttcttttgtattcattaagtggttctacagacagttccagacactgaacactagcagcatcacctaaataaatgtgaatcacaacaaatcattacagtataatagtaattcattggaggaaagtataaatgcaatt

SEQ ID NO: 398509 - DNA, 597 bp, Homo sapiens
ttagtaaaaagtaataataataacactcttcagagtgcaggtggcataaggagattccaagaatggagagaatttgggtttgcatgcagcagcctcctgcaaggactaggctgcaatgaaagccccaaacagagtaactctgtgttcacctttttcttatcacatacatctgcatgaatactctgggtaacatcagaagtaggtcaaggctagcagatcctttctctgtagtctccctcatccaaaataaaaaaggcttagatctaaaacagagtgaagaaagacaaggaaaaggaaaaaaatatatgtgtgttatatatacaactataaagctaaaaatggatctggatacaaagaaatcatagaaagggtcaacaaaacaaaaacctagttctatagaacaatagcaagatagataaatttctggtaaaattgacaatgaaaaaagagaaaagaaggctatgaatatggagattataattacagtttcagtagaattttttaaatcctaagaatactatgaacattaaaaaacttggctgaaatactttcttcaataaattaatttttaattcaataaaagatgaaaattaaaat

SEQ ID NO: 398510 - DNA, 471 bp, Homo sapiens
acctggggaaagtgatgttcctgtcatctattgggtaagcgtgagaacaaaaatgtagacctaaataaataaacaagcaaagaaaatatcacctagagaaagaaacactgaaaatattacacacataactatagaatgatatgaccaagttgagaccacacatatcagtcatatcaataaatatgaattaatttaacacacttattgaaagctttttaaaggtggtgatgatgtggaaaaataggtatgcattaaaggataggaaaacaccacaaaaagaaaagctaccaagggagctagccctgtcaagcattaaaacataccctaaaacctgtatcattagaacagtgcagtactggctcataagtagacaaacaggctagtagaataaaatagcctagacatagacccaagtacatgtggaaattgagtatgatgcaggtggcatctcaggtcagtagggcctcagtc

SEQ ID NO: 398511 - DNA, 602 bp, Homo sapiens
atgtcctcctcattccaaagatatgctccaacccagggcagcattctcagaaagaattcaggtggaccattctaaatccatgtgtgtaccacaatctgtatcttactgagagtctgaccccttccttgagagtttctgttctagtaaaataattccatcagttacttcaattcatcctattcccttccctaccgtcaaaccgccaatgcttgaaaactacaacattaaaataatcaactatctagaagttaggctttgtgactaaatgctttctggtaatgaatgaacacatatgacacccatccctgatggtttgggtttatgaaagcaacagaattgaggtctgaggtccacacagctggacctttccctttagtgtgttcacccccaaaggaagcagggtctcctttctcacatgcaatcaagttacctcgcagaggtgactaagatactcacccttcccctgggttcctattactcagcctttactgaacaaatatatgtggagcgccatttaggtaggaggccctgtgccaggcattgcagataaagtggtgaacatatgtaatcacaaccactcttcccaacagcttatggccttt

SEQ ID NO: 398512 - DNA, 587 bp, Homo sapiens
tcttatgattacccaactctggttcataaactcctgaagaatctgtccaactacagtgaataaatatggttcctccagattgctaggttgaatatttttgacttgaactcagaagctcttcttagattttttttaacctcctagaagctggtttaatttctttcagttcagtgccttgcatggagccatatagatttggagcttttggaaggttgttggtgatgtttgctgatctaatgtgtattgatgacagcagtagacaaaacgtagaattcagagcagcactggctaagaacgaggcagggctaaagagtaaagttatacatattagctgttgccttaggctgtatttcttttttgaactcagaactgggacagaagaagaatatcccccagctcttcttttatagagaaggaaacagggactgagagtggttaggtccactcgagggcatatgtgatgaagctgggataactactcaactgccctggaacatagtgattggcttcctagtggtttccagtgtacttcactggaaaatgttatgaaggttactataggctgccctttccatccattggtattg

SEQ ID NO: 398513 - DNA, 460 bp, Homo sapiens
tctaactaaagagggcactttaattttttactatccttttatgtaaatgatttcactggtttatactgcagcagtttcttcagcagtagctttgctattagataagaaatctcaaaagtggttgctaaatatgtataaatatttcataagaagttttaaaatactggcctgagactcacacgactttactcttgaaacaaaaccagaggctcattttaatattgtgggttcttcatttcaaattagtttataatattgcaaagcaacactatccatggctcaatgtttgttggtaacaataatgcatgttaaaaagctatatttcaaatatacttttaaaagaaattttaattcaaaagaattttaggtttaccagaggattgcaaagatagaacagaattcccatacacccttcacccagcttcctcgaatactaacatcttacataaccatagtatat

SEQ ID NO: 398514 - DNA, 294 bp, Homo sapiens
tatcgctctagcaggatccggctgatgcaggaggactgcttgaggccaggagttcaagaccagcctgggcaacatagtgagaccccatcactacctcacacacacacacaaattaattagctgggactacaagtgcatgccaccacacaccctgctaatttttaaatttacttttgtagagatgggggtcttccaaagagctgggattaaagttgtgaggtaccacacccagcacagccttgactacattatttttctgtcttctattgacagaagcagtcatatagcatcact

SEQ ID NO: 398515 - DNA, 383 bp, Homo sapiens
gtcttaaactcctgacctcaagtgatcccaaagtgttgggattacaggcgtgagccacagcgctagccctgtagtttaaaagcctaggcctgttggatttctggggatttacattgatcatatctgtcgcttggtttttttggtctgaaaggaagcttaggtgtttagttatgattggatgacttatttggccaagttaacaggttacagagcagtgatttttagtgttttttaatgttcccattgttagtctattgaggcccctagtgtatttgttgaaacacaaaaggccttctaaaaaagattcagtccttgtgtttaaaaagcttactttctagttggagagacaaaataaactgagagtactgaggtaattaatatca

SEQ ID NO: 398516 - DNA, 556 bp, Homo sapiens
cgtagtggctcatacctgtaatcccagcactttgggaggccgaggcaggtggatcacctgaggtcaggagttcgagaccagcctggccgacatagtaaaaccccgtctctactaaaaatacaaaaattacccggatgtggtggtgcacgcttgttgtcccagctacttgggaggctgaggctggagaatagcttgaacctgggaggcaaaggttgcagtgaaccaagattgtgccactgcactccagcctgggagacagagtgagactccatctcaaaaaaaattttagacaataagaactcctccaaaaactctcgaagacgattaattgttccttatattttaaaattttgaagtaataacaaacttttttcctgaccctttgacattagatgcttcatgacatttgaatagaatgtatttcctacccagtacattctttgacatcactacaatgtaaccataaaaatcagaaaattaacattgagaattactgctgtcctaatcctcagaccacattcaggttttgccagttatcatcttaatgttctttata

SEQ ID NO: 398517 - DNA, 333 bp, Homo sapiens
tcggaagcactgggctagggcagtgtagtacccagtgggatgaggtgcatcagagcagcacctgctgaggcaggagaatcacttgaacccgggaggcagaggttgcagtgagccaagatcatgtcattgcactccagcctggcaacgagagtgaaactctgtctcacaaaaaatttggaagcaacccagttgcccatcatttgatgaatggaaaaaaataatctatacagcggagtgctcttcagttataaaaaggaatgaggtgctgatacatgctatatgtggatgaaccccaaagactttatgctaagtcaaagaagccagacaaaaaac

SEQ ID NO: 398518 - DNA, 1245 bp, Homo sapiens
ctacgctagtggatgctaaaaggaacatcaatgtctcccgtttcagctgggaatgtggggttatgactcagaccattcctaaggtccagggccccatttctcgggtctccctaggtgcctttctgcagttctccacagttctcatccagacaaaaccaggagaaagtgcacatccacagctgtctcttgggcatagaggggagcagtattaagagaggcccatttgggggtaatgctggctggcatttgactctattccttaggctttaagttctgtttctttggtgccaactggccaatctctgcattttgcacccccttctctcctttcccattcccaccctcaccctctattgcctgcctcccaaggctttgtccaccagggtaaggtcccccatcccagggcctggcctcacattccctttctccctggactcccttcctcccacgcctccttctcctagaagcacttctgagatgcagagagggttaaatggtgcttttgcacataaccgtctgatgaaaggcagagaagtgttcctaacccctgccggggttccagataggcagctgtagtgtgtgaatcctcctccttgcccccacccccttatgtctccagctgccagattaaggctaggtgttgctgagcaagaaagcatggagatcagatgtgtgaagcgggtaactgcttggcggccatccttccccaggggacacagaggtgttctttgtgaggttcgctggagcatgccacctctcctgctacagaggctgacacgtcccctctccatcagtttaccactcatgtaaacaactgccgaggccagcttatctatgggtggaagaaaatgtttttcaccaacttttctctccaagaacacagggacaagactcagttacagaaagtagcataagtgccaccaaagagtgtgaagcgtccgagacttcagccagtcagagatctgaattcggaggcatttaaaaatgcctctagatgtgggagcaatccacatggtttctgccaacttactgaaaacatcccggcgcctcccgccacaccatgctcataaggcagatggaaagagtcgtttctcagggatgcctttgtgcttgtgcgtcttttttccaaacacatcagagggcgtgaccacattcttctactatcttctgtaaacttctctagaggagccaacctttttcgtttgtttaatctcacaaattaaataaacctttatgtgaaatgtt

SEQ ID NO: 398519 - DNA, 398 bp, Homo sapiens
tgggattacagacgtgagccaccgcatctggcccaacatttattttaattactagaaaaagaaactctgtattacagaaaagcaactgggtacaaggtacctcaaaatcacgacctaccaaatgcagcataggcacagaaaaagaacagtttaaataagctgaaccccttattgatgaagagatagagttaacacagggatttaccaattgaactcagagattttaaccagcttatcaaagctaattaaaatggggttgtgatattgaaaatatagcaagagaagaagagggaaaaagcttacgggaggtccttgaatactcaactgtgttctgggaaaaacgcaatgagctccaggacatagacaagattatggctcagagtgaaagggagagataa

SEQ ID NO: 398520 - DNA, 458 bp, Homo sapiens
tgtgaagtttgaagcctattccaatttggaatgtcctatttatggaaaagtatacaaaattgcaaatgcaaacttgctagagctcatcacaagccttggaagatgccaattaaatgagagaccctgaatcctaagctttgttagtttttgaaatgtctgcttccaactatagcagtgctgaccagtagaaatataatgtgaaccacgtatgtaacttaaaattttccatcatgaacatcaaagaagcaaaaataagcagtatttcgaccccactctagacctactgaatcagaatatacatttttaataaggtccccagattattcatatgcatattaaagtttgagatacgcttttgagatatgtcgctctatagaatgaagaatagagtgtctgaaaatagttgctgaaaaaaagagacaaagaaattctcaaagaaggcctagggaagggaatta

SEQ ID NO: 398521 - DNA, 442 bp, Homo sapiens
caagggactgatgggaacccacatctattccttatctacgaagtgcctggcctggtacgaggaggcacatttgtactccttgtctgaaattacccacgcaaaatctcagtgacataaagagtgttaccctgcttcaaaggaggaaactgaggcttggcaagcttatttggagcctagtctctgatcccctgaagcgcactttcttcccactgccacagcacatctctctcagactgtgttctgtcctctggacaccttgctctgattaccctgatcagataaagtaatcttgctggccgctaactgggatcggctcttgcttagaaaggccattgtaagcattttgtatctcttatctcatgtaatcttatagcaaccttataaggtaggtcctattcttatccccattttacaggtggagcatgtgtggctctaagaagga

SEQ ID NO: 398522 - DNA, 249 bp, Homo sapiens
cttggaaggggaaaaattagaaagagaaaggcaatacagtaactgttcacctacaactgaccaggtccagatattttgatttttcaaaggaagagcagagtcatgcgacaacagatcagagtcataaacacaaataggcattccaagaaacggagcgcccacatcctccacatacctgtcttttcctcccattaccccacactgaatagcaccttaaataacaccactgctaatgcctcaataccaagg

SEQ ID NO: 398523 - DNA, 392 bp, Homo sapiens
ccttctccttgctgcaagagtgctttgaagatactggattaattacattgtaccttaccttgtaatgaactgtttatatcattttattcaaatacacaaggaagtttttaggacttcatctattttttttaattcttttaaaattctgggcctttaatgtagctcctgctgtgtaatcacttgttaaatttttgcagaatgaaaataacacatcagtgagtcttgccctgttctctcttgatgagccttccctgttctctcctaacttccctgcacccaaatcccttgtatttgtagccttcttgacacaagcagggtctagttccaaatgccttttgcgtgttgcttataatcctcatagcagccctggcagtaaggacctattattgtcc

SEQ ID NO: 398524 - DNA, 243 bp, Homo sapiens
gtaaaaccacctgctggaaaacgactgcagactctatcctgacccaaactgagtaggatcaaatgccagcagagagggggaagcccgagggctcacctgtccagggagcctccactgttagctctgccctcccttatgagtggatccaatgctgcccccgccccaactgcctggcagattcttcttcattcttttaaagcctttgaggatatcatctctttttctggccttctctgcccctgc

SEQ ID NO: 398525 - DNA, 216 bp, Homo sapiens
ttatgtaaggtcacataggtaataagtatcagagctgataataaagttcaatccagatgttctgcagcaaaaacatatttttaaaaaataatttcaagttatttcagattcgggggtacacatgcaggtttcttaacaggatatattgtatgatgctgagattaggggtacagctgatcccatcactcaggtgttgggcataatacttaatagttt

SEQ ID NO: 398526 - DNA, 337 bp, Homo sapiens
ctcagagcgtcactgtcaactacataaaattgccagagaagctctttgggactacaaacacatacccttaatgtctttatttctattttgtctacctcttcagtctaggtgaaaaaataggaaggataatagggaagaactttgtttatgcctacttatccgcccctaggaattttgaaaacctctaggtagcaataagaactgcagcatggtatagaaaaagaggaggaaagctgtatagaaatgcataataaatgggcaggaaaagaactgcttggaacaaacagggaggttgaactataaggagagaaagcagagaggctaatcaacaaggctg

SEQ ID NO: 398527 - DNA, 365 bp, Homo sapiens
gacatcctacttttgataacccagttccttctaaaagtgaagcaaaggataatttcttcgaagtgtttaccccagtgtttgaaaggaactccagatggtcaaataaaaaaaatgttcctaaacttggtgatatgaattcatcatttgaagatgtagatatattttattctttctggtataattttgattcttggagagaattttcttatttagatgaagaagaaaaagaaaaagcagaatgtcgtgatgagaggagatggcctcttgctcccatcagacaattgcattgctaccaagtttcataccaaatatttgaaaggatggtattgaatctaaaaccaaatattagtttttattaaactgat

SEQ ID NO: 398528 - DNA, 504 bp, Homo sapiens
caagattcaacttatatatatatataaagctttaaaaacatctaataagatgcaacatgaagtatacattacctaagatataaaatgtttcacttaaattgactgacactttagatctaacttcaagtttgatgtacatacaggaataaaataaagaaatgtcatactacaaataaataactagacaattccaaaagggtaggacatctggtccagcctgtcaaaagtcaatgtaatgaaaaatgatttattctagactataagaaacctaggagacaatggccaatttttatatatagatccttatctgaagaaactagctataaaggacttttttttaacaaatggagatatttaaatatggactgggtattagattttatattatgcaggaaatattctcattttaaaacacttgtactaaaataagggcagtaagtaaacgcatacatatatatatttactacacacacacacacacacagtaactgggaaccaaaacag

SEQ ID NO: 398529 - DNA, 1876 bp, Homo sapiens
cattccatgcagacaagcgtgtccttcatgagacaggattcagtactgagctagatcgtgtaaagaatctgcctcattgtgaaacggaaatatttgaagtgagatttgacccacagggggccaatcttcctgttggaagcaaagaagtcattctgcccatcaaggtggttggagggccaacagttcacatctgtctccaagccaaggtgaccattccaaccatgactctctctcgtggaaaagtggactttgccacaattcagtgtggacagtgcctggtggaaactattcagctttccaatcatctccaagtcccttgtgaatggttcgtccagagccaaaagcctgttgacaagctggagaaacacatgccgaagtacttaagacagaaactacgcgctgaattaaagccaaagacacggatcttcgaaatccagcccatttctggagtcttggatcctggtgagaagtccaacgtgcaagtgaaattcatgccaaaagaagagaaattctacagccaaaccctggtgtttcagattgcccagagtgctcaaaagcttaccctcctggcacgtgggcaaggtctagagccacgcctggaatttagtccttcagtcctggatctggggccactgctactttgtgcacctggagacgaggccgaggtgatagtgaagaatccctgcaacttccccattgagttttattccttagaatttgatcagcagtatctcatagaagaaaagatcttgcggaagctgaagggctatgattcctacaacaccctgctgctgcctccccgcaaccctggggagaagctgcccccagaactgtacgagtacttcaaagagataaagaagtcaaaagaggagcagatgagggcgaaatatctggagaatctggcacaggagaatgaagaggaagatataacctcatcagatcagggaacctccaatagcacaaagaggacatcgctgagccgagggatctctgtcacatccaacctggaagaatggcacgccctgttggtcgagtccaaaacctacctagaggaagaggaggatgaggaaagcctggaaaaaatcattttccaaactgacaagcttcagagcattgacagccactccatggaggaagttggagaggtggaaaacaacccagtgagcaaagcaatcgctcgccacctgggcattgacatttctgcagaaggccgcctggccaagaaccggaaaggcatcgccattatcattcacgggacacccttgtcaggaaagtcagccaatgccgttagcgtggccaagtactacaacgcagcctgcctgagcatcgactccattgtgctggaagctgtggccaacagcaacaacatcccagggatccgggcctgtgagctctgcatcagggctgccatagagcagtccatgaaggaaggagaggaggctgctgagtgactgctaccgaggagtggtgtttgatggcctcgacactctctttgctcggaatgctgcagccgccctcctctgcctgctgaaggccattggcagccgggagcatatatacattctcaacatggcccaggattacgcagccatgaaggcccaggagaaagccaaaaaggagcaagaaggcaaggcctcctacctttccattgggcttaagtgaaactttgacatttgctattccgttggcgcctcacctctgccctgtaaggtggccaggagttgtatttctgctttgctaggagggaactgggacgcgagtggctggctgggaagttctatgatgaacgctttgctgacagcaggtgcattcctgcttccctcccatcacactgtacccctccatcctttctgcaattacagccattttgggtccc

SEQ ID NO: 398530 - DNA, 1038 bp, Homo sapiens
tctcctgtgctggtatgataaaatttggtacaatttctctgtcaccatttctttgtctatctccaactctttttgtagctgaattccatcatttttggctcttctgagttttccacattttctaagcaaatgtataattttagttgctaaacaaatgttaaaatgtagaaacactgtgcacagagagactgaggaatagccaactgactgcagttcttgtttatttgggttgaatggtccagggtgatgggagcccgtatggtgaatctcttcttcatcttttttttccttttctgcctccatctcccttgtccccctcccaactcttcccctggtgttttcatcctttgctacctggcagaagaggaagatataacctcatcagatcagggaacctccaatagcacaaagaggacatcgctgagccgagggatctctgtcacatccaacctggaagaatggcacgccctgttggtcgagtccaaaacctacctagaggaagaggaggatgaggaaagcctggaaaaaatcattttccaaactgacaagcttcagagcattgacagccactccatggaggaagttggagaggtggaaaacaacccagtgagcaaagcaatcgctcgccacctgggcattgacatttctgcagaaggccgcctggccaagaaccggaaaggcatcgccattatcattcacgggacacccttgtcaggtaggcaacagttctgaggggaggttaagaccagcagtgccatgtcttctctgtaaactctgcggcttccagagtggcaacatcagctgtgtggtcatggcaaatactaatgactttatttgaggaactgcatagggtagtgaatatacattaatagctgtgtgcctttgggaaaattaactaaattgtctgtgctcagtttccctgtccgtaaagtggtattaacgctgtctattttatagggtagtcatgagaatttaatgagaacatttatataaaatgcttatctcaatacttggcacatagtaaatactcaaacgaaa

SEQ ID NO: 398531 - DNA, 378 bp, Homo sapiens
cctcaacttatactgtgaatcagaataatctgggcagcttttaaaaaatataaacgtcagtgcctcatcagagatctgattcaatggcgtggggtaaggctgccatcactgttatttgtgttttgtcttttactgttctcaagcaatctaatatgcaatcaggactgagaagcagcgtatacccgattcaggtgcttcatcaaactgactgcacacccaaatcacctggggatcttgttaaaaatatgtatgtggtgggacctgagactctgcatttccaaaaaaagctctcaggtgatgctgatgttgccagttggtccatggaccacaggtggaggagcaagggtataaagcctgggccccagtctttcttatcag

SEQ ID NO: 398532 - DNA, 721 bp, Homo sapiens
ccctaatgaggtaggctgaaaatgaactctgagagcgaattctgtttagagatcattttaatctagcagcctgccacctcgcttagcttcctgtgatagcttgccagtcagtttcacaacacaagaccttctgaagacatagctctgatgttttcactctcttgctccaaaccccgggcatggaggctaaacctgctgtgcagcatgctggctcgtctttcgcgcccctccacctccgccagtcaaagcaaaccgcagcatggaatttgagcattatttgcgtcattcggccagcggggagaatgtgactgacgcccggtcctgtggctatgctgttcctgttgcctggattttagtgtccatgcatctctgcctattgacaccctgccagtccttcaaaagccaccttcaccatggagcctccccaggactcctcctctgtgtggccatactacagggcacattgcctggcaaggggtctgtgtgtataggtcacctgttacagtgtgaactacttggatgcagacactgattccttcccctctccatggagcccagcaggcgctctgcacacagcagccactgaatccagatggcgttgctgaatttaattgtatttcagaggggataggatgttaccctagttagcagcttagctatggttcctttttgccccgcaaagcagtagaaccctttttccaaatgaaacttttctagaaat

SEQ ID NO: 398533 - DNA, 385 bp, Homo sapiens
ccaggcaaccacactcatgccccaggatattcagtggggtgtcttcttcctcttattgcttcctcttactgcttaaaagagtagactatatccggtcgggcacggtggctcacgcctgtaatcccagcactttgggaggcccaagtgggtggatcacctgaggtcaggagttcaagaccagcctggccaacatggtgaaaccctgtctctactaaaaatacaaaaattagctgggcttggtggcgcatacctgtaatcctataatcccagctaatcaggaggctgaggcaggagaatcgcttgaacccgggaggcagaggttgcagtgagccaagatcacgctattgcactccagcctgggggacaagagcgagacttcatctca

SEQ ID NO: 398534 - DNA, 208 bp, Homo sapiens
tcctaaacttattagcccagctactttttaactgcttgaatttactattattatttttgccttgattttatatgtaaacatattcttgtctgagaatttactttttatttttcatgttcatgtaaatacattgtgttttgtttctgtttaatatactctattttttcccataattttcctactactagtgcacattttataaaaacaa

SEQ ID NO: 398535 - DNA, 389 bp, Homo sapiens
taggttgatgaaccaccctaccttccacagaaacctgagactggggatcttacagaactgatctacattcttctagaaccagtctgcaggctcatagccagaagggacttggctcgtctcagatgagactttggactgaagacttttgcattaatgctgaaatgagttaagactttgggggactactggcctggacctcaatccccaggtgtctgcaactcttacttgatatacacacaatggataatcaataatgattcagctaagtatggaaatagagcagagaagagcccctccaggtgtgagcagaaccttgaaggagacagggagcagccatgtggctctcagaggaacagcatttccaggaggaattgtgattgtatttctgg

SEQ ID NO: 398536 - DNA, 485 bp, Homo sapiens
caaaaagccttttgatacccaaaggggtaaatacccattatcagaaagtttattttccctcatgatggaagcttaataaagggtttctatattttggacaccagagaattgctcaaatgtgattttagtgtaataggtctttcttttttcattgagttgatttttaagcatttaatacattgccttgtacaactccaagcttctctataatcaagagcccaagctagatattttgtgggaaacttaactttaaattccaaacctttgctgaaattgacattgtcactttttgtgctgtgccttggatttgtattcttactcttcttgaggaaagatagaaggcagttgaactttgtgaccaagagcgtttcattggcagtccctgcatgattgataatttgtagatacaatattattgcatttctttacatgtattcattttcctgaagagtattatcttgtgcttttaataaaataacatgtga

SEQ ID NO: 398537 - DNA, 592 bp, Homo sapiens
atcgagtcggtactctgtaacatctatgcatgcttcttttttattcaggtttccctctatcctttcaaatttatcctgagtgctactttgctctttaatctaaaatcatttaacaatttgcctaattggtgtgtaaaacgtgctttttaccaaaatcggctctataactcaggattggaatttttcttcccttgactaaggctgcctgccgctgagatgagcccacagtctaaaactgcacatacaaatgttcttgctgttgtcattatcaaaacaaatgctattgctgcgcatgcttgtctgatgttgtactgagcagatacgaaggagtaggaaggagaaagaatgattctcgcactgtcttaaaattcctaatgtgtctctgacctcagcaccttaattttaaataatcagagttgcatatgtactgtgcttttggtttaagggctgaaacatacacacacacaaatcatctagaagaagataattttatatgagatatggtaatacattcaggccatgagagtgggacatttttcacaaacatgtctgatctcctagaaaacttttaagggtgtcccatagttggtaa

SEQ ID NO: 398538 - DNA, 481 bp, Homo sapiens
ctaatttttgtatttttagtagagatggggtttcaccatgttggccaggctggtcttgaactcctgacctcaggtgatccaacttccttggcctcccaaagtgttgggattacacgtgtgagccaccatgcccggcccatggctgtcttttgggagtattttttttttcatcgcctgaacagtttagatgatagtgtctttctattttcttcttaaagtaattttatgtgaatataatttgccatttgtctgtattcactttcaaattccttgaattgctctggtcttcagatgtttctactttagggtagctggaggcagggcttactcactaggttccttagctcaatactaccctcttctgttggcacagtgagtgcagtttctaaagtttactagatcaagcctttttgggagtgagggtttatatgatgtctgattctgtaatactgtctcatttgtataaacatattaatttcca

SEQ ID NO: 398539 - DNA, 449 bp, Homo sapiens
tgagtgagacatcagggcagcggctttgttacttgtgaaggaacaggaaaggcctgaaccccatccagggctttagatcctgggcttccctttctggcaacccctctacctcaaggaggccttggctaagagccttagggcaggcccagctcaagctgaagtcagctggcctcctcctccaggaagtcctccctgaccaccatgctctctctctgtacttgccatgttctttctctctgctgcactgtgggtctttttctacaggggaagctgaggccctccaggtacagatggggttaatacccacctcctacaggcaatagggtatgatgctgaccagggattttcaaacaaagagccaaagagctcagccaaggtcctgcctcagctctggaaagagtcttctgttacttcatcccaactgcttggtgccatcctcacacccacat

SEQ ID NO: 398540 - DNA, 502 bp, Homo sapiens
attaactatcttttttgggccaccatttgccttgggcctaaatggttctgtgttcaaaactaaaacaatgccaaatgcaaaaataaggaccagaaccaaacagggagcccctgtaagaaatgtgcagaaagaaggtaaaagccaggggaggggtgtcccagaccagaaggcatgaaggactagagggtgaagaaaggaaaaatgtagagggagagagggagaattccaaggccctggtgtcttacacctctctgggttttgaaatcaataaataggtattgagtatctataactctgattctcaggggtacttgtgttccttgggtgtaagatagtatgccagggatacaaaagatgggatacaattagtccgttttcctgctgctccagtgttataagtagaacttgaggagtatgaggttggggaagaagaggatcattttatatcgaaaccaataccaatatagagtcgataataaatttcgtatgattacaaaaattc

SEQ ID NO: 398541 - DNA, 431 bp, Homo sapiens
ctcctctaatccaccctctaccccatgggtggggcaatctgggtacacacccacctgaacatgccccggccctggcctgaaagctttctgtggctgccacaattctcatgatagaaccaggactcttggcctgccatgtaatgccctagaaatctaggcctggcacacatgtccagctttgccttgggccacctgtggtctaaactagcaaacagggagccacacaaggttccccccaaatacccttccacttcttttctccctgcctgggcagtagctgttccctttggctgggacctccattatctctcacacttgcctctgccttctgccagccctcccaaatgttgagatctggctgtttcatcctcagggccccatgtgctgcacaccacagcattgatgcacgtgtgcccattctcccatcagac

SEQ ID NO: 398542 - DNA, 434 bp, Homo sapiens
cccccaccccgtactccctggctccctcgtccagccctgttacttcagcggcagctccccgatgcacccccaccagcccgaagcttcccacaccttctcaggctctctcgcctccaggaacgcctcttccccctcttttcttcccctgtcttttaccccgttttctcaccccctgcctgaaatagctctaaatagttcctttcttttttcattaacacatttgatttcttatgagtcgagttaacacagcgtcactttgtaagagtgtctagataattgtctgggaattatggctttagctttttcaaaattatactttgacagtattgtgaataggcagagttcatctctgacattgccagcacctgttgcccatggctatgacatacttccacactcttcctcagttctagtcccgtcagcctccctccagg

SEQ ID NO: 398543 - DNA, 112 bp, Homo sapiens
atgcacatcagtaaggggcttggatagataaaattataatgcatgtaaaatgcaatactatgcagtcattacaagggatgaagaagtatatttactgatgtggaatgatacc

SEQ ID NO: 398544 - DNA, 315 bp, Homo sapiens
agaaggaactggatgagctgaagaaggaggtggcaatggatgaccacaagctgtccttggatgagctgggccgcaaataccaagtggacctgtccaagggcctcaccaaccagcgggctcaggacgttctggctcgagatgggcccaacgccctcacaccacctcccacaacccctgagtgggtcaagttctgccgtcagcttttcggggggttctccatcctgctgtggattggggctatcctctgcttcctggcctacggcatccaggctgccatggaggatgaaccatccaacgacaatgtgagcccacacg

SEQ ID NO: 398545 - DNA, 2168 bp, Homo sapiens
agcgacgggaaacgtctctgaattaggtgttccgctcgcctcttgtgcggtgtggagctgcgcgccccccgccgaggcgggcccaggtacaggctgccggtgagggcgggcccggggcgtgcggctgccgcggcgggaccaggacgagggctggcctctgcgcgtgtctgccgagtccccggctccgggcgtccgagccggggcggcctcggcaggtgaacccggccccggagggggcgtggcctgggaagggcctggcggaggccgggagggcgcttcgacgccgctggactcctgggccgcagcctgggccggactccgggggaaacggctccagaacagaaactgcaaaatgccgcctcggttcagggtccggagccctccgggcggtttttcgctcttagtgtttgtgggtttaagcctccccctactccgtttcccggagtttaaactttagatttactcgtttttggcagtcttgcacgtttggcagtgttttcctacagccagtcctagagtgatttaactatttctttttttatttaccgtaaccatgtccacttgctacgtttcttcccatttctctaaattttaaatcaatttctagctagtgatgctgttttcttgcgcccttgtttttttggggccagggagaatgggtaacgctacctttaagcagctttgataactgtttttgataaaggaagtaaatcttacaagaggaagaaaagaggactaatttttggttggctgttcctaaaaaagagcatcagttcttcaactgctgtttttcgtattgaacaacatccaagtgcagatgtgtggaatattgtgtcatttcctattactttatctgaatgagccttgcctgattctgcccttgaccctgttaaggcacggcagatggtcttcatcccttcgctcctttcgtctttatcgtaaagcactggcagaaaggtagcaggcccggtgactctgaacctgcttcccacactggtttaagtggccggacttagggcccctctggcctgggcagttccaggctccttctctgcaggtgctcagcttatggcttctaacctggtctggcctaatgagggtgggcatgcaggctggatgaaaagacctcacagcttttttctccattccaggtgccttctccaagagaggcagcagggagggagaaatggcaaggaggttgctgccagcccatgtacaggagtccgtgacgttcagggatgtggccgtgttcttcagccaggacgagtggttgcacctggactctgcccagagagccttgtaccgggaggtgatgctggagaactacagcatcctggtctcactggggattctcttttccaagccaaaggtcatctcccagttagagcaaggagaagacccctggatggtggagagtggagttccccaaggcgcacatctcggatgggaaagcttgtttggaaccatagtttctaaagaagaaaatcaggaagtcatgaaaaaactcataattgatggcacatttgacttcaagttggagaagacctacataaatgaagataagttagagaagcaacaaggcaaaaagaacagacttttcagtaaagtgttagttaccatcaaaaaagtctacatgaaggagaggagctttaaaggtgttgaatttgggaaaaatcttggtctaaaatcatcgcttattagaaaaccgagaatagtttccagaggaaggagaccccgttcacagcagtattcagttctctttaaacaactgggggtcaacacagtgcgtaaatgttataaatgtaatatctgtgggaaaatcttcctccacagttcctccctgagtaaacaccagagaatccacactggagagaagctctataaatgtaaggaatgtaggaaagccttcagccaaagctcatccctaactcagcacttgagggttcatacaggagagaaaccttatatatgtagtgaatgtggaaaagccttcagtttcaccacatctcttattggacaccagagaatgcatactggagagagaccttataaatgcaaggaatgtggaaaaacatttaaaggtagttcatctcttaataatcaccagcgaattcacacaggagagaagccctataagtgtaatgaatgtgggagggccttcagtcagt

SEQ ID NO: 398546 - DNA, 793 bp, Homo sapiens
agcgacgggaaacgtctctgaattaggtgttccgctcgcctcttgtgcggtgtggagctgcgcgccccccgccgaggcgggcccaggtgccttctccaagagaggcagcagggagggagaaatggcaaggaggttgctgccagcccatgtacaggagtccgtgacgttcagggatgtggccgtgttcttcagccaggacgagtggttgcacctggactctgcccagagagccttgtaccgggaggtgatgctggagaactacagcatcctggtctcactggggattctcttttccaagccaaaggtcatctcccagttagagcaaggagaagacccctggatggtggagagtggagttccccaaggcgcacatctcggatgggaaagcttgtttggaaccatagtttctaaagaagaaaatcaggaagtcatgaaaaaactcataattgatggcacatttgacttcaagttggagaagacctacataaatgaagataagttagagaagcaacaaggccaccgcaccgcactttcagtacgtgtcattaccatccacaccgctccatgcaggacaggctccaggtgagattgggaccactggctaaatctcgctttgcgacaatttcgagcagaacccgtcacgcgatcagtttaccacgggccaccggtctgttatgcacgggactctcagtctctgtcctgacctggacccacgcgcggcactacgccaccagagtcggcattcgtcccccttacgaggcaggagatacactgtgcacctcgagacgacccg

SEQ ID NO: 398547 - DNA, 1800 bp, Homo sapiens
agcttgaacagctgaacaaggacctaaacaaagttttgcataaagttcaacagtattgctatgagcttgctccagaccaggggctccagcctgcagatcagccaacagatatgagacgcaggtgtgaggaagaagcacaggaaattgttcggcatgcaaattcctcaacaggacagccctgcgttgaaaatgaaaatctgacagacttaatttccaggcttacagctattttgttacaaattaagtgtctagcagaaggaggagacctgaattcctttgaattcaaatcacttacagactcattaaatgatatcaagagtacaatagacgcttctaatatcagttgctttcagaataatgtagaaatccatgttgcacatattcagagtggcctgagccagatgggaaacttacatgcctttgcagcaaataacaccaacagagactgagtaaagatttcattattccaactgcacgggacattgtttttgagaagttcttttcctttatataggcttccaacaccaaataacctaactgctggaaaacaagggaaatttaaatctccaaataaggcattttaatagactgtactgcttcttaaaccagcattgctgaccagcattatatttatttttcttttattattcagatgcagtagcattgcttatgttacatatgtttatattcacaaatatttttaaactgaaatatctgaacataatataatttcgtggaagaatacattgaccattttttttaatgtgcatgaattcaccgcaacacatgcagacaactgctgcaatggagagtatgaagaaacctggtctttttattcatgtcggtggcagtgtggaaattccatccagaaaattacaactccacttgatttagttgatcaccatctcagtcttcaaaagataacatcatgaggtgtgggaagtcctagttttaaggaaaccactgaaatatagatgggaaatgtggactttacaagtatatgttatatatacttgcaatgtgacatggttctgtagatcattttataataataaatattttaatttatcataacatataaaagaaacctttgttgtttgttgaaagaaaatgaaggaacagggggaaaaaaggtgcaaaatgctaaatttctaaaaatggatttggcatgtcttcccatcagttcaggtcaaaagtgcattgttgtgagatttattaaaaaaaaaatgataacacactattttcatattgttttgtttatttgcacaacttttaaaccagattactggttaaaatccaacagtacacaatttataaagtaaaaagattttataaggaaaacaaatataataaccagtgctgtgaaatgcagaagaaaggcttgttttggttgtttttcttttttaggaaaaccctgcctaaaatgttaatcttgtaaaaagtatgtatttggaattttcttcgttttaatagaatattataaagtcaaaatataaatttttttcaaatttggagtttaagatatagctgtagaggtggttttaattcctttagatgtctcataaaatgagactttttatatgttaatgtataataaaactgaaacaagattattttccatttgaaatttttgtatagtttaaaaaggcttccgtattctttgttggtattgtgccactgcagaactttagtgcagagtttatatttagctaaactgttatgttaattaagaaatgcataaatcttctattcttaatatttgtaattctaaataaattgatctatgaaaattaaaaaaat

SEQ ID NO: 398548 - DNA, 559 bp, Homo sapiens
tgccaggcaacgtgctgcatgtttacatacagggtctaattgaaaccttaaaacaagccactgagttaagtaccattacacccattttacagtttgtggaaactgaggctcagagaagttaagaaatatacacaaagtcatgcaagttgtagatgatggatctaaaaatcaaatctaggcttttctaaccccaagatctaaaatcttatccactatattagactagcccctccccaaatagcacagctaccaccagctgggtgcccactgtgtgccaggcacatgatttcatttaactccaatcccatgtcatttggtgatggccctatgtcccaacctctgtcctaggtggcagaggttttagccactgaactcaggttcccatgtgttcagagggaacatcctcagctgtaggtgggttaatcatgacaatgactttacagggcttttagagaattaaattaggtaactgcattctgtgctctgtactgcacatgctcaaataacagtattagtgcaaagtcagaatcagagacaagctgtgatcttatacatagca

SEQ ID NO: 398549 - DNA, 169 bp, Homo sapiens
atcaccatcctaaaactaatttgttgaagaaactggatttttttgtcctgtagatgttccctcagttgcgattttattgattgcatttctgtagttggttgaacattccccatttcccttatgtttcctggaagtcagtagttgtatctagagctcctctgcccaatat

SEQ ID NO: 398550 - DNA, 139 bp, Homo sapiens
gcctgcctcggcctcccaaagtgctgggattacaggcgtgagccaccgcgcccagcctgtttttttttgttttgttttgttttttaaataaaagcagaaaaactttaacaaatataatctacagtatttattccattca

SEQ ID NO: 398551 - DNA, 477 bp, Homo sapiens
accagatgtttggggaagggaagaggtgtggagataattactagagtaggggatacatgtgtcacttcttacaaggattgaaaagaagtttcctattatgccaagtgagatgacacaagaagcagatcttatttctcaatattgatgccttagtccaaaaggaatgaatccattcttctgcctccaggcaatgcaacattcaaagagattgggtttttgttcttttttcagcattctcaaagaagggcattccggccttctttaaccttgcattccagagcctcacagtgcctatactcaggaaataacttcctcaggtttaacttcaatccctctccctgcaatgtgagaccattgctatcctccaaggattggaagaacagctgcctggcaccttgccagtcacatcattccactttcccattgttcagcaaaggaaatggctctgggaatctgttgcttggctcctcgtccgtc

SEQ ID NO: 398552 - DNA, 857 bp, Homo sapiens
gactagttctagatcgcgagcggccgccctttttttttgcctcagcacacattttagttttctcattctctcgctgttagatagaatattcttatgtatttttttgctgttccaaagttagtttcatctgtttgacctttttgtaaactgattcttacatgcatcttacttgactgctaaattaattttttaatttgcccacaccgtgacaaaaaggcagtcttccttatgagcttcaagcgtgaagtcccggagaaagacactgattggcccagcttgggtcatgtggccatcctgaagaaaagaaatgggctattatgatcatatgcccatccccgagggtgaatggacagtgggtactgtggtgacagctctatcacaacaatgtgagatgtgaaatacaggtttccaaaggaaggaagaatgttgggtaggtaaaaaacatgctggataatgcctataatcccagcattcaaggaggccaaggtgagaggatcccttgaggccaagaattcaaggccaacctggccaacaaagcaagacttcatctctacttaaaaaaaaaaaaaaaaaaagggccgggtgcggtggctcacgcctgtaatcccagcactttgggaggctgagacaggcggatcacctgagattgggagttcaagaccagcctgaacaacatggagaaaccccgtctctactaaaaatacaaaattagccaggcgtggtggcagatgcctgtaatcccagctactctggagactgaggcaggaaaatcacttgaacccgggaggcagaggttgcgatgagccgagatggcaccgctgcactgcagcctgggtgacagagtgagactccgtctc

SEQ ID NO: 398553 - DNA, 452 bp, Homo sapiens
cctttcaaaatattcgatgttgcaattacctgtgatgtttacagaacggattgggatcactgataagagatgctttgctggttacttaagatgggctgtatctataagtcctagtcactcttttttgtgaaatttgaatcatcaaattttccaagtagtgataaaaaacaattttagcatatgttaggctattctcttgtgtatctggtagaagtttatgtgatgatggaaatgttttatatctgcactgtctgatatggtagtcagtggccacatgtggctattgtgcactgtatatgtggttactgcaaatgaggaactgattttttttttcattttactaattttaaatactttaaatagccacatgtagctagtggtaaccatatgggacagtgcaggataatgtagaatatttaaagttatggtctcttttttatggccaaaagaag

SEQ ID NO: 398554 - DNA, 305 bp, Homo sapiens
ttttttgagacagagccttgctccgttgcccaggctggagtgcagtggcacgataacagctaactgcaacctccacctcccggggtcaagcgattcttgggcctcagcccaggaatttgaggttacaatgagctatcagtgcgccactgtactccactctgggtaacagagtgaaactgtctcaaacacaacacaacacacaaaaaaattgctttaatggaagaactcagtaaattatacctttctccaaggagaaagatgtttagtttttgaaagctggcaagggtattcactgaaacattact

SEQ ID NO: 398555 - DNA, 614 bp, Homo sapiens
aaaccatgatggcaaaaaactaagaaaactgccatctgacaagagattaataatcagaaaatataaggatctcaaacaagtctataggaaaaaaatcctagtaatccaattaaaaatgggcaaaagatttgaatacatatttccccaaagaagacatataaatggcaaacaggcatatgaaaggtactcaacccaaaacaggcatatgaaaaggtacttgacatcactgatcagagaactgcaaatcaaaactacaatgagatgccacgtcaccccagttaaaatggctttatccaaaaaaaagaaaataacaaatgctagcgaggatgtggagaaaagggaacctccgtacactgctggtggtgtgaaaggaaaatatcttaggcccccagaattacgaagctaaagggaaaagtcaagctgggaattgcttaaagcaaacccacctcccgttctattcaaagtcacccctccgctcactgagattaatgcatatctgcttccctcctttggagaggctaatcatcaactcaaaagaatgcaactatttgtctcttttcttcctatgacctggaagcctcatgcctgcattgagttgtcctgcttttccttca

SEQ ID NO: 398556 - DNA, 288 bp, Homo sapiens
tagagtgatcccggcagctatacggttcaatgagtcacaaatcaccaaggaaactagaaggaggtcaatgatggtttccaaaaaggagcatctctagaatttccttttggagttaggtaacagaatgggaacttgcttttagaatgaatatattccaaagaaaaaattcactcatcttttcccctcatgaccctgggaactgcctccaatccttgttactcaaaatagttaaagatgtacacagaacgaacatgacaatgtctgcatctaaagctgggggccagtgag

SEQ ID NO: 398557 - DNA, 540 bp, Homo sapiens
atattgtctatggctatatttgtgctttgatggcacaattgagtagttgtaacagagatcatatggttcgcaaagccccagatatttactatctggtcctttacagagtttgaccacccctgcactacattataagctccatgaggatggggacccagtctcagctcttatacccccagggcttcacacactggctagcacataatggaagttcgtacaatcgaaaaagttctgtagggctccccatctagaggcagtatatctggtggtggaggatggattctagagtcagacaacattgggtctgaatccctcttcctccacttactagctatatgacattgagaaatttaatctctccaggactttttttcactgtctgtaacatttgggggaaatatgaatagtggcaatttgttgtagacattaaaatcagatgatgaggtcaagacaacttccataaatgctagataaacattagctattattatcatcatccatatgtattatgacctcccatatgtctctgtagattagacc

SEQ ID NO: 398558 - DNA, 480 bp, Homo sapiens
ctttggatgcggcctattggagggcatagggtgggagaagggagaggatcaggaaatatgaggagggggcactagaatttatatcctggtgatgaagtgatctgtacaacaaactcccatgacacacgtttacctatgtaacagacctgcacatgtacccctgaacttaaaagtcttttaaaaatgaaagaaacctccttctattccatactctacctgtcaaagtgaagtataaaacagtcacctcacccatccttctgtctggatggtgagctcagtgtgctggtcatgccagtcagtattatatgagagggcagcagccaggctgctagatatgggattgtggttctgtgtactcacctgctgtcacaaccgcaatgatcattttacctgtcacagctatgacagtgcagtcctaggatgctactatatttttatttatttatttagagatggagtctcactctgtcacccaggctg

SEQ ID NO: 398559 - DNA, 537 bp, Homo sapiens
agccgagaggcccacctttgcaagggaattggtgccttccaagaagacactcagctctgtgacagccaggaccccagtcaccaggttcaaagccgcacagagatctaataacatgtatctgaggccagagtaaatgaggaactttttgcaaagaagcataaaaggaaagagatcttggaatacctagctaatctcagttgctgtctctgctctgaagccctgcctttgaaagctctatttctcctcccatcctctgcgaaagccagatgagacttcttgacattaagcaaatgctggtatactgactttggtgtggggtttgtacatgtgcctgttgagagctggatccttcccgtgggtggatgctggcatggtggctcttccatctaaggatccatctggaaaagtggccgatttcatcacttacgtgccaggacctcagatgccgaggcaggggaatgctgcaatctaaacatttacattctaaaaaatgggaaatcatctgcttcgatataaattagccagggcctgacgggt

SEQ ID NO: 398560 - DNA, 318 bp, Homo sapiens
tgattgttggaccaacagcacctgtagccccccaaggtgaggttggtgagatggggcatgttggcccctgtcagcagtggctctaggtattgttcatggtgttctttggggccccctcactttcctgttggagggactgcgtgaagaccccataccactgtgtctggctcccactctacctgctccagctgcaaggtaggcactcactggcaccttttgttgcagacaccaagaagacgagaaagaagccaagacagaagaaaccagaacccaacctcttgtgggaccggttgacctccccatgcctgccaccaaccc

SEQ ID NO: 398561 - DNA, 600 bp, Homo sapiens
agccgggtgtggtggtgcatgcctgtaatcccagctactcgggaggctgaggcaggagaatcgcttgaacccgggagatggaggttgcggtgagccgagatggcgccattgcattccagcctgggcgacaagagcgaaactccatctcaaaacaaacaaacaaacaaacaaacaaaaagctgccttggttcctttgggtcccctgctatcccaggtcagggtagggctgagtaaggagggaatgtggttcagatttgtgccagagaagaaacgctttaaactactcggggttgggggacggtgttccgctgggcctttccagaagtcttcctaagtcaatagttctttcttgacttttcttctcccatccaccaactggccatatcaaatccaactcctcccatccctaaaaagctgagtgggaagctgctgtcagtcagccctaaccccagggatacgcgaggcctcatcttgcactgagggaagatcaacctcagatggaattcagcttctcggaagctttgtgactgggaaagaagcaggcaggcctcgaagggtttgcagaaggagcccagagtgcccctagggctgggtcactga

SEQ ID NO: 398562 - DNA, 547 bp, Homo sapiens
gtgcaatggcgcgatctcggctcaccacaacctccgccttccgggttcaagcgattctcctgcctcagcctcccaagaagctgggactacagatgggtgccacacgcccagctagtttttatttttattttttgagatgaagtctcactctgtcgcccagactggagtgcagtgtgagactccatctcaaagaaaaagaaaaaatttgttcaagatcacacaactagtcagcggcagaaccaggtttcaagcctgggcaggctgactctaggaagtatattctcaaccacctgagctgaatcactgggcaagatcctgggggcacaatgcatatgtgtgtatgcgaggtagcgggtacagaataaacacagaaatctggatatgagaaataactgtggaatttataattccaaccaaatgaaatccagcaccttgataatcatgatctgactacaatattattaaacaaagctcgaagaggaaaataggaatactaaaaatatcacattaagaccaagatgagtccattatcaccaatgctctacag

SEQ ID NO: 398563 - DNA, 323 bp, Homo sapiens
cgcagcttagtggctcagtttgctggagatgcgcagtgtctgcctcagcagtctcagcagtttctaactaaagctgactttagttagaccgaaaccgaacacatggcatcctgccaggatgacctgaagtcatcctcacctttcctttccacataaagccggcccatacaccttttctttggaactaacccaccagatcttagaagatgtacacgtgcttctttcctttttcctactctacctggctagtctttagatatgtttttcttcgtatgtggtgtttatacatttcacatgaatatatcaaacttttcattcaaatc

SEQ ID NO: 398564 - DNA, 526 bp, Homo sapiens
cttcccagggccacttttctcacttgccagatctgggatttcttattaggagtatctcgagaaagatggtggaaggcatgacttgatcccaagagtttctctttttgactcctagaaatagcctttctcacctatcatccttctctgcctttttttttttttcaaactttcttcaagtactctttaaaaacagtttaaatttcattaaaaactgtagcatgaattcatattccaactcattccagtagcactttaggaaggacttttctaggaaggaggttttttgttctgttttaaacgcagtaagacctagcttcagagcactctagggctctagctaatttgttcccctttgtccctaggtgctagtcatctaatgaatgaggtgtttcttagcattatctacagatatggctttaccttcaattgtgtcaggttacatttacctaatgtcagcaagacttcacatttcatgtatgaatatccagatgaaataaagtcctggttgtattcaccatcaaaaaat

SEQ ID NO: 398565 - DNA, 107 bp, Homo sapiens
catgcatcttcaggcaattttcctgtcttcctgtttacaggctgtctatgttcagctcactccagtagggctatgctgtcattcattctccccaaagtgtagtggga

SEQ ID NO: 398566 - DNA, 566 bp, Homo sapiens
ccagccatttgagtgtgcagttgtctggagcagccacgcagcaggtctctgtagccctgatggagagagttttcttcttgggagggcttcccaggatgatgtaacacctctgcgttttgcctcagtggctgaagagtccctttggacttgggttttgcagaaagagaggggagtctgagggcagagtgtaaagtgacacagccggtgtgtagagctgagcagcctgtgttaggaacagtcagagcctgtggacttgtgaggcttccactcacgtgctatgttagcagttcttttcctcaagctctactgaaagacctgtggacctgacattttatggtcacaagccctggagaagatagccattcattttgctggatgaccttttaaataaacctctagagtaagttccaggcaaatactggaggtggctgtgtttgcccaacagaatccagcaaaaacacttctctgtgcttgaaattccttcttgtacctgatgctttggaatttaggcaggtgataaattaaagatgaatttcttctttttttttaacgttacaatatagtta

SEQ ID NO: 398567 - DNA, 643 bp, Homo sapiens
cgagaattcgttttaacctcgtcactgactggactagactgtaaactccttggcgtctgggatggctcagccgtgcccagcaccaagtgcaggcactcaaacccctgtggagtgcctcagactacttcaccatagtcataaatcctgtcacatcccagggatgcagttcatgagtctcttaatctagcctgaactctacttttgcattcagacaggcaggggatgcctcatcctttgaatactggcacattaagagcagtgacataggtaagaactgaacccaagcactataagagaggatgttaagcaagatctaaaaatcaacgtgatcaacaagagcagtaatcttttcttttccaagaaaaaagaatggaagaaacagaaggtactgggcgcaatgtattaaacactgtgttttgaatgactcgagattctacgactgcctggaggggttttgctggatcggtgcaatgtcatgtgattattggaaattaatcccttttttcaagaatttttcaagaattaggttaagttagatttgagcaaacttaattaccttgccaggcatttgtttttcagaaacataataatctatgtatttgattcaattagtagtaggcccatgggttgttctgtaaatcac

SEQ ID NO: 398568 - DNA, 476 bp, Homo sapiens
ttaaagaaaattgcctaaagacaatgcaagataaaggaaataataattaagccatccccagggatagtggatgtacctgagaaccagttactgatcatgatagagtagaacaaggactggcatgaggaataggaggcctgggctttattcctttcatggtcacaagcccaagttttagttgtttcatctagaaaataaaaggcttgggggagatccatgctttccaagtgtactatgcatgggattcagctgtgaagcgtgttaaaaatacagataccttaggtccatctaagtttggaagaatttgaacttagggccagtgcccatgaatctgtgttttttactaactccatagtgattgggacctacaacaaggtttgggaaccactgttccagggatgtctaggatttttatttcagttcggaatggatatgacactcaatgtctacatcaggggaatttcatcactgagaca

SEQ ID NO: 398569 - DNA, 484 bp, Homo sapiens
accatgaccacaggggcctcttccctgtcccccctcgcctacccccgtctgtcctccatgcagcagccagccagccaggtgatccttttaaaacacaatccgatcaagttcttcctctgcttaaaacgctcagtgattcccctcagacatggattaaaatccctgttcctcgccctgacctacaagggcctgggtggtcagtcctggatctgtctgcctctggcctcagcccctcccagcttcctctgcacagccctctgcctggctccttcctggaggacccatccctgctagtggggttacccgacctacccctgccctgcactgacccccgccctcctacctcgttgcacaccagcctctgagatgaccttctcggtcctgtttaccgaagtttcctggtactgggggcagcgcctggggcagagcaggctctgtcaacccccactgaatacatacgctgtgcaggtgcttagcactcggt

SEQ ID NO: 398570 - DNA, 511 bp, Homo sapiens
caaaacaaaacaaaagaaaaaaacacctagagagtgagtttgcaacacagatttgcaggactggtgcctacaagtagagagagttttttaaaccttatatgaggttaggatttcgggtttctcaggagccaggtttaatataacctatagcaagttagtttctcagtcatccttcagtcatgaaatgcattatggtgcacacacagggtttagatttgtgcaacccaagtgtaggtgtattgtttactttcaaataaagacttacagtgacattgtatccctgagtctcctcttgacaagcacagtatttcagaaactcttggcggcagttccagttcagtatggggcctggttctcattttagtccaagtcaaagcagctgagggggttctaccccagtgtgtcagggggacctgtcataggcatgtcctctacttggttccagatttaacccctgaatgattcagggggattttagtcacatgagatctcagacgctgacttggaagtg

SEQ ID NO: 398571 - DNA, 922 bp, Homo sapiens
actttttgcgtctttatgcaaaagattttttttaaactttttagttctgcagtattgttttggcagttttataccatttggaaaggcttagtattcttcagaggcactgttacaatgaagcaagttattcttcagtccaacattaggtaccacaatagccatagcatctctttttagctatttttaaatgtgttttcataagcagtatctatagtttcccattccacattttaaaaaatatttgatatgtcagtcatttgcttagaaacttttttagaaagtatattgcaaaatgatagacaaaaacattaattgatgatggtttaataaataagagcatgcaattagtgaatctttaaaaggctgttctcacatggatgattatttttgcagaattgaatacttaaggctttaattttatacttattgctagatcattatatccaattattttgaccatttattcaaataataaaccaagtctgaatatttatagtgaagaatgagttttgtgaaaggagaataattatatgtctctctctctgctattttattctgcctgccatcagagtacaaaaatatacattcacatcatctgtttgttgtatcatattcttggatcatacagatttagttacaatacacacacaggtcagccagcgttaaaagactgaaaagaatgaaaactataaatgaggacagatgagctatgcattatgtaatgacaaaacaggtgtctcggaagataaacaatgttcagaagcaaagaagatttaaatacttttgaatctctaattactttattctggttattagacaaagcaaatagctttcaaatgaagtctaaactttctgtagtacaattgaagtacataatgttgaatagctctagcttcgtttacttttttttagaaaggcaaac

SEQ ID NO: 398572 - DNA, 972 bp, Homo sapiens
acttggaagcctgagtgggaaggactgcttgagcccaggaggtcaaggctacagtaagctgtgattccgccactgcactctagcctgggcagaagagcaaggcctatctcaaaaaataaaaaatgaactggactagtgatagatatccaaaaccaccagcctgaaaaattctaatagtctcctacctgattttgctacctgcatttgcacttcacttctggtttgtcttcccacatggtcagcatggacagcttcctaaaataaagacctgcttatggccaggcacagtggctcacacctgtaatcccggcactttgggaggctgagatgggaggattgcttgagcccagaagttcgagaccagtctgggcaacatagtgagaccccatctctttaaaaaaaatttttaatggaaaaaaaaaagacctgcttatgtcaccccttgcacaaaagttctgaatggctctccagtgcctgcatatctgaggccatacttctttgcttattatacaggtacactcaaaatatactgaaacctctttccagctttattctcttgtcaaataaaaataactagtatttataaaccatgtgtcagcctctggcctaagacttttgcctacattatctcctgaatccttgtaacaacccttaaactaataactacttttactatttcagttccacaaaggaagaatctgaagtccagaggtgtaatacgcccccatgttacccatctagaaggccctcatgaatatcacagtaatgttgggatgctggcattcttccccaaaataacctacattcccactttccacacctttgcagtcaaggctctctctttactgaatgcccttttcctatcttcccactctaatttcccacctctaattttctccattcagccttcaggcactagataaaatgctatttcctccataagccttctctaaacatcatcctattcatttt

SEQ ID NO: 398573 - DNA, 487 bp, Homo sapiens
gcaccttgaatattcctttttcaagttcctcttcctcaggagatattcaaggtcactttgtcacccaggctggagtctacaatggcaggatcttggctcactgcagcctctgcctcctgggttcaagcaaattcttgagcctcagcctcccgagtagctgagattacaggtctgtgccactacacctggctaatttttatatttttagtagagacggggtttcaccatcttggccaggctggtcttgaactcctgatgtcaggtgatccacccacctcggcctcccaaagtactggaattacaggcatgagtcacccctcccaggcccccccctttttttttaatcctaaaaagcttcctaagggttggtcagagcagttaactccagtgaatacctcttctaaagactcagcaaaagggtcatttgtgcctctttaactgttcttaccaaactgtcctgtctcttttctgctgccaactaagcagc

SEQ ID NO: 398574 - DNA, 354 bp, Homo sapiens
tggtaaacagggaaaccatcagtggcccccacgctctcaggcctgggggtttctatccaattccttaaatccagtctctccttggccagcccagattcttctcttgatggtgtgcccagtagctttctctttaaccacagtcttagtcctggatgagccctttgtattccaaggatctcttctcctctacttccttctgccaacttcttactcatttgtcttcaataatgtattcaaacatcttaactgttgtatctactccatgccaggcaggtacttgagcactggtgggggaggcattcggagatgagtaagacaaagacaaagaactcaccattctatcctggtatcagg

SEQ ID NO: 398575 - DNA, 536 bp, Homo sapiens
cagggactgcacagaagcgaggtcttgtccttcttgatgcattggatcaggaggtacacgacactccccatctcatggccggtgatgccagctttgattgttcagttaagatggcatctgccaagtttctccactatcaatttactattttaccctttgtaattcatacgtatctcatgggggaatactttgcaactctatgagtattgtgtttctcatcaaacttttgcctgctactttcagcattcactgatgatgcttgcctgaaacagtaactactgcagatatactgtatttgtttcccagggctgccttaacaaaatgccacaacctgggtggctttaaataacacatttgtcatctcagttctggaggccagaatgctgaaagcaggtgttggcaggttggttgcttctgagagctgtgggaagcatgtgttccatgctgctcccctagcttctggtggtttctgcaatctctggcatcccctggcttgtagatgcatcactccagtcctgtgcctttacatggtttct

SEQ ID NO: 398576 - DNA, 428 bp, Homo sapiens
aaaatcgcttgaacaggaggcggaggttgcagtgagccaagatcacaccattgcactccagcctgggcaacaagatgaaactctatctcaaaaaaaataccaacctctaaaaaatccacgttggccacatggccttgagcaaataaaagagtaccaaacttcatcttgagttcgagttggcctcagttcctcttcccctcttcagacatagaggactgtgagcataattgcactgggggtggccttgcagccattttttttcttcaccaaagagaatgagagccacaggtcaaccagagcctcttacgtgcctacttacattagggttcctagactgcctggctgccaggagtctcttccatctcccatccttgggcggaccacttgaggtcaggagttcgagaccagtctggccaacatggtgaaac

SEQ ID NO: 398577 - DNA, 414 bp, Homo sapiens
caccccatcaggcctctgtgcacctaccctggatccagaccaccacaggacatcagggaagtttgcctgagaccccaagtgcgcaatacttgtgggatgcttctgaaacacatgtacattatgtacattactctttgccaatgcatcttgcaagaggctagaatgtggtggggtaggaaacttgccatttaattttaccttcctggagatcctagagtcaaactagtgtgtggatctgctggacacccgtaatgagctgcaccttgtcccaagtgttacagaggtctggaggcctcgggactcagggtcagcttggcagtttccacgtgccttcccccatctatattgtatttttcagtaagggattgcacacagaaatcaaataacagaaggtgcctgtgtgagaaggggatg

SEQ ID NO: 398578 - DNA, 497 bp, Homo sapiens
tcttgccttagctccagtctttcctgcctgctgcctcctttctgctctggtcaagaaccacccctctccagcaccccctacagaagtatcccgctctccccaggccacagggcacagcccctctcctttgttctgacacccctcccagagatggagcctcagactccatctcagaccctggaaaggggtcccgatccagaccccaagagatggttcttggatctcgcacaagaaagaattcagggcgagtccatacagtaaagtgaaagcaagtttttaagaaagcaagtaatggccaggtgtggtggctcatgcctataatcccaacactttgggaagccgaggcgggtggatcacttgaggtcaggagttcgagaccagcctggccaatatggagaaactttctactaaaaatacaaaaattagccaggcgtggtggcacatgcctgtaatcccagctcctcaggggctgggacaccagaatcacttgaacccgg

SEQ ID NO: 398579 - DNA, 590 bp, Homo sapiens
aagagaatatgaaaaaactggaatctaaatagtcagtgaggaaggctttgataaaatgaaattgccagaaagatataaaactggttagggtcctacagggaaataaaattataaccgtggaggtacatttctctaccagaaagcaaaaataaagcatcatgtcttaatggttttctacaaatcaacttctaattctacagagtccttaatctggtccctattaaattcttggtcagacaaagttacatttcccaagagagtcaggtgacacttgagtgagtttgatggataatgagctaatgtgatatctataggtcacaattttttaaaaccaaaattttcaagtctgggataatctttcctaaatgggatcaaatgaaataatatgtgtaaaagagtcaaatgcagtcctttaccatagtaactgcctatggacgttgtctttcccttacatgcctgcctacacttaaccagatgttggttttcaatgtctaatttgtcattagtttcaccacatttgctcactttttgtaacatttttgcaagatttgaaaactttcagtaaatgttttggcactattggtacttga

SEQ ID NO: 398580 - DNA, 230 bp, Homo sapiens
gttgatgaaatcaataagtatacagtgactcaaacaagatgtggtggcttatttccctcatctaacagaccaggggcgggctggagtccacagcataggagatgtgtttctctgtcctgcaaagttgtcctggagaccagattccttctgtctagatgtcccaccatccctagagttgtgtcctcatctgcatgttcaaactgacacacatcatcacacccaccagatcg

SEQ ID NO: 398581 - DNA, 192 bp, Homo sapiens
tcaaagattgctattatcataggatgggacacaccctcaataatacgatggcgctggtgattctcatctgtgtccagcattgaacatcaaggcagtttcccccatattgagaactgaggtcagtctgtgatccacagggaggtgagggggctgtgctctgcatggggtttggttagggccagatctgtgtcc

SEQ ID NO: 398582 - DNA, 369 bp, Homo sapiens
tgaagagagtctaacaggtttaagtgggtcagatgccatgactcaacagcttccccttgatcctttaatctcacatctgaagcataagacctatccaggttacttggggcagcaccaccattgtaccattaaggcttctctttcagaaggatgaataatccatctgcagcactattttacactctagttcaattcaagactctgaatatgatttataagtgtgagtgattattttaagatcaaccagggttaagccagggaaattctgtcctctggtagggagcctcaatgaccagaccactgtaaagccccaggaatgccaagaactctgaagaagaaagattcacctctaagtgagttggaggaggc

SEQ ID NO: 398583 - DNA, 359 bp, Homo sapiens
aaggatcaacatagctagtaagttacagactcaaaacttggatgaatggtaagttctgtaccctttatatatcatgatgttacatcccagaagacccaagcctcacaaatctgtagaaattcggtttatccacttactaatcatatccttcttaatgctctgtctcacatatggagaatgtgcttttagagacatgagtaaagattctgcttggaggctcaagcactaaatgtgtattacatgcttgcttggtttctggaaccccttaaccacacagtatagttggagtggtgttgatactgggacctctgtaagtttgttgtgtgtagttttctgcagctttgcacctcctagggccc

SEQ ID NO: 398584 - DNA, 534 bp, Homo sapiens
tgctcattcttctccatgaagttgaatccttcacacaaaagagaagatgccatactctctttcttggacccaaacactccttccaccccttgtttcaggggctgacccaagatgaaaagccccatttcatcaaaggctcctcagtggtctcacacgaccctccagagggctggggagtaggaatctggctgttgctgccaccaaagggtggattgtggggcaccaggcttatctaccctagaacacaagaaggtgggagtttcctaaagtgtagaccagttccagaatcatagaatcttagaacaggaacttaccagctttgtgactttgtgcaagttataaccactccaagctttagtttataaatctgtaaaatgggtaaaaaatccttgcctttcagtgggcacctgtaatcccagctactcaagaggctgaggcagaagaatcacttgaacccaggaggtggatgttgcagtgagccaaggtcgcaccaccacattccaggctgggcaacagagtgagactctgtctcca

SEQ ID NO: 398585 - DNA, 360 bp, Homo sapiens
accaagttggaggtgcgtcctccttttgccagacctcctcttgtgcctcttgctgtatgcagagcgtcgtgatgacagctcgtcaagctttccaatttgagtcttcagctatccagaagctgtgaaggggcagccccgtcaccagacacaatccttgcaaagggacagcctccatcagcctccatggaagactgacagacccacacaggggagaataaatcaacctgcaaatgaagcattcagccagcttgggagttctgctttccattttaaattaatacaccggccttctggtttgtacatcggttgtcctcccgtgggtctggctggtaggcattggtttctgaggggctggctgtg

SEQ ID NO: 398586 - DNA, 326 bp, Homo sapiens
agctttgatgaggccgatgcacagtgcgaatttccagaagcgggctcgtcaagctttccaatttgagtcttcagctatccagaagctgtgaaggggcagccccgtcaccagacacaatccttgcaaagggacagcctccatcagcctccatggaagactgacagacccacacaggggagaataaatcaacctgcaaatgaagcattcagccagcttgggagttctgctttccattttaaattaatacaccggccttctggtttgtacatcggttgtcctcccgtgggtctggctggtaggcattggtttctgaggggctggctgtg

SEQ ID NO: 398587 - DNA, 439 bp, Homo sapiens
cccagatgggtccacagcctttgggggactgtgacagcatcacggcaggacgggtgctctgtaatcgttacgcaccaggtgtcttgggagcagaggaggtggctccccacaaggtcacgttgtgctgatgtgatgggtgagaacggtgaacgccaggctcgtcaagctttccaatttgagtcttcagctatccagaagctgtgaaggggcagccccgtcaccagacacaatccttgcaaagggacagcctccatcagcctccatggaagactgacagacccacacaggggagaataaatcaacctgcaaatgaagcattcagccagcttgggagttctgctttccattttaaattaatacaccggccttctggtttgtacatcggttgtcctcccgtgggtctggctggtaggcattggtttctgaggggctggctgtg

SEQ ID NO: 398588 - DNA, 262 bp, Homo sapiens
ggcaacagctactcagcttgctaatcctatctcctgctgggcccacacaaattcctagcggtccacagggacatagtagttgagggctctgatagttgagaagttacattcctctaatttaaaactgaaaataacgtcagactaaaactgcccactcatcactccggcacagtaagctgctggtttacactctccctacagcagagcaagtgaattgacccagacatcattttaattcatgggggttagtggaccctacacc

SEQ ID NO: 398589 - DNA, 547 bp, Homo sapiens
  misc_feature (180)..(180): n is a, c, g, or t
cggtaccgactgcaatctgtgcctcattagttactggcattctgagattaatcccaaatgatcatggagtgcctacagtgtgcctagctctaagctaggtattggcaggaagtagcagggatcgagccagggggcctctagctaatctagctggaagggtggacagtagacaggtagttnatacttacatggttcgtgctttcacgcttttctgctgcagaatacccattccacacacacacacatccttgagatgcctagtaagtagagcctttgtagcctgaagataacactgtgagtgtatctgcacaggctgggctacctgagaagctgttggatttggtgccttgttaggctgacttttcctactgctgggccatttatggttttggactaattttggttgcacctgctttgatgatatgtcaatttggggttaaagatagcatcccttcttgagggttttatctaggcacaacctaactggtagtttgttcagtagaaatgtcattatctaccattgtgtttcccagagggacatctttgt

SEQ ID NO: 398590 - DNA, 763 bp, Homo sapiens
aaaatcagctgggtgtggtggcgtgtgcttgtaatcccatctactcgggaggctgaggcaggagattcgcttgaactcaggagggggacgttgcagtgagccaagatggtgccactggattccagtctgggcgcacagcgagactctgtctcaaaaaaaaaaacaaaacttcccttttctgctggtgttccaggtaggtgaggctatgtgataaatagaacctggatgtttaattataaattcaagtagcagaaaaaaattccaatttttacacctacagtgcaaaatatcaaatgacattataggccattttaaaattctttccatagcctcctaaacagatttgttaaaataaaaaactaattcaaaagactagaaagctactaaaatagaggaatatacaattttatttcaagtacagttaattaatttttttttagagatgtggtcttgttatgttgcccaggctggtctcaaattcctgggctcaagtgatcctccagcctctgcctcccaaagtgttgggattacaggcatcagtcactgtgcacatcaacaattaatagtttgagagtcactggcaatgacttgtaaaaattttaaagcaacgaggccaagacaaagtttaatatattgggactatattttgtctaaaaaaattagagaataaaaatgttatataactcaaactaataaaacacaatgggaattctattaccaagatcaatgctgacaggcaacactgaaatgaagttagaaaaag

SEQ ID NO: 398591 - DNA, 492 bp, Homo sapiens
ctccacacattccctctggctgcaggcccctgggatttttctgtgtgaccccgtcacattgcatctgtatagattgtcaaagcacctcatgactgtggaggaagaagtcggggacagaacatggatctggaaggctcacagcatggatttggtagggtgacacaatgtcccatgttcttcaagaaatgtctagactaggtgattgattctatcgtagatctggcacaatgctcctgccacacagggggcaaattgagatccagagagaagtgactggcccaggtcactcagccagctggtaacttagctggaattcgttcccaggtctcctgacatccagttcattcattttttgcacgtttcctgaggacttactgtatgctaggcactgttgtaggtgctaggcatatacaaagtgcccgtatagagcttgtgtcttgtagtgtgtgtgtggggagattgtggataaacaaataaacagatttatccaga

SEQ ID NO: 398592 - DNA, 265 bp, Homo sapiens
taaatattacctgttagaagtctttttaggggtctctgagcagacactctgatgtttccttggtcaggattgcaccattggcccactgtctacccaatctttgcggatggttgtgatactgcaatagtgtttcaatcctaggggttggggaagggctcggacccctctatagcacagagccatgggccatatgataaacgtcaggtctctagaaagagaaaagggaggaaaagctagtaagtggggaaagctagtatgtgtttgc

SEQ ID NO: 398593 - DNA, 233 bp, Homo sapiens
caataattacagtaaaatgttatattacatgtattaaaatatttttgtcatagggcccaagaaattagacaacatcagaatgcgacacctggatctaagtttcacaattttaattcacgtttttgttttttataacttcaactttttttttttttttttttttttttctccaatttttttacacctttggggagagaggggagtttacaatctctggggtggcccagaggggg

SEQ ID NO: 398594 - DNA, 248 bp, Homo sapiens
tccgtgtcgacctgcggcaaaactgtgaatggtctgacttcaacatgcctgaaagtgcacagagaaacccaggcaggaggcaccaagtcgtggctgatactctgggaccgcaggggccggggttgggtggtggcgccgcgtccagggcagcaaagcttcccgcacacgctgtcccttctgagcaccagagccgagacctgcttctaacgctggacccaagcgatgaattattgctacagagcggccgc

SEQ ID NO: 398595 - DNA, 251 bp, Homo sapiens
gagttctgataaaaggcagctgagtttggaaggattgtagcctcaggatggctcctctgccttttgacccatggttgaggaaattctgcctcagcagccctgtctccctttctgcatccatctcatagtccccactggtgatcccccatctcaagtagcaaattccaaagacgttggagaatgttggccttgttggttgtctcatatcagaaataatctgagagttgcttgtgaattgcaggactatttag

SEQ ID NO: 398596 - DNA, 1690 bp, Homo sapiens
ccggcttttgcgctgggagcccagagcaggaggcagagcccgcgggaagctcggagcactcaggacgccgcgcgcccttccccgccctccctgaccagggagcagctcgctccaggcgcccagccgaggcccccagcccagtgggagcaagtcatagagaacaattcgagagacagagagacggagcgcgctttcctgctcagtcctgaaaagtgagccgctcccgggtttgcaacctcaagcttcgcagcagcggcggcggcggctgccgggaaggaggcaggtgcaggtgcaggagggaggcggctctgggctccgcgcctgggtcttggccatggcctcggtcctggggagcggcagagggtctggagggctgagcagtcaactcaaatgcaagtccaagaggaggaggaggcggaggtccaagcggaaagataaagtaagcatattgtcaaccttcctcgctcctttcaagcacctgagtcctggcatcacaaacacggaggatgacgacaccctcagtaccagcagcgcggaggtgaaggagaaccgcaacgtgggcaacctggccgcgcggccaccgccctccggggaccgggcccggggcggcgcgcccggcgcgaagaggaagcggccgctggaggaggggaatgggggccacttgtgcaaactgcagctggtctggaagaagctgtcgtggtcggtggcgcccaagaacgcgctggtgcagctgcacgagctgaggccgggcctgcagtaccggacagtgtcgcagacgggcccggtgcatgccccggtcttcgcggtagcggtggaggtgaacgggctcacgttcgagggcacaggccccaccaagaagaaggccaagatgcgcgcggcggagctggcactcaggtccttcgtgcagttccccaacgcctgccaggcgcacctggccatgggcgggggcccgggccccggcacggacttcacctccgaccaggccgatttccccgacacgctcttccaggagttcgagcccccggcgccgcgccccggactcgcgggaggccgccccggggacgccgcgcttctgtccgcggcctacgggcgacggcggctgctgtgccgcgcgctggacctggtgggcccgacccccgccacccccgcggccccgggcgagcgcaaccccgtggtgctgctgaaccgcctgcgcgccgggctgcgctacgtgtgtctggcagaaccggccgagcggcgcgcgcggagcttcgtgatggccgtgagcgtggacggcaggacgttcgagggctcggggcgcagcaagaagctggcccggggtcaggccgcgcaggccgcactgcaggagctgttcgacatccagatgcccggccacgcgcccggcagggccaggaggacgccaatgccgcaggaattcgcagactccatatcccagctggtcacacagaagttccgcgaggtgacgacggacctcacgcccatgcacgcccgccataaagcgctggcaggaatcgtcatgaccaaagggagggaattccactctgagaaacaagggtgacccagccgcgaggggcatgctgagagccaagaaggcgtcctctccagtcagccaggatgggggaagatgaatgagggctaaatttgatcaatcggccctgtggaaacaacgagccaccaacccattaataac

SEQ ID NO: 398597 - DNA, 3655 bp, Homo sapiens
ccggcttttgcgctgggagcccagagcaggaggcagagcccgcgggaagctcggagcactcaggacgccgcgcgcccttccccgccctccctgaccagggagcagctcgctccaggcgcccagccgaggcccccagcccagtgggagcaagtcatagagaacaattcgagagacagagagacggagcgcgctttcctgctcagtcctgaaaagtgagccgctcccgggtttgcaacctcaagcttcgcagcagcggcggcggcggctgccgggaaggaggcaggtgcaggtgcaggagggaggcggctctgggctccgcgcctgggtcttggccatggcctcggtcctggggagcggcagagggtctggagggctgagcagtcaactcaaatgcaagtccaagaggaggaggaggcggaggtccaagcggaaagataaagtaagcatattgtcaaccttcctcgctcctttcaagcacctgagtcctggcatcacaaacacggaggatgacgacaccctcagtaccagcagcgcggaggtgaaggagaaccgcaacgtgggcaacctggccgcgcggccaccgccctccggggaccgggcccggggcggcgcgcccggcgcgaagaggaagcggccgctggaggaggggaatgggggccacttgtgcaaactgcagctggtctggaagaagctgtcgtggtcggtggcgcccaagaacgcgctggtgcagctgcacgagctgaggccgggcctgcagtaccggacagtgtcgcagacgggcccggtgcatgccccggtcttcgcggtagcggtggaggtgaacgggctcacgttcgagggcacaggccccaccaagaagaaggccaagatgcgcgcggcggagctggcactcaggtccttcgtgcagttccccaacgcctgccaggcgcacctggccatgggcgggggcccgggccccggcacggacttcacctccgaccaggccgatttccccgacacgctcttccaggagttcgagcccccggcgccgcgccccggactcgcgggaggccgccccggggacgccgcgcttctgtccgcggcctacgggcgacggcggctgctgtgccgcgcgctggacctggtgggcccgacccccgccacccccgcggccccgggcgagcgcaaccccgtggtgctgctgaaccgcctgcgcgccgggctgcgctacgtgtgtctggcagaaccggccgagcggcgcgcgcggagcttcgtgatggccgtgagcgtggacggcaggacgttcgagggctcggggcgcagcaagaagctggcccggggtcaggccgcgcaggccgcactgcaggagctgttcgacatccagatgcccggccacgcgcccggcagggccaggaggacgccaatgccgcaggaattcgcagactccatatcccagctggtcacacagaagttccgcgaggtgacgacggacctcacgcccatgcacgcccgccataaagcgctggcaggaatcgtcatgaccaaaggcctggatgctcggcaggcgcaggtcgtggccctgtcctcggggaccaagtgcatcagcggcgagcacctcagtgaccaggggctggtggtgaatgactgccacgcggaggtcgtggcccggcgggcgttcctgcacttcctctacacgcagctggagctgcacctgagcaagcggcgcgaggactcagagcgatcgatattcgtgcggttaaaagaaggtggctaccggctgcgagagaacatcctcttccatctctacgtgagcacctccccctgtggagacgcaagactccactctccctacgagatcaccacagacctgcacagcagcaaacacctcgtcaggaagttccgcgggcacctgcgcaccaagatcgagtccggggaagggacggtccccgtgcgtggccccagcgcagtgcagacctgggacggcgtcctgctgggggagcagctgatcaccatgtcctgcacggacaagatcgccaggtggaacgtcctggggctgcagggcgcgctcctgtcccacttcgtggagcccgtgtacctgcagagcatcgtggtgggcagcctgcaccacacgggccacctcgcacgcgtcatgagccaccgcatggagggtgtcggccagctgcccgcctcctaccggcacaaccggcctctcctcagcggcgtgagtgacgccgaggcgcgccagccggggaagtcgccccccttcagcatgaactgggtcgtgggcagcgcggacctggagattatcaacgccaccactgggcggaggagctgtgggggcccatcccggctctgcaagcacgtgctgtctgcacggtgggcgcggctgtatggcaggctgagcacacggacacccagccctggagacacgccctccatgtactgtgaggccaagctgggggcgcacacctaccagtctgtgaaacagcagctgttcaaggcctttcagaaggctggcctgggcacctgggtgaggaaaccaccggagcagcagcagtttctactgactctctaggctgcgggctcctggctgctggagctgagcgggacgctggagggatgggaccgtgtctggggggcgacgtggcgggtcggccggttccctgcattcgttttactttggtgtcccagaaacacgcgagtgtgcaatgtttggacgagcaacaacacaaattcagaacgtgcctctttccagatcgctggccccagaaccctgtcccccacacccaggggcacacgcaccgttgagttagcgccgactcttcctgtggagtctgagggaggggctccattcaggcaaaggggttttagctgcagccttggaaggaggcaccgacacgacaccaggcaggagtgagcctcaggccccgtccctgcaccccacccctgcgtgcgcctcttggtgatgctggggtctcactagcttgagggggcacatgaagataagccacaaatgaagagaaaagccatgcccaccccagccccagagaaaccaataagaatcctctattattttcactattcgtttaggtttttatactccacctcctttcaaaaaagatttaagatgtacgacattaccgaacacctaaaatagaaccagagaaacgaaagccattcccacaaagtgaaggaacagtttccaaaacccctgcgaggcagagttaagacctgtgacgtggggagcctggaaacacctggcccacgcgtgctgcagatgtggggagcctggaaacacccggcccacgcgtgctgcagatgtggggagcctggaaacacccggcccacgcgtgctgcagatgtggggagcctggaaacacccggcccacgcgtgctgtagatgtggggagcctggaaaaacctggcccacgcgtgctgcagatgtggggagcccggaaacacctggcccatgcctgttcagtccgtcatggcgtttggtttatggtggccgatactaagagccactgaggtctgggttgtgtgagggttagctaccaccctataacctccctaccaggtaataaggagaccaagtctttgatcaaattctgattttttaactaaattttcattagaaagcaagcacaaaataaaatcaaaacaacctttaccttca

SEQ ID NO: 398598 - DNA, 294 bp, Homo sapiens
aattttgaatttatttatagtaacaactgtcattcattgagtgccagctgtgcactcagagctgtgcaaagaccttaacctgcattatctcattaataagcccccaaggccccctgaagaaggcagttatattcttacttggcagatgaggaaacagaccagagcagggatgtgacttgcccaaggtcacacagcaagcaagtgtcagatgtggaatttaaagtccagaatccttatctcaacttctcccatgggccacctctctatgaaaagaaaggcagtggggtagtttat

SEQ ID NO: 398599 - DNA, 328 bp, Homo sapiens
tgtcacagagtcgattcagtgccggctcatccctcacaccagcccccacaaccaccgatcctccgtgtctccacagctctgcctcttccagaacgccacggagctagaaccatctggcatgcagccttttcagatgcgcctctttcccttagtgaatacgcagttacctctcctccatgtcttgctttgctttttaagggtgggatgtaattttccacaaagtggagttcgatactgtgaaacttatggaaaatttgctcttttaaaaaacagcttgcacatcatgtcatcttaaaaaaaaaaagtctaataaagatatgagtaggga

SEQ ID NO: 398600 - DNA, 1537 bp, Homo sapiens
aaccaaaaaatagcgtctgtagcccctgtgtgcttactttaagtatatgttactgaaaaatgcggagtgagcacttaacaactcattctcctgggaagcacagtgctactataccccaaatgcttttctttatcattttaatttttatcttctttacttacatttccaacatcagttaagagggtcttgtagttttctaactgaaaggagactgtaaaatctccttgctcaaaactcagatgcagaatattatttttactacaataaatacatctacaacaatggtattatatctggtttatttcaaagtcaagttctaatacaggtaaacaaatatactaataaagagataatgcttttctcatgaaatgtataatctagtaggaataaagataaacaatttttttaaaaattctatttcattaagcaaaaatgcaactcagaagaataatgtatattagcagtcatttactatttttcaattaaattccgatatatatgtaaagtaaattattactaatatcaaacatagtttaaagaattagtgactatgtgcacttggatctccatatgtaatgtactatcagcatcttcacaaacacagtaaattttaatacgcaagtaaaacttattttactaaacgatgattactccttctatattcatattcctaaacacatacagtttcttaatgtaattaagtttttaactaaaaaaagggaaatgcattattgaggcgataggattactgggtggctataaacacatctgctgcacagctgacatttatcttctacaatgagcagtgacaattttattttttaataatcagtatggactaatcctgatgattttttttaacattttcaaatagggctgcatatggcttaaaattaatatatacatgtgtacctatataatattcttatttattaatggacttcctacatagctcatattgacgttagatttaaatgaaattccagaagggttttctataggtaagtcatacattggatttccatattacctatgattattgaagtatttatttctgtttttaagacttcagagcaattttgctggtcatttgttttctgtgtttttattttgaaattgttctttgaggcattgtcctattacatttttaaggtatgttaataaaataatatttttaatgaaaaaaaaaaaaaaaaaaaaaaaaaaaaaatttttggggggctggcgccggaaaggtttttaaacccatggtggggggggggcaccccagaagtgtaatagaaccagcgggccacacgggtcgtccaaagaaaatccggggtcacacagcaaggtgtggtggtctcccaccatataaaaaacggccggcggcaccggactgtgtttggaaccatcccaagagggtgtcagggacaaggggtctcacacagcggtccaggagtcagataataccccggcggggaaaaacacgaacgagagacgacaaactcacgacgggcagagacgcagcacagcagagcagaaacagaagacacaa

SEQ ID NO: 398601 - DNA, 410 bp, Homo sapiens
ggaaacccagcaagaaagaattaacaatgaaaggcaggggttcccacactacgatgtttattacaaaacactctagaagaacctggtagggctgaggtggccctcggggatctccatcttaaacaaattggcccagaaatcacattttgggaaatacggttttttttttgatggatgaatgccactttttttttttccagttgtatttcttttcttttctttttttaaatttcaatagttttggagggatcaggtgatgtttgatgacatgggtaagttctgtagtggtgctttctgagattttggtgcacccatcaccctagcagtgtacactgcacctaatgtttagtcttttatcccttaccctcattttgagaaacattgatagaacatcttacattgtatatctg

SEQ ID NO: 398602 - DNA, 526 bp, Homo sapiens
atggacgttcttttgaatgaagagatcagatgaagtcacttgtttgggtaaaaggacttaacgttacatataagaaactacatcctaatgtttggatggctcagcatgagtagttgaatttgtataagataatgtttgtgtgatgctgctctgtcattcagtagcacagtggaatgctctccaaccaccaaaaaataatcaaatttctaaaatgaattctgatcagcaaagacagatcggttttattatgtcattgaaaatgtcaaacacaaaatactgcatacaacaattccatttgtttttttaaatagggtgtacacaaacacacacacacacatgcatccgttttaacaatttttcaaggatatgcaaggaactattaacaggattttcctgcgggaaattaatagaaatatgggtgaagggaacgtatttttttcattcatactcttttctattactgtttgtgctttttaccatgggtgaatttttttattgtggtaaaatacacgtaagattaaccatt

SEQ ID NO: 398603 - DNA, 164 bp, Homo sapiens
ctaaataacagctgccattgctggagcccgctgggtgcgaaacactcatgggcatcttcccactgaatccacacaacagccctatgagatagagtttcttttcacctcccttttagagagggaaactaaagctccaaggggctaatttgcctgagggcacacag

SEQ ID NO: 398604 - DNA, 138 bp, Homo sapiens
tttaatcatgtctgtgaacttgatatctgaattttgaaagactgggattttctctattacttaaaacatattctacatcatcctagccctaagtttggcctatgagtgactacaaaaaggattagactgaaccgaata

SEQ ID NO: 398605 - DNA, 429 bp, Homo sapiens
tggaccggcactccaacagccagtgccctggggggcagccatcaggtggggcatttgcaggcctcttcttattcagacagctccaggtgctgagcggaatcattgtccacattcactctgtcattctgaagcggtgtgtagaacattctagaacactcaccacgtggcatgcccctgctgggtcccggtgatgcagctgtgaatgaagcaggcttggggttgctgccacctggggaggagcagaaggactgtggtcacagccacacgtggacgcggttactagggttctggtgggtgctgtggagggtgcagagggcgtgtgatgggtcatcctgagcgatgcaagctgggcctggaggacgtggagtgttcgcaagggaagagggtgggctggagtgactgcaaggagaaggtctcgggtggtggagc

SEQ ID NO: 398606 - DNA, 312 bp, Homo sapiens
ccagcacagagctggctcagcccctgaacagggaacagggtctcagccagggctttcttgcagcctggatctctgccaaccccaggatacaggatattctcctgcttccttccagaagcttgccttaaaggcgccacagcccctacaactgacttgtgtgtgacactgttgagccaacagtgtccccctgccctgcagccttgtccattcctgctgagggcctgttgaccggtggctctgcctctgggctccctcctgggccggggcccaacactgcagcttgggggccggggcgtcctgccatgtgagcag

SEQ ID NO: 398607 - DNA, 328 bp, Homo sapiens
aggagctgggactacaggcatgtgccactgtgcccagcataggtcaggcagtcctcctgcttcagcctcctgaggagctgggactacaggcatgtgccactgtgcccagcataggtcaggcagtcctcctgcttcagcctcctgaggagctgggactacaggcatgtaccgctgtgcccagcgtgccttttacctttaaatcatctacctgaaactgaaaagactgaaacactttgtctttcctcccgtgccattgctattaaagtggtgttgtgtgcctgctttaccttgtttgtaaagcattctgctacctagacagtataacatg

SEQ ID NO: 398608 - DNA, 334 bp, Homo sapiens
ttctttcaccgccagccagcttttccaccctaaatattgaagtcctcaaaattatctttggaaaaaggcacagaccacagactgtttctatgattgcatggttttttctatgtccttaaccttggcaaaataagcttctaagttgatggagacctgtctcagataccttttggtttacatctcatctctggactcccctttaatctaggagtgctccccacctgcctttcattttctttaatgtcattgaaagcaatggttcacttcttttttttttgtaaagtcttccaccacctggatgtgtctgactcagactatgattagagtagtttta

SEQ ID NO: 398609 - DNA, 505 bp, Homo sapiens
aagagctgggacttggactcaattctgattcagaaggaaatgctgatccactctcattgctctgagctcctcaggtccctcaaggatgccctatctgtccatttccactggagagcctgaagtgaaccaaggtgacccagaggattgatgcaacctctgtcaatgcctccatctctcccctggggtaacgtataccctgggagaaagttactcaatatgtgttggccatgagcaggtgtatttctcaaggttctaagttgagaaaagtcacatctcattacaaccaagataaagaagcctttcctcctttggacaggcttttgaagcctaatgaatagactggagtagggagcaagtatgtaacatttgctaaatagtctggccaggttgggcatccatctgtgaaagaagagtctatgaactgccttctgtatccaggctgagtctcagccaaagtgaagacagaattgaaacagatagatcttttcctatagcccatttgatg

SEQ ID NO: 398610 - DNA, 2292 bp, Homo sapiens
  misc_feature (263)..(263): n is a, c, g, or t
tactcatgaccagccagatgtcttaaggaatgcttttgaaaagaacagaggcgtacaacattattacgacaacagagaagcaagttggctttgaagaaactgtattctgaggatgttgtttgctttgggctaagaaaagaaaaaatacaactacagacaaagcctttatatctgcaagtattatggcgtggtcggtagcaatgtaattagatttacatcagtcttcctggtgagacttggaggctcttcctcggtagacatgngtgacccaaggcagtcacaagaagagaagcacaagctaggcagagcctcttcaaagttcaaggatccccctagaatcatgcagtcagatgattattttgctcggaaatttaaagccattaatggcaacatgggacccactacttctttaaatgcctcgaattccaatgagactggcggtggtggtccggctaatggtaccccagctgtgcccaagatgggtgtgagagcaagggtgtctgaatggcctcctaaaaaggactgttccaaggagctaacatgcaaggcactgtgggaaagccggtctcagaccagttatgaaagcatcacttccgtcctgcagaatgggcagagtgaccagagtgaaggtcagcaagatgaacagctcgatctggacttcgtggaggccaagtacacaatcggagacatctttgtccattccccccaaagaggacttcaccccataagacagaggagcaatagtgatgtcactatcagtgacattgatgccgaagatgtcttagaccaaaatgcagtcaaccccaacaccggggctgccctgcacagggagtatggaagtacttcatccatcgacaggcaaggcttatctggtgaaaacttttttgctatgctcagagggtaccgagtagaaaattatgaccacaaagcaatggtcccttttgggttccctgaatttttccgctgtgaccctgcaatctctccgagccttcatgcagcagcacagatttctaggggagaatttgtccgcatctcaggattagattatgtggacagtgccctcctgatggggagagacagggacaagcctttcaaacggaggttgaaatcagagtcggtggaaacatctctcttccgaaagcttcgaactgttaaaagtgagcacgaaactttcaagttcacgtctgagctggaggagagccgactggagaggggcattcgcccttggaattgtcagcgatgttttgcacattatgatgtccagagcattttgtttaatatcaacgaagccatggctacgagggctaatgtggggaaaaggaaaaacataaccactggggcatctgcagcatcccagactcagatgcctacgggccagacaggcaactgtgagtcccctttagggagcaaggaggacctcaactccaaagagaacctggatgccgatgagggtgatgggaaaagtaacgacctcgtccttagttgtccttactttagaaatgagactggaggggaaggcgacaggcggattgcgctctctcgagccaactcatcctctttcagttctggggaaagctgctctttcgaatcgtcactcagctctcactgcacaaatgcaggtgtctccgtcttggaagtgcccagagaaaaccagcctattcacagggagaaagtgaagcgctacatcatagaacacattgaccttggggcctattattaccgcaaattcttctatgggaaagagcaccaaaactactttggaatagatgaaaaccttggtccagtagcagtcagcatccggagagagaaggtggaagatgccaaggagaaagaaggatcccagttcaactacagggtggctttcaggacaagtgagcttacaacactgagaggagcaattttagaagatgctataccctctactgctaggcatggtaccgcacgaggactacctctcaaagaagttttggaatacgtcattccagagctgagcattcagtgtttgcgacaggcttccaactcacccaaggtctcagagcagctgctcaagcttgatgaacaagggctgagctttcagcacaagatcgggatcctttattgcaaagcaggccagagcacagaggaagagatgtataacaatgagacggcgggaccagcttttgaagaattccttgatcttctgggccagagagtccgactgaaaggatttagtaaatatcgagctcagctagacaataagaccgatttcacgggcacgcactctctctataccacatacagagatctacgact

SEQ ID NO: 398611 - DNA, 645 bp, Homo sapiens
gagtattgtattggggttctctggatttcctgaatttgaatgttggcctgtcttgctaggttggggaagttttcctggatgatatccagaagtgtgttttccaacttggttccattcttctgtctctttcaggtatatctaccagtcgtaggttcagtcttttaacataatcccatagttctcagaggtttcattcattccttttcattcttttttctctaatcttgtctgcctgccttatttcagcaagatagtcttcaaactctgatatcctttcttccacttagtctatttggctatggatacttgtgtttccattataaagttctcatgtttttcagctccatcagatcatttacgttcctctccaaactggttattctgtttaacagctcctataatgttttattatggttcttagcttctttgcagtgagttagaacatattcccttagcttggtgaagttcgttatttcccatcttggatggatgattgacattcatccatctcagcctcagcccagttctgtgcccttgctagagacatgttgcaatcttttggaggagaagaggcactctggctttctgagttttccgtatccttgcattctttctcatcttcatgggtttatctacctttgatct

SEQ ID NO: 398612 - DNA, 557 bp, Homo sapiens
agtggcagctgggttctgttgttggcaaccaacagagttgttgtcttttctcgcattcattaaaatgcacaagaagaaatttctaatggtgaggggctagagtgcaatggcaggatctcggctcaccgcaacttccacctcctgggttcaggcgattctcctgcctcagcctcctgagtagctgggattacagtgaaagcaaagtcatcatacactgtttgcttcattgtatgagaatcaatgtttgcatgataaactgccctaatggaagaggactctgagttacctttttcgagcaaagccacctaggttactctgttttccccagagtgacccttctgttctgcaaattttcagattgaagggagtagcagtagagtatcagaagtatcagaagcaaaaaagtaaatgtatgatttgaaatctacttaaatgtaccaatcacagcagagtcttttggaacttaaacatcttgactcttctgtttaaagcctaaatcaacctgagagaagagatgaaacaactgagggccaaaaagtttacaaaattttccaaga

SEQ ID NO: 398613 - DNA, 328 bp, Homo sapiens
gtgaaataaacaacaccatacataggaatgcagagtcttttggaacttaaacatcttgactcttctgtttaaagcctaaatcaacctgagagaagccaatccgtgtcttctgaaagaagagattaatccgttaactttcaatgttgttattggaccactatatttgtgaaatttcctaaaaatggagtctgcaagaaaatattcaacacaacaaaatgcattggttactcaagatttcaagcagctatagctactaaaagaatgatccctcagctgtgacaatgcttacaattttttcatctcaattaaattataaataatttgtggg

SEQ ID NO: 398614 - DNA, 118 bp, Homo sapiens
gggagtaggatgagaagtgctttaaaacgtgcttaatttggaagtcgcaaattcaggcctagagcatgtgaggaaatgaggaaactaggactgtaatagagccactttttccctttta

SEQ ID NO: 398615 - DNA, 340 bp, Homo sapiens
cgtccttcatcatacctaccagaaatgaaaaaaaaagagaatatctacttctggggaactgatgaagcttgatcttttggagttagatcttccctcctctgtggctcagacccgatccaaactggaggctgcagtggggaaggaaagcactgttctttttactcttttctgctcaccttcttttccccctctcccatacagctgctgtttcactctttgccagagtctaaggtaggtgaggtgcaaatgatggggtagttcatacttggctgagtggctttgtattatctgggcctggcaaatatttaaagtggagaccctagttaggcctagccaatgc

SEQ ID NO: 398616 - DNA, 174 bp, Homo sapiens
gagccggccccagttgactaacctctcccatacagctgctgtttcactctttgccagagtctaaggtaggtgaggtgcaaatgatggggtagttcatacttggctgagtggctttgtattatctgggcctggcaaatatttaaagtggagaccctagttaggcctagccaatgc

SEQ ID NO: 398617 - DNA, 640 bp, Homo sapiens
ggcatcgcacacttcctaacagcaacacggtccttactgctgtccgactgatgagtgtgttagttgtagaatcccatcttaatagtaagctgtctacagtctcttctgttactagacaggtaagactagttccctcccaaatcaggtgtgaaataatggcttactaaagatagtttgtttttgggagtgatccaagagataaaagtgagggtggaaggatttttaaaaagcaagaaagcaagccaatctaagagcaaattatcatgataatcatcacagcggacaaccagtgatacattgtgctaggtgccttggcggaaccatgcagaaagtgtattattgcccttgaattttagataaaggaagagtttatccactggttcccatctctcattgattcacagtagccatatggggcttaacagatttcccccatgtctgaataggtaacaggcttctggccattgtctcacagagcagtggaagagaagcacaggaagggaagtaaagttactccgtaacgggtgacataagatgccatggattacacctgcaacaggaggttgacatagcacaaactggagtacaaaggtaggctgaaataatgtacagtgagatacaagttgaatcacttatactt

SEQ ID NO: 398618 - DNA, 487 bp, Homo sapiens
gtgggctttgtcttacaccttagataccagctcaaccacaggacagtaaagcaccaaatggttcttgggaatgccaattccaggacttgtctcttagatggcatttatggacctaccctgggccagaggggcgcccactgccctggaggggggggtcccatgccaggcagcattcaccaccagctggttgaagactccctgggccttaagagaacatcagcagtagtctggcagtactccctgtgggcctgtggtggcggtggccatggagtgaggcacctctgccttgggaaagcggaagcaagagagggaaggactgcatcttgtggattcagtgccagctcacctgcagtataacagaacaccaggtagacttctaagattttttaccctagttgctggctcccagatggcacctttgggcccagctggggcctggaggaccttgctgttctgaagggaaggacacaagcctggctggctctgc

SEQ ID NO: 398619 - DNA, 462 bp, Homo sapiens
tgagcgcatctgaagctgctcccacagaaaccacagtgctgcttctctgggctatgttcaggtatactttatttcacacatgtgctgagtcttcagcagcagccgctgcatgacatatgggtcattcccaaacttcaatctcattgtttttgctgagaaggtactggccaccttctccatttttatgttttccatatatattactttctttacaatggacttttcagttatttaaatattttttctttcagctttagatttttagttcatcaaaatgtttcttctgtcaaaaattctatctgtacaaaaaaatagctgggcatggtggcgtgtgtctgtagtcccagctatttgggaggctgaactgggagggtcgcttgagcccaggagttcgaggccgcagtgagctgtgatcgtgccattgcactccagcctgggcaactggagtgagaccctgactca

SEQ ID NO: 398620 - DNA, 328 bp, Homo sapiens
gcagaaaagagacagagagccaagagaggaagagggcataaattaccgatatcagaaatgaaagggacattcctacagatcctacagatattaagcgggtaacaaagcactataaggaactgaatgccaagagaaaatgtagatgaaacagacaaatttttcacaaacacaagctaccaaaactgacatacaaagaagtagaaaatctgaatttataattaaaaatctttctacaaggaaatggtgggtgcaggtggcttacggatgaactctacacacgatataagtaagaaataatacaaaccatacacatactctttcagaaaac

SEQ ID NO: 398621 - DNA, 635 bp, Homo sapiens
cccaagtagctggtattacatgcacctgccaccatccccggctaatttttgtatttttgtagagacggggtttcaccatgttggccaggctggtcttgaattcctgacctcaggtgatccaactgccttggcctcccaaagtgctgggattacaggtgtgagccactgcgccccgccaggaggtaataactcttaactggaataagagtgagttagtctgtaaagagacaggttctaggaaaaaagaacatcaactggatgttcctaataatttcagtgatgtgcaactggaataaccacagatgtctgaaagcatcccatctccttttaatgaactccagtgttttaaaactgaagtatgagagctgaacatccagttacatgctttattgtttaagttttctaaaattgtgaaatacaatgtatccagaaaattgtataaagcacatatatacagtttaacaagtagtttgaaagccaacagtcatgtaatcaccaatagaacaatatcagcatcctggaaggcttctcttatgcctgcccctaatcacatgctgcccacttccctgtagttttgacatgtatgtatatccctaaacaatatattttagttttgcctgtttttaaactctatt

SEQ ID NO: 398622 - DNA, 446 bp, Homo sapiens
tctgttgagtgatggatacagctaaatatggatcatcaaagggctttctaggtcacatggagggcagctacatgattcagaaaatatgaaattcaacttggacagaaagacagaaatatttgcaattcacttcttagagataaggtcagaattgacaaagaataaaagggcagcacagaagtagagttacaacacagtaagagatcagcataataagatacagattcacaagatgaaaagagatagagaactggattttttggcagattgatttgggcaagggaggtgggcatgaacactacagtccaaaaatagaaggaagaactgagaaatcctcaaaaaaatattttttaagcctaaagtcgagtaaatgataaaatagaaatccccaggtattaatgacgttgttattaaataaaagctatcatttattatctagtccaaag

SEQ ID NO: 398623 - DNA, 453 bp, Homo sapiens
tcaggagatcgagaccatcctggccaacatggtgaaaccccgtctctaccaaaaatacaaaaaaattagctggccgtggtgatgtgtgcctgtagtcccagctacttaggaggctgaggcaggagaattgcttgaacccaggaggcggaggttgcagtaagccgagatcgtgccactgcactccagcccgggtgacagagcaagactccgtctcaaaaaaaaaaaaaaaaaactattgtctccaaatgattacatgccccaacagtaaaaaaatttaaagcgtaatactaccaatatatgtatatgtgtttatacactgaataaatttactactgtaccaaaatattatctttgttgtaaatgcatataaataaaaaatgtaagtataagttaaaatttaagcataagttaaaaatatagctaaaagttgtaatgttttccttctgaacccca

SEQ ID NO: 398624 - DNA, 578 bp, Homo sapiens
agaggtgtatctcaggaaaatcctggttcccaaagttgcacattatgtcagatgtacctgtctttgacggctgggagagcggacaagaccctgccccagccctggccaggaatggtggctggtgagcccctagttgcaggcaacctggacctgtcctcgcggcacctgaagaggggaaaggagacttgaggagaatgactgtccccaggcgaccgcccatgaacacctgagcacccatctgataaacagcctggagtcactggagagtgacagcttccatgtatattcatatatgctcaccattatttttcataaccacatcacattgcatcattttaatgtatcataattttctcaaccagccccatccagaagcttcttaacccaatctctttctaaggccctccaaagggctggaagagggagcatctttattttgctgctgccatcaggggtcttgggagagtccccttggatcctgatttttcagggcttgatacctgagaataactgacagaaattttgagaactgtgcccccagtaataacaataattaacattgttttcagtactctggg

SEQ ID NO: 398625 - DNA, 521 bp, Homo sapiens
ttaggcggggctggcaaatatctcccctactgggcgcagggcagacttcacctcaaggtcttcctccacacacattccacagcccagccagtcctccagggcggaactcaagataaatctattcaccatctctgttctcttgggagtgggggaggatacgaagctgaggtctagcatccgggccagggctttctcggccacggctcctggcctgggtgatggtgggagggaggaatgtgatgatcaacactccagtttcttgtccaaggctgcctgtggccgatgtgctgcctatttggggagaaaagagaaacacgtaggcttgtctcgggtgttcctagaggatgtgggatggccacccatggcagaaaactaacttggttcactagagtgtgtgacatcgggacctgagatccaacttaccaagtgctatctacgtgacttcacccctcagtgtattcatctatgaaatggggataatactagcactggaggataaataaatcgatcaacatgtgtaa

SEQ ID NO: 398626 - DNA, 495 bp, Homo sapiens
tctaattaccacctacctccacctcaagggtaaccactatcctgacttctaaagtgcaaattatattagttttgcttatttttgtgctttttatataagtggaatcatacagtatacttttgtgtctggattcttttgcttaacatctttgtgagatttactgatgttgcatgtacagtgcttcattctttttcattgttgtacaaagttccattgtatgaatatattacaatttattctactcttgctgaacatgtgggtaatttctggtttgaggctattttgaaaaatgctactgcactcccgcctgggtaacacagtgagaccctgtctcaaaaataatatattatttaaaaatttgttttcttgtcagtgggccatctgggtggtttctggtattttgccattgcatgcaacgctactgtgaacatatttctacatgtcttatctttatatttctataagtgtaatgaaatccccccaaaatagctcatt

SEQ ID NO: 398627 - DNA, 652 bp, Homo sapiens
ccagctactctgaaggctgaggttagaggatcgcttcagcccaggagtttgaagctgcagtgagttatgattacgccactggactccagcctgggtgacagagtgagaacttgtctctgaaaaaaaaaaatttgcaagaactaatgttttttgtagcatttagcttgtgtcacaccattaagtcattttaacctttaataacctcacgatggaacatgtgaggacatctggaaattattgaggccggggttcaggactaagaccccagcaatccaaagtcagagcctgcataggccactgttaagacatgtgcaggcttgacccttgtgtgcatctgccagcaactcagctgtccgctggggcatggcattactgtggtgagtggagacacggagaggactgaactaggaaacggaattgtaagtgtgaatagaggcttcacttgttcgtgtggagcagaggatggggaagcaggagacagcatgagatgaatgaaatccaagattccattcatcagactggtctccatcttgtctatgttaccgaaggggaaaattccagaggcggcacagctatactggccaggcttggggggtcttggtggaggcccccagctgaaacacaatttggttgtttttacccaggacatact

SEQ ID NO: 398628 - DNA, 841 bp, Homo sapiens
atttcacttgtggcttgctttatgttcttaatttctcctaagagattgtaaactcatgagagatctggcctagtgttcttaacttttaatccccaaagtgctttgtacacagtatggctcaatacatgcatttatatggcacaggaaaaatgtacttaagatgttgggtggcttttaccaacatagcatgtcattactgactcatcgatgctcactggaaaagcttgctcccagagccatgtccccaggactctctactaggtagccaccaaactgccaaagaccctatcctatgcaagtcacataaattgtctgtttgtagaaattctttctttttttctttttttgagatcgagtctcactctgttgcccaggctggagtgcagtggtgtgaacttggctcactgcactacctccgcctcctgggtttaggcaattttcctgcctcagcctcccaagtagctgggattacaggtgcgtgccaccatgcctggctaatttttgtatttgtagtagagacggggtttcaccatgctggccaggctggtcttgaactcctgacctcgtgatccgtcctcctcggcctcccaaagtgctgggattacaggggtgagccaccatgcctggcagaaattctttcctttattgactgtagaggctactgcaactaggtgacagaggtgatttggccctgttagtttcaaatcccaatttaaagaatgatagtacagagatgcctgaactccctgccaggtaattttatgtagcttattccccattccatttctttgatcatgacacaggccattcaggaagtcctatggagagtaaatagatggac

SEQ ID NO: 398629 - DNA, 404 bp, Homo sapiens
ggtgaggttggcaaccagtagggtctgccacggtggcccacgcagtgaggatctacagctctgctggaggcgtaacatgccagccgggaactggagcctctcagggcctagcctcgcatctgtacggaatcagatacacaggtagcaaagacaaaacggtgcctccagctcctgagtctgaaagaaatatgaggctctgccagaaggccagactctggagcacatcaagacatttgtccagatgacaacctgccaggctgcagtggattcgctaaactcgggatgtggcgcagctgtgtgcccttaatgttttgctgatttaaatggaaaggccacagatttgtgtctttgctttgtcctttctctcatggccagttgatacattaaataattgtttgtaatga

SEQ ID NO: 398630 - DNA, 1484 bp, Homo sapiens
gtgacaggaagatgggtttgattgaggtcctggtttccctatgacatggaagcaagatgccaggctgaggctgacaacaatagggtggggagctaaggggcaacaggaccctcgtgaaggatgcaagcagctgcccagacatgtggagctgaggccagggagcatgcgcattggaggcagtgtgaatgtcccctgaaaggcttcgctgcccaagggacagatgggctgtccaggacccaggtggggcaagccagggttggaagaaccaaaggcagagaaactaaaggccccagcagctgcagcagtcaatcttggggtccaggctataataatctggatttaagatctcaggaagattctgagttaggtcaagggaccatggaggtgaaggccattgactcagaggtgtaaggaatggagtgatttggacttgagtcgggtggggacgaagaggggccatcctcagggtgaggacgggatctgtggaggtgaagtctgtgcatcagatgccagagtcctcagggaatgagagaaagtgatggcaatcatgctgatgatgatgaagataaagatgagagcagacatcagagagtatcaactgttctgtgcgtgtaccaggcatgtgaagtgcagcgagggcttaaccctcctcacaaccaccctgggagatcggtaccatctcttcttctttttacagatagggaaatagcacagaaaggttaagaaacttgcccaaggtcacacctaactgggaaatgggacccggtccagggatttggactcaagggtccatgctcccaacccttagcaagaggagctggatttccatcaggagggggaagtgaaagaaacattcggtaaagaggggaagatgtaagggagcttgttaacaaggaacttccacaaggcccactggaaaaatgagagaagtgggaaagaagcaatggaaagctgggtcaggaaagagaaagcaggaagaaaatcaggatccccatttgacaagtaaggacatgaagaagctaagtgtcctgcccaaccagtaagtcaaagactggaatttgaaccccaagatagttctctaagggtgggaaatccatctcagtaggaacttgagggaaggttgagggaactttagggaaggtttccagttcaacaaaaaaaaaagcggctgggcatggtggttcatgcctgtaatcccagcactttggaaggccaaggtgggaggatcgcttgagcccaggagttcaagaccagtctgggcaacaaattgaggcccccatctctacaaaaaaatacaaaaaaattagccaggcatggtggcatgtgcctgtagtcccagctactcaggagtctgagctgggaggatcactcaagccctgggaggtcaaggctgcagtgagctgcaatcacaccactactctccaacctgggtgacagaccgagaccctgtctcaaaaaaacaaaaaaaagagagagagagggag

SEQ ID NO: 398631 - DNA, 495 bp, Homo sapiens
cagctcttgtccagagttgctgatcagattggcccaggctttgtcaggtctgcagcgcggtctgagactctccctgcccaaacccacttccccgctttcctttaataggtgtcagatctgcagcacggtctgaagaatttccctgcccagccttgctttttctgacttttatctttcaccagtgctgtcccacggttaacctcttgtactcctagctccatctgctttcagaggacccaactgacacacttaggtgtgtcataagccacaagtgtgacagcacatgaaaatgctggacggtgcctggcacacagtaaggcttcagtgactgctatcactggcattatgtgactgatcggctttttattataaaatgaggttttgtttttggtcactgctattttctcatttattcctgatttggcttccaccatccttttctactggcatataaatgtaagactgtgtatatactgattaaaaattttaaataaa

SEQ ID NO: 398632 - DNA, 537 bp, Homo sapiens
ttgttctatttttttatgtaattaaaaaaaaaaagacatttgtaacagatggaaaatttaaaaggggaaaaacaaccaagcagaaaactgctcctcatctgtgatagatgaagctctgtgattgtcggaatatccccgtcaccctaactgccccccacttcattgtcccatgtgaagatcctgcctctgggcttctggtctgtcatgacttatatagaggcaggcagttggttgcaaaaaagctctctttgttccccatgacatagagatagtggcattgcctgatcccaccctcccccttattttttaaaaaataacactagggaatttctgttaaacttgattcacttcctgctgttgccttgttaatgtgactgtttcatatcagttattcctgggttctaaagtgctttttgggacaggcatcatggctcatgcatgtaatcccaacactttgggaggccaaggcaggagataggcttgaggccaggagttcaagaccagcctgggcaacatggggagaccctgtctttatca

SEQ ID NO: 398633 - DNA, 560 bp, Homo sapiens
ttgttctatttttttatgtaattaaaaaaaaaaagacatttgtaacagatggaaaatttaaaaggggaaaaacaaccaagcagaaaactgctcctcatctgtgatagatgaagctctgtgattgtcggaatatccccgtcaccctaactgccccccacttcattgtcccatgtgaagatcctgcctctgggcttctggtctgtcatgacttatatagaggcaggcagttggttgcaaaaaagctctctttgttccccatgacatagagatagtggcattgcctgatcccaccctcccccttattttttaaaaaataacactagggaatttctgttaaacttgattcacttcctgctgttgccttgttaatgtgactgtttcatatcagttattcctgggttctaaagtgctttttgggacaggcatcatggctcatgcatgtaatcccaacactttgggaggcctcaggcaatctgcccactgcctcggcctcccatagtgctgggattacaggcatgagtcactgtgtccagcttcaatatttctaaacaaaaaaaaaa

SEQ ID NO: 398634 - DNA, 579 bp, Homo sapiens
gaacacccagattcataaagtaagttcttagagtacaaagaggctcccacacaataatagtaggagactttaacacaccactgatagtcatagacagatcatcaaggtagaaaattaacaatgatattcaggatctgaacccaacattccaccgaatgagtctgatagacatctacagaactctccatccaaaaacaacagaatatacattcttctcatctccacatggcacatgctctaaaattgaccacataatgcctttcttttcagtggtccatatgtaagtcttttgaaagtggcagcatctctactgctcatgcttgttgcaaggaactctactgaatacaaggaactttactaatctctaatgcttgtgagtagattctgaactcatcatttagaaagctaaactgggggctttcttcccagagcaaagacataaaacaaacctcaattgagcgtgggacagggagtcatgtgctataaacttcttggacagttcttattctatggaccaattaccattcccttgtatctctaattttgggattatttctggattaaaacacaaaaaaaatc

SEQ ID NO: 398635 - DNA, 336 bp, Homo sapiens
ccagcaatgtatctgtctagtgccctctatgtgccaggcctgcttcttgggctgccagtaaaggaaggagccctggttttttggtttgtttttggtttttgttgttttttttgagatatagtcttactctgtcacctaggctggagtggtacagtggcaccatcacgactcactgcagcctcaatgttctgcactcaagcaatccttctccacctcagcctccagagtagctgggactacaggcgtgcatcaccacacttggctaatttttttttttttttttgagacagagtctcactctgtcgcccaggctggagtgcagtggcgtgatctcgg

SEQ ID NO: 398636 - DNA, 359 bp, Homo sapiens
aatgacactagaattttgataggaatctcattgaatctgtaggtcattttagctaatatagacgttttaacaataataatctttcaattatttaacacaggatatttttccatttgcttgtgtctacttcaatttctttcatcaatgttttacagttttcagtgtatagatcttttgcctcctaggttaaatttattcctaagtattttattatttttgatgctattgtaaatgggattaagttatatacatggtcaacaggcatatgaaaaggtgctcatcatcactattcttcagggaaatgcaaatcaaaaccacagtgagatatcacatcacacctcttacgatggctaattatt

SEQ ID NO: 398637 - DNA, 336 bp, Homo sapiens
gggatgatgggtgagctaccaaggctaacattttcccgaggacattgagttagggaagtggcctctccttgagggaaggagccagatgacttctcagagaacaacaaccatattcaaaatattctcaagtttcttttgtttcttcttgtctgcatctgatatccaggacattattccacaggaaaaggttaacaggaaatcaagatcggcccgctcctacagcaaaagaagtactaagaggaaagtttatagtgataagcacctacataacaaaaaacttcaaataaacaacctaatgaggcatcttaaggaatgagaaaagagcaaactgaatac

SEQ ID NO: 398638 - DNA, 705 bp, Homo sapiens
gctttgattacttgataagggataagaatttaaatgttttaatggaagatgactttttatcaacttcgttggatatgaaggctaaaggatagtaatcatgtaaaaaatatatctataaacatatgtaatttagtcagattctttatgaaaagatttggctttttgtatcacattttctttatttttaattgataactttgattctttgcttattttttattttctgtttagtcatagaaagaaaatgataccaagaaagttacatttgacttttacatgcacttcactaatgtaagacttaccctttttctacttcctgagttgtaaataattttctgttgttgaggacatagactggggttataaaagaggaaagaaagatgctcatctatttgagaatctgtttgtctctgatggttttctttttaccctgattagtgccttttggacaaaaagggtttagatgccttgaagagggattgatgagtctctttttcctgaaagcatggtagtttgacagaaaaaagcatttcctaagatgacactttaagaaggtgtgggaagaataaaacaaaataggcttttactaagctgtattctggaccttagagtgagagagcagtgaagttatgcaattgaaaatagcattgcttggtgattttctaaagccatattaactcttttgagccatgatggtagcatagc

SEQ ID NO: 398639 - DNA, 168 bp, Homo sapiens
tactgatacaatcagctcggtacccaggtctttcccctcaaagtcccaactatatgctgcatgtaaaaaattaacttacatatacacattgactaaaagtgaagggatgcaaaaagttttcaaatggaaaccaataaatagcagctgctatttgtatcagataacaga

SEQ ID NO: 398640 - DNA, 405 bp, Homo sapiens
tctcataggggtaaggaggaaatgagtaaatatgtatgagtgaagcactaggaacagcgcgtggccctgcggataacagaatattgaagaactgataccacacctggccaagaaggctcttacatgaccgaaaagcttaggacagattttatcaaaatgtttgtattataggaatgcctctagatcgaggtcttaaccagaagtgatctctcccatggccctcagggtagtttaccttatctctcgaagacacacctgtaggctgtgttgtattaattatatgtctgatctccttgagaaagctgtaaagatccctgtggtcaggaaatacactcatttttgtgtccctggtaccgtatcctatgtgctaatgaacactcattaaatgtctgctgacttgagtta

SEQ ID NO: 398641 - DNA, 410 bp, Homo sapiens
ttaacacgcagtaaaacagctcaatagcacttttcaaggaactaaatgttttaaatgttatgcagtatgcagggaaaaattattctctagacctttggccagaactttaaaagtgagcattaagtgtaggtacagtctaaattaggggaaggaggcatcacaaagcaattccagggcatattgtcgatccacactattgccagaccaggaacaactggctggacatattttatcagaagactaatgtattttctatagcataagcagttaggctcaattagtgtatgacttaccttgtttcatttcactataccctgacctccttaactgtggctatttttccagtgattctttggagttccgagtagtttcacagacaggaatactatctaaaattcttatcttcagag

SEQ ID NO: 398642 - DNA, 1426 bp, Homo sapiens
ggaaaaaaataaccttgatccctacctcatgccatatacgaataatttgagatggatcttaggccaaaatgtgaaagctaaaaccttaatgcatttagaagagaataagggagaatgttttcaggactttggggtaggcataggtttcttgtaacccagaaaacactagccataaaaggaaacattgataaatagactttatcaaaacttaaaacttctcagaaaagacaccattgacacatatctgacagagggtatattactcctttaaactataagaaaaaaacccaaaaaactgactaaaaatgggcaaaagacttgaatagatacttcacacaaaaaaaataattcagatggccaaaagaatatgaaaaggaactcaacagtattccttattcaggaaagacaagtttaagccacaataaatgccagtacatacccaccagagaggttaatattataaggactaaaaacaccttttaggaaaaaaaggaaaacagtttggcagtttctaataaagataagtatatctctaccttaagacccagccactctatctgtagccatatactcaagagaaaagagctcatgtatttacattaaaagacttgtaaaagaatgttcataaaaacttaatagccaaaaactagaaacaaccccaattttcatcagtaagagaatttataaataatggtagactcatacaatgaaattactacacagcactaaaacagtttgaactgatgtaacaataaaggttattaacaacatcatgcaaaaaaaaaggcacaaatgaatacatattctctggatccatttatatgaagttaaataatagtcaaaactaatacatggtgctagaagtcagaatagtagtaacctatacggttctgtcgggttttgtctgggatggagcatgttggaacttttttgggtgttgaaaatgttctctatcttgttccgggaaatggttattttgatgtgtacataggcaaggcaaaaaacttattgagtttgtccccattttaaattatttctgtgccattttttacctggtcattgttcccactttattattatttcccattctcttccaaataattattttcttaaaaggggcctttggatggttcccaggaaaaatggccactaggaaatacgttttctcaacagaaaaaaagaaacacaacataacaactacataaaaaaaacaacactttgtttttgggggcgcgcctactggccccttgagaaaagacgctttcttttaacacacacacctctttttttggcggggcgccggggcgcgcccccatcgagtgtgaatgctgtgaaccacactgggctcaataagtggtgcttcccaagagaaaaaaaccggggggtccaaacaactagggggagcgtgtgattcttccccaatata

SEQ ID NO: 398643 - DNA, 495 bp, Homo sapiens
aacttgattacctctataaagaccctatctccaaataaggtcacattctgagggactgagggttagcacttcaacatatgaatacttgggggacacaattcaacccataacaaaaagtaagtattaaatataggtaaggaataaagaataatgccttggtagcctttaaggctggtaactgacagggacatggtcagccagcaagtaagcatagattgtcaaatttatgttgtaactctaatggcttaaacctacattaacactaattttatctccacatatggatattgtgtaagagtcagctctgaattctcttctacctgaaatttttcagcctcgccctgctttccagtgttatttcatctgtttttataattggatgtgaaacttcttgagaaagggtcctatgactctttaaccaattattgttcaaaggagtccccaaagtgttaagcaggtaggtcattgtttaattaaatgactctgttgaggttt

SEQ ID NO: 398644 - DNA, 429 bp, Homo sapiens
caatataagcttcttgaaagcaggtctttctttcaggaggggctgaggaaggcacggctccctttacaactccaaacagaaagcccattttatttagtcagaccagcatctcctttccagagcattttgccattgaggaaaggtgggacaatgtgcatttcaggctcaaatacacattagcaggaaatgggttccaccattcactggatgtgactgtcaaccaagcaggtgataatcctttaaaagcctctttttgttcaccaatgtctccccagtacctgaaaacctggcacaaagtaggtgctctatttgttgaatgaatgaactttatgcagggtggttgtacaggtgtacctaacatcaataacttaagaagaatgcgtgtgtggagttccgagctaaggaatcctagtggccaaccctgaaatc

SEQ ID NO: 398645 - DNA, 357 bp, Homo sapiens
gagaacaaacgttgagctggcttagtatatggctgaaattttcactgcttttatttcattttcataataattttattatgtagggtaatttttttttctgtttttcagatgaggaaacagaagcatagaaaagctaagtagctttcataaggtcacatatagctgggaagggactctattacacctcaggtgcatctctagtaacgtttttttttttaaacttttattttaggttctgtggtacatgtgcaggtttgttatataggtgaactcatgtcccgggggtttgttgtacagattattttgtcacacaggtactaagcccagtacccaacagtttttttctctccctccccc

SEQ ID NO: 398646 - DNA, 316 bp, Homo sapiens
taattttgtatccttctaccttactaaattattttattatcactgagtctttaggattttccagatgtgctattatataatttgcaaatagatacagtgttacttctttaaaaatgtttaagcctttagtgatgtcttttgttttcctgcacaggctaatactttcagtacaatattaaatattattggaggtaacacttaccttttttcttcctgatgttagtgaaatacccctagcacttcctgattgagtgaaatcagtaactttgtaactaagcatatatatttttatcaataaagtattttattattctca

SEQ ID NO: 398647 - DNA, 483 bp, Homo sapiens
tatgtgtcccccatgtccttccatggaataactcttccatatcctcctcctaattctctaacaccaaattttctgtagttttcaaagtctagtacaaaccacagctcctccctggggccacctttcagttcttttcccacattacctttctttgaatgcagactgtacatactgcttttgattttgtaattcaattctgcctcacagattgttttaaattataaacacaataaaagcactgcaaaaaatttggagtgttacttaatgcttaaatggtttcatgtgttgtagagcgctttttggccctcagacctgggcagaagaggctcctgtcaaggccctcctctctggtgggccccacccatatcccatacggcccttttaaactatgctccaggtactgagttctctaggatttccagttcaagcctccctagcccacttccaggatctgcatgggcattttacctgggtttattctcc

SEQ ID NO: 398648 - DNA, 541 bp, Homo sapiens
aaatagtgctgtggataattcaagttgcttttatttagtctgggaatgaaccaagcagttctttaaaattaatttgctttgtcacttatagtaagcatgtgcttgtgttgaaattactgtaggttttctttacgtcatttgggtagtaggaggaatctgccattgaaagtgctgtatctttggacttaaaagagaacttcccgtgaataatccacaaaatttgtttgagtcttaaatatgagtttctgtaactttttaaagttggcctatatcatagaacttcaactgatataatggaacacaatgggttttgtgtgaatatagaaaaagtattttatttgatttttcagtccttaaaaccttaaacgttttctatatcagtgctgtgaaataggaattgtgtgatctatatggaacagaggaagcatttttattgaagtttttaggctcctttacatttcttaatctttttatcagaaaataaaacaaagttagctttagtcattgctgaagcttccagtaagaatctcaataagtggtt

SEQ ID NO: 398649 - DNA, 265 bp, Homo sapiens
catagactctccttgtacagaggcagtgacagtttcacttctctctggaaaattactccagtggcccaagaacagccttccaattcccactggagccactgcttgtcccacacatagacagccagagcatcaccttacctgacctagttcccacctggctttgctcaaccacctaccctggtagattaacacaaataactgaagaaacttttagaagctctttggctccacttatttcctgagacaccagagtgcctccaatggg

SEQ ID NO: 398650 - DNA, 480 bp, Homo sapiens
ctcgtttgagccatacaaatgtactcttgaggtcagtgatggtattgccttcattttacagtgataaaactaaggtttttaatggacaagttatttgcccaaggttgcacacaaatacgtggagaagtctgcattcctctaagaaacagcgtctcttattgtctaccacaatattgttaatttcgttgtataccagaggaattactggaaaggttcggtctctgaaactatttttgatttttaaagaagcagtggtgtataatttaacccaggatgaagttttatgttgtcttcgtaatctgtgatttttcaaaagaccagtattttgtgtatgatctaataagagattagagattatctgaatacaatctttatagttaatggagttaaatttttttatgacatctaattatattgagtatgcatgcatgttttgttcaacatagtcacaacaaataaaaataaccattttgggttgtt

SEQ ID NO: 398651 - DNA, 363 bp, Homo sapiens
taattaagaatgtccaggagtgctttgtaataagtgccctttcctattcatcacatgccatatagaccccagggtgcctcctgctgacctgggaggctcagatgcagccagggggcagtgtcctgctcggcagacagtgcacaacacagggccaagaagagccgtcctccagggccatgcatgctggcatgacagagttctcagacataatagtagacagatgcttctgggtatcagggcacggggcagacagatcttgatttatgttaagttaaaatggcttaacctttgttggggcactcattaggaacctttctttgtgagcaaaacagtccatcaaaattattgaaaataaagtgctct

SEQ ID NO: 398652 - DNA, 380 bp, Homo sapiens
acgttgacacttcagaagctatagtctccaaacttcagtttctcctctgtcaaataggatcttcagctatgattcttacttcaaagggtacacaggtacaagagatccccagcccacgagtctggcaacatgttttggtcagccttaacattatctttttctaaaatccttaaattagtaaatattgcttcccatctaacatagctctaagtgaaaaaagttgcagtttaaggagagtcctaattttctgaccaaagagactaaaacttaaaagggaaaacaagacaaactatttgcttggcccactacaagtcccaggcattatgcaaggttttcaaggagacacagagacaagtgacacctgactgaagtgtcaacgt

SEQ ID NO: 398653 - DNA, 330 bp, Homo sapiens
ggagaaagtataggcactgtgattcacatagttaaatgttcatttagtagagctggggtgaaaaaatactgtttcaacttgaaatgttagaagattgttgttcttgtgttactcattcatgcaaattggagaaggtataattgaaacaaggttggctgtgtttgagtcagtgtgctgcagctgagctcagcttaaaggtcgctggaaatcaagtgctttgtaagtgaaggcattttgactacaagcgattcaagacattttggaaacgtcagtctctggaatgggtcgtctttttctttctatgatatctggtatctaatgttttactta

SEQ ID NO: 398654 - DNA, 647 bp, Homo sapiens
agatgctaagatggtagcagtgctgccaacctcaggatgcagagggccttacctctccccacccacctgctgctcctgcaccctgggaaacaaaagaggggctgacttcaggccacagtggcctagtggcctctaggccttgtgtccacaaatactgtgtcacacggcttggggtcttttccttcacaatgaattcatcttcatccatcattccattaattattctccccagtattcttttattcatgtacatattcatttcctccctcattctatttgtttactcctttcttcactcatacacatattcattttcctccctcctcaaacttatcacaagagtaactaaatacatcatagattgtgcaactcccagtgtctgcctgacttctcagctacaatgtgaaagatgagggcaggaagcatgtcttcttcacagctgtgataccagcatctggccccatgcagagcccatagcatgtgctctataaatggatttctacagccatccattcactgcacgtgcattcattctttaggcattcctcaaacctccgtgtgtaccaaaacctgggccagacacatttcagaagagggagaagcaagaagaaaatataggataaattatcccagcccctgtcatccac

SEQ ID NO: 398655 - DNA, 908 bp, Homo sapiens
gccaccatccatgtaagatgtgacttgctcctccttgccttctgccatgattgtgaggcctccccagccacttggaactgaagcaaacactgctattgccacctttttgcagaggaaggtactgaggtgaagcgacttgcccaaaccctacaaaaataactggccattgcatcaacagcagtgtcaagagcatcatagcatcggatgatgatggacagatgcctctgctgcagagttatgcccccgccccaacactcaattggcaatcatctggggaagtctgtcacaatggtccctgtccacctttcttttagtggtttcagcatctgtcaaaggttcttatttgaatttccatcctatcaagggctgcaaaatggtgactttctgaccgtattattgcatctacattcacagctgacattcttcaataaagaaaagttttccttcatcaagtagaactatttagttatgctgaaattcagtatcttctagaaagacattaaatctttaattatttttaattctcaattctcagaataaccaattcatgtaataatcacctccagtgatggcaaatgagttttgttttggaagacattctcttttctagttatgtacttgcggagttttatatattcatagtcatttttaaatgctcaggttgtctcacacttgccactgtatactcttcaactagaatgctacttaacccagattaaaatccacgtttcccgtgtaaaacaccaacctgacatcacacaaaaatctcgggggcttttttccgggggggggaaaagcgtgtttagacatggggcctgggcctagtggttccccgggcccttttttggcccaaggggagaacgcggggcccccaagggggcgaaattgaaagcccgtacttattccaa

SEQ ID NO: 398656 - DNA, 471 bp, Homo sapiens
gccaccatccatgtaagatgtgacttgctcctccttgccttctgccatgattgtgaggcctccccagccacttggaactgaagcaaacactgctattgccacctttttgcagaggaaggtactgaggtgaagcgacttgcccaaaccctacaaaaaacagagtcttactctattgcccatgctggagtgcaatggcgctatctccgctcactgcaacctccgcctcccgggttcaagcgattctcctgcctcagcctcccaagtagctgggattacaggcacccaccaccatgcccggctaatttttgtatttttagtagagacggggtttcaccatgttagccaggctggtctcaaactcctgacctcgctatctgcccgcctcagcctctcaaagtgctgggattacaggtgtgagccactgggcctggcctatctttttattccttaataaaaaatgtttgtttcctc

SEQ ID NO: 398657 - DNA, 644 bp, Homo sapiens
gccaccatccatgtaagatgtgacttgctcctccttgccttctgccatgattgtgaggcctccccagccacttggaactgaagcaaacactgctattgccacctttttgcagaggaaggtactgaggtgaagcgacttgcccaaaccctacaaaaagcactgtgccaggtgctggatttataaccacaaaaacagaggggcagaatgtctgcatttccagtgggcaagacagacaatgtgcctatctgtgcatttccttgtaaaatccagctttcgcaagagcatgaacaaatcagtttggcaagacctccccaccctcaacatctgatcacgtgtctcatcctccatgatgccacaggtggtcttcagggctgtctccatgaagtcatcaccagccttcccaggccaggactctccatgccatccttagcaaggagaagaaaacaaatacccggcatccatttccaggtcctgcatgatgtgatgtcagaagagaagacaggaatatatgaaacaggagcaatcacaagaacgtaacagaggacacaggtgtcatgttcatggcacagaacagaagccccatagagttcaaaagacgggatgactggagatatccttgacacattgagctaaaaaaaaaaact

SEQ ID NO: 398658 - DNA, 395 bp, Homo sapiens
gcattgcccccatctgtcctccactctccagctagagtgattgatgtgacatgaaaatcataagttgtcctctgcttaaacccttcaatgcaccctgcttttcttaggagaagaaaacaaatacccggcatccatttccaggtcctgcatgatgtgatggtgagtctcgcaaacattagccatcctaatcacatgcctttgctccctccactccactcacacaagtatttggtaattacatccttcctctccctatgctcatccagtctgcattgcccccatctgtcctccactctccagctagagtgattgatgtgacatgaaaatcataagttgtcctctgcttaaacccttcaatgtaccctgcttttcttaggagaagaaaacaaataccc

SEQ ID NO: 398659 - DNA, 498 bp, Homo sapiens
aattagccaggtgtagtggtggtgagggcctgtagtcccagctactcgggaggctgcagcagcagaattgctagaacctgggaagcagaggatgcaatgagccaagatggtgcctctacacacagcctgggcaacaaagcgacactctgtctcaaaaacaaaacaaaaaactgtttctcaaggtatgggactgattttaggatgtaaaagatgatttaaaatcatccataaaaacggcagtaaatagcactgaattacatagcgcagtgggcattactagtgcccaccaatatcctggtctccattcccttctaggcagaggggtgactacaattaccagctgttgtgcagtttagaagactagtttgagccaatgaaataaaagcagaagtgacatagtccctgcatgattctacagtgtatctcttcctctgacagaaaaatcatgatgaaagtctcacgttgagatagtgaaactacaagattgaagcagcaata

SEQ ID NO: 398660 - DNA, 767 bp, Homo sapiens
ctataatgttaaattaaaatctaagccttacatagaaattaaaattcgctaaactactgatgctatgttgtacaaaactgtactccttttagttcataattggtcacctccatattcagttggaatattaggttggtcagcttaaatactgtggctttgttttggttatccacagaatctttacacccaaatgttaatgcataaaaagcagcaagacattgttaaatgaaacagcaatagtgcagtttagacctgtgaccaactatatatgattaaacttacttcccacattcacatcacaataatcatccatcatttaatagctcaaccaaaatgttatacagtcatcaacaggcaaggcacatgaaaaccccgcacaaccaagaatgatttgggcccaaatgtcagtagatttgagtttggaaaaaccttcttgtagttgttaaggctcaatggctctggttaatttaatataataaacaacaacttcataatggaaaaaaattaaatcctctattgaggtataaaacctaattaatttataaggataaagtaagtgactaccttgaagtcaaaacacattatggacaatgaaagagtattacgattgttccaaattgacaagggtatttaaacctaggtacacaatctttcttaaaattaatttatagaaagtcataacctgtgggtacatgaatatgaatatacatcttctccaacttgacaagtacattattgctgggacaggtaccttttaataacaagta

SEQ ID NO: 398661 - DNA, 667 bp, Homo sapiens
tagagtggctgtgttggtacacatgcttggtattgccatcccttgccgcttcactgctgggttattctatgggtgtgtgggagagaactcagtcagacaccaccacaaaccctggcactacctgcatgctaattgtggtttataagaaagttaggcaagtcatagctgcaggagatccttggtgacgtgatttatggccaattgacatgaatgttgttgttactaagaaacatttagtgagccagccattgtgctcggcgctttacatgaattatctcatttaatcacgatttctcagataaggatactgaggctggagaagtggtgtttctagcttcaaatcttctagctaagcaagtggcagaatgaagatcccaaaagatttttttctgatactcaattctacattcttgagcacttttcaaagagccccgaaacagggacatctatgaaaccataactatctttgaaaaacctaagagaaatggttaaaagagtgaaatgtactgcgttatctgtattcctttgggatttatagcagctgcagtatgaaataaaagctcatctcagaatcagaatatacaccagaaacttgacactgttttctgaatgttaaaatttttggctacaggaaaataggaaatacttttctaaagcatagcacttt

SEQ ID NO: 398662 - DNA, 871 bp, Homo sapiens
gtgtgtaaattacttaagaaaggaggagggaatgcttatccctttcttttcttttttttaggcagggtctcaactatcacccaggctggagtgcagtggcatgatcactggcctggaccttccgggctcaggtgaccttaccaccacagcttcccaagtagctgggactgcacatgtgtgctgccatgtctggctaattttttgtaatttttagaagagatggggttttgccacgttgaccaggctggtctcgaactcctggtctcacgttatccacctgccttagcctcccaaagtgctgggattacaggcatgagccaccatgcctagcattatctattcatatattgtggagggtacataagatgagagagaacgggatattggatttagtaagataatgattgttggtgacttttaacaagtggtttcattaagagtgctggggaggaaagcatgagtagaatgatttaaaaggtgaagaggatttagtgagagtaattacagactttttttttttttttttttttactcgtgttgtgagcaacattgaaataggtggtagctggaggtggacctggttgaggaggttggttttctaagaatctcgccacaaattaatgatagaggagagaaagtatgaaagaggatgagagagggatgttttaagaaaacaagcaaggtgaaacacaggacacaggtttaagggttggacacaggagtaggggtcattataacagggaaagggcattggatagacattcagagatacagatatgttgattggaagataagataattcttgtcagattattccttatttccttttgtgataagaaacaagctaagatgggtgagagggccaggtgtt

SEQ ID NO: 398663 - DNA, 422 bp, Homo sapiens
ttaaattaggtctggtacacacatacactgataaaattgggtttcaggacctgctgatctaaagctgagacctgaactgtgctgtccacatactagaattgctactgtttaaggccccgcctgaggagctggctaaattcttaatttaaattatcttttgaaatgacacacacaatgatttgcatgacagattgatttaaatgtatttacagaatcttaatgatttctagactctgtcaataagtctgtattttccttacactctaaataataatcttgtagatttgtcagtataatcataaaatctgatacagaaaaatccttgttagataatgctggccttgctgtgtttttaaattacatatttggtatttctaatcaactctataggattagacattatacaaattctaagttggaaa

SEQ ID NO: 398664 - DNA, 538 bp, Homo sapiens
tcagaatcctctttgaaaatatacaatatttgaaaatatacaataatatacaataagtagacaataaataatcattaactgtagtcacctaccctgctttagaacactggaattcactcttcccatctttctagctgtaatttgtatccgttaactctcttttccctatgacccttgcccctctacccttcccagcctctagtagcctctattttactctctacttctatgagagtaactttttaaattttcccatatatgaaagaggacatgtggcatttgtgtttccgttcctgacttttttcacttaacgtaatgtcctccaggctcatccatgctgccatgaatgacaagatttcattcttttttttttttatggctgtatagtattgtgttgcgtctatataccacattttctttatccattcatctgctaatgaacatttaggttgattccagattataatgtttatactgtgaatcatacatactttatgtacaatgtgtagcatagacaattcctcataatagaagctca

SEQ ID NO: 398665 - DNA, 318 bp, Homo sapiens
ttccctaatacaacaagctgaggatgaggccccttctaactaggccaccgtcagagtcccaatcctttctgacagaccagcccccgacatgtgtctgtctccatccttgcagcctggccagccctgtcccacgcctgctaattggtggggggggacctggccccccaagcctgccggccattagcagtgcctcacggggaagggctttcttccttggtttcaactccctccctccagcgcgcagtcccttgccgggcttgcctggtgacagactcgtgttgatgaagacctttagggaatttccttccccctccgctc

SEQ ID NO: 398666 - DNA, 397 bp, Homo sapiens
ttattattaatgttatttggaaaaatcgtgtaacgcatgtgtgttggaagccctttaagttgcgatcgagggtccgattatggcgatcttctctttgcactggcacatcaaatttaatgtctgtggtcgttttggcttatctggtttgcaacataaaccagttgggaatcatgttacagcgaatgcatttgttgggattgactttaataatgaggctggttttgtttaaaaaattcatggtttccagttgtaggggaaaaggacacacactatggctaatgtttttaagtgtgtacgtgaatgcatatgtaagtaactacaaataatttctccctgttaactgggcttctgaaattgggtgattattcctagatttaaatggcttggaatagttaaa

SEQ ID NO: 398667 - DNA, 777 bp, Homo sapiens
gctgaataccaatctgtgcatgcaatgggtaagctccaaaaggctagtcaaagaacaattgtaagaatgctgttagccaaataattactagagctctcatggggccaggaattgttgtttaatcccatttagccttctaacaaatcttaaaaactgatctgtaagcaagtgaactgtcagaacaaaattcaaccttcttcaaaagactacaacaaaatccagcactcaatatgaaattactagacatgcaaagaaacaggaaagtgattcagtcagtagaaacagacacaagtgtgacaaagatgatggaattagcagattaagacataagacaatcgttatgaatgtgctcagggatttaaaggaaaacacaaacatgaggaaagaaatggaagatataacacagaatcaaatgaaacttctagaaatgaaaaatacagtatttgaaatgaaaatttcttttttttctttctttcttttttttaatagagacagggtctccctgggttgcccaggctggtctcgaactcctgggctcaagtgattctcccaccttggcctcccaaagtctgggcttacaggtgtgagctaccatgcccagcctgaaatggaaatttcactggataggattaatagtaaattagatagtgccagtactgcagaaagaaagaccactaaacttaactcaatgcaacagaaactccagaatgaagcacagagagaaaagtgactgaaagcaaaataaacagagcctcaatgactggtgagacaacatca

SEQ ID NO: 398668 - DNA, 454 bp, Homo sapiens
gcacgaggaactttcagaaaaactgctgtaggttgaaataatgggcccaagctgtaacatattagggatgaatagaaggtcctatatcaaagttcatggggaaaaaaacagtcacagagtgcagactttagggagagtaactgaaaaactattgatctttttttttaaaaggcctgttgggttggctcacatctgtaatcccagcactttgggtggcagaggtgggcagattgcttgagcccaggattttgagaccagcctgggcaatatggcaagaccgtgtctctaccaaattaaaaaaattaacgtggcatggtggcatgtgcctgtggtcccagctacctgggaggctgaggtggaaggattgattgaccgtaggaagtggaggctgcagtgagccatgatggtgccactgcattccagcctgggtgacaacagggcgagaccctgtctc

SEQ ID NO: 398669 - DNA, 425 bp, Homo sapiens
ctcttttctcttcattcaggtggtacttaccttacattgcagtataaataactcacgcctcttgcttttctcccagatgctccaaagataaaggccatgaccttcactttccctctcttctgcacatctaccatagtactgagaacctaatgtaatcacgggtctcactctgtgagtgagctactatttggtggaaaaagcactaagaaagtataaagccttatatatggaatgattgcaaaaaactgagatgttaatttgtcaacaattagtaccagaatctggccaataacttggtattttgaaaaatgtactattttaaataatttatgttcttcaaaataaatgtaatatttgttcattatagactttctggaaaatacaaaaagaaaataaaaatgatttctaattcctgcactcagaga

SEQ ID NO: 398670 - DNA, 334 bp, Homo sapiens
cagaagaggaggtacagaacaataacacctgattgttatcccaggaattatttacatccaccgagcaaagcccactcagctagcttgggcacgaagagaggggtggggttggatatattgttccctgaaacccagagcagaaaatgcagccagcctcgcaggggccaggaaccagctggcagctcccgggccatctgtccttgtagcctcaggatctcccatggagcctgttctggaccacttcctgcagttgcccactggcccacatcccccaagagcaacccccagtgagcaccttccacctggagctgcagtgtccttccctgttgtcaaa

SEQ ID NO: 398671 - DNA, 134 bp, Homo sapiens
agaagcatgacaaacaccaaacataagaaacacgaatgaagccacatcaactcataataaaattgctgaaaagtggtagtgatgagaaaaatcttaaaagcagccaggaaaaaaaaaagaaaagacacattaga

SEQ ID NO: 398672 - DNA, 163 bp, Homo sapiens
ttcctaccttaatcttaaaagatctctatatccttcattggttccttatctgtgagctggcaatatttttttctggatatctgattgcattcctttttgctacagtttggttcatttccctttgttcagtccttggtagggaagaacagctggtccccgcatt

SEQ ID NO: 398673 - DNA, 637 bp, Homo sapiens
tcctacttatgcttaatctcactctgtcacttcagtgaaactggtctgtcagtcaccagtgatcttcatttttctgaatcccatggagtgctaaatgttggattgctttagagcttgttcctaatgtatcttattctatctatttcattcttctagacctatttttaaaatacaacatatatactaatgattctcaaatgtatttatgtaaatctgacctcttctctgagtatctcatatagacaaatatttaattgatgccttcatttagaagtctaataagcttttcaaactctgcacattcaaaatggaactctagatttccttcccgaacctattcctttcttaggctgtctcggattaatcatcttcctagtggctcaaataaaaaattaaggagttgttattatttccctttttcttttgttacgcatttgcaaatcacaaggaaccagtctccattcctgtaaaacatatttcaaatccatatacctctattcttttcactgccaccatgttcttcacagcctctactatttcttacctggagtgctgcaatagtatcctaataggtccctctgtaattccttctttacaaaccagtctttacagaacctattaatcataccattcatgc

SEQ ID NO: 398674 - DNA, 606 bp, Homo sapiens
gaaaaaaggggaaaatcttgccttaaaacatccaggatggagttataaatagttctcaactaataacaaattgaaattgagttatataacccttcatcctgtcccgcggggggttctcagcacctattctcactaacccagtctcatgggagaggctccgtagcagctgtgcctagggttaaaccaaagagatgactggcaaccttccaatccagaatagcgatataatgccaacagaaaaagtaagagaagctggcaatctgtgtagccccaagggtagagatgtagataaaaattcctgcacatttaacctgctgtcaccagattctgagaagcagaatataacaagtgtagttattgttattccattcataagtgaatttgaaaaactcaatttaaattaatatatgtgtttccaaaacatgcccacagggaaggagcagtcttcatgttccattgactccagagacgttcccattaaatgcatcaccaaccctagagtttaggtcctgcacattgttagctctgctgtgcgaaaacatgaattaaagcttaaaagatcatagaagtgaaaccatgtactagaaactaccacaggtgcgttgg

SEQ ID NO: 398675 - DNA, 420 bp, Homo sapiens
aaagcccaaatcccataaaaccctcttggctggactgattacagtttactacagcaaaaagcggggaaaaagagaggatacaagaacttttttcggctcttccatagttcatggataatctcctcgaaatgtttcatgcagacggctctgcccagtatttgggctgtaaaaacatcgtgtcagacagtttggaagacgttgtaaacaacctaaatgtccgtcaaaagaaaatgagtagataagaaagctgaggtcacaaaaaggaaagtgactggtccaagttgaaattgatcgtaattagcagagccagaagttgaaaccagttctgttttattataaatccacaccacactttggatcacacatcatcagtggcccaaactctcagctcttgcaaataaaaataaatcaacagttaaa

SEQ ID NO: 398676 - DNA, 476 bp, Homo sapiens
atcatgctagatagccagtctctcatttctccaacttaaaaaatccatctctgaaattcatgacagtgatggcagacggcaaagcatggtggtgtccacctctggggtgtgggcttcccggaaagaatcccagctgaccaccccagaaagtgcaagaataacattgtgctgtacatagtcaagtgctataaattacagttatcataatgagaaggcagaaatgaaactgagttgtagctatttgttacaagataataagaagtagagatattagtatggaaaaagaaacttttcctgggatttaaaatcaggccaaatttatcactcgagttcttttagaaaagaaaacaggtactggagtagacaacttcttccagataaagtttcaaaagatacgagaacattttttcaaataaaggactcacattaatcttttataaaaatcacaaaaataaatgaaatcttaattcagtgca

SEQ ID NO: 398677 - DNA, 493 bp, Homo sapiens
ctggcattccttctcccctgtgcccttggagggtatttagtgctacctagaatgtgagtcagagaaggtacagataggaagaactgttctcacaccacaggagaagtaacagctcaagggcctagctagtcagagcagtgtggcactgctgctccagaagtctggcttcatcagcagtgatgcatggctctgagctctgaacaggaagcatggttgatctgtgctgaaggcttggttgatctcttgaataaactgagagatgatggaatggtgcacagtgaatctcctctgaagactgaacatcttccttggaccatgatcagtgaacatactggaacatactggaacattctgacaccattttccatcccaacccctgttctcccttagttttctggtcttagggttacaacttgaagtgagtaccttccattgtagcactcatttctaaaagcattaaagccaattttctgactcatctgtatttcaagtc

SEQ ID NO: 398678 - DNA, 563 bp, Homo sapiens
ggcgggctctcaggccaggggcactcgcgatccagaggccgcccaggccatgctccaccacctgggcgcccagctacaggcgccaggcaactcccaagctggctggcgcgcccagcctcgcagacctgggcgtggatgtcgccgtggctgcggccaagccaggcggtctgcccggcggcggctgcaccggggcaggaaccgaccctcagccccatccccggtggctgcggacggcccctggagaggccccgacctctcttcggaggagaagaggggcgggagtcaaggacaggcaggccctcaggcgggaagggatgcgtgcctgcgattccgggacataccgcgccagcccaggagaacccggaagcccgcagcgcctgtttctctgtgtgattctgtgaggaaccaccaaattgttttccacggcaagtgcatcattttctattcctagcagccagttcataagggctccaatttctccacctccttagcaacactgattttctgtgtcgttgttatgaaagccttactagtggatgcaaagtggcatctcatttgggttt

SEQ ID NO: 398679 - DNA, 985 bp, Homo sapiens
cagatttggctgtaaaagtgaaactggggatgaggtggaatggagagagagtggtagagacagcttgtgaccagtttactcccctgcaatggtatagatttgtggctgcaaagcagctgcttgtaaagatgagctgtaagtttgtttccttctgtttggatcatttaattttgttaattttaagaatgaagacacaagagcatgcctgaatgcaatgggaagtagatcagttgacctttgctgaataacaaggtggacctaaaactgggtgacttgaaacagtaagtatttttagttcttgattctgcacatcagcagtctgggctgggttcagccagaggattctgctagtctgagctgttcttacttacattatcattgcagtccatagtcagtcagtgggtggttttctggggctggatagtgtatgatggttgaccttcatgggtggcagttagcttgctgctatctagggtcaataggcaactagacaacatatcttttgtcatctcataagctcgtccaggatttctcctttttgatcaaagcaaaccacatgcccaaacctggagtcagagtcagtgttgaagggcattagcaaagggtgtcactcagggaggcatgaacaaatcaaggccattatggaattcaatttgcccaaaaggcatagagaatgaatatagaagtatgagatagggtaactgtttgagatggtcatatacagtcctcagatccattttagccttaaaatagaaggcagttttgctaggagttcaacaattaaaacgcatcattttggtggcatttcaaaaaaaatgttggtggcagatgcagtgttttgttttcttgaactcttatcatttatttctcatagaagctgcaaaagcaggccttccattttagaaaccgggacagcccgctgccagtaatgtgctcagctcaactctctaattactgtcatgctgatggaggttaaatatttatg

SEQ ID NO: 398680 - DNA, 394 bp, Homo sapiens
taagacaagagaatcaggacacttgaacttgggaggcggaggttgcagtgagtcaagatcgcaccgccattgcactccagtctagacaacagagcaagactctatctcaaaaaaaaaaaaaaaaaaattagctgggcagggtggcatgttcccaaggctgaggcaggaggatagcttgtagccgagaggtggcggttgcagtgagcagaaattgtgccactgcactacagcttagcaacagagcgggagtctgtctcaaaaaaaaaaaaaaaaaaaaaaaaaaaaagttaagcaaaaggggatatgtcaaaagatcgcagggatctccagatgctaatgctttcagccatgttcttcaaggcaggagccaggtgactccagatcccaacaggag

SEQ ID NO: 398681 - DNA, 378 bp, Homo sapiens
agttgtaatagatattgctaaattgctctcaaatgttgtgccaatttatgcacccaccaacagcgcacgaaagtgcctcttagaaaatgtcttttagaagataaaatacctattgttaagccatgaaacacatttcaaataattgctaaaatttttctagctgtggcataagagacaagagtcctgaggaggactgaaaggtcttgggatgcaggggagcttaatgtattaaaaggtgacattttggatcagtaggaaaaaaaatggcttatttaatacatggtgctggcataattgggaggccatgtggaaggatgctgagtttgattcctaactcatacaaaaataaattacaggtggagtaagctataggcagta

SEQ ID NO: 398682 - DNA, 531 bp, Homo sapiens
ccagaccctgtatgacaagtggggtctttcagaacacgacagaaacaggggggcccttgtaatgccactcatactcagagcattattcttatttggacagccaagggcagatcacaggttattgtaggaataaagactagtttacaaaggagaaagaggccctggacttcccaaggaaagggtcaggttagggctcctgtacccattctgttccaccactgtttgatctctctggcctcccaccaggaatgccgtttcctttttatggatctgttgggaaccagagagaatcaacagatcaatgacataggatccgaagtgcaatgatagtcacttctagtttggcatttcacaaactctgtacagcaaggtattggtaggttactcaatttcaaaagggccccatggccaaatatgtttaggaaccgctgtttgtatttctttttttggagacgcattgtatataatatatgtcaaaggctttcggaattcctgcaggaaagaaatcagctttgttaaatccaaactgat

SEQ ID NO: 398683 - DNA, 681 bp, Homo sapiens
ttttttacactcagcataattcccttgagactcatccaagttacacatatcgatggtccattccttttttgttgttgagtagtattctatggtatggatttataatatttatcttaaatagttagtaaacaacatttttaatgactgcatgatgttcccatgggtggagatgtcatcggtttcctaacaattctattattgttggacatttagattgttgctggtaaaaataaatgctactgaaaatcttgtatacaagggtttcctgattctgatttctttaagatagatttttttagaagtggaataacttagacaaaggatattgacaattttcagactcttaacgcctgttaccaaattaattttgcaaaagattgtacaaatgtatataggtccaccagcaatatagaggctgaggtaagaggttttcctaaattataatacaagctgaataataaatatgtagcttgctttctgcaaaagccaactcaatatccataggaaaaaccaatgagccttattatacccatgatgtacttggtctgggtatgtatgatctaaagttacttgatatcatgctgcccttttggtgagcaacatgattggaggcaaactgtggcatacatgcatagtacaatggtggtctcttggctgcatttgtgttggctgtctgtgcta

SEQ ID NO: 398684 - DNA, 539 bp, Homo sapiens
tcttgcttgtcctgggagtggcccacgttatctgtgcagggtatgggatttcatagcttcacaatcaggagtgaaccagatggggcaagagagtggtttgacctttatgtttggtattcagggccagcacagccaagtgcattcctctgaatttgtttctgtggagcttccatgccagtcagcttggccatatcatgttctattgccatgctagatgagaattttagacgttcaagaatactgagggagagaatttttttcaaattttttatttgcaatgaaacctttttttcccctcaaaagcaatcttatcagacaactaagtaagtataagaaagaagatctggatagtgagggtagaattctcaagaaccttacttaggctttccctttctcggccaagcccctgacttggaattcccccttactcccaaagctctgtaacccatatagtttcttctcctttatttcctctgtaaccctgatggctttctttcttttcttttcttttttctttttttttttttttgagatggagt

SEQ ID NO: 398685 - DNA, 303 bp, Homo sapiens
ctgggaggtggaggttgcagtgagccgagattacaccactgcagtccagcctgggtgacagagcaagattctgtctctctcaaaaaaaaaagagagaccacacacaaggaatcgaaagtggtagagtgaggagccagaaaatctccctcaactgaagtaataacccctagaaatgctctgaggtcacttgggagctccagtagggtccttttgaaaacaggtgggattcctcagttatggaccaagaatgcagtatgcatgtgcattgcctattaatttatgaaagttttaaaggattgatag

SEQ ID NO: 398686 - DNA, 751 bp, Homo sapiens
tgaacgtgtgcatgtgtttgtatgtttgtgagtatgtaatgagtaagcatgtgtgcatactagtgtatgtttgtaagtatgagtgcacctgtgtgaggatgcatgtgcatgtgtacatgggtgagcgtgagtttgtgcctgtgagcatgagtgtgagcatgagcatatgtacgtgtgcatgtgatcagcatgtgcgttgagtgtgtgcatgagcatatgagcatgtttgagcatgagtacatgtgtgagcatatgtgtgcatgttagcatgtgtgcacgagtttgcatgtgtatcactgtaactgtgtgcatgtgtgagcatctgtccatgtatggtgagcatgactgtgagtatgagcgtgtgtgtgtggggccgtccctgcagacaggagagtcctaagccacggtcgatggtccccctaccctccttggtcccctccccacacatgcagcaacccaggtataagcagtaccctgccctttgctcccagcaaagacctcaggtgctgggcccattgcaggcacaagctaggcagatactcgctttcctcagcacctgatgaaccagcctcccgaggccaagataaggacacaccctggaggtcatcgggaacacggtttccagggaacagggtctgcactggcaccacaaacccaagggccccccgaactgtgcagcctcccatcagacagactgtgtcttttttgagacaggggtttgactcttgcccaggctggagtgcagtggtgc

SEQ ID NO: 398687 - DNA, 512 bp, Homo sapiens
caacaatttgactatagtgtgtctcagtgtggatttctgagtttgtcctgattggaatttaccgagcttcttggatgtgcatattcatgtcttcatcagatttgggaagtttattttttcaaatatttttttctgcccctttttctttctgggactccagtgattcatgtattggtacacttgatggtgccaccagtctctcaggctctgttcatttctcttttttttctctctctctttctactcctcagaatggacagtttgaattatcttgccttcaagtttgctgatccttacttccccctgctcaaaggtttcaacagcagatttttcatttcagttattctacttttcaattctagaatttctgtttggttcctttttacaatttctttctctttactgagattctcattttgtttgtacattgttttccttatttgtttttagttatttgtccatgttttcttttagttcagtaaacatttaagatagttcatttaaaaaaaaga

SEQ ID NO: 398688 - DNA, 332 bp, Homo sapiens
actttggattatttaaacttggccaagagaggttcgcattttggaaaactgtattcctgatggcaatgctctttagggtgtgtgggtcactcaccgtaagtgtcacatcacggttgttctgcatatgtgtaagtatgtgtgtgtgtttatgtgtggggggctatttatacacacacttatttaatatactgatttaccccttatttcaaaatggcaaatcaaagtgttgacagtattcagtattgtcttgtttcctgtgaacccagccgtatgtgttgtaagtgggtgcatgagaagatctcatcaattaaatgtacctgctggtatagtta

SEQ ID NO: 398689 - DNA, 1811 bp, Homo sapiens
  misc_feature (122)..(122): n is a, c, g, or t
ctgtgtcccaggggcagtactccccttctacagcagggggagccagagacccacacagcatcaggaatcccacagcgcgatcaagcagggagggaagagaagggagtagtggtgtccagccnctactcccttcatgttcctgatccagtcccctgggagctgtgcagctccaggatgttggccccagtgaggtgggttagcagaaggaaccgcaccgttgggcgtccgcgagaacagctggcgtcagggacttcctcgggctccctaaggacctgctctcccagttctctactcttccctctgaggcagaggctgggcaggacccacaggcagcccttagtgacccgcactccacaccctgtctgccttaggagaaatggggtctgtgaatctgggctctccctccatgctgccgtgtctgcggagccaggtgccggcgtggcctctgctagccagcagagtgagcatgcacagctggtccagggcacggtgttttgtttgcactgttccagacatcgtcatctccatctgatgatgatcactcggcagctttgagccctggcacagcttcgggtcgaagcacgttcccttttcaggagagttgagccgagctttccttcacgcagacttaatttcctggacttagtgctaacgtcaagaccaaacctgtagggtcccagaccggagcctgtgtccctagcgcaggtgtgtctgtcgggcagccgacggtgcctgtgcaggcagtggctggacaccactactcccttctcttccctccctgcttgatcgcgctgtgggattcctgatgctgtgtgggtctctggctccccctgctgtagaaggggagtactgcccctgggacacagaactgcaaggccagtggcgccaggtacctcccacaggaagaagatttgaggacatttaaaggtacccactttaccccgtgcccaccttctaccccagctccctggcagccatccaaaatttgcctccaagagcatgtctcacagacaaaggtctgtgttttatggaactgtgctgacgggctctgcacacatctcactgggctactctccctggtcccagcctgcccagacagtcaggcgcaaagtaacatgtgagtcagaagaggttctggaggaagttggagaaggctccagaagtggcctcatggaatgcggccccatctatgccgcatatgttttactgcaagctcatctccagccaagacttggctccttctctgatgcaggaaacctatcgccagtgcaggtgcctttaatgtttctctgagaaaggaggaaatgctggcttgtgctgtcgataagtccccaaggctgcatgtattagcaggaagcacagcaggactctgagagaagaatgtgtctcttctctttgttgctgagaaggtagagaaaggccctgcactctttgacttaccttcctcagtcctgtgcatccaggctgttaggtgactctgctgtgacttagtcccacccagcaccataaagaaaggcaaattgacggccgggtgcagtggctcatgcctgtaatcccagcactttgggaggccgaggcgtgtggatcacctgagatcgggagtttgagaccagtctgaccaacatggagaaaccctgtctctactaaaaaatataaaaaattagtcgggcatggtggcacatgcctgtaatcccagctacttgggaggctgaggcaggagaattgcttgaacctgggaggcggaggttgcggtgagctgagatcgtgccattgcactctagcctgggcaacaagagcgacacttcgtctca

SEQ ID NO: 398690 - DNA, 1865 bp, Homo sapiens
  misc_feature (122)..(122): n is a, c, g, or t
ctgtgtcccaggggcagtactccccttctacagcagggggagccagagacccacacagcatcaggaatcccacagcgcgatcaagcagggagggaagagaagggagtagtggtgtccagccnctactcccttcatgttcctgatccagtcccctgggagctgtgcagctccaggatgttggccccagtgaggtgggttagcagaaggaaccgcaccgttgggcgtccgcgagaacagctggcgtcagggacttcctcgggctccctaaggacctgctctcccagttctctactcttccctctgaggcagaggctgggcaggacccacaggcagcccttagtgacccgcactccacaccctgtctgccttaggagaaatggggtctgtgaatctgggctctccctccatgctgccgtgtctgcggagccaggtgccggcgtggcctctgctagccagcagagtgagcatgcacagctggtccagggcacggtgttttgtttgcactgttccagacatcgtcatctccatctgatgatgatcactcggcagctttgagccctggcacagcttcgggtcgaagcacgttcccttttcaggagagttgagccgagctttccttcacgcagacttaatttcctggacttagtgctaacgtcaagaccaaacctgtaggaaaagagctttaactacacaaacacatactgacagattcagccaaactccgagagtcccagaccggagcctgtgtccctagcgcaggtgtgtctgtcgggcagccgacggtgcctgtgcaggcagtggctggacaccactactcccttctcttccctccctgcttgatcgcgctgtgggattcctgatgctgtgtgggtctctggctccccctgctgtagaaggggagtactgcccctgggacacagaactgcaaggccagtggcgccaggtacctcccacaggaagaagatttgaggacatttaaaggtacccactttaccccgtgcccaccttctaccccagctccctggcagccatccaaaatttgcctccaagagcatgtctcacagacaaaggtctgtgttttatggaactgtgctgacgggctctgcacacatctcactgggctactctccctggtcccagcctgcccagacagtcaggcgcaaagtaacatgtgagtcagaagaggttctggaggaagttggagaaggctccagaagtggcctcatggaatgcggccccatctatgccgcatatgttttactgcaagctcatctccagccaagacttggctccttctctgatgcaggaaacctatcgccagtgcaggtgcctttaatgtttctctgagaaaggaggaaatgctggcttgtgctgtcgataagtccccaaggctgcatgtattagcaggaagcacagcaggactctgagagaagaatgtgtctcttctctttgttgctgagaaggtagagaaaggccctgcactctttgacttaccttcctcagtcctgtgcatccaggctgttaggtgactctgctgtgacttagtcccacccagcaccataaagaaaggcaaattgacggccgggtgcagtggctcatgcctgtaatcccagcactttgggaggccgaggcgtgtggatcacctgagatcgggagtttgagaccagtctgaccaacatggagaaaccctgtctctactaaaaaatataaaaaattagtcgggcatggtggcacatgcctgtaatcccagctacttgggaggctgaggcaggagaattgcttgaacctgggaggcggaggttgcggtgagctgagatcgtgccattgcactctagcctgggcaacaagagcgacacttcgtctca

SEQ ID NO: 398691 - DNA, 459 bp, Homo sapiens
taattaggatagctatttgaccatttgaaaattaaagactgctgagacagagttattttagaattttattgccttttttgtgttgattatgcataggagtatgtgttttgatttgttaaatgaaaaactagactgttttgagaaaagcaaggtactcgaataaattttattaattttttcgttcattagggagggcattttttgcttggaaatagataatttagatatatttacatgtttggtatttgataatgaattataaaaaggtttagtgactgaagcttttaagtatgcttatttaaatttctagagctgtaacagtaaattttacccattttataaagtagtagagaacagatacaaagaagagtcccaaaagcatttttttaaatacttggttttaagtctccttttatcttaatgatcttaagaattggcagtagtcatcaaaggggaggt

SEQ ID NO: 398692 - DNA, 397 bp, Homo sapiens
atattccccatccctcccaaaagacccagagatcccaattccttggccatccatcatcctctctattgcttaagcagctctgaggtccgggtcctgagaagaaacctcaaagaagaatctatgcatagagtaaggccatctgcctgattgccatttcattgcacaagcaagcatcaaattaactctccccacagccttttcctctcatcatgatcacattggaagcagctactattggggaagaaaaggcatatgatgtgcctcctctttcctggcatctgacaagaagctcagtgagaacatcagttgggttgggctctgggttcagtgccaacaggccctggcagctgcctggctgcagtggaataacagcagttacaacttaactagaggcaga

SEQ ID NO: 398693 - DNA, 280 bp, Homo sapiens
ctgtggtctgaacctcctgctgtctcttgtaaccactggctgggcccctctcagctccttcttggcttcctgtacgaatctccaagcagagcattgctggttgcctctctgtggcctggaacaggaccccccaccatgagcaggtgggctgcacatcagtacagcttccaagcaatcctgcaatcacagcatggatagcagaactgtgtcatgctgtatgttaatgttcaaaaagttaatctgttcaacacatacatttaaaatatactgtaacagttac

SEQ ID NO: 398694 - DNA, 300 bp, Homo sapiens
tagctcaccacccctatttttcccatcttgcagtccacttgaagtcactaataaataatatttctgcttctgcaataattcagcttttaagcactagtgactgcctaattaccaaacgcaacaatttttctttggtccttaatctacttgtcctcttgtatttgcagctgttaaccatcttcatattgttcagggttttttttttcctcctttgatttctcaatatgaacactatctccattttatgcttgcctttccagaagatctctctccttcatgggattcctttgctttttccca

SEQ ID NO: 398695 - DNA, 284 bp, Homo sapiens
atggatatcgcccaacaccaagttaactaccagctttccacagggccctgggatagagtcatcaccacctagaatgaatggcctgaacacctttgaactgtggtaggactatttcttccatttcagcttagatttgtggtcttctctataattgggtgttggggataacatcactgatgttatcgcccaacacaagtttgtaagtgttcttaaaacattatgagactttttgtataatttttttttttcctcatcagctattgttagtgttggggataacgtca

SEQ ID NO: 398696 - DNA, 381 bp, Homo sapiens
agctttgaatctcatttcattaaaccataccacctatcatcctccctctcttgcaggcacatactacagtcttttcttacttctccaacaccacacaactccaacaatcatatgaccccacaacaagactttcaagccattgatcttaccacctttttaactaaccttcacctgcttcctgtttttgcttccctccttacctagctagtgtaaatcccatggccaatcattataatcacttccttgaatgcaccctcaacctgccctcctcactagactaaaccgcaatcccagttaaatcaaatgttctgcctcatccacacatgtagctggggaaacacacacacatgacaacgctagtatccttttttttcttccctt

SEQ ID NO: 398697 - DNA, 367 bp, Homo sapiens
cgcccaccaccacgcctggctgatttttttgtatttttagtagagacggggtttcaccttgttagccaggatggtctcgatcccctgacctcatgatccgcccacctcggcctcccaaagtgccgggattacaggcgtgagccaccgcgcccggcccatcatacaatactttttgtgtctggcttctttgacttagactccagcctgggcgacagagtaagactctgtctcaaaacaaacaaacaaaaattggatttttgtttttcttcttcttgcctggctagaacttgaatagcagtggtgaaaataagcctccatgtcttgtttctcattttagggggacagttttcagtctttaacctctcag

SEQ ID NO: 398698 - DNA, 671 bp, Homo sapiens
gccattggaggacttaagctttgacgctgaatgagttgggaaagcatgagagggttttgagcagaagggtgacatgacctgacttatatgtttgaaggctcacctgggctgctgggttgagactagcctgtgggaaggatgcaagagcaaaagcaaggagtggaagacggagggacacgtgggcagattctggatatgtgttgaaattggagacaagaggagtcactgatggatcagatgtgggatataaatgatggaaggaatcaagagtgactccggagcttctccatggaattgccttttgctgagacggagaaaactataggaggaataaatttagtgggagctggaatcaagagtttttgttcatgctgagtttgagatgccttttagaaatccaaaaagagatactgaggaggcagttttatatcacagactgaagttcaagtcagggtctgggatgagatggatacgaaggaaatgttggcatacagatggcatgtaaggccatgacacctgaaggaaagaggagcatatctacttaacaaaagagaaggaaatgtcagtgcaagacaatgaaagctagctttagactctgggtcaggggcagtagcctcagttcctaatgtaataatgatctaactgagtggctaccatgtgccagatcctat

SEQ ID NO: 398699 - DNA, 735 bp, Homo sapiens
gccattggaggacttaagctttgacgctgaatgagttgggaaagcatgagagggttttgagcagaagggtgacatgacctgacttatatgtttgaaggctcacctgggctgctgggttgagactagcctgtgggaaggatgcaagagcaaaagcaaggagatcagttgggaagctactgcaggaatgcaggggagagataaagtggccttgacaggaggaggagtggaagacggagggacacgtgggcagattctggatatgtgttgaaattggagacaagaggagtcactgatggatcagatgtgggatataaatgatggaaggaatcaagagtgactccggagcttctccatggaattgccttttgctgagacggagaaaactataggaggaataaatttagtgggagctggaatcaagagtttttgttcatgctgagtttgagatgccttttagaaatccaaaaagagatactgaggaggcagttttatatcacagactgaagttcaagtcagggtctgggatgagatggatacgaaggaaatgttggcatacagatggcatgtaaggccatgacacctgaaggaaagaggagcatatctacttaacaaaagagaaggaaatgtcagtgcaagacaatgaaagctagctttagactctgggtcaggggcagtagcctcagttcctaatgtaataatgatctaactgagtggctaccatgtgccagatcctat

SEQ ID NO: 398700 - DNA, 446 bp, Homo sapiens
aatccaggcatcggaggcaacacacaaggcagacttaggttcccttctgttcctgatattctgtgagagctaagtcctcagagaccctctgctgggagtcacggtttctgaccctgagtgtgacctgccttggtcacatacttctctcttgtgtaaaatccacagcttccagctcctggacaccaccaccaacttcaagctctactattaatcaaaaaaactgaaggcaatggccatcttttcgctgtctctaccatgacttccaaattaaaaacccaaagcctcactaattctcgtgttcgctcactggcagatctgtaaaatggtcagagggtaccaactgcccacaatggggatgtttggcaagaggccaagaactcactgagggctgaagaagcatgttttgatgggggacaaggttggtagaaggcaggggaaacaagaca

SEQ ID NO: 398701 - DNA, 484 bp, Homo sapiens
atactttaccttggaatgcagccggaggagccatcctaggcagtgacccgggaatccttcagtgtactttgtgaaagaggctgtctgctgtcataactgatctcttccatacttggtggtttttccttcccaggcactagtattacatacatcttgtttcttaagtcactacttggtaagagaagcgttgcctcaaagcaggtaattctgtgtactgtgaacctagagccaccagggaaggccacacttctctaacggtgaagtgagtctgcccaggcagtcatctccagtgatgggtcctggaggctctgccctctgtggcctggggttgctgctgtgccccttacaagacagcctgctgtgtgtggctgccatctcctaaactcaagtttggctcattttctttgagcatgggtgatatatctttttcctttcctaggagaaggggtgacttctaaataataaagttccattgttgctaggg

SEQ ID NO: 398702 - DNA, 350 bp, Homo sapiens
tttcattaagccattttcataaacattaatatgtatttagacatacatagacatatgtatatagtgagttgcaataaaaatatattttttattgtctgtctgggtcaaaaaaaagtttgcaagccactgaactacacaatctcaataccttgaaaatagttgatgttcagtaaatctgtactaagttgaattaatgtattgttaaataaaaaataacccataaacagtgttaggataaaatacttctgctgagcatataatttccctatggagtaggactgaaaatgttagtctcacagttcttaaccaatgaaactgtaattatcaaacataatctattagtttatacc

SEQ ID NO: 398703 - DNA, 860 bp, Homo sapiens
gagatggggtctccctctgttgctgaggctggagggcagtggtgcaatctcagctcactgcaacctccacttcctgggttcaagtgattctcccccctcagcctccggagtggctgggattacaggtgcataccaccacgcccggctaatttttgtatttttagtagagacggagtttcagcatgttggccaggctggtctcgaactcctgacctcaagtgatccacctgctttggcctcctaaagtgccgggattacaggtgagagccactgtgcccggccacctgtgcactctttcatgggatttctaagcagtgccgggaggcaggcaggatcgcttttgacttatgatgatggaagaaaattaagctaaagtgggtcatcttgtttcaaatgcagtgattgtcccatcatgccttgaagcctctcgaaaggagaggtgtgagagtcagtacaacactttgccatcggcagaggtctttgggctggctctcgatgcctctgggccctggaacaagagaacaaatggaggccgcccaccatgtgtctaaatattatttaaaagttattaattaggggctgagcgcagtggctcatgcctgtaatcccagcactttaagagactgaggcaagaggatcgcttgagcccaaaacttcaagaccagcctgggcaacatacaagaccttgtctctacaaaaaaaatgtaaaaatttgctgggtgcggtggcgtgcctatagtttcagctatttgggaggccaagataggaggatggcttgagcctggggagttgaggctgcaatgaaccaagactgcaccactgcactccagcctgggcaacagggcgagaccctgtctaaa

SEQ ID NO: 398704 - DNA, 353 bp, Homo sapiens
gtacataaattatactcatcaaagagacaggatattcctagcattctggaattcccaggactccagaaccatcctaaaatttctacctatatgacctcaatacaggtatgtttgggttcacctggcactgtgtgagttctattcttttccatgaaatggcgactgagagacattatcagcaatgtaaacaaaagtaaaacccagtttgattcttggctattactatagttggcaatgaatgtgtcctgaatgcaggtatcaagtaggatcatatattcagtctgctaaataccagttttctcactgacctgttaaaaattgactgatgactagtatcaggcctataactgtac

SEQ ID NO: 398705 - DNA, 132 bp, Homo sapiens
agagcagatgccgtccagccctcccgtgccctgctcctcggagtccctgccacccaggacgtggccatggtgcggctctcaggctgaggccggcagccaccctcctcctttatcattcctgcagtggtgtca

SEQ ID NO: 398706 - DNA, 402 bp, Homo sapiens
ggagaagcgggggtgggggagagagagagaagtaaaaaggattcactcaagaacctggtattcaaaactacgtgtaccagcactaccacagcagtatgactcagtgtccacctaaagcatgatgatactgcttaccaaaaaaagtctggagggaatgaaaagttgggttagttttaagttatgggtcacagaacagaattcggtggtaaaaagcttaggctgggaacagagcttgaaacagcaaaggaatgagaggaacgaccaaaaagccaaggaccatatagtgatgtctgaaaaatcagaatcaggtaataatattgaatactgcaaaagtcagagaaaatgtggaaataagaaagcaagcgatctggaaagtggcgagtaagatggaatatgaggagg

SEQ ID NO: 398707 - DNA, 310 bp, Homo sapiens
cactggcacaatgttacttctgcctgaatatcattcaccaaagcaagtcatgtggccacgtccaaagccaaagaccaggaagatacattccaccgacactgaggcaatgggggatggtgaaacagcaatgtgatcaaccacagccaccaacataacatgcagtaattttagaatacttgatctcttttaaatacaattgtttttatattctgtatcacacaaattattttggaacaatttcaatcatttcatcacattaaactggatttatttcaatcaaaacgaatgtactgagaggctccaaacagca

SEQ ID NO: 398708 - DNA, 760 bp, Homo sapiens
acgttacaatgtagatttattttggtttcttttgtggtgtggttttttttttggcttttgctgactttattgagacataattgacaaaaccgtatatatttaaggcatacatgcaatataatgatttgatatacatatatactgtggaatgatttccacagtccgtttagttaacatatctgtcacttcacctcattaccattttatgtgtatgatgaaaatgtttaagatttactctcttagcaaatatcaagtttacaatacagtattgttaattacagtcactgtgctatatattagatctacaggactttctcccagatccatagaatttctccattatgtaaactccaaaagaatgaaattctgtggatgaagccttaattttactcttgataattaattttagttctgataatttgtgttaaacaaaaaaaataggagggcttgttttgctgcatagttttaaaatatcacctttgccttctttcttgaaaacatcttgcgttttcatttttttattttttaacagcctccaagggatgagccatcattagagatcaatacagataacacgaggatataattactttgtggcctaggatataattatttagctgtcatttatttctcatttggagggaaaaataaatgaaagtattatttatgagccacataaaaattctgtgttttttttccctccttgagaaagcgagaaatcacactaatgtttcagctattttactttgttcaaactgga

SEQ ID NO: 398709 - DNA, 389 bp, Homo sapiens
  misc_feature (10)..(10): n is a, c, g, or t
  misc_feature (13)..(13): n is a, c, g, or t
  misc_feature (17)..(18): n is a, c, g, or t
tttgagcggncgnccgnncaggtacaggagggagatccctgagttgggaacatgctggtaatgcttgggaaatgttacaaaacaccctataaacaaaacattcagcttcccaaagagctggccattatcttgagctctttcttaccattcaggcttagaaatactcattttgtggtcagtgtgggagacctttaatcataaagtgaagcttattaaaataaagatttttttatttaagtatttgttttaggaagcaagattgttatttttttccttctgtttttaaaacactgtaatatagcatttatattcataactaaatattttaaaacaaaatatgaattgccagccttgttcataagggaacatgattctgtagtcaagtcatg

SEQ ID NO: 398710 - DNA, 679 bp, Homo sapiens
ccataaatggtatttccagtttttgttgatttattgggctgtgggggtctctggttattctcttctatttcaaaaagctatggtaactgatttggttttaatttgctgtaatataaagacagtctctagatattaataaagttcagcttcattgaaatagccaacaaactaaagacataattgaataaagcaatagtacacagctttccagaaatatgtaaaaaccaaagtgaatatttagatttgtttttaataaaccttagttctctccttttccccaaagcactagataaacattttaaaaatatggctgcaatttgatttgaatattaggctaaaatgatttttaaaatctaatgttatatttgagaagcttaaaaataacccaaatccccttatacatttctacctgtatcatggtctaaagtatagattaatatgcttgtcatgggatcggtcatcacattatcagttggttttacaatcagcactctccccctctcacaaagtgtatcaagttaaattccacctaagcttgcctcaagtataacagcttaattatacagttaatttccccaaggtagtatctgtttgggagaaatagtttctttaatgtaaatttgattttttggctaattaatggccactcgatgtgtttcatacataaattcaaacaaag

SEQ ID NO: 398711 - DNA, 313 bp, Homo sapiens
caggaagctattgtgctcccgtgaagttcaaaggaaaggaccgtctgtccgggctgctgagccgtggtgcaggcagagggcgcggagggggtcgctggcccctttctctttgcaacaggaaaaggggcgaatgtctgggacagaaaatgacttctgaagacacgaaaagatttaccgtgtctggagcaacctctgaacttttgtggtggtgatctcagaaaaatgcatattttcctattggttgcttagatcatctcccatccttcttccctccccctccccccccgcggaggtggggggatccctaaagaga

SEQ ID NO: 398712 - DNA, 455 bp, Homo sapiens
ttctctcttctctctctctcgtagccccctacgaggcaactaaggtggtggccgcggtgcgcggggccggacacgcgtggggctctgcctggcccgggcctccgcgccctctgcctgcaccacagctcagcagcccggacagacggtcctttcctttgaacttcacgggagcacaatagcttccctgcaacttagctggagctccctcggatgcattcctggctcttcacgggtcgctggcccctttctctttgcaacaggaaaaggggcgaatgtctgggacagaaaatgacttctgaagacacgaaaagatttaccgtgtctggagcaacctctgaacttttgtggtggtgatctcagaaaaatgcatattttcctattggttgcttagatcatctcccatccttcttccctccccctccccccccgcggaggtggggggatccctaaagaga

SEQ ID NO: 398713 - DNA, 560 bp, Homo sapiens
ttgctcataattttgcttttttaaaaatcaagggaaaatatagtaggaaatcataaaatttgggtcttgtcttgattgtgcctctagctgttttacttcagtacttccgttttccagccttctatttcttcatctataaaaccaatttgattaatttatcaatttctctagcaagtctctgacccctctgaaatcttatcagtaacatatttagttttacctttttgatatcactatttcgatttaaagaataggatggttttggccaagcgcggtggctcacgcctgtaatctcagcactttgggaggctaaggtgggcggatcacctgaggtcaggagttcgagaccagcctgcccaacatggcaaaaccccatctctactaaaaatacaaaaaaaaaaaaaattagccggacgtggtggcgggcgcctgtaattccagctactcaggaggctgaggcaggagaatcgcttgaacccaggaggcagatgttgcagtgagccgagatcgtgccactgcactccagcctaggtgacaagagtgaaactcttgtttcaaaa

SEQ ID NO: 398714 - DNA, 447 bp, Homo sapiens
agacaggtgacagagtgagaccctgtttcaacaacaacaacaaaaatgaatagtcctgtttgcttattatactgtcctgtttgtatattatacaacacccaggtgtttcactctttctatcacttttctgccccatgtaggaatttgatttgatccatttttgacattatactagcagccaatgggattgctctagatttttgaatggaagccttgacatgctgaaagtaaaaggctctcctctatccctgacctccaattgtccagcattcagacatattgtacactagtctctacatgttcttgtctgttgggagagaagaagcccttcagacttaacaagaatgcccataagtaaagagaagcaaaagagaagatgacaaggaaaatcagaaagatggaacaggctcctttcttttctttctttctcatacttgagtcctgttt

SEQ ID NO: 398715 - DNA, 559 bp, Homo sapiens
tcaagtatcactcttagagccatgttcatgccactgcactccagtctgggcaactaagactctaactcaaaaaaataaaaaaaataaaaaaaataaaaaatcactcctgctgcagtgtggagaaaaaagatatgaaaaaagtaaaagtggctagagaaagggagtcagattaaaagaagttagtagcagtccagctaagataatggtagcttaaattagggtgttgacagtagaaattgagagaaatggttccagagatatttagggcttggtagctatgggtcaggagacaaaagatgtagaggatataaatgagaaagtctaaacgagatcattcaagaggaaacaggttaagtattagaaatatttagcaattaaacagtataataaactgaaatctagaactgctctgcttaaaaacaagaagggagtcaccaacaaaaaataagaatatctaataaaaaaatacaagcccaggtctccattgatagaaactcgccttagaaactaaacaggaaaaaaaatcaggaaaagttccacagaaatgatggacgagtag

SEQ ID NO: 398716 - DNA, 293 bp, Homo sapiens
tcaagtatcactcttagagccatgttcatgccactgcactccagtctgggcaactaagactctaactcaaaaaaataaaaaaaataaaaaaaataaaaaatcactcctgctgcagtgtggagaaaaaagatatgaaaaaagtaaaagtggctagagaaagggagtcagattaaaagaagttagtagcagtccagctaagataatggtagcttaaattagggcatgcctgcagtagtaataaagaaatagttctggatgaatcagtagccactcatgtccactatcttctgtcc

SEQ ID NO: 398717 - DNA, 403 bp, Homo sapiens
cctgagcaacagagagagaccatctcgaagaaaaaaaaaaatctttacacacagacattcacacagttagacataaacacagacttccaggcatagatggctttgccaatgaaaatgaagcaacatatcaaacttatttcatgaaatcagcatgatcttgatatgaaaatctgacaaggttattacaacaaagaaatattacagaccagtagtctcgatacagatgcagatttataagtgaaatccagcaatatatagaataaatgatacattaaaaataaattggtttattccagacatgtgaagttggtttaggatttgaagatcatttagattcaccacatttataggaaaacaggcgataagttatgtgatcatttcattagatacaggaaaaacattt

SEQ ID NO: 398718 - DNA, 293 bp, Homo sapiens
gagagagagagacccaaatgggaattccctagggccagtttcttaatctttctgtgcctcagtcccctcacctgtacaaaggggataaacatagcccctaccacaaaggattgcaatgaggattcaatgagttagcatgtgcgaagtgcttccagtgcctggtacgtagcaaccactcttcatttagtttttattggctgggctccgtggtacacatctgtagtcctagctacttgggaggttgaggcaggaggatcacttgagcctgggagtttcgaggctgcagtgcatgc

SEQ ID NO: 398719 - DNA, 415 bp, Homo sapiens
tcctgaccagtgttagtgtatattatgtgtggcccaggacaattcttccattgtggcccagggaagccaaaagattggacacatctgttttaaaaccttccttttatttgaagatgaatatgaaaattaaataaatgtccatacttaggtttaaacaaaccaggaatgtcaccacccacaagcacagaggaagaacagttctatttctttagacctacaaccttcgtaatttgtttttggttttcatcctctaaactgtcttccatattgcccatgttctgtgtgcaattcaatcaagtaaaattgctgtgatcttctactgtgttgccatgtaccatgctagactgaaagacacagagattaataaaagcaatgagttcccaattctccaggaactcacattttggttaagtgt

SEQ ID NO: 398720 - DNA, 518 bp, Homo sapiens
gacctaccaaaccagaatcagcattttagcaaaatccacaagtggctcgtgctcgcattcaggtttgagaagcacttctctagagcacccgggagcttctcttacctttaactggggcttccactggtctggtcttcccaagacacccccggccactggtggccctgtaaacatggtgccaccatggatgagttgatgcctgagtatcgatgggggcaagccagagcgtccttcctaaacgctatcgaagtctctgacataggtacagcctgggggtgatggtgggtgagctgctgcttaagggccacagccccgaccctggagggagcaggaaaaaaatgaagcctaccagattcactctgggaccactatcccacccccaacttcagcctttcaagatctttttattaatacccacaattactctgatgtgattacattacacattgcatgtctgtttcaaaacatcacatggaccctataaatatatacactattacgcacccataataatgaaa

SEQ ID NO: 398721 - DNA, 755 bp, Homo sapiens
tgcagtgtgtgtgaaccccaaaaacatgatgcctaagtgagagaagccggacacaaaaggccacagaatgtgagattccactgacatgaaatgcccagaacaggcaaatccatagagacaggaagcaggttggtggctgtcagggattgggggaggggaatgggaagtgactgctgatggggacgtgggttttcttttgggaaggtgaaaatgttctaaaataatgttctaaaatggatcgtggtgatcaatgtacaactctgtgaatttacaaaaaaatcatcaaattggctgggcgcggtggctcacgcctgtaatctcagcactttgggaggccgaggcgggcggatcacgaggtcaggagatctagaccatcctggctaacacggtgaaaccccatctctactaaaaatacaaaaaattagccaggcgtggtggcgggcgcctgtagtcccaggtagctgggaatacaggggtgcaccagccatgaccaggtaatggccgacttcagtacagacgggggtgaccaagtcagaccaggggttcagaacacatgcactaaaggattctagtggcttagctcctggcctgagctcccaagtggtgaataagacgagactcgcacagcgacacagcgtcgaattgatcacgtttcatcatagactgagccaccagcaacacggagaggacgagcgtacaacactgcacgaaacactgtcggcagcacaccactgagcaggctcacagcaccacct

SEQ ID NO: 398722 - DNA, 463 bp, Homo sapiens
ttgttcttttttgacagttgcagaaaaccctttattatggtttttataatccccaaattacctcccttctgatacctaggaaaactagacttctgaaaggtcagacactgacagaaatttcagagattttccaatccaaatcccacactttcctgacgtgaaaacagaagcaaaggacaacaaacaaaaaataatcagcccagatttattaagcttagtaacagagcctgtattttggaatcaaaatctcctcattaggaaactgagtttcattttcctacctaaggaatgtttgtccattgataaaatagtgattgacaaagtttagattggtgcttctcaaacgtcagtattcacatagctctcagagggatcgtgttaaaatgcagattctgatttggtgcgccccagtgaagcctgagattctgctttttaacaagctcctagatgacgctgatgctac

SEQ ID NO: 398723 - DNA, 218 bp, Homo sapiens
ggtgagggcttgctgtttgcttccaagatggtgccttcttgctgtgttctcacatagcaaaagggcaaaaagctccccaaccctcttttattggggcactaatcccacttataagcgccagaaccctcatgccctaatcacctcctaagggccccacctctaaaaactgtcatattgagcattagattccaacataagaatttaagtgggggatacta

SEQ ID NO: 398724 - DNA, 234 bp, Homo sapiens
cacatctcaggcccagtcctgctccagaggctctaccaatcactcccttgggccttaagggtccatccttcttcaatgttctctccaaagctgccaaaatgctccccaaaccttgcaaacctgctccccacaggcaacactagctggagagcatgcagactccccaaagtccacccattcttgtagcccctgaacaagcacagaaacagcactattgtttctttcatgagcatg

SEQ ID NO: 398725 - DNA, 333 bp, Homo sapiens
tgtgtcccagactcctgagagagtcaactttgaaggacatcttaaataacctgcccttctgccctgcccctgggtactgtgtgttaagtccttgattacagaaaagctataaacctgactggttactttaactctttcccctcacctggaactgtcccagagtcatgctttaatgtgatatctgaaattgacagaaagcaattagataacctacctttagatcccatgaaaactaatatttgtatctgctgtcttgtagtacagttatttgtgtaggttctttatatatcctattaaattgaaagatccaggaaggcagaatttatgtctgat

SEQ ID NO: 398726 - DNA, 336 bp, Homo sapiens
gaaaagcattaggcagaaaggatcatgagcagaaacatgaagacataaagaaaatggtatgttgaggcaattagtcctgtaacttttggagtggcaaatgacacgtgtaaaaagataaaccagacggaatagtaaagaaccctgaaagccattctaaggttttatgtatcaccttatcaaggcaataaggaacttctcagtatctgtgacatgatctgtatttgggtttctgaaagacaactctaagaataagacagtgggataaggtgggtgacagggaataaacagacatagcatacaggataacccctgtaatacttcaagaaatgacttaaa

SEQ ID NO: 398727 - DNA, 442 bp, Homo sapiens
acagtgcccatcataactacaaggtattgctacctaatttatgcaaaattccatatgctaataaagtatgaacatcaaaaatttgattgtcatactataaacatgggtgatttgcagagccaaggtaaagaaaaatgtgggaatttatttcttgagtttatcactaaagctaagataaaattattatcaaattcatatgtccctaaaataaataacaaaatggatcataatccctttaaaaatatgtcaacagtataaaatagcataaatatttttacagaaacaaagtagtttatccatgtgtctaagttgagcaagtacagtacggcaataaactgacactgacattcaattctgtaaagttaaaacaaccatgaaaaggagttcttacccacccactgccaggaggctgaggtcttgcctgggctaataaaatgggtga

SEQ ID NO: 398728 - DNA, 375 bp, Homo sapiens
gttccattaagttaaccactttagaataccaataacacttctgcagcacttttcatcttcatagtggttcacaaacatctccttcttcactaatgaagatgagtcgaatatcttatagcatctaaaaccaaagctatttaatcattgtctggtgtgggaaagtgagacaaaatgcaagaccaacaaaaaagtatattacatttcaaacttgctgattcaaacttttgaaaaattctttgaatatgcaggcagaacttatgccacaaaaccctagtttttgtaatgaaaatggccataagcataatagcaacattgcaggggtatttttagctcttcatattttatagagtgcttttcagttcattatttcatttg

SEQ ID NO: 398729 - DNA, 465 bp, Homo sapiens
tgaggaattgggatgtattaccgggcccagcacctggtagacttgactgtacttttttgcctggactctccctacagaagtgattgggacaaatcaatgggccaagcacccagggtgatttgtaacacattgctggacccagcacccagataatttggctctcctgctatggccctgcccacagaaggcattgtgatatatcagtggactcagcagccaggtcatgtgactttcctgccagggctcttctctcaaaatggatactgacatatctctgggtcatcattcaggcacctcatatctcaccctggaaacaagccatatgaatgtgaagaaaatagacagaagccagataaaccttaacaatgtcagaaagccatcattttgttcacacatcttcaaggacacatggcattgcacactagaaatggaccttataaaagtactgtatgtgaaaaagccttt

SEQ ID NO: 398730 - DNA, 349 bp, Homo sapiens
cattatacgctggttgttgggcatttggtattctgtgtgtttcccacccttcctcatttttcctatgaattcttgatacagaaatggagatttgtaacacgctggtagtgtctagctagaatttctgggttccattccttcactttttagctgtttgcctttagagagttatttaacttctgtgttcctcagtcttgtcatctggattgttgtgggggttaaattaattcatatatgcaaagcacttacctggcacatagtaaacactaagtgctgttattagtgttcatacatattacatgaagctctaaaaattagaggttaattaagccatttatatagccaatag

SEQ ID NO: 398731 - DNA, 656 bp, Homo sapiens
ggacctaacagtcttacagtactgatgggagaataggttaatttaagcactcagaagagctattttgcaaagccaaataaagtcaaagaatacataaacacctggaaattctccttctggtgtgttctctagagaaatactcttctataaatgcacaaggaagcacataaaggaatgtttattctaacactgtttgtaatggtgaaaattgtaagcaactaaatatcaatcaaatgagattgtatgctattatatatttgcataatggaatattatacaatttctaatgttaatattatatgctacttatggatacataacgtatagtaaaattgtatattttcaagcatgttttaaacaccaagtcataataaaggttacctctgaggaagtacgtgaatggatggagggatacaaaaatgtagtgaggtaaacaaaatattgagttgataaattgagtggtggctacatggttattatgggcattcttttggaccctacacttgtttgtatatttgagattcttcatagtaagtaatttaaaaataaattaccaaacaagtttcattaaagattagtggactagagctatatgtatcaacatggacagatccctcacactgatgaagaagatgcagaagtatattcacatcgta

SEQ ID NO: 398732 - DNA, 341 bp, Homo sapiens
tccccaaaaaaaaaaaaaaaaaatctgcatgactgtaggcttaaaagaaaatgtgtccagtgtgtgagcgaggggcacagcacttggtaaatgctcaaggcacgttggctgtatgtatagccataggcaagaaagcccaggaaaaggtctgtgagccaatccagaattgggggctggggagctgggtctgggcaacaaggagccaggggcatgttgtgagcccagagacgtcaacaagctccatgaggactataatttttttgtttgctcactgctatagcttagtgtctggaacagtgcctgtatatagtgattgtccaataaattttggttgataaata

SEQ ID NO: 398733 - DNA, 3330 bp, Homo sapiens
  misc_feature (1808)..(1808): n is a, c, g, or t
  misc_feature (2609)..(2609): n is a, c, g, or t
gggcttggcttggagggggcaagggagggaaagagagaagggggaaacacaaaaaacttctttctttccccctccgtttatcttcagcccgacattgtcacctcctctttgaggggttagaagaagctgagatctcccgacagagctggaaatgcattgcactttgactatggaaacagacgctattgatggctatataacgtgtgacaatgagctttcacccgaaagggagcactccaatatggcaattgacctcacctcaagcacacccaatggacagcatgcctcaccaagtcacatgacaagcacaaattcagtaaagctagaaatgcagagtgatgaagagtgtgacaggaaacccctgagccgtgaaaatgagatcaggggccatgatgagggtagcagcctagaagaacccctaattgagagcagcgaggtggctgacaacaggaaagtccaggagcttcaaggcgagggaggaatccggcttccgaatggtaaactgaaatgtgacgtctgtggcatggtttgcattgggcccaatgtgcttatggtacataaaaggagtcacactggtgaacgccccttccactgtaaccagtgtggagcttcttttactcagaagggcaaccttctgagacacataaagttacactctggagagaagccgttcaaatgtcctttctgtagctacgcctgtagaagaagggacgccctcacaggacacctcaggacccattctgtgggtaaacctcacaagtgcaactactgtggacgaagctacaagcagcgcagttcactggaggagcacaaggaacgctgccacaactatctccagaatgtcagcatggaggctgctgggcaggtcatgagtcaccatgtacctcctatggaagattgtaaggaacaagagcctattatggacaacaatatttctctggtgccttttgagagacctgctgtcatagagaagctcacggggaatatgggaaaacgtaaaagctccactccacaaaagtttgtgggggaaaagctcatgcgattcagctacccagatattcactttgatatgaacttaacatatgagaaggaggctgagctgatgcagtctcatatgatggaccaagccatcaacaatgcaatcacctaccttggagctgaggcccttcaccctctgatgcagcacccgccaagcacaatcgctgaagtggccccagttataagctcagcttattctcaggtctatcatccaaataggatagaaagacccattagcagggaaactgctgatagtcatgaaaacaacatggatggccccatctctctcatcagaccaaagagtcgaccccaggaaagagaggcctctcccagcaatagctgcctggattccactgactcagaaagcagccatgatgaccaccagtcctaccaaggacaccctgccttaaatcccaagaggaaacaaagcccagcttacatgaaggaggatgtcaaagctttggatactaccaaggctcctaagggctctctgaaggacatctacaaggtcttcaatggagaaggagaacagattagggccttcaagtgtgagcactgccgagtccttttcctagaccatgtcatgtacaccattcacatgggttgccatggctaccgggacccactggaatgcaacatctgtggctacagaagccaggaccgttatgagttttcatcacacattgttcgaggggagcacacattccactaggccttttcattccaaaggggacccctatgaagtaaagaactgcacatgaagaaatacngcacttacaatcccacctttcctcaaatgttgacataccttttattttttttaatattattactgttgataattcttattttgtggaggcagtgtcatttgctctgcctaattacgataaggaagaaacagaagagagaaggggcgggaatattgtttctttatcacctggcttgtttattttgtgggaatttaagagcagtccatttctaccaaggcatatcatgctttgaaaaatcacttgattcataaagattcacctaagagattctgatttgccactgatattcagaattatgatggaagacaggaaagtttagagttttctgggtaggactttggtggtttaaaaatggtataagtaactttattcttgaaagaagaatgtgtttcaaactgtaaaccaattttttgttcttcagagatcatggaacacaaacacattgttattttcagtgataactcctaagaggagctgagttgttgtgggttctatgtttacttcccctatggaatttataattcagtatgttttacactgtaccatatagcaaaacttttaaactacaggtagttaagggccacctacaatacatctgaggtcctgtgatcttatttttctaaacgtaagcactgtttttccatagttttgatgactggcattttatagacaccctggcagccttacttttaacacctttaaggaatagtatttttatgtagttttcagaataacatatggtctaagagtggataaaaggcagtcaataatttctgggagggacttctactttcataaatntgtttgagaggttttcttttaaagttgtaatgtgatggcagcatagtatatgtatttgtttctaaaagtatgcttacgattgtcactttatcagcatttaatcagtgttaaccagtcagcagaaaaatataattatgctaacagtagggggagaaaacccacttagaaatcccttttctggtatttctcttttcactagtttttttcaagatgtgacctcccggtgttctgtccatagttcattcatcctttactcttcgagtagaaggtcttaaaagtcttcctgtcggctgtttctttcaaaatctcctcagagcaattgctaatttggcctgaatctggtaacttgaaccctgtaaggttacagaactagggctatttattttagcatttcttcagtagtatttactactcttgttgcaaagaaaagggaatgggacttctttgtaacctgtaccttggacaacagataaaagaaacaaaaaaataagaaagtttacttttacccttcttggagtctagaatgtgacagaacacccaaaggaaagtcctgcacatttttctgtttccaaaatatttaactgtgtaagtccttgtcagaaatgaatctcaatcccttagtatagaattccccttacatggtataggttgccatatttcatgtgcagattttaatttcatttatgtgggcgctctgttttttctttgcagtccagccaca

SEQ ID NO: 398734 - DNA, 1542 bp, Homo sapiens
  misc_feature (821)..(821): n is a, c, g, or t
gtagccatggtgatagctgactctagaggatacacccgcgagacgacctttgacataccttttattttttttaatattattactgttgataattcttattttgtggaggcagtgtcatttgctctgcctaattacgataaggaagaaacagaagagagaaggggcgggaatattgtttctttatcacctggcttgtttattttgtgggaatttaagagcagtccatttctaccaaggcatatcatgctttgaaaaatcacttgattcataaagattcacctaagagattctgatttgccactgatattcagaattatgatggaagacaggaaagtttagagttttctgggtaggactttggtggtttaaaaatggtataagtaactttattcttgaaagaagaatgtgtttcaaactgtaaaccaattttttgttcttcagagatcatggaacacaaacacattgttattttcagtgataactcctaagaggagctgagttgttgtgggttctatgtttacttcccctatggaatttataattcagtatgttttacactgtaccatatagcaaaacttttaaactacaggtagttaagggccacctacaatacatctgaggtcctgtgatcttatttttctaaacgtaagcactgtttttccatagttttgatgactggcattttatagacaccctggcagccttacttttaacacctttaaggaatagtatttttatgtagttttcagaataacatatggtctaagagtggataaaaggcagtcaataatttctgggagggacttctactttcataaatntgtttgagaggttttcttttaaagttgtaatgtgatggcagcatagtatatgtatttgtttctaaaagtatgcttacgattgtcactttatcagcatttaatcagtgttaaccagtcagcagaaaaatataattatgctaacagtagggggagaaaacccacttagaaatcccttttctggtatttctcttttcactagtttttttcaagatgtgacctcccggtgttctgtccatagttcattcatcctttactcttcgagtagaaggtcttaaaagtcttcctgtcggctgtttctttcaaaatctcctcagagcaattgctaatttggcctgaatctggtaacttgaaccctgtaaggttacagaactagggctatttattttagcatttcttcagtagtatttactactcttgttgcaaagaaaagggaatgggacttctttgtaacctgtaccttggacaacagataaaagaaacaaaaaaataagaaagtttacttttacccttcttggagtctagaatgtgacagaacacccaaaggaaagtcctgcacatttttctgtttccaaaatatttaactgtgtaagtccttgtcagaaatgaatctcaatcccttagtatagaattccccttacatggtataggttgccatatttcatgtgcagattttaatttcatttatgtgggcgctctgttttttctttgcagtccagccaca

SEQ ID NO: 398735 - DNA, 3793 bp, Homo sapiens
  misc_feature (3)..(3): n is a, c, g, or t
  misc_feature (6)..(6): n is a, c, g, or t
  misc_feature (158)..(158): n is a, c, g, or t
  misc_feature (403)..(403): n is a, c, g, or t
  misc_feature (596)..(596): n is a, c, g, or t
  misc_feature (663)..(663): n is a, c, g, or t
  misc_feature (2271)..(2271): n is a, c, g, or t
  misc_feature (3072)..(3072): n is a, c, g, or t
gtngantacaattcaatttttttgacccatctataggttaatcaaaacttggatggaatgttgatttctttaaacatgtccaaatcatgaaaacattttttcacactatgtttcattttcttcaaaattggtaacctattggttattaaatacatcanctgaattgtgcactgaattttcctacctttcatctcttgctttctcacttatttttgtgtctgccaagaggatccccttataaatgagactacatttttttgtacacagtgggactatcttatacaaatgaaaggatcagagtaaatcatttttacagggcatactgaacaagtaaagttattctaagaaatgaaagctttaggtttccaaacagtactggcacaagtgcaactggagaaagcancaataaacaacaagtaataagttatgttctttcctgagaacactgtttttaatcaactgattcgccttgtctgagttgttaccctatccttaattaaacatccttgggcagtatttctactcaaaaaacaactgttttaagttctttgtctgcactatgaatgtcagtgtctaagggctaacagattagtccntagcaacttagaaaaaagggatgaatagggaacagcattggagagtatatgtcaaatgaattagggnagtagtttagtgagccaatgtgccaatttagaaatggattcttcttcctgctgaagagctctttttaaaataaattacaatcataaagctgccacagtttactgtgcatagacatgttcagaattggctcttcttcatgagggctgcttggtgcaggtatttaagctactgccaataaggctaacagctcatcaaatagaaaatacgctgcaggaaaatacatgggttaagaaaaacagttaaataccgtgctgttattttgtatgtctgtttaagcttttctctcaaacaagttgacttacttaaattgttttttaaaaataaactctaaaagccttgaaaatagtgcagtcttaaaagtagtattgattttagtcaatgctaaaaacactttcaggggaataagatgagaaaccacatgaacaagtttgccaccaatagtggcaacagtgtatgtatgtcatggatttaagagagactcaaataaaaacaaatcctctggtgtatatgtgtgtgtgcaaatttaaagagtatactttcacactagagggtattctttctacttgcttctactgaagcatactagcttttataacacatatcgagatggcatatccagctttgtatcatccaaaatgttgaagaaattatcagattgcatttttctatggttttgtatagtacctcctatggaagattgtaaggaacaagagcctattatggacaacaatatttctctggtgccttttgagagacctgctgtcatagagaagctcacggggaatatgggaaaacgtaaaagctccactccacaaaagtttgtgggggaaaagctcatgcgattcagctacccagatattcactttgatatgaacttaacatatgagaaggaggctgagctgatgcagtctcatatgatggaccaagccatcaacaatgcaatcacctaccttggagctgaggcccttcaccctctgatgcagcacccgccaagcacaatcgctgaagtggccccagttataagctcagcttattctcaggtctatcatccaaataggatagaaagacccattagcagggaaactgctgatagtcatgaaaacaacatggatggccccatctctctcatcagaccaaagagtcgaccccaggaaagagaggcctctcccagcaatagctgcctggattccactgactcagaaagcagccatgatgaccaccagtcctaccaaggacaccctgccttaaatcccaagaggaaacaaagcccagcttacatgaaggaggatgtcaaagctttggatactaccaaggctcctaagggctctctgaaggacatctacaaggtcttcaatggagaaggagaacagattagggccttcaagtgtgagcactgccgagtccttttcctagaccatgtcatgtacaccattcacatgggttgccatggctaccgggacccactggaatgcaacatctgtggctacagaagccaggaccgttatgagttttcatcacacattgttcgaggggagcacacattccactaggccttttcattccaaaggggacccctatgaagtaaagaactgcacatgaagaaatacngcacttacaatcccacctttcctcaaatgttgacataccttttattttttttaatattattactgttgataattcttattttgtggaggcagtgtcatttgctctgcctaattacgataaggaagaaacagaagagagaaggggcgggaatattgtttctttatcacctggcttgtttattttgtgggaatttaagagcagtccatttctaccaaggcatatcatgctttgaaaaatcacttgattcataaagattcacctaagagattctgatttgccactgatattcagaattatgatggaagacaggaaagtttagagttttctgggtaggactttggtggtttaaaaatggtataagtaactttattcttgaaagaagaatgtgtttcaaactgtaaaccaattttttgttcttcagagatcatggaacacaaacacattgttattttcagtgataactcctaagaggagctgagttgttgtgggttctatgtttacttcccctatggaatttataattcagtatgttttacactgtaccatatagcaaaacttttaaactacaggtagttaagggccacctacaatacatctgaggtcctgtgatcttatttttctaaacgtaagcactgtttttccatagttttgatgactggcattttatagacaccctggcagccttacttttaacacctttaaggaatagtatttttatgtagttttcagaataacatatggtctaagagtggataaaaggcagtcaataatttctgggagggacttctactttcataaatntgtttgagaggttttcttttaaagttgtaatgtgatggcagcatagtatatgtatttgtttctaaaagtatgcttacgattgtcactttatcagcatttaatcagtgttaaccagtcagcagaaaaatataattatgctaacagtagggggagaaaacccacttagaaatcccttttctggtatttctcttttcactagtttttttcaagatgtgacctcccggtgttctgtccatagttcattcatcctttactcttcgagtagaaggtcttaaaagtcttcctgtcggctgtttctttcaaaatctcctcagagcaattgctaatttggcctgaatctggtaacttgaaccctgtaaggttacagaactagggctatttattttagcatttcttcagtagtatttactactcttgttgcaaagaaaagggaatgggacttctttgtaacctgtaccttggacaacagataaaagaaacaaaaaaataagaaagtttacttttacccttcttggagtctagaatgtgacagaacacccaaaggaaagtcctgcacatttttctgtttccaaaatatttaactgtgtaagtccttgtcagaaatgaatctcaatcccttagtatagaattccccttacatggtataggttgccatatttcatgtgcagattttaatttcatttatgtgggcgctctgttttttctttgcagtccagccaca

SEQ ID NO: 398736 - DNA, 3399 bp, Homo sapiens
  misc_feature (1877)..(1877): n is a, c, g, or t
  misc_feature (2678)..(2678): n is a, c, g, or t
aaccctgctcctcgctgaagatggaggaagtaaaaacaggattacccttagctacagatccactgccttagtttccaccaccaactgcagtgcacaaacacacgttaggcacaggaaagaaagaaagacagaggacacattaacagtaaacacaaacaaaagggtgatgggattattttactgcatgcactgctgagcccgacattgtcacctcctctttgaggggttagaagaagctgagatctcccgacagagctggaaatggtgatgaatcttttttaatcaaaggacaatttcttttcattgcactttgactatggaaacagacgctattgatggctatataacgtgtgacaatgagctttcacccgaaagggagcactccaatatggcaattgacctcacctcaagcacacccaatggacagcatgcctcaccaagtcacatgacaagcacaaattcagtaaagctagaaatgcagagtgatgaagagtgtgacaggaaacccctgagccgtgaaaatgagatcaggggccatgatgagggtagcagcctagaagaacccctaattgagagcagcgaggtggctgacaacaggaaagtccaggagcttcaaggcgagggaggaatccggcttccgaatggtgaacgccccttccactgtaaccagtgtggagcttcttttactcagaagggcaaccttctgagacacataaagttacactctggagagaagccgttcaaatgtcctttctgtagctacgcctgtagaagaagggacgccctcacaggacacctcaggacccattctgtgggtaaacctcacaagtgcaactactgtggacgaagctacaagcagcgcagttcactggaggagcacaaggaacgctgccacaactatctccagaatgtcagcatggaggctgctgggcaggtcatgagtcaccatgtacctcctatggaagattgtaaggaacaagagcctattatggacaacaatatttctctggtgccttttgagagacctgctgtcatagagaagctcacggggaatatgggaaaacgtaaaagctccactccacaaaagtttgtgggggaaaagctcatgcgattcagctacccagatattcactttgatatgaacttaacatatgagaaggaggctgagctgatgcagtctcatatgatggaccaagccatcaacaatgcaatcacctaccttggagctgaggcccttcaccctctgatgcagcacccgccaagcacaatcgctgaagtggccccagttataagctcagcttattctcaggtctatcatccaaataggatagaaagacccattagcagggaaactgctgatagtcatgaaaacaacatggatggccccatctctctcatcagaccaaagagtcgaccccaggaaagagaggcctctcccagcaatagctgcctggattccactgactcagaaagcagccatgatgaccaccagtcctaccaaggacaccctgccttaaatcccaagaggaaacaaagcccagcttacatgaaggaggatgtcaaagctttggatactaccaaggctcctaagggctctctgaaggacatctacaaggtcttcaatggagaaggagaacagattagggccttcaagtgtgagcactgccgagtccttttcctagaccatgtcatgtacaccattcacatgggttgccatggctaccgggacccactggaatgcaacatctgtggctacagaagccaggaccgttatgagttttcatcacacattgttcgaggggagcacacattccactaggccttttcattccaaaggggacccctatgaagtaaagaactgcacatgaagaaatacngcacttacaatcccacctttcctcaaatgttgacataccttttattttttttaatattattactgttgataattcttattttgtggaggcagtgtcatttgctctgcctaattacgataaggaagaaacagaagagagaaggggcgggaatattgtttctttatcacctggcttgtttattttgtgggaatttaagagcagtccatttctaccaaggcatatcatgctttgaaaaatcacttgattcataaagattcacctaagagattctgatttgccactgatattcagaattatgatggaagacaggaaagtttagagttttctgggtaggactttggtggtttaaaaatggtataagtaactttattcttgaaagaagaatgtgtttcaaactgtaaaccaattttttgttcttcagagatcatggaacacaaacacattgttattttcagtgataactcctaagaggagctgagttgttgtgggttctatgtttacttcccctatggaatttataattcagtatgttttacactgtaccatatagcaaaacttttaaactacaggtagttaagggccacctacaatacatctgaggtcctgtgatcttatttttctaaacgtaagcactgtttttccatagttttgatgactggcattttatagacaccctggcagccttacttttaacacctttaaggaatagtatttttatgtagttttcagaataacatatggtctaagagtggataaaaggcagtcaataatttctgggagggacttctactttcataaatntgtttgagaggttttcttttaaagttgtaatgtgatggcagcatagtatatgtatttgtttctaaaagtatgcttacgattgtcactttatcagcatttaatcagtgttaaccagtcagcagaaaaatataattatgctaacagtagggggagaaaacccacttagaaatcccttttctggtatttctcttttcactagtttttttcaagatgtgacctcccggtgttctgtccatagttcattcatcctttactcttcgagtagaaggtcttaaaagtcttcctgtcggctgtttctttcaaaatctcctcagagcaattgctaatttggcctgaatctggtaacttgaaccctgtaaggttacagaactagggctatttattttagcatttcttcagtagtatttactactcttgttgcaaagaaaagggaatgggacttctttgtaacctgtaccttggacaacagataaaagaaacaaaaaaataagaaagtttacttttacccttcttggagtctagaatgtgacagaacacccaaaggaaagtcctgcacatttttctgtttccaaaatatttaactgtgtaagtccttgtcagaaatgaatctcaatcccttagtatagaattccccttacatggtataggttgccatatttcatgtgcagattttaatttcatttatgtgggcgctctgttttttctttgcagtccagccaca

SEQ ID NO: 398737 - DNA, 218 bp, Homo sapiens
caaccccagagagcagtggctatcagtgcagactccagagtggtgctgtccaatagaaatactatgtaagcctaggagttacatttaaaaagtaaaaagagctgggtgtggtggcttttgcccatggtcccagttactcaggaggctgaggcgggagagttgcttgagcccaggggtttgagaccagcctgggcaacatagcgagaaccctgcctcta

SEQ ID NO: 398738 - DNA, 479 bp, Homo sapiens
ttgttgttgttgtagagacagggttttgccatgttgtccaggctagtcttgaactcctgggctcaagtcatctccccaccaaagtgctgggattacaggtgtgagccaccgtgtctgcctatgcctggctagtttttttttaatttctgtagagacgaggtctcactacgttacccaggctggtggcaaactcctgggctcaagccatcttcccacctccatctcccaaagcactgggatgagaggcgtgagccaccacgcccagactggttggagatattctctacacaatgagtgcagagccatagatgccttctaggggatctagctcgtgtgtgtgtgtgtctgagagagagagagagtgtgtgtgattgtgtgagtgtgtgtgtgtttgtgtgtgttgtaggggcacaggccttttccatggaggccttgttctggtctgacttgcatgccgtgtgccttgagcaagccacttc

SEQ ID NO: 398739 - DNA, 396 bp, Homo sapiens
aataccagaccacagcagtctgaaaatgcatcccttcttaattaccatttggtttggaacgagactgactcatctgtagccctggcagcagcaggtcctggttgggatggaggtgatgctgggtcactggacatgcctggaactctgcctcttcctgcctcactctggattgctgcttcattgggtcatttggactcaacaaagcaaaaatgctgtgaacgtgccattttacttaagaagcttgactttgagagagccaaagaagggatgcctacaaagaaatattcagtgtttcccattaccttggctttacttcaaaagaatcacacattctacccaaggctagcactatctgtgaaatcctgatatccctgatattaaaccatgagaaataag

SEQ ID NO: 398740 - DNA, 560 bp, Homo sapiens
tctcttgttttgttttacagtgccgtggacactgccagaatttgtcaaaggtcctaggaagaaaaggctctttcacccctcccctcaatgaacagatggcgtgtttggactgttcgcattcgctcctcataggtgggatcctggaggaagttaaggggtgctccgttccctggggatgggacagcagctcgcctttttactaatagctataagggactgtcagacatttacctgactagaccttcacctcagagctcagaaggggaacagctccagaactaaaagagagagcctctggcagaccccaaaagacagcatgtggagtgaagctgggcttccctgcccaatcactaggatcatttattgcacaaatacctgtattttaagctgcagattattgtgaatttttgtattttcttcatttccatttagctttttttcaattttagaatagcctttctctagataactcgaggaagtgggagacggaatttcctttgtttctgtcttgagcccaaagggacaattgagtgtcaggtatgacagggataaagggagaa

SEQ ID NO: 398741 - DNA, 221 bp, Homo sapiens
aaaacttagttacttaaacaacaatgcataattcgctctcagatttttgtagggtggctgggctcaactgggcagttcttgcttgatgtctcttgtgtgtttgcagtcagatgacatctgaggccaaagtcatctacagatttcactgggctgaacattccaaggtggcttctttactcacatgtctgacacttcagctgggttggcagaaacagtgggag

SEQ ID NO: 398742 - DNA, 639 bp, Homo sapiens
tctgtacatgtttctcttctctctctcctctctcctaatagaaggaggtcagtagaatatgatgagagatgtgggatgcccagcctattagtacagtgcagggagaaagaggatgaaaggggattattacaagctgtggaataaaggatggaaccaagagaaaatgtgttgaaactctcccaagttcttactgtggacaaaattctcacagcgaacagaatgatcatcatcaggtgcacgtttctgagtcagatgcactgcagtcctcagggacaaaggccccagttgcgggggcagctttctcctcttggaccctctaagtgctgctctgcaggaggactgtgggacaccagtccccgtggtcgtgggcagtgctggcgggttgagtggctgcaccagcaactgccacctactcttctttaggggcctggcagagtgtgtgagtgttggtggtggggaggtgggaggagtggtggctgaggggatctagactaacataatctttgatccttacagcagacgtccttggtggacggttcccattttggagaagatctgtgcactgctacccttctctcctggtctctctctcttttttctggatgtttgtttccaaaattctgctgcccatgccttctc

SEQ ID NO: 398743 - DNA, 429 bp, Homo sapiens
taaagccactgaaagactttttcccaagttcttactgtggacaaaattctcacagcgaacagaatgatcatcatcaggtgcacgtttctgagtcagatgcactgcagtcctcagggacaaaggccccagttgcgggggcagctttctcctcttggaccctctaagtgctgctctgcaggaggactgtgggacaccagtccccgtggtcgtgggcagtgctggcgggttgagtggctgcaccagcaactgccacctactcttctttaggggcctggcagagtgtgtgagtgttggtggtggggaggtgggaggagtggtggctgaggggatctagatggagaagatctgtgcactgctacccttctctcctggtctctctctcttttttctggatgtttgtttccaaaattctgctgcccatgccttctc

SEQ ID NO: 398744 - DNA, 472 bp, Homo sapiens
tggcggcagcatagatgacagccaggctggcttctcttggtgcagctggagatggaggttgtggagaggggaactctagagaggggtcttaagagggaagctcatggccctgttccattcccttgttggacagatgaagagactgaagtctcaaaggcagagtttgaagcaaaagccagatggcacaaccctcggtccatagctacagccatgcttttctctggggtttcctaccctgtttaggggtgctcgtagcatttaggcttgcaaccaaggaagctaaatgtcctctaccacaaggaaccgttgcaccccaaatgctagtacttatggagaaacacggccctaacgtgattttaagttgacacatgggccttggaatgggttttccattttcttgagtttctcctctgggccagggacttaactctgacaggatatgctctttactgaaccatgccaggcctcagtg

SEQ ID NO: 398745 - DNA, 466 bp, Homo sapiens
tcgagtgttgcagtgcttttctgatggctcatgtgatctttggcttgggctgcatttcagatactctgagtatttgaaccctgggccaggcagttggcaggtggttgcgtgatctgatcttagaggacattgctttggaatgcattgatttgaggtgcgttagtatgcactctgtgtgcccacaggttgcacctccttgcagggttgttcctggggaattgccagaccagcagtttgggaggcctaagtgggagaatcgcatgaagccaggagtttgagaccagcctgtgcaacaaagcgagaccccccccaagttctacaaacaattttaaaaattagtccaggcatggtggctcatgcctgtggtcctagcgctttgggaggcttaggtgggtggatcacttgaggtcgggtgttttagaccagcctggccggcacggtggagcctcgtctcttttaaaaataa

SEQ ID NO: 398746 - DNA, 193 bp, Homo sapiens
tttttttttattttgtagagaagaggtcttactgtgtttcctagtctggtctcaaattcctgggctcaagctttcctcccaccttggcctcccaaagtgctaggattataggtgtgcccaccaccacacgcccagtgcttgtttttcttagagatatggttatcatgctttttctaccctttctgtgatttta

SEQ ID NO: 398747 - DNA, 328 bp, Homo sapiens
gacgttgttaaaggggggcagattttgcctctagctgccagttctgctttctatttcactgactatcccaggacctaaattgcttggctatgtaattactagagtataagcctatttaacttaaaagctttcttttttttttttttttttccaactctaaatgaaacttgatgagggcccgtccttagttatcaggggagtcagtttctggtcagtcttcttgattcatctcttttagatttaatcagcattaaggtattgcttgtccttaagagctttagctaatggggttactggatgcttttctcagtgtaatgtttccttttca

SEQ ID NO: 398748 - DNA, 505 bp, Homo sapiens
atgaacatgcataaaaaccgtagaagatgtaatgcagtatagtaactgtttacctttgaattctggtaaagtatgagtcattttcttcaatatctatgttctaaatgtaaagtttttagcagatatgctatgcaattctttaagctgatgaaaggaaatgcctttgacttctttattattggtactcttggttcaaaaggtcagtattcattacattcagatctattatttactctccccatttccatctttcccattcatccctctatacaatggcttccacacaaaacactgcaccatacttcctttttgacatagtaattaaagaccaactggtaaagctattttcttttttgtcatacctttacttcgtaatctttctggaaactcactgtttccttgagttgcatggaattcaaccagtatctttatcaaattcttcccagactcattctctatgtgcttcacgttgaaagcttcaacacccgcagactccctctttgcc

SEQ ID NO: 398749 - DNA, 430 bp, Homo sapiens
  misc_feature (430)..(430): n is a, c, g, or t
cgcccctgcctgagttcgccagtggtccaggagccgcttttttccactcgggaagacttcagagaagtctcacaaaggactcggctggctgcttttctcagtgccgaagccgcgccatgctcgttctcagaagcggcctgaccaaggcgcttgcctcacggacgctcgcgcctcaggtgtgttcatcttttgctacgggccctagacaatacgatggaacgttctatgaatttcgtacttattaccttaaaccttcaaatatgaatgcgttcatggaaaatcttaagaaaaacattcatcttcggacctcttactctgaattggttggattctggagtgtagaatttggaggcagaacgaataaagtgtttcatatttggaagtatggtaattctgctcatcgagctgaagttcgggccttagccctgtn

SEQ ID NO: 398750 - DNA, 399 bp, Homo sapiens
gctcttctgtcctgcagctgaggcacccggggctggtggtacagccagagtaggagttttcagaagatcccagagggaatgtaggtgctgccatctcaggttctttatgtaacctggctatgtgtaaatttcctcattggtaagacagggataattctccctttgtgaattcagtgtctgttgtagaggtcctgtctaatggcatgacccccactggggtaggggtaggtaggagccatgtccctttcaagtgctggtgctacaattcttgctttgcatgcattctagtttcacaaaacttctgcatgctgggtatgcctttccctgcttcctctgccattttcagataagttaaatgccttatgcaagtcacccagctcgttaagtggcatggctaac

SEQ ID NO: 398751 - DNA, 494 bp, Homo sapiens
gagaaataagaatatatatttacatttgcttgtatttgataaagaaacattgggaagaggctgggtgtggtagtgtgcacctgtagtcccagcaccttaagaggctgaagtgggaggattacttgaggccaggggttccagaccagcctgggcagcatagggagactccatttcaaaaattaaataaataaataaattagtaaaataaacactgggatgacaagacactaaaagtcattatttatagaaagagggagtgagtcagggttggggtgagggtgagacttgtcatggtaaacattaatactgtcttaatttttcaaccatataagtaagtgtttatctattcaaaacaattatatgatgggcttaaaaatcatagagataagaaaataaaatcacctagaatcccacaacccacagcttacactgataacattttaaagtacatccatttagaatgtagccatgcagattcaggtacatgtacattt

SEQ ID NO: 398752 - DNA, 907 bp, Homo sapiens
acagcacttggcccggggtctcctgctcgcctcccttcagagcatctgccaaacttcgggcatctaccctgcaattcccgcttggctgagaggagggggagaaggaggggaagagagaggagccccacttcactccggcaggcagacctgctggagctgctttgcagaatgacttgggtcttgctggcccctgggtgtgcctggaggggggtcttcctatccccctccacctctccccttggtgcctaacccaggactttgtccccagagacccactgtgtgccccctggagctcctcctagagcagagtctgctgctgtctgttctgcagagggtagcctgaggcccaaggaggttgtcagggacacagagcagggggaggcagcccagatccctgctcatgcgtggtttgggcctctgctaacagctgggccacatgcgtgtatctagagcctgggtcccctctgtcctcatttccctgtgcatattcagggacatgcctcgtcagggtttggcaagaaaatggggcatttaataatctccccagtttcattccttggtccttactccatgccaggacttgtgcacatctttttggagccctgtctcacttgattgacagccggccaggcgcggtggctcacgcctgtaatcccagcactttgggaggacgaggcaggcggatcatgaggtcaggagatggagaccatcctggctaacacggtgaaaccccgtctctactaaaagtacaaaaaaaatagccgggcctggtggcgggcgcctgtagtcccagctacttggtaggctgaggcaggagaatggcgggaacccgggaggcagaggttgcagtgagctgagatcacgccactgcactccagcctgggcgacagagcgagactccgtctca

SEQ ID NO: 398753 - DNA, 575 bp, Homo sapiens
gactgtgcctctagtgcattcctagttgatgagggaacattatacaagaatgccactcaacaagtgtagagtgatagaattagaaaattgtcattttgcaaacattgatgagacaatggattcaggcaacgatcaccgttggttactttttaccaggtaaaaagttgttggcaatcaaaatatccatgtgctgccagtgtcagtccacagattaattgcaataggaaaaactacctttatattgggaagatctggtgacctcaaatgagtgatccattgataatgagtcaacctgatattaatgagacttttgatatgatgcactatgaaatacatctgtgaggtgttatcattaaaaatgtttaaacaacccaatcaagccttttgccctaacttctaatttatggaaactacagggggtaccggaacaacccacatgtaaataatcagttgaatcctgaacatgagacatttttcaagacaactgacctgctctcttaaagaggaaaaactgtccgggcgcggtggttcacgcctgtaatgccagtactttgggaggctgaggcgggtggatc

SEQ ID NO: 398754 - DNA, 451 bp, Homo sapiens
actgtgttccatgctggccaatttcaccctacttgcttctgtggcaattggaacatggtctctggccttctgtttggaaactgcaactagttagcctccatttccaaggtttctttccttctctctgggcagcacactgggcaaagttgcccaaaacaggatgcctaactctaagtactactttctctgcattgcctgtgaggacagactactctttttactgtggaataaattctattctatttgacaaatatatctcattttgattccatgcagaaatgccctcattttctcccctctgctcccttcaaccaaccaagatcagccttgaaatttgcaggacattaacagggatcctaatctgtcatggaaaggagagaaaattaagacatgctatttcatatctttttatttctaagagaaattaaaggacttacatcttttcccaaaa

SEQ ID NO: 398755 - DNA, 531 bp, Homo sapiens
ttcctctttcctcactacccaaactaatccttaaggctccattttccctggcgactcttcgagcgcccctctgcttctgtagaggggtcgagccatgtcaaggtagaccctgtgtcggcccgtctccctcggatcctccgcaccaatcactgttgctgaatccgacacccggcggatccagtgcggagtctcgaacagctgcggagctgggagctacgggacatgaagagagcggggtggaagagaagacggcggaggaaaatcccccggcgatgctcaactgcggctttctctctcggctgtgagccggctccgccctccagcttccagagccggtggcttctgcgttcaccgccccgcgccgtttgcggggcggggctgattcataagaatcggttctcaccaatggagggcttagcttgtttaacctcaggatcataaacaaaagacactgctagaacggtcgggaaagtcatacgctttgcttatcttatatatagatatctaaaactccaaaccgggtacgcgttg

SEQ ID NO: 398756 - DNA, 131 bp, Homo sapiens
cgatgatggattgtcactcaagggaaccattatatttccatacgtagagaagttcctttgccaatcacaacaaaatgatacaataaccgttaatacagaaagaatgagtatgcctctacctgctcttatct

SEQ ID NO: 398757 - DNA, 426 bp, Homo sapiens
ctgagattacgggcatgagccagggcacccagcccctttgcctttatcttataaggacatctgtccttgaattcaggaaccaccatatgcaggatgatctcaagatccttaattgctaagtgagggcttagtgcctagggtgagggcaagggcagttctctaaagaactgccattggcctttaggataaaacatcagttgtaccagaccatcccaagcattgaaggattttaaagttcctggtctacactcattaatgccaatagccctctaaccctaatatgacaattaaaaaaaatgcccccatacactttcacatccctttcccagcaggaggaggaatgcttgtcttaagaaagaaaggatatttagaacatatattgccttacttctccatgctaatggaaggcataatgtcatacagaaa

SEQ ID NO: 398758 - DNA, 296 bp, Homo sapiens
tttctgatgtttgctagtagcttttataccccactcttctcatttcccattttgccccacatctgggcaagctgataagaaagcctgggttcttctgttggcactgagattccaaccatgtgggcccccgcctgtgtgcaggaaccctcaccccagccccactccccaacgcctaagaaaacttcaagtcagttttctttccctgctctcttacgctgtttttggacctgtttgggaagctttcccagctgtctccagaaaacctcattatgtgcgtaataaaccttttcacactc

SEQ ID NO: 398759 - DNA, 414 bp, Homo sapiens
  misc_feature (50)..(50): n is a, c, g, or t
  misc_feature (61)..(61): n is a, c, g, or t
agccagcctgtccaacgtagtgaaagtccgtctctattaaaaaataatancggcgggggancagtggctcacgcctgtaatccaagcactctggggccaaggaccctggtcacaccttggccccagagttactctatcccttcactttctttcttttatagcacttatcaccatctgtattagcacatttgcttaccagatttagttgtttattgaatagaaatgagggcatgaactctgtccatcttgttcactgctatggcatcagtgcttaacatactatacctggcacattgtaggcacacatatttattgattttatgaataaataaaaataggtagtaatgtatgtacgaaatattgctttgtaaagataagagtttataatatacacgttagtcttgggcctccaat

SEQ ID NO: 398760 - DNA, 530 bp, Homo sapiens
cagcttgttcacccttcttctgtgtatgggcatttgggctcctggtttgggaccattatgtgtaaggatgtcatgaatatttatttatgtatgtagcctgtgagcttgccttcatttctcatggttcattcctaggagtgcagtggccacatcatgtcatggtaggtctgcatcgaccttgttaaggaatcactgtcccttgtgctaagtgtttggtccattgcctgctttctctcttgctccctctgatttagtcatacaaacctcttgtatccttcaccctccagggcaataacttcttagcataccgcctttctttacacttggaatcaccagctccttctttatgtgctggctctgattccctcactaaatttgccctttgtgccccatgtgtgacccattcccattgatacaccctatgtatgagagggctttgggataagagactgtttctgatgagtatcgagtactacaatggctctgaatggaagaaagatgactgggtgggtcttgtcaaccattgtccc

SEQ ID NO: 398761 - DNA, 508 bp, Homo sapiens
ggcaggaatgattatataagacttagggccaaagagagcctgggtgactgtgtaggggtattaggctatgcccagcaccacatctggttgtcattcaggggagcagctagggctggaactgctggggagtgcaaactgcagtattccctgttcccttgtctcagagcagaattgtggcctctatccaggtccaatcccagttaaaaaaaaaaattccaatggtctattcttcttttgagctatattattgtagagaatactgacttgaaaaaacaaagtcactaactagaaataaaatttgaactgggtgcagtggcttataactgtaatcccagcacttttgggaggccaaggtgggaggatcacttgagctcaggagttcaagatcagcctgggcaacatggcaaaatcccatctctacaaaaaatacaaaaattagctgaagtgtggtggtgtgcacctgtagttccagctacttgggaggctgaagtgggaggatggcttgagc

SEQ ID NO: 398762 - DNA, 526 bp, Homo sapiens
gagcagttggtttcgttgtcttaatttggggcagtaatgatttctgagaagcaggtgattgataacgcgcaaattcaaagccccttgggggctgcattgtagcatggtgtggggatggggagacagagggctggtaggatcccgaattcctagtttttctctccctctcccttgcttcttcattttcttccttcaggctttcttccatttctttcttccatcaaatatttgtggagctggaactgggcttcactatcatattccaaggccctgtactgggaacagacaaagaagctcctcccagagactggaagaatggtacaaggtgtgaaaaccaaggcttaaagcatgcaagttatttgcccgaggtttttcagccacaaatgaagaagctgggtctgctccacacctgtgaaccaggctatttccaccataacctgaactcagatgagcaccagcccatggagaatagtccagaaggctgcccatagccttaaaggacagtgtgagcattaatcacagcctg

SEQ ID NO: 398763 - DNA, 404 bp, Homo sapiens
agaagcaacgagacaggtcaggatatgaaagagttggccccaacaaggcaggtgtctccagggggaatgcagaaaggaaatattgccaaagaaattaaagaagtcttaaatattatttccaaagagtgaaacgaaaaattttaggaaaagagaatcagaagacacaggcatatatgcatgtgcctggtgtatgatacgtgtagcacaggatggaagcagagagcagatcttagtcttaacacccttgaggagactgactctgcacctcagacagtcacatatcctaaagttcagaaggagctgggtagtgcattttcagaatttagaagtagtaaaggtaatgaaacaactttttttttttttagatgagtcttgctctgttgtccaggctggactgcagtggc

SEQ ID NO: 398764 - DNA, 930 bp, Homo sapiens
  misc_feature (658)..(659): n is a, c, g, or t
  misc_feature (672)..(672): n is a, c, g, or t
  misc_feature (680)..(680): n is a, c, g, or t
  misc_feature (683)..(684): n is a, c, g, or t
  misc_feature (741)..(741): n is a, c, g, or t
  misc_feature (744)..(744): n is a, c, g, or t
  misc_feature (746)..(746): n is a, c, g, or t
  misc_feature (753)..(753): n is a, c, g, or t
  misc_feature (758)..(758): n is a, c, g, or t
  misc_feature (762)..(762): n is a, c, g, or t
  misc_feature (765)..(765): n is a, c, g, or t
  misc_feature (772)..(772): n is a, c, g, or t
ctctggccctacttatcagttagtgtcatttaagctatttcttgttcagaaaacaggtcccatgatggacatgtattatgtaatggatggaagtagacatggctctcaataattcatttatggaggaagagaagctgtcagaaagtgggatttaagcagtgactttcccaaggcttgcctagtttatttgggaaaatagccagagaagtgctttcttgtaacccaaaagagaaatatacagataagaatttcagtagttgcagatcgttgctttttctaagtgcctacttaatgagcagattattgtcttccagcaaatacttctactttatagagaggtatgggaaacaggacataataggtattaagtgagaaagtgtgtgttccaatttttaattataaataaaagatttaattaactgtattcagttaattcatttggtaaagtgaacagttttgactttggattagttagaaggaaaacaaaattgacatatctagttttcgcttttaaattatacatagacttaattaattgggacaaatgtgaactaagatactgggtaaaacttgtgtgtactcctaaaatgacatttgcatggctggtagtaagctgtgattcttgtccttgtaggaatgaaatcacataattgggganngtcttaaggtaanagtaagcnatnncgttagcatttcttgtgctgaaattatgcctacattttatttttcaaaaaatgtggntgnantcattantgtgntatnctngttggcnacgaggggtttttccttcattactgggtctgataagtttgccggctgttatcacaattatatggctgctggcagtttaggattgtgttgaactggttgccagggaagcggcaaagctggaaaaaacgccaatctcgtggacaagccgcggagatggat

SEQ ID NO: 398765 - DNA, 469 bp, Homo sapiens
gaagtcatgtattttaaagccttcaggaaactgtgagtgtaaggcatggttatctcaccttgcaggaaggtcttgaatccattccaatagcctttattggatgagtggtttctggtgttgatttgtgtgcttgaaaacacttattttgtttatttgaccctaccactccgatagtacaggctacacttattttcctggaagattaagaaaaatttggcggtgagctatgcaaggggaagtaaacaaagtcacgagacacagacagaaaacttcatttccattcaatctctgaccccaagaaaaagtcactttggggagatacataaagttttaaaaattaaagtgcaattaattgtagttaagttttaaaaaattaaatctgggttccgctggcacatgaatagagcaatgaaatggaataggaaatcaagaagtagacccaaatacatacagggatttagcatatgat

SEQ ID NO: 398766 - DNA, 494 bp, Homo sapiens
agggacttgtatccaaaatatgtaaagaacacctataaattaagaataggaagacaacccaatataaagtgggcagaagattatacagatactttaccaaatatgcaaatggccagtaagcacatgttcaacatcattagctgttagggaaaatgcaaattaaaaccacaatttgctactgcacattcctggaataactaaaatgaaaaagtctgagaatacgaagtgatggtgagaatgtggagcaactcgaatgcccatatattgcttgtggggttgcaaaatggtacaaccactttgaaaaacagtctggcaatttctcatgaagttaaacatgtacttaccatatatcccagtaattctatttctggatatttgcctaatataaaaacatttgtctacagaaagacctgagtgtcatagcagctgaatgctcaataagctgaatgtttatggcaactttattcataacaataaaaaaaaacttgaaacaa

SEQ ID NO: 398767 - DNA, 172 bp, Homo sapiens
ctcacccttccattctccctcaaggatcacctcctcagaaatgccctggctgaccacctggctcaagcagcacccatcacccattacccattattttactgtcacctgaaattctctgtctttactcactgtctgggtctgagttatcaaatacaagaaccactagtggctg

SEQ ID NO: 398768 - DNA, 358 bp, Homo sapiens
tgctggctggggcaaaaggcccttgaaagggaccctaaggcctctaggctttcatatgtacttcccctagggctggaatgccctccaccacacccttcaaaccactctccctcctcagaaagataagcaggggaccctggtgggagaggagaaagaaatgaggcacagggaaagggggcttccatccaggatggaaagacaacctgatgaggacaggagcaaatgccacacacattccttggactctgttcacatttggccacagagaaaagcatgttattcctggtacaggttgagtatcccttatgcaaaatgctcagaaccaaaggtatttcagagttcatatttttttcgattt

SEQ ID NO: 398769 - DNA, 469 bp, Homo sapiens
aagcgcgtcatcaccgaggctctcacagctcccaggaccttatgagcccataaagggaagcggacacgaaggcggccgagaaatgatactttaagtaaaatgcctatgagtccatcactaaagggaaaatcatttccatggaggcctgtgtcatagtttatccaggattttaaagagatgctgctactctgcaggtgtctaatgtcttaggatggcaaaagagagaagcctgaaatatttatatgaatagaatatgaaacttaactaatggtgcccgcttcgattacgtgcattttcacattgctactaacctgaaagccgccctcaatattttataggctaccatttcccgcctgggctacacgaggcctctgggttcttttacgaacattgtctgtcatttattatgtgatagatgcataattgtaaattacacggaaagccaaaataaaaacatgtttacgtttta

SEQ ID NO: 398770 - DNA, 449 bp, Homo sapiens
atgtgttccgaaggggaggcctctgaaatggctgctttaggaacgtctgtcttttacagttgtagataagggatgaaaaaagtcccggtctcccgttgcgctcccaggcttattaggaagaggaaattccctcctaataaattttggtcagaccggttgtctgctctcaaaccctgtcccctgataagatgtcatcaatgacaatgtgtgcctgaaacttcattagcaattttaatttcaccccgtcctgtgatcttgccctgcctccatttgccttgtgatattttattaccttgtgaagcatgtgatctctctgacccccaccctattcatacactccctccccttttgaaaatcactaataaaaacttgctggttttgtggcttagggggcatcacggaacctgccaacatgtgatgtcttccctggacacctagctttaaaattt

SEQ ID NO: 398771 - DNA, 344 bp, Homo sapiens
cttgtgatgacttctgcccctcttaaacatacataattttatctttaacactagactgacgactctccttcctccctcataccaatcaaagaataaaatcttaatttcattttcttggacaaaaagacccaaaataatcaatctccacgaagaggagtagttttaaaaacaggttctcaaaaagttttttttttaataaggcttaaattaagagctcctattctcacgtactcaacagaaaactaatcaatgagacaggcagcaaaggccagaaatgtggaatgtgtgtgtttttggtgggtttatgtgtacgtgtgttgtttttttttttgggggggggcgcg

SEQ ID NO: 398772 - DNA, 522 bp, Homo sapiens
agggctttatttatcaaaccccatggctcagctcttacgtcaccttctctgtgaactctcctcactgcctcattcagaatcacttcttccccctcagtatgaacagcactttgttcacgcccttgttacatcactcgatgcgcaaaggtttgtctctctctaagctaagagctgattgagagcacccttgtgtctttaggctgggccaaggctggcacacagtagatacttagtgtatatttgctaaatgaatacatccctaccctctgctaattgtgcagcatttccttgcatcctgttgatgactgagccttgtttgctttttcctctttttgtttagtctagagggatgatactaaggatagtttatgggagctaatttgaagaacaggaatagacttgataggtgcaacaataagatattattgaaactgcccaaggattatcattatgccaaactattttccttattacttttaactccacttgcagagtgttcaggaggattgttattcaaaaaaa

SEQ ID NO: 398773 - DNA, 291 bp, Homo sapiens
agagcagccattgttctctgcagacagacacattctctcacatgtccccggggccacagacctctttatgttctaactgggtctgcacagaagaggcaggagacaggctttagcctcaagggagggagagagaggcaagaggccacagtccccaagttaggaggccacaaggaaagaaaaggacttctgtgaagaaaagagtcccgtctgagttgcagtccacttgcctggggccactggaggagatggggctggggaggggccgctgcagggaggagggcgggggtcagc

SEQ ID NO: 398774 - DNA, 219 bp, Homo sapiens
tggtgacaggatgatttttaatgttttggcccatgccaaatattttttgaaagttggcatactagtatctataagaaaatatcaaaatagcccacctgtagtgacaactacttgggaggctgaggcaggaggatcacctgagcccaggaggttgaggctgcaataagccgtgattgtgccactgcactccagcctgggggatagaatgacaccctgtct

SEQ ID NO: 398775 - DNA, 460 bp, Homo sapiens
cctgagttcatcaaatgcatctagcaaagagacgtataaaggcaggagactcaaactatctgctacccatgtctgactgccagactgactataaaacacaaacttcatattgaacagctttgtcacgttcacctgcagacgctgttgccccagttttcctctttcccaccccgcactgcacacgctcttctccctctccttaccatcacacacatgcagtttctagccctgtttttagctctgcagtcagcacttgcctcataggtgtgagagaatcaattgaagtggaactgaagaacagccttctagatagtaaacatgtaattgttcatttcacattgcctccccagagtcctagggggataaagttttaaaattacatatttttatttatgagttacttatgtgaatattcctgtttaatgtgatacacatagggaataaagaatgcttgaacaca

SEQ ID NO: 398776 - DNA, 483 bp, Homo sapiens
atggagaaagagaaggaggttaggcaggaggaagaggttacagctcatgttgtgcatggcagggaagcaataaatattgcttaagaggaaaggtaatatataaaggtgtcattataaaaataactatcagaaaaataaaacagcatttaaatagcagaagaatgacagaaacaacagcaacgaaaagcagaattaaacttcttaattattaactgcaacagacatacagaaaaacacataaaatacgaattacagaataatcaataatgataaagcacatacgtattaagcactacccaagtcaggaaatacaacattactagcattccttcctgatcataatctcttcccctatacagatagccactatcctgacttttatagtaattacatgctttttttggtttacagttttacaatctatgtatgcatttctagttttgcctacttttggactttatataatataatcatactgtattt

SEQ ID NO: 398777 - DNA, 236 bp, Homo sapiens
cgatcttaggtgatccgcccgcctccgccttgcaaagtgctgcgattacaggcgtgagccaccgcgcccagccagggcttttacatttaacatcttgtagcttcctgctgagcggcgaacagcccgtgcagactttatcatgagcatctttcttcttccccaaggaggcactcacacgtgtttggtgaattactatttccactggtcaaggcgcacatgcggtaaaatgtctgcac

SEQ ID NO: 398778 - DNA, 408 bp, Homo sapiens
ctaaaaacagactaaccctgcccagagaggaggtggccggctggtgctcagggagggcggaagtctgggtgctaaacactcttacctctcaccacttcctctctgagcagactctgcaggtgtggggcagcatacctgtggctccctgctccccctaggctccccccagacaaattcttgggctccttctggtgtggggctcaggctgggccctggagatgtggcccccacccctgcagggccctccagtgaggggaggtgcgcaaatccaatcagtgctatggccacaggccctaaggaggtgatgctgggctcggttctggggcatgagtaggattagcaggtggcgggtgggagaagagcagcctgcggcagaggcacggcaagggcgagcgtgctgagcgggaa

SEQ ID NO: 398779 - DNA, 612 bp, Homo sapiens
cacacacacagactaactttcagatttaggagtaaagggaagactgtgttattttatgccagacatttcaagagatttatgtcggagcctggaattgaaatagagtactctgtcaaagtagtcagcttttgtgtaggctttctctttatcttcctctcattatgtgaatttcattctttcagtgattatattgtatatgtgtaaaatcactccaatacttgaaaactgagtttgacttttaaagtgtgtgtgtgtatatatgtttgtgttccagtatatatttgttaagagcatgtaatgccagactctgtcctgtttagctgctggactggtggatcggttcggtgaggatgtgagtatctcctgggtgccaggtctgtcctggatagcgagaatgctggaggtgtcatgtgcctgtatcgcagaaaggcgtggggtgagccctaagctgcctgttgacaaggtagaagactgtgacctggatcactggtacccagattccagccagggcctggtatcagatttggatgaagtttttaccagcccttggtcaaagtgagaaaattaagaaaagtgcagttttctttaataaagataaatttatttgattta

SEQ ID NO: 398780 - DNA, 958 bp, Homo sapiens
ctgacacgacaacaaccatcacgtcccaacgagcgaacacaaaacaaactttgatccaacttgaatgcttcctgattaaatatatacaggagtgatttcagaggaatttaagttttggatcattcttttgagaaagaaagaaaagtacccttttaaaagaggtggctcttgaacaacacaggtttgaactgcatcattccacttatacacagactttcttctgccactgccactcctgagacaacatgaccaatctctccccttcctcctcctcagcgtactttcaacataaagacgacgaggataaaggcatttatgatgaactacttccacataatgaataattgaacaaaggagagaattgtgagagtgagaaaaagtgagacaaagaagaaaaactataaatcagcaaaatacagtgccaagagctctggaccacaaatcagaagacctgagccctaattcctttccagtcattggatttgttcgtcgcttgccaaaatagcagcgaactctctgtcaaactgcaactcattttatcggagcaaaaactgaacaaagaactgctatcatttctgaggtcagaggcagtgcagcttgtgttacaactcaaaagagtaatactctgaaaaaagaaaaaaaaagatggcgctgaaaataaacatgttcagcagccattgtgattcaacttacccagatgtgcttttcatgagatggagaaggacggatggaaaagaaaagcacacaaatgttaatggatacagttcaatccaaagaaaaccatggaataaaacaagagcattatttaagatgtgagaaagctcaggtatgagaaagacatggtgccattttgtatttcatcatgacacacatactcactgcgtcgaaaagcatagtcaggctgagggtagttctaatagttgaccaataagtctatgtcttgagtatgagccactct

SEQ ID NO: 398781 - DNA, 957 bp, Homo sapiens
ataagagatagtcgtgacacagacggacatcgcaacccgccgacacatcactatccaacttgaatgcttcctgattaaatatatacaggagtgatttcagaggaatttaagttttggatcattcttttgagaaagaaagaaaagtacccttttaaaagaggtggctcttgaacaacacaggtttgaactgcatcattccacttatacacagactttcttctgccactgccactcctgagacaacatgaccaatctctccccttcctcctcctcagcgtactttcaacataaagacgacgaggataaaggcatttatgatgaactacttccacataatgaataattgaacaaaggagagaattgtgagagtgagaaaaagtgagacaaagaagaaaaactataaatcagcaaaatacagtgccaagagctctggaccacaaatcagaagacctgagccctaattcctttccagtcattggatttgttcgtcgcttgccaaaatagcagcgaactctctgtcaaactgcaactcattttatcggagcaaaaactgaacaaagaactgctatcatttctgaggtcagaggcagtgcagcttgtgttacaactcaaaagagtaatactctgaaaaaagaaaaaaaaagatggcgctgaaaataaacatgttcagcagccattgtgattcaacttacccagatgtgcttttcatgagatggagaaggacggatggaaaagaaaagcacacaaatgttaatggatacagttcaatccaaagaaaaccatggaataaaacaagagcattatttaagatgtgagaaagctcaggtatgagaaagacatggtgccattttgtatttcatcatgacacacatactcactgcgtcgaaaagcatagtcaggctgagggtagttctaatagttgaccaataagtctatgtcttgagtatgagccactct

SEQ ID NO: 398782 - DNA, 1073 bp, Homo sapiens
  misc_feature (50)..(50): n is a, c, g, or t
  misc_feature (56)..(56): n is a, c, g, or t
gaaattgtaaaactcgacgattatcattaatcaatcatcaaacccccgcntttatngagagattatttgaggacaccaagaggtgaccatcagcaagcccaggagagaggcctcagaagaaaccagacctgctgattccttgatcttgaacttctagcctccggaactatccaacttgaatgcttcctgattaaatatatacaggagtgatttcagaggaatttaagttttggatcattcttttgagaaagaaagaaaagtacccttttaaaagaggtggctcttgaacaacacaggtttgaactgcatcattccacttatacacagactttcttctgccactgccactcctgagacaacatgaccaatctctccccttcctcctcctcagcgtactttcaacataaagacgacgaggataaaggcatttatgatgaactacttccacataatgaataattgaacaaaggagagaattgtgagagtgagaaaaagtgagacaaagaagaaaaactataaatcagcaaaatacagtgccaagagctctggaccacaaatcagaagacctgagccctaattcctttccagtcattggatttgttcgtcgcttgccaaaatagcagcgaactctctgtcaaactgcaactcattttatcggagcaaaaactgaacaaagaactgctatcatttctgaggtcagaggcagtgcagcttgtgttacaactcaaaagagtaatactctgaaaaaagaaaaaaaaagatggcgctgaaaataaacatgttcagcagccattgtgattcaacttacccagatgtgcttttcatgagatggagaaggacggatggaaaagaaaagcacacaaatgttaatggatacagttcaatccaaagaaaaccatggaataaaacaagagcattatttaagatgtgagaaagctcaggtatgagaaagacatggtgccattttgtatttcatcatgacacacatactcactgcgtcgaaaagcatagtcaggctgagggtagttctaatagttgaccaataagtctatgtcttgagtatgagccactct

SEQ ID NO: 398783 - DNA, 965 bp, Homo sapiens
tgtagttgcggtcgctccctctccttcaacaacactcgaagaccggtatatatattcacagagaaaggattatttgaggacaccaagaggtgaccatcagcaagcccaggagagaggcctcagaagaaaccagacctgctgattccttgatcttgaacttctagcctccggaactatccaacttgaatgcttcctgattaaatatatacaggagtgatttcagaggaatttaagttttggatcattcttttgagaaagaaagaaaagtacccttttaaaagagcgtactttcaacataaagacgacgaggataaaggcatttatgatgaactacttccacataatgaataattgaacaaaggagagaattgtgagagtgagaaaaagtgagacaaagaagaaaaactataaatcagcaaaatacagtgccaagagctctggaccacaaatcagaagacctgagccctaattcctttccagtcattggatttgttcgtcgcttgccaaaatagcagcgaactctctgtcaaactgcaactcattttatcggagcaaaaactgaacaaagaactgctatcatttctgaggtcagaggcagtgcagcttgtgttacaactcaaaagagtaatactctgaaaaaagaaaaaaaaagatggcgctgaaaataaacatgttcagcagccattgtgattcaacttacccagatgtgcttttcatgagatggagaaggacggatggaaaagaaaagcacacaaatgttaatggatacagttcaatccaaagaaaaccatggaataaaacaagagcattatttaagatgtgagaaagctcaggtatgagaaagacatggtgccattttgtatttcatcatgacacacatactcactgcgtcgaaaagcatagtcaggctgagggtagttctaatagttgaccaataagtctatgtcttgagtatgagccactct

SEQ ID NO: 398784 - DNA, 979 bp, Homo sapiens
tgtagttgcggtcgctccctctccttcaacaacactcgaagaccggtatatatattcacagagaaaggattatttgaggacaccaagaggtgaccatcagcaagcccaggagagaggcctcagaagaaaccagacctgctgattccttgatcttgaacttctagcctccggaactatccaacttgaatgcttcctgattaaatatatacaggagtgatttcagaggaatttaagttttggatcattcttttgagaaagaaagaaaagtacccttttaaaagaggtggctcttgaacaacacaggtttgaactgcatcattccacttatacacagactttcttctgccactgccactcctgagacaacatgaccaatctctccccttcctcctcctcagcgtactttcaacataaagacgacgaggataaaggcatttatgatgaactacttccacataatgaataattgaacaaaggagagaattgtgagagtgagaaaaagtgagacaaagaagaaaaactataaatcagcaaaatacagtgccaagagctctggaccacaaatcagaagacctgagccctaattcctttccagtcattggtcagaggcagtgcagcttgtgttacaactcaaaagagtaatactctgaaaaaagaaaaaaaaagatggcgctgaaaataaacatgttcagcagccattgtgattcaacttacccagatgtgcttttcatgagatggagaaggacggatggaaaagaaaagcacacaaatgttaatggatacagttcaatccaaagaaaaccatggaataaaacaagagcattatttaagatgtgagaaagctcaggtatgagaaagacatggtgccattttgtatttcatcatgacacacatactcactgcgtcgaaaagcatagtcaggctgagggtagttctaatagttgaccaataagtctatgtcttgagtatgagccactct

SEQ ID NO: 398785 - DNA, 732 bp, Homo sapiens
tgtagttgcggtcgctccctctccttcaacaacactcgaagaccggtatatatattcacagagaaaggattatttgaggacaccaagaggtgaccatcagcaagcccaggagagaggcctcagaagaaaccagacctgctgattccttgatcttgaacttctagcctccggaactatccaacttgaatgcttcctgattaaatatatacaggagtgatttcagaggaatttaagttttggatcattcttttgagaaagaaagaaaagtacccttttaaaagagactttcttctgccactgccactcctgagacaacatgaccaatctctccccttcctcctcctcagcgtactttcaacataaagacgacgaggataaaggcatttatgatgaactacttccacataatgaataattgaacaaaggagagaattgtgagagtgagaaaaagtgagacaaagaagaaaaactataaatcagcaaaatacagtgccaagagctctggaccacaaatcagaagacctgagccctaattcctttccagtcattggatttgttcgtcgcttgccaaaatagcagcgaactctctgtcaaactgcctgcctcactttccctttccctggagccaggaagagagcctttaccaaaaactgaaccctgctgataccttcatcttggaccttccagcctctaaaactgttaatgttaataaacttccaagaaacaaatata

SEQ ID NO: 398786 - DNA, 859 bp, Homo sapiens
tgtagttgcggtcgctccctctccttcaacaacactcgaagaccggtatatatattcacagagaaaggattatttgaggacaccaagaggtgaccatcagcaagcccaggagagaggcctcagaagaaaccagacctgctgattccttgatcttgaacttctagcctccggaactatccaacttgaatgcttcctgattaaatatatacaggagtgatttcagaggaatttaagttttggatcattcttttgagaaagaaagaaaagtacccttttaaaagagtttcttattttaaatatacaggtggctcttgaacaacacaggtttgaactgcatcattccacttatacacagactttcttctgccactgccactcctgagacaacatgaccaatctctccccttcctcctcctcagcgtactttcaacataaagacgacgaggataaaggcatttatgatgaactacttccacataatgaatagtaaatataatttctcttccctatgattttcttaataatattttcttttctctagcttactttattgtacgaatggagcatatatgtgtacatataaaacacataatacatgcttatcaactatttgtgttatcagtaaggcttccagtcaacagtaggctcttagtagttaagtcttgggagagccaaaaattctagctgattttttgactgtgtgtggggggtcagcacccttaactcctatcttattcaaggggctattgtattctaaattgtcttttagcttgagtcataatccaggtatagtgaaaaacatttgtgtctatttaaaaataatataggtaagaattttaaaaattatatatttttccta

SEQ ID NO: 398787 - DNA, 1049 bp, Homo sapiens
ttttaacagtggcccgggagttacagaccctgtcaggcaaatttgcctaggcatgtcaaaccctctatcacagaagaagagttctgcctgaaagatatcacataagctgccaatccaagataactcccatctccccctatttgaatgtgatctttttaaatgacaataataataataataatttgccagcaagcctgcctggaagacttgcagtttaaaatctggtcatctggcgtttactgtgcctaaatataaatgatgtgggacaagcccaggtactgagtttcctcttagaatttggccaacgcaatttgaccacgatatccgtggaaaaaaacgttgtgcatccgttaatctaacctatttagtgtttactctgcaagctaaagtatcaggggtatggacatacctgccctcggtctcggtgagccagcaatgttcagcggtgtgttcatgcccaggcaagcgtagacgcactctacgcttaccagtgtgaacggtgttgcagtctagaatactcccccagcttggggccggccctcgcctttctaccgtgcctgcgccgtcgcctaccactttcttcctgtggtttctaccccattttgcagattgctgcgtatcccagtgtcggcgatggataaacaggtctcgtctcttcccagttgcagcccgtgagctggtggcacaacggattaatgaggcaacagggctctagatggtgagtgggatcaatgagacccaattgagctgttagcggtcttaggcggagagcatctctcaggaggaaaggaaggcacagcgagaagacctaaggccgaaagtcgctgtgcagcacccacccaaggctggactcgggggaggtagacgggacggtgtctgtgactaaacggttcccacaccttacacgccgcaccgggattatgttttgaaaggtgtcttataaaatcaagaccggttcctaacaacctgcaagtgccagtgaatcccgaaatgtttgtttgaggagagggagtgtgagggaaggagcagaaaaaagaaagagggggagg

SEQ ID NO: 398788 - DNA, 234 bp, Homo sapiens
ctggtatctgtacttttgggtactctttacccacataaacttgggtttagccatgtgattttctttgctcaatgagacaaaagcaaacactagaggaagagattttaaccatgtctgctcttggggtccccctttctttctgtgattataatccttagtgaccactaagtgaacaagactgtgctaatctgagggagaatgaggggccatgtggagaactgaggtgcttcagcc

SEQ ID NO: 398789 - DNA, 266 bp, Homo sapiens
gagatgctgggggttaggatttcaacacaggaatttggaggaatacaattcaatcaggcttatggacaattctggtcttaagtcaagagtagtgttctccagtctgtatgtggaggcgcacacctatggtcccagccacttgggaggctgaggccagagaattgtgtgagcccaggaggagttccataccagcctgggcaacatagcaagacctcctctcaaaaacagacaaaaaaagtggtgttccagagtgattagtttgcttt

SEQ ID NO: 398790 - DNA, 327 bp, Homo sapiens
gtagagaagggtgtgcaaggtgtgtctttccatgtatttttaccctcatttaaatctccctttttataaataacctgttccctgtccaagctatattcatttctgtttcaagcacatgaaaatggatacttaattaaaatgaagtaaaattctgcctaattaagtttggtgattaggttgtgaatttgtctgtgttcttgaataaatgatttagtaaagaaatgatttgtattatctgtaaagagaattagccaagaggaaaggaattctatttgaagaatgtagtagccaggtgatatagctgatatgagaaactacatgtggatt

SEQ ID NO: 398791 - DNA, 324 bp, Homo sapiens
tttggagaatctccttccatcactgtaatctggggggggcctatcagtcaaggaaccctgtcctgctctggacaactgggggccaagggacaatggtactctctccctggaatcttgagcataatggtgcagagacctaaaacagctggaaccaattcaccaatagtagtaagcctccatcgttccacttacccaggccccagaacatccttggttagggctttctaagctttcccttaaattctgtgaactgctctatttccttctaataatttcctcatctgcttagtttagctggagtcattctctgttgtttataaccaa

SEQ ID NO: 398792 - DNA, 327 bp, Homo sapiens
catagccacatgtagcaagtgggacacatagcaagtcccagatttcacataaattttataaaaactgatggccctcatcttcttcatcagcaatatagggaaaataattcctacctctttggaatggtgtaagacttttatgcacacataggtaaaacaattagtatggtagcttttattattcccagcattgttgataaaagaaagaggaagatgaagaggatagaaaaaacacttttcaaaatcagcaaaacctggctaggcacagtagttatcttttctttaaagttatttacttgttttttaaattgatgtattacattggat

SEQ ID NO: 398793 - DNA, 743 bp, Homo sapiens
gacttcctaattctgtccccattgatgtatatgtcttattcttttgccaattgcagataagaatttttacttccaaaaagcaaagggccgatgtccaaattttcttccctcatccaaattttgtgcacatcattttctggatattgtcaggcctctgagccgaagctcagccattgtaacccccgtaacctgcatatatacgtccagatggcctgcaggagccagctaaaaaaccacagaagtgaaacagctcctgccttaactgactgaccaaccttacgacattccaccattatgacttgttctgccctgccccaactgatcaatcgaccttgtgacattcttcttctggacaatgagtcccaagatctctccaccatgcaccttgggaccccctcccctgctaacaataaataaccacctttaactgtaactttccactgcctactcaagccctataaagctgcccctctcctatctcccttcactgactctcttttcggactcaacccacttgcacccaagtgaataaacagccttgttcctcacacaaagcctgtttggtggtctcttcacacagacacgcataacagatatcattatctctgaaaggaaaattagcagtgggaagaatgggtgactagaatctaggaggaaaagtaccaaggccattcaacagcttagcaccccctgagcatagatatggtaggataagaccataggtctgagtcaggggacagaca

SEQ ID NO: 398794 - DNA, 398 bp, Homo sapiens
tggctcatcactgagtggagaatcctcattatactacccattcagaagcaagggtttgtcatggcagctttgatgccctgattggagcattggtttgaaaaggtttagtgaaaggctcctcttttttctttctctcagcttcattagaggtgaagcccttgttggttcattctaggatgtaagagccaagataccaaaggcttgagaaccaaagacccctcaatttaaaaaccgttagccaggtctggtggcacctgcctgtagttccagctacttgggaggctgaggctggatggcttgagcccaagagtttgaggctgcagtgaactatgatctcaccactgcactaaagcctgggcaacagagagagaccctgtctccaaaataaattaaaaata

SEQ ID NO: 398795 - DNA, 736 bp, Homo sapiens
gctgactatttgttgcagtcagacctgatatagatctaattgctcatcaacgtgtaaatggatataagcaaattgtgatgcatccatacaatggaatattcctcaggaataataagcaaagagctaaagatacatgtaaaaccatggataaatctcaatattattatgcagcgtaagaaaacccagacataaaggaacagatattgtgtgattccattaatataaaatattagaaaatgcaatctaatctacagcgacagaaagcagatcagtggtttcctgtgggatggggaaagtgctgattacacagggttaagaggaaacttttgtgagtgatggatatgttcattatcttgattgtggtgatattttatagatgcatttgtataccaaaacatatcgacttacaacctttaaagataagtaatttactctgccaattaaaccccaattaagctattaaaaatacatgaaactctcatgataaaagcacaaataaaaataacaaaaataaacttgacatcatcaagtttgtgcttcaaatactatcaagaaagtaagatgacaacccacagaaagggagaaaatttttgaaatctcatatttaataggggacttgtatctagaatgtattaaagaaattttacaactcaatagcaaaaagacaaataacccaattattaaaaaagcaaagaatctgaatagttttccaaggaagagatacaaatggccaaca

SEQ ID NO: 398796 - DNA, 392 bp, Homo sapiens
cagcctcagctgggagcttgttagaaaggcaaattcttgaccaacccagatctactgaatcggaatctctaagggagggggtcaagcaagctgtttttaataagcccttcaggtgattcttatactgtacagccataccgcagggatattgtgggcttagttccatatcactgcagtaaactgaatatcacaatagagtgagtcacacacatttttttgtttcccattgcatataaaagttatgcgttttggccgggtgtgatgtcacaggcctgtagtcccagctacttgggaggatcacttgagctcaggagtttgaggctgcagtgagtcatgattgcaccactgcactccagcctggatgacagcatgagaccccatttcttaaaaaa

SEQ ID NO: 398797 - DNA, 422 bp, Homo sapiens
attaagtagtcaacagaagttgctttaggcagaggaatgaactaggagaaataaacccttctatgtttttcaataatattacaggaaacacgtattaatgttagaatttctaaaaagccttttctcaaaaaacgtctggccccttaagttctcaaaacagtacacatttctcatatattttagtaaaagccaaaattaagcaattattaaaagcagtttagaatcttgttggattgtgctaaattgtatcaaagtgtttcctcaaaaatatcattttgtatcacttacattattattcaatattgggctatgtttaagtaagttaacctatattattaattaaaatagtttgcatgagaaaccaaatagcacacaaaataaaccatgactcctcagactctaagataactgcatgacataag

SEQ ID NO: 398798 - DNA, 466 bp, Homo sapiens
tgatgtgaggaagataagaagggaagtggggtcagaagggagctgatggaggacagtcatgtcctgaataattgaaggatgaccaaaccctcaagcctggcatccacactgtcagcattacacagcctcagctcaaggtctaggtatcccatatggagccttgattttccttcccacactttctttctgatatgttgcttatcttctgtgaaaaaaaaagctcatcgttagagcttgccagattatcataactggcaactggttattaacggttattcataatattttcccttcactttacatcttacaaaatgctttaatgtacgctttaccttctgatactcagggcaacttcctaagatgggcagggttggttctctttccatcttatatgcgataaaactagaggggaagataagcacttccttccaaaagcacaacatcattgcacgttggtgtgattgtc

SEQ ID NO: 398799 - DNA, 4490 bp, Homo sapiens
tgaatgaaggagcgggcggaggaggaagtgtcatggcgtcgggccgtggagcttcttctcgctggttctttactcgggaacagctggagaacacgccgagccgccgctgcggagtggaggcggataaagagctctcgtgccgccagcaggcggccaacctcatccaggagatgggacagcgtctcaatgtctctcagcttacaataaacactgcgattgtttatatgcacaggttttatatgcaccattctttcaccaaattcaacaaaaatataatatcgtctactgcattatttttggctgcaaaagtggaagaacaggctcgaaaacttgaacatgttatcaaagtagcacatgcttgtcttcatcctctagagccactgctggatactaaatgtgatgcttaccttcaacagactcaagaactggttatacttgaaaccataatgctacaaactctaggttttgagatcaccattgaacacccacacacagatgtggtgaaatgtacccagttagtaagagcaagcaaggatttggcacagacatcctatttcatggctaccaacagtctgcatcttacaaccttctgtcttcagtacaaaccaacagtgatagcatgtgtatgcattcatttggcttgcaaatggtccaattgggagatccctgtatcaactgatggaaagcattggtgggaatatgtggatcctacagttactctagaattattagatgagctaacacatgagtttctacaaatattggagaaaacgcctaataggttgaagaagattcgaaactggagggctaatcaggcagctaggaaaccaaaagtagatggacaggtatcagagacaccacttcttggttcatctttggtccagaattccattttagtagatagtgtcactggtgtgcctacaaacccaagttttcagaaaccatctacatcagcattccctgcgccagtacctctaaattcaggaaatatttctgttcaagacagccatacatctgataatttgtcaatgctagcaacaggaatgccaagtacttcatacggtttatcatcacaccaggaatggcctcaacatcaagactcagcaaggacagaacagctatattcacagaaacaggagacatctttgtctggtagccagtacaacatcaacttccagcagggaccttctatatcactgcattcaggattacatcacagacctgacaaaatttcagatcattcttctgttaagcaagaatatactcataaagcagggagcagtaaacaccatgggccaatttccactactccaggaataattcctcagaaaatgtctttagataaatatagagaaaagcgtaaactagaaactcttgatctcgatgtaagggatcattatatagctgcccaggtagaacagcagcacaaacaagggcagtcacaggcagccagcagcagttctgttacttctcccattaaaatgaaaatacctatcgcaaatactgaaaaatacatggcagataaaaaggaaaagagtgggtcactgaaattacggattccaataccacccactgataaaagcgccagtaaagaagaactgaaaatgaaaataaaagtttcttcttcagaaagacacagctcttctgatgaaggcagtgggaaaagcaaacattcaagcccacatattagcagagaccataaggagaagcacaaggagcatccttcaagccgccaccacaccagcagccacaagcattcccactcgcatagtggcagcagcagcggtggcagtaaacacagtgccgacggaataccacccactgttctgaggagtcctgttggcctgagcagtgatggcatttcctctagctccagctcttcaaggaagaggctgcatgtcaatgatgcatctcacaaccaccactccaaaatgagcaaaagttccaaaagttcaggtgggctacggacatctcagcaccctcgtgaaactggacaagaagccagtggagaccaacggtcctgatgccaatcacgagtacagtacaagcagccagcatatggactacaaagacacattcgacatgctggactcactgttaagtgcccaaggaatgaacatgtaataatttgtttaggtcaatttttcctttacttttttaatttaaaaattgttagaatggaaaaattccttctgatctagcagtggtaacccctgctgttgctgccactgcttcaatatttgtaagtgctgctttattcttcattctgaaaagaagagattatagtaaacaagtctttatctccacatatgatagtgttataaatactgtaaaagcatggaaggtgcaaaactcagtatttctacaattgcagctaagaacattaggatgaatggctggctgcttctaggaatataagatgcctcaagcattcattatttatgatttgaatactgtagctattttttgttgcttggcttttgaatgagtgtaaattgttttcttttgtgtatttatacttgtatgtatgatttgcatgtttcaatgataaagggataaaacagtatactgacaactgtttacaagaaagtggagaaaaatgtacatacatttttgtatgtttagatattaccgtaaatactcaggattggagctgcttgtaagtataacaatatacagaataactttattttatcttgtcagagtccatcactaatctaaaacaaaggtggcacttttttatgttaaccttaaactctaggccttactggaagccactgataggggacacttcactaccagatgtgtgcagtgcaacagatggtcatatacactgtgaggcactgaaattttgccttcagaggttctgaccagattggctgctgaaatagcccctaactttctgaaggcttgaagaggaaaaaataaagtttacatactcttgatgtgaagtgcatttaaatgtttgttggcttgttgcagttctatgaaacagagctgttaataatggttatgtggattactgtgatttgaaaactaaattcacaataacttacctagtagagatttagtgagttgtttcctttaaagaattttacactacatattttaatagtaaacagggatcacttttcctttagcattcagaatgacaccatattcttaaatatactccttccctgaagcgtgtttgtgtgtgatgccatatttctttttcaggtaaatgtagtcttccttataaaaatgaaattaaacctatgctctcaattcttttatattctaacaataaataaaaaagaaaagattactgactgtgcattgtacctgtatttatagtttatggttatcaggaagctctgtaagaaagaaaaggtcagcctcccaggcaaaccagtagtggaggttttacatttgtttgcacatctcagtatatttctgttgaggtaaagtttgcacagtcatctgacttctgatcaagcattagattttaacttgtttagattttgtcttaaacaccagtaatatggctcttgtttatcagctaatcttgaatttattctgtggtaaatcttttgagttgttgagtatatttgagattgattggattcaacctcttgttgaactgaaaacttaattttttctctgtatttttgttacaaagccactgatacgtgcacaattgtaattaagtatgttgcagttgtaaatattagagtttaatctcatgctctacctttatttagcaattacctaatttgccagtagctttataatttttaaagataattgttcattattttgtcaatgttatttgaacttggggtacttaggagcctctttgtagggactgtgcctaggtagcatgtcctaacatttgttctggtcttgcataacttcagtaatctttgtcattatatgtaactttgttgctctgtatggcataatattgtatccataaacatggtaattttgatacagttatacttttacagtggtacataatccaaggactagtatagaattaagctgagtgcaagatgagggagggaagggctttcttggtaatttagatgtgaaacctctacagagctatcatgtaaaaactacataaggtggttgtgctactgtataattgggggtgataataccaggaattttaataagattttgtaaagaatatccagaaaagtagtgaacttattttcagtagacatagaaaacaatgtgaatatttaaggtctgtgactatagttaaacttcactaagaatttgcagaattgttttgagatgtgtgaataaaggtaattttattgaatcttcattggtgctaatgatggacagttaaaaagatagctagtgtatattgttatgggtcagtacttattagtacttccaaaattgaatttgaaatgctatgtattcacttttcactctgtaaatgtaattctttacaatgactttatttattaaagggcagccagttgtcattt

SEQ ID NO: 398800 - DNA, 1182 bp, Homo sapiens
aatttgtctttttgagtggatcattggggagaagggaccaaaccagctttgtatggtccctaatttcttgtgacactgataagttttatttacaatttcacattggcaaatactgctatattttctcaaatatctgttgttggtatttaacctctatccccagtaattctgaacagcaacataaaaagacttaaatttggaactttgattagaaaaggctagctgtgacacatatttcatgccccatatttggcatatagtggaaggagaaaggtagtatttttgcagtatttaataacattgagccttgaagctgtttggcaaaaggtaagtttcctttgtggctttgctgaaaaacaaggcatagatttacatagatacgtgtttaattctctgcttcactaaagaaagcaaatgcctattaagccacttcagttgggataatccctgattattgtgagattgaaattactttgtcaattttacaaatagtttttatctttccatttacatatttaccatgacattacaaaagaaaaataccacaaaaaatttacagtgttatctatatagtgattattgcaaatatactatcctcctctccttttataaaatacttcaattttagatgtaaaaacaaaattttaaatattaatatattagtaatatactcgggagtgagtgaggggaaatgttcattttatgtagattttttagtactagaattttataacttagcttttaatttaataaaataaggttttatactctagacttaaagatagagtttaaattttgctctaatcttactggtaaatgtttttctttgttttacatacttgaatttttatggctctccattttcaaacctgctctgcaacagtctgcatcttacaaccttctgtcttcagtacaaaccaacagtgatagcatgtgtatgcattcatttggcttgcaaatggtccaattgggagatccctgtatcaactgatggaaagcattggtgggaatatgtggatcctacagttactctagaattattagatggtaagtagagaaaataaatttttaagtttggaattatctaagttggcagttgtctgaattgacaatagaaagtgtcagtacactatcaaatgaacagaatgaaaacaacaattcatcagcctaaagaaaaaaaaa

SEQ ID NO: 398801 - DNA, 551 bp, Homo sapiens
tcccgaatcatttataattcagaattttgaataaatttacccttggtcttttaactttattttcataattgagacattgtatttgaaaaattatatcttgtcattggaaaagtaatgagaatgtcagtgatgagaaacttataactttggatttttcttaataatgaagaatatattatacgtttatggcatttctcaggcaagtactgtagtggtaagagattggaaaaaaaagtgcttatcatttcaggttttgagatcaccattgaacacccacacacagatgtggtgaaatgtacccagttagtaagaggtaggtgatccttgaaacttttaagataagtattaatgctttttattatctgtaattgatttgggtgctattttgtttttctagccttttgttaggtttcattaaaattagggagaaatgtcattttttaagcattactttttagtgttctacatctacttctatttgtgattctacctggtatgttagcttcctttaaacataggtaagaatctcatttcactaaaactccggaggg

SEQ ID NO: 398802 - DNA, 6927 bp, Homo sapiens
  misc_feature (5152)..(5152): n is a, c, g, or t
  misc_feature (5963)..(5963): n is a, c, g, or t
tgaatgaaggagcgggcggaggaggaagtgtcatggcgtcgggccgtggagcttcttctcgctggttctttactcgggaacagctggagaacacgccgagccgccgctgcggagtggaggcggataaagagctctcgtgccgccagcaggcggccaacctcatccaggagatgggacagcgtctcaatgtctctcagcttacaataaacactgcgattgtttatatgcacaggttttatatgcaccattctttcaccaaattcaacaaaaatataatatcgtctactgcattatttttggctgcaaaagtggaagaacaggctcgaaaacttgaacatgttatcaaagtagcacatgcttgtcttcatcctctagagccactgctggatactaaatgtgatgcttaccttcaacagactcaagaactggttatacttgaaaccataatgctacaaactctaggttttgagatcaccattgaacacccacacacagatgtggtgaaatgtacccagttagtaagagcaagcaaggatttggcacagacatcctatttcatggctaccaacagtctgcatcttacaaccttctgtcttcagtacaaaccaacagtgatagcatgtgtatgcattcatttggcttgcaaatggtccaattgggagatccctgtatcaactgatggaaagcattggtgggaatatgtggatcctacagttactctagaattattagatgagctaacacatgagtttctacaaatattggagaaaacgcctaataggttgaagaagattcgaaactggagggctaatcaggcagctaggaaaccaaaagtagatggacaggtatcagagacaccacttcttggttcatctttggtccagaattccattttagtagatagtgtcactggtgtgcctacaaacccaagttttcagaaaccatctacatcagcattccctgcgccagtacctctaaattcaggaaatatttctgttcaagacagccatacatctgataatttgtcaatgctagcaacaggaatgccaagtacttcatacggtttatcatcacaccaggaatggcctcaacatcaagactcagcaaggacagaacagctatattcacagaaacaggagacatctttgtctggtagccagtacaacatcaacttccagcagggaccttctatatcactgcattcaggattacatcacagacctgacaaaatttcagatcattcttctgttaagcaagaatatactcataaagcagggagcagtaaacaccatgggccaatttccactactccaggaataattcctcagaaaatgtctttagataaatatagagaaaagcgtaaactagaaactcttgatctcgatgtaagggatcattatatagctgcccaggtagaacagcagcacaaacaagggcagtcacaggcagccagcagcagttctgttacttctcccattaaaatgaaaatacctatcgcaaatactgaaaaatacatggcagataaaaaggaaaagagtgggtcactgaaattacggattccaataccacccactgataaaagcgccagtaaagaagaactgaaaatgaaaataaaagtttcttcttcagaaagacacagctcttctgatgaaggcagtgggaaaagcaaacattcaagcccacatattagcagagaccataaggagaagcacaaggagcatccttcaagccgccaccacaccagcagccacaagcattcccactcgcatagtggcagcagcagcggtggcagtaaacacagtgccgacggaataccacccactgttctgaggagtcctgttggcctgagcagtgatggcatttcctctagctccagctcttcaaggaagaggctgcatgtcaatgatgcatctcacaaccaccactccaaaatgagcaaaagttccaaaagttcaggtagttcatctagttcttcctcctctgttaagcagtatatatcctctcacaactctgtttttaaccatcccttaccccctcctccccctgtcacataccaggtgggctacggacatctcagcaccctcgtgaaactggacaagaagccagtggagaccaacggtcctgatgccaatcacgagtacagtacaagcagccagcatatggactacaaagacacattcgacatgctggactcactgttaagtgcccaaggaatgaacatgtaataatttgtttaggtcaatttttcctttacttttttaatttaaaaattgttagaatggaaaaattccttctgatctagcagtggtaacccctgctgttgctgccactgcttcaatatttgtaagtgctgctttattcttcattctgaaaagaagagattatagtaaacaagtctttatctccacatatgatagtgttataaatactgtaaaagcatggaaggtgcaaaactcagtatttctacaattgcagctaagaacattaggatgaatggctggctgcttctaggaatataagatgcctcaagcattcattatttatgatttgaatactgtagctattttttgttgcttggcttttgaatgagtgtaaattgttttcttttgtgtatttatacttgtatgtatgatttgcatgtttcaatgataaagggataaaacagtatactgacaactgtttacaagaaagtggagaaaaatgtacatacatttttgtatgtttagatattaccgtaaatactcaggattggagctgcttgtaagtataacaatatacagaataactttattttatcttgtcagagtccatcactaatctaaaacaaaggtggcacttttttatgttaaccttaaactctaggccttactggaagccactgataggggacacttcactaccagatgtgtgcagtgcaacagatggtcatatacactgtgaggcactgaaattttgccttcagaggttctgaccagattggctgctgaaatagcccctaactttctgaaggcttgaagaggaaaaaataaagtttacatactcttgatgtgaagtgcatttaaatgtttgttggcttgttgcagttctatgaaacagagctgttaataatggttatgtggattactgtgatttgaaaactaaattcacaataacttacctagtagagatttagtgagttgtttcctttaaagaattttacactacatattttaatagtaaacagggatcacttttcctttagcattcagaatgacaccatattcttaaatatactccttccctgaagcgtgtttgtgtgtgatgccatatttctttttcaggtaaatgtagtcttccttataaaaatgaaattaaacctatgctctcaattcttttatattctaacaataaataaaaaagaaaagattactgactgtgcattgtacctgtatttatagtttatggttatcaggaagctctgtaagaaagaaaaggtcagcctcccaggcaaaccagtagtggaggttttacatttgtttgcacatctcagtatatttctgttgaggtaaagtttgcacagtcatctgacttctgatcaagcattagattttaacttgtttagattttgtcttaaacaccagtaatatggctcttgtttatcagctaatcttgaatttattctgtggtaaatcttttgagttgttgagtatatttgagattgattggattcaacctcttgttgaactgaaaacttaattttttctctgtatttttgttacaaagccactgatacgtgcacaattgtaattaagtatgttgcagttgtaaatattagagtttaatctcatgctctacctttatttagcaattacctaatttgccagtagctttataatttttaaagataattgttcattattttgtcaatgttatttgaacttggggtacttaggagcctctttgtagggactgtgcctaggtagcatgtcctaacatttgttctggtcttgcataacttcagtaatctttgtcattatatgtaactttgttgctctgtatggcataatattgtatccataaacatggtaattttgatacagttatacttttacagtggtacataatccaaggactagtatagaattaagctgagtgcaagatgagggagggaagggctttcttggtaatttagatgtgaaacctctacagagctatcatgtaaaaactacataaggtggttgtgctactgtataattgggggtgataataccaggaattttaataagattttgtaaagaatatccagaaaagtagtgaacttattttcagtagacatagaaaacaatgtgaatatttaaggtctgtgactatagttaaacttcactaagaatttgcagaattgttttgagatgtgtgaataaaggtaattttattgaatcttcattggtgctaatgatggacagttaaaaagatagctagtgtatattgttatgggtcagtacttattagtacttccaaaattgaatttgaaatgctatgtattcacttttcactctgtaaatgtaattctttacaatgactttatttattaaagggcagccagttgtcatttttacaggattgtgtgagctattcaaactcttcaacccctgaacagggtattaagcttccaaaataatgatggggataaatatggaaatcctttttaagttgtatttccattaaacaaaaacccttataattcatactatcatgaatttgctttatccatctcatttgcataacagttcatctgtctggtcccattaggctctaccaaagaaagactctgatgagtggacattattactgtgactcttgtaagtagccataaataaaccaaaatagtatcaaatttaggtatgaaattccacatgtgcaaagtactgttaaggtgataacatttttgatgagatttaaaaaaatatttgaaatattaaaaagcattatctttaaacatcctaaaaaagagtgagtcatttttaagttgtgttttccctagatcactgatttgttacctttacacagaagcacattgcaaagaaaggctttatttctacctcttccattcagttttccaatattgagctgtgtccctctgaatatttgccttagctatttcaaaataggtatnttcagaaccaaagcaaagggtggtttgttactgaaacattcttagaggcctacttaacgggcggcagtatccggtagtggtaaaacctcacagtttcctaattgcaggtatgtaaataccaaaaaagtcctgttgtcagccctaggtttatctttgaaagcagttaaatgtgcaccttggtcttcctccgtgtgttcagattccttctggttaaagttcttattcagagtcatctaaaagaaatttctaacatgatgtatggtttcttgaatgtcatgagtggctgcgtatattgctttgtagcaacagattgtattaataattaatagaatacctaatttttttggcctatcctctttgaactagaaatgactacttgagggctatttcagagaaccaatatgaaatgtttttgttagtacaaaataccattgccttaaaaggtttcaagcacattttcttttctatttgagaacttaaattgctgacttgtattcgttaagcaaccttagaaataaaccactgcttatatctgcatgaatattatgcatttcatgcgtacagttagttgattagatatttcagggttttgcattttctatagacatggggacttttttaacatggtaacgtcttaggaaaaccattctctcaaggtattacaccatttccaattttatccaaatgaaaagcatatctgcttaaatttaggatgtctttgctgagaatatttggaggctcttgttaggaagaatcatggattcagtatttctaacctgattactgcctcagaggctgtcttgaagggagncagtaggattcactgactacctttacccagatgagggatcaacaaatctcacacttaaactaaatgagttgacaggacaataggtgctaatctcatgtgccctaagatggacttatttagatagggatttttgcattggaaaagcagcacattctctgaccttgggtaccaagctatgatactaatttgagaatcacattctgatacgttaatatcagaaatcagtgagcaacctaattgctgtaagctgacatacatggaagccgaaatcaaaaggttgcttttgttagtttccctggagcatctatttttgtaatacattttgccagtgggactgaaaagctcaaaatgttttagacctaatatcatacattaattttctgctctgcagtgtcaatttgggcacagccagtttttacctctgtggcaccttctttataatttactgttacctattctgcctgacagattgattaagtaggttgataagatccatcgaagattgaatggctaggagtaattctgttctcgtataggcaacttaacttcactgtggaatccatttatctcaaagtttgagggctgtctactttattttcaagtttggggcggaaactcaaaatcccgagcattgccactttagtagtttgtttgatttgcctattgtttaataatgagtacattcttattaagtgatgagtacattcttaattttaaggtatgtttttttcaagcagcttcattttattaggaaaaatacatactcatttgttgtaaacagtgattgtggggtttcattttctgaatgtactcaaaactcccaacaacaattgaacaggatgtttgctaatagaaaatctaaaacaggaatatgtgtatatggcatgaattagtcattgactttaagcttcttatccatacaaggaactaataaaatgtttattgacaacataaaaaaaaggct

SEQ ID NO: 398803 - DNA, 7239 bp, Homo sapiens
  misc_feature (5464)..(5464): n is a, c, g, or t
  misc_feature (6275)..(6275): n is a, c, g, or t
aatttgtctttttgagtggatcattggggagaagggaccaaaccagctttgtatggtccctaatttcttgtgacactgataagttttatttacaatttcacattggcaaatactgctatattttctcaaatatctgttgttggtatttaacctctatccccagtaattctgaacagcaacataaaaagacttaaatttggaactttgattagaaaaggctagctgtgacacatatttcatgccccatatttggcatatagtggaaggagaaaggtagtatttttgcagtatttaataacattgagccttgaagctgtttggcaaaaggtaagtttcctttgtggctttgctgaaaaacaaggcatagatttacatagatacgtgtttaattctctgcttcactaaagaaagcaaatgcctattaagccacttcagttgggataatccctgattattgtgagattgaaattactttgtcaattttacaaatagtttttatctttccatttacatatttaccatgacattacaaaagaaaaataccacaaaaaatttacagtgttatctatatagtgattattgcaaatatactatcctcctctccttttataaaatacttcaattttagatgtaaaaacaaaattttaaatattaatatattagtaatatactcgggagtgagtgaggggaaatgttcattttatgtagattttttagtactagaattttataacttagcttttaatttaataaaataaggttttatactctagacttaaagatagagtttaaattttgctctaatcttactggtaaatgtttttctttgttttacatacttgaatttttatggctctccattttcaaacctgctctgcaacagtctgcatcttacaaccttctgtcttcagtacaaaccaacagtgatagcatgtgtatgcattcatttggcttgcaaatggtccaattgggagatccctgtatcaactgatggaaagcattggtgggaatatgtggatcctacagttactctagaattattagatgagctaacacatgagtttctacaaatattggagaaaacgcctaataggttgaagaagattcgaaactggagggctaatcaggcagctaggaaaccaaaagtagatggacaggtatcagagacaccacttcttggttcatctttggtccagaattccattttagtagatagtgtcactggtgtgcctacaaacccaagttttcagaaaccatctacatcagcattccctgcgccagtacctctaaattcaggaaatatttctgttcaagacagccatacatctgataatttgtcaatgctagcaacaggaatgccaagtacttcatacggtttatcatcacaccaggaatggcctcaacatcaagactcagcaaggacagaacagctatattcacagaaacaggagacatctttgtctggtagccagtacaacatcaacttccagcagggaccttctatatcactgcattcaggattacatcacagacctgacaaaatttcagatcattcttctgttaagcaagaatatactcataaagcagggagcagtaaacaccatgggccaatttccactactccaggaataattcctcagaaaatgtctttagataaatatagagaaaagcgtaaactagaaactcttgatctcgatgtaagggatcattatatagctgcccaggtagaacagcagcacaaacaagggcagtcacaggcagccagcagcagttctgttacttctcccattaaaatgaaaatacctatcgcaaatactgaaaaatacatggcagataaaaaggaaaagagtgggtcactgaaattacggattccaataccacccactgataaaagcgccagtaaagaagaactgaaaatgaaaataaaagtttcttcttcagaaagacacagctcttctgatgaaggcagtgggaaaagcaaacattcaagcccacatattagcagagaccataaggagaagcacaaggagcatccttcaagccgccaccacaccagcagccacaagcattcccactcgcatagtggcagcagcagcggtggcagtaaacacagtgccgacggaataccacccactgttctgaggagtcctgttggcctgagcagtgatggcatttcctctagctccagctcttcaaggaagaggctgcatgtcaatgatgcatctcacaaccaccactccaaaatgagcaaaagttccaaaagttcaggtagttcatctagttcttcctcctctgttaagcagtatatatcctctcacaactctgtttttaaccatcccttaccccctcctccccctgtcacataccaggtgggctacggacatctcagcaccctcgtgaaactggacaagaagccagtggagaccaacggtcctgatgccaatcacgagtacagtacaagcagccagcatatggactacaaagacacattcgacatgctggactcactgttaagtgcccaaggaatgaacatgtaataatttgtttaggtcaatttttcctttacttttttaatttaaaaattgttagaatggaaaaattccttctgatctagcagtggtaacccctgctgttgctgccactgcttcaatatttgtaagtgctgctttattcttcattctgaaaagaagagattatagtaaacaagtctttatctccacatatgatagtgttataaatactgtaaaagcatggaaggtgcaaaactcagtatttctacaattgcagctaagaacattaggatgaatggctggctgcttctaggaatataagatgcctcaagcattcattatttatgatttgaatactgtagctattttttgttgcttggcttttgaatgagtgtaaattgttttcttttgtgtatttatacttgtatgtatgatttgcatgtttcaatgataaagggataaaacagtatactgacaactgtttacaagaaagtggagaaaaatgtacatacatttttgtatgtttagatattaccgtaaatactcaggattggagctgcttgtaagtataacaatatacagaataactttattttatcttgtcagagtccatcactaatctaaaacaaaggtggcacttttttatgttaaccttaaactctaggccttactggaagccactgataggggacacttcactaccagatgtgtgcagtgcaacagatggtcatatacactgtgaggcactgaaattttgccttcagaggttctgaccagattggctgctgaaatagcccctaactttctgaaggcttgaagaggaaaaaataaagtttacatactcttgatgtgaagtgcatttaaatgtttgttggcttgttgcagttctatgaaacagagctgttaataatggttatgtggattactgtgatttgaaaactaaattcacaataacttacctagtagagatttagtgagttgtttcctttaaagaattttacactacatattttaatagtaaacagggatcacttttcctttagcattcagaatgacaccatattcttaaatatactccttccctgaagcgtgtttgtgtgtgatgccatatttctttttcaggtaaatgtagtcttccttataaaaatgaaattaaacctatgctctcaattcttttatattctaacaataaataaaaaagaaaagattactgactgtgcattgtacctgtatttatagtttatggttatcaggaagctctgtaagaaagaaaaggtcagcctcccaggcaaaccagtagtggaggttttacatttgtttgcacatctcagtatatttctgttgaggtaaagtttgcacagtcatctgacttctgatcaagcattagattttaacttgtttagattttgtcttaaacaccagtaatatggctcttgtttatcagctaatcttgaatttattctgtggtaaatcttttgagttgttgagtatatttgagattgattggattcaacctcttgttgaactgaaaacttaattttttctctgtatttttgttacaaagccactgatacgtgcacaattgtaattaagtatgttgcagttgtaaatattagagtttaatctcatgctctacctttatttagcaattacctaatttgccagtagctttataatttttaaagataattgttcattattttgtcaatgttatttgaacttggggtacttaggagcctctttgtagggactgtgcctaggtagcatgtcctaacatttgttctggtcttgcataacttcagtaatctttgtcattatatgtaactttgttgctctgtatggcataatattgtatccataaacatggtaattttgatacagttatacttttacagtggtacataatccaaggactagtatagaattaagctgagtgcaagatgagggagggaagggctttcttggtaatttagatgtgaaacctctacagagctatcatgtaaaaactacataaggtggttgtgctactgtataattgggggtgataataccaggaattttaataagattttgtaaagaatatccagaaaagtagtgaacttattttcagtagacatagaaaacaatgtgaatatttaaggtctgtgactatagttaaacttcactaagaatttgcagaattgttttgagatgtgtgaataaaggtaattttattgaatcttcattggtgctaatgatggacagttaaaaagatagctagtgtatattgttatgggtcagtacttattagtacttccaaaattgaatttgaaatgctatgtattcacttttcactctgtaaatgtaattctttacaatgactttatttattaaagggcagccagttgtcatttttacaggattgtgtgagctattcaaactcttcaacccctgaacagggtattaagcttccaaaataatgatggggataaatatggaaatcctttttaagttgtatttccattaaacaaaaacccttataattcatactatcatgaatttgctttatccatctcatttgcataacagttcatctgtctggtcccattaggctctaccaaagaaagactctgatgagtggacattattactgtgactcttgtaagtagccataaataaaccaaaatagtatcaaatttaggtatgaaattccacatgtgcaaagtactgttaaggtgataacatttttgatgagatttaaaaaaatatttgaaatattaaaaagcattatctttaaacatcctaaaaaagagtgagtcatttttaagttgtgttttccctagatcactgatttgttacctttacacagaagcacattgcaaagaaaggctttatttctacctcttccattcagttttccaatattgagctgtgtccctctgaatatttgccttagctatttcaaaataggtatnttcagaaccaaagcaaagggtggtttgttactgaaacattcttagaggcctacttaacgggcggcagtatccggtagtggtaaaacctcacagtttcctaattgcaggtatgtaaataccaaaaaagtcctgttgtcagccctaggtttatctttgaaagcagttaaatgtgcaccttggtcttcctccgtgtgttcagattccttctggttaaagttcttattcagagtcatctaaaagaaatttctaacatgatgtatggtttcttgaatgtcatgagtggctgcgtatattgctttgtagcaacagattgtattaataattaatagaatacctaatttttttggcctatcctctttgaactagaaatgactacttgagggctatttcagagaaccaatatgaaatgtttttgttagtacaaaataccattgccttaaaaggtttcaagcacattttcttttctatttgagaacttaaattgctgacttgtattcgttaagcaaccttagaaataaaccactgcttatatctgcatgaatattatgcatttcatgcgtacagttagttgattagatatttcagggttttgcattttctatagacatggggacttttttaacatggtaacgtcttaggaaaaccattctctcaaggtattacaccatttccaattttatccaaatgaaaagcatatctgcttaaatttaggatgtctttgctgagaatatttggaggctcttgttaggaagaatcatggattcagtatttctaacctgattactgcctcagaggctgtcttgaagggagncagtaggattcactgactacctttacccagatgagggatcaacaaatctcacacttaaactaaatgagttgacaggacaataggtgctaatctcatgtgccctaagatggacttatttagatagggatttttgcattggaaaagcagcacattctctgaccttgggtaccaagctatgatactaatttgagaatcacattctgatacgttaatatcagaaatcagtgagcaacctaattgctgtaagctgacatacatggaagccgaaatcaaaaggttgcttttgttagtttccctggagcatctatttttgtaatacattttgccagtgggactgaaaagctcaaaatgttttagacctaatatcatacattaattttctgctctgcagtgtcaatttgggcacagccagtttttacctctgtggcaccttctttataatttactgttacctattctgcctgacagattgattaagtaggttgataagatccatcgaagattgaatggctaggagtaattctgttctcgtataggcaacttaacttcactgtggaatccatttatctcaaagtttgagggctgtctactttattttcaagtttggggcggaaactcaaaatcccgagcattgccactttagtagtttgtttgatttgcctattgtttaataatgagtacattcttattaagtgatgagtacattcttaattttaaggtatgtttttttcaagcagcttcattttattaggaaaaatacatactcatttgttgtaaacagtgattgtggggtttcattttctgaatgtactcaaaactcccaacaacaattgaacaggatgtttgctaatagaaaatctaaaacaggaatatgtgtatatggcatgaattagtcattgactttaagcttcttatccatacaaggaactaataaaatgtttattgacaacataaaaaaaaggct

SEQ ID NO: 398804 - DNA, 7442 bp, Homo sapiens
  misc_feature (5667)..(5667): n is a, c, g, or t
  misc_feature (6478)..(6478): n is a, c, g, or t
tgaatgaaggagcgggcggaggaggaagtgtcatggcgtcgggccgtggagcttcttctcgctggttctttactcgggaacagctggagaacacgccgagccgccgctgcggagtggaggcggataaagagctctcgtgccgccagcaggcggccaacctcatccaggagatgggacagcgtctcaatgtctctcagcttacaataaacactgcgattgtttatatgcacaggttttatatgcaccattctttcaccaaattcaacaaaaatataatatcgtctactgcattatttttggctgcaaaagtggaagaacaggctcgaaaacttgaacatgttatcaaagtagcacatgcttgtcttcatcctctagagccactgctggatactaaatgtgatgcttaccttcaacagactcaagaactggttatacttgaaaccataatgctacaaactctaggttttgagatcaccattgaacacccacacacagatgtggtgaaatgtacccagttagtaagaggagaatgctttattgcaacttttagctgactagatgcttaacttagtaacaagtttagcccttgtaactggctagctaaaagcaaatcggcttgtttctcagatctttgggggatagcaagaaacatttgagtgaatgttgttgaagattttcagtagtatagaaaatgatggcgctcttgtgatatttgtaagtacaagcaaggatttggcacagacatcctatttcatggctaccaacaggttgttatcctgaccctctttgttgcactgttgtagcacactatagcttcctttaatgcagggccccctcaatgtgtctcttacccttgttgcgacaggagactggaccatctactgtggtggtaccttcctgtttgctttgcggtgtattgtacaagggactttgggcacagaggggttaaatgcacaatgtgaagtgtagtggtgctttctgatgacatattctcgatttgtgagtgcataagtctaaaattggtagcctgaatagcagctaaagattacaaagagctaaacttaacgtagaaattcgagcaacttgtctgcatcttacaaccttctgtcttcagtacaaaccaacagtgatagcatgtgtatgcattcatttggcttgcaaatggtccaattgggagatccctgtatcaactgatggaaagcattggtgggaatatgtggatcctacagttactctagaattattagatgagctaacacatgagtttctacaaatattggagaaaacgcctaataggttgaagaagattcgaaactggagggctaatcaggcagctaggaaaccaaaagtagatggacaggtatcagagacaccacttcttggttcatctttggtccagaattccattttagtagatagtgtcactggtgtgcctacaaacccaagttttcagaaaccatctacatcagcattccctgcgccagtacctctaaattcaggaaatatttctgttcaagacagccatacatctgataatttgtcaatgctagcaacaggaatgccaagtacttcatacggtttatcatcacaccaggaatggcctcaacatcaagactcagcaaggacagaacagctatattcacagaaacaggagacatctttgtctggtagccagtacaacatcaacttccagcagggaccttctatatcactgcattcaggattacatcacagacctgacaaaatttcagatcattcttctgttaagcaagaatatactcataaagcagggagcagtaaacaccatgggccaatttccactactccaggaataattcctcagaaaatgtctttagataaatatagagaaaagcgtaaactagaaactcttgatctcgatgtaagggatcattatatagctgcccaggtagaacagcagcacaaacaagggcagtcacaggcagccagcagcagttctgttacttctcccattaaaatgaaaatacctatcgcaaatactgaaaaatacatggcagataaaaaggaaaagagtgggtcactgaaattacggattccaataccacccactgataaaagcgccagtaaagaagaactgaaaatgaaaataaaagtttcttcttcagaaagacacagctcttctgatgaaggcagtgggaaaagcaaacattcaagcccacatattagcagagaccataaggagaagcacaaggagcatccttcaagccgccaccacaccagcagccacaagcattcccactcgcatagtggcagcagcagcggtggcagtaaacacagtgccgacggaataccacccactgttctgaggagtcctgttggcctgagcagtgatggcatttcctctagctccagctcttcaaggaagaggctgcatgtcaatgatgcatctcacaaccaccactccaaaatgagcaaaagttccaaaagttcaggtagttcatctagttcttcctcctctgttaagcagtatatatcctctcacaactctgtttttaaccatcccttaccccctcctccccctgtcacataccaggtgggctacggacatctcagcaccctcgtgaaactggacaagaagccagtggagaccaacggtcctgatgccaatcacgagtacagtacaagcagccagcatatggactacaaagacacattcgacatgctggactcactgttaagtgcccaaggaatgaacatgtaataatttgtttaggtcaatttttcctttacttttttaatttaaaaattgttagaatggaaaaattccttctgatctagcagtggtaacccctgctgttgctgccactgcttcaatatttgtaagtgctgctttattcttcattctgaaaagaagagattatagtaaacaagtctttatctccacatatgatagtgttataaatactgtaaaagcatggaaggtgcaaaactcagtatttctacaattgcagctaagaacattaggatgaatggctggctgcttctaggaatataagatgcctcaagcattcattatttatgatttgaatactgtagctattttttgttgcttggcttttgaatgagtgtaaattgttttcttttgtgtatttatacttgtatgtatgatttgcatgtttcaatgataaagggataaaacagtatactgacaactgtttacaagaaagtggagaaaaatgtacatacatttttgtatgtttagatattaccgtaaatactcaggattggagctgcttgtaagtataacaatatacagaataactttattttatcttgtcagagtccatcactaatctaaaacaaaggtggcacttttttatgttaaccttaaactctaggccttactggaagccactgataggggacacttcactaccagatgtgtgcagtgcaacagatggtcatatacactgtgaggcactgaaattttgccttcagaggttctgaccagattggctgctgaaatagcccctaactttctgaaggcttgaagaggaaaaaataaagtttacatactcttgatgtgaagtgcatttaaatgtttgttggcttgttgcagttctatgaaacagagctgttaataatggttatgtggattactgtgatttgaaaactaaattcacaataacttacctagtagagatttagtgagttgtttcctttaaagaattttacactacatattttaatagtaaacagggatcacttttcctttagcattcagaatgacaccatattcttaaatatactccttccctgaagcgtgtttgtgtgtgatgccatatttctttttcaggtaaatgtagtcttccttataaaaatgaaattaaacctatgctctcaattcttttatattctaacaataaataaaaaagaaaagattactgactgtgcattgtacctgtatttatagtttatggttatcaggaagctctgtaagaaagaaaaggtcagcctcccaggcaaaccagtagtggaggttttacatttgtttgcacatctcagtatatttctgttgaggtaaagtttgcacagtcatctgacttctgatcaagcattagattttaacttgtttagattttgtcttaaacaccagtaatatggctcttgtttatcagctaatcttgaatttattctgtggtaaatcttttgagttgttgagtatatttgagattgattggattcaacctcttgttgaactgaaaacttaattttttctctgtatttttgttacaaagccactgatacgtgcacaattgtaattaagtatgttgcagttgtaaatattagagtttaatctcatgctctacctttatttagcaattacctaatttgccagtagctttataatttttaaagataattgttcattattttgtcaatgttatttgaacttggggtacttaggagcctctttgtagggactgtgcctaggtagcatgtcctaacatttgttctggtcttgcataacttcagtaatctttgtcattatatgtaactttgttgctctgtatggcataatattgtatccataaacatggtaattttgatacagttatacttttacagtggtacataatccaaggactagtatagaattaagctgagtgcaagatgagggagggaagggctttcttggtaatttagatgtgaaacctctacagagctatcatgtaaaaactacataaggtggttgtgctactgtataattgggggtgataataccaggaattttaataagattttgtaaagaatatccagaaaagtagtgaacttattttcagtagacatagaaaacaatgtgaatatttaaggtctgtgactatagttaaacttcactaagaatttgcagaattgttttgagatgtgtgaataaaggtaattttattgaatcttcattggtgctaatgatggacagttaaaaagatagctagtgtatattgttatgggtcagtacttattagtacttccaaaattgaatttgaaatgctatgtattcacttttcactctgtaaatgtaattctttacaatgactttatttattaaagggcagccagttgtcatttttacaggattgtgtgagctattcaaactcttcaacccctgaacagggtattaagcttccaaaataatgatggggataaatatggaaatcctttttaagttgtatttccattaaacaaaaacccttataattcatactatcatgaatttgctttatccatctcatttgcataacagttcatctgtctggtcccattaggctctaccaaagaaagactctgatgagtggacattattactgtgactcttgtaagtagccataaataaaccaaaatagtatcaaatttaggtatgaaattccacatgtgcaaagtactgttaaggtgataacatttttgatgagatttaaaaaaatatttgaaatattaaaaagcattatctttaaacatcctaaaaaagagtgagtcatttttaagttgtgttttccctagatcactgatttgttacctttacacagaagcacattgcaaagaaaggctttatttctacctcttccattcagttttccaatattgagctgtgtccctctgaatatttgccttagctatttcaaaataggtatnttcagaaccaaagcaaagggtggtttgttactgaaacattcttagaggcctacttaacgggcggcagtatccggtagtggtaaaacctcacagtttcctaattgcaggtatgtaaataccaaaaaagtcctgttgtcagccctaggtttatctttgaaagcagttaaatgtgcaccttggtcttcctccgtgtgttcagattccttctggttaaagttcttattcagagtcatctaaaagaaatttctaacatgatgtatggtttcttgaatgtcatgagtggctgcgtatattgctttgtagcaacagattgtattaataattaatagaatacctaatttttttggcctatcctctttgaactagaaatgactacttgagggctatttcagagaaccaatatgaaatgtttttgttagtacaaaataccattgccttaaaaggtttcaagcacattttcttttctatttgagaacttaaattgctgacttgtattcgttaagcaaccttagaaataaaccactgcttatatctgcatgaatattatgcatttcatgcgtacagttagttgattagatatttcagggttttgcattttctatagacatggggacttttttaacatggtaacgtcttaggaaaaccattctctcaaggtattacaccatttccaattttatccaaatgaaaagcatatctgcttaaatttaggatgtctttgctgagaatatttggaggctcttgttaggaagaatcatggattcagtatttctaacctgattactgcctcagaggctgtcttgaagggagncagtaggattcactgactacctttacccagatgagggatcaacaaatctcacacttaaactaaatgagttgacaggacaataggtgctaatctcatgtgccctaagatggacttatttagatagggatttttgcattggaaaagcagcacattctctgaccttgggtaccaagctatgatactaatttgagaatcacattctgatacgttaatatcagaaatcagtgagcaacctaattgctgtaagctgacatacatggaagccgaaatcaaaaggttgcttttgttagtttccctggagcatctatttttgtaatacattttgccagtgggactgaaaagctcaaaatgttttagacctaatatcatacattaattttctgctctgcagtgtcaatttgggcacagccagtttttacctctgtggcaccttctttataatttactgttacctattctgcctgacagattgattaagtaggttgataagatccatcgaagattgaatggctaggagtaattctgttctcgtataggcaacttaacttcactgtggaatccatttatctcaaagtttgagggctgtctactttattttcaagtttggggcggaaactcaaaatcccgagcattgccactttagtagtttgtttgatttgcctattgtttaataatgagtacattcttattaagtgatgagtacattcttaattttaaggtatgtttttttcaagcagcttcattttattaggaaaaatacatactcatttgttgtaaacagtgattgtggggtttcattttctgaatgtactcaaaactcccaacaacaattgaacaggatgtttgctaatagaaaatctaaaacaggaatatgtgtatatggcatgaattagtcattgactttaagcttcttatccatacaaggaactaataaaatgtttattgacaacataaaaaaaaggct

SEQ ID NO: 398805 - DNA, 7021 bp, Homo sapiens
  misc_feature (5246)..(5246): n is a, c, g, or t
  misc_feature (6057)..(6057): n is a, c, g, or t
tgaatgaaggagcgggcggaggaggaagtgtcatggcgtcgggccgtggagcttcttctcgctggttctttactcgggaacagctggagaacacgccgagccgccgctgcggagtggaggcggataaagagctctcgtgccgccagcaggcggccaacctcatccaggagatgggacagcgtctcaatgtctctcagcttacaataaacactgcgattgtttatatgcacaggttttatatgcaccattctttcaccaaattcaacaaaaatataatatcgtctactgcattatttttggctgcaaaagtggaagaacaggctcgaaaacttgaacatgttatcaaagtagcacatgcttgtcttcatcctctagagccactgctggatactaaatgtgatgcttaccttcaacagactcaagaactggttatacttgaaaccataatgctacaaactctaggttttgagatcaccattgaacacccacacacagatgtggtgaaatgtacccagttagtaagagatctttgggggatagcaagaaacatttgagtgaatgttgttgaagattttcagtagtatagaaaatgatggcgctcttgtgatatttgtaagtacaagcaaggatttggcacagacatcctatttcatggctaccaacagtctgcatcttacaaccttctgtcttcagtacaaaccaacagtgatagcatgtgtatgcattcatttggcttgcaaatggtccaattgggagatccctgtatcaactgatggaaagcattggtgggaatatgtggatcctacagttactctagaattattagatgagctaacacatgagtttctacaaatattggagaaaacgcctaataggttgaagaagattcgaaactggagggctaatcaggcagctaggaaaccaaaagtagatggacaggtatcagagacaccacttcttggttcatctttggtccagaattccattttagtagatagtgtcactggtgtgcctacaaacccaagttttcagaaaccatctacatcagcattccctgcgccagtacctctaaattcaggaaatatttctgttcaagacagccatacatctgataatttgtcaatgctagcaacaggaatgccaagtacttcatacggtttatcatcacaccaggaatggcctcaacatcaagactcagcaaggacagaacagctatattcacagaaacaggagacatctttgtctggtagccagtacaacatcaacttccagcagggaccttctatatcactgcattcaggattacatcacagacctgacaaaatttcagatcattcttctgttaagcaagaatatactcataaagcagggagcagtaaacaccatgggccaatttccactactccaggaataattcctcagaaaatgtctttagataaatatagagaaaagcgtaaactagaaactcttgatctcgatgtaagggatcattatatagctgcccaggtagaacagcagcacaaacaagggcagtcacaggcagccagcagcagttctgttacttctcccattaaaatgaaaatacctatcgcaaatactgaaaaatacatggcagataaaaaggaaaagagtgggtcactgaaattacggattccaataccacccactgataaaagcgccagtaaagaagaactgaaaatgaaaataaaagtttcttcttcagaaagacacagctcttctgatgaaggcagtgggaaaagcaaacattcaagcccacatattagcagagaccataaggagaagcacaaggagcatccttcaagccgccaccacaccagcagccacaagcattcccactcgcatagtggcagcagcagcggtggcagtaaacacagtgccgacggaataccacccactgttctgaggagtcctgttggcctgagcagtgatggcatttcctctagctccagctcttcaaggaagaggctgcatgtcaatgatgcatctcacaaccaccactccaaaatgagcaaaagttccaaaagttcaggtagttcatctagttcttcctcctctgttaagcagtatatatcctctcacaactctgtttttaaccatcccttaccccctcctccccctgtcacataccaggtgggctacggacatctcagcaccctcgtgaaactggacaagaagccagtggagaccaacggtcctgatgccaatcacgagtacagtacaagcagccagcatatggactacaaagacacattcgacatgctggactcactgttaagtgcccaaggaatgaacatgtaataatttgtttaggtcaatttttcctttacttttttaatttaaaaattgttagaatggaaaaattccttctgatctagcagtggtaacccctgctgttgctgccactgcttcaatatttgtaagtgctgctttattcttcattctgaaaagaagagattatagtaaacaagtctttatctccacatatgatagtgttataaatactgtaaaagcatggaaggtgcaaaactcagtatttctacaattgcagctaagaacattaggatgaatggctggctgcttctaggaatataagatgcctcaagcattcattatttatgatttgaatactgtagctattttttgttgcttggcttttgaatgagtgtaaattgttttcttttgtgtatttatacttgtatgtatgatttgcatgtttcaatgataaagggataaaacagtatactgacaactgtttacaagaaagtggagaaaaatgtacatacatttttgtatgtttagatattaccgtaaatactcaggattggagctgcttgtaagtataacaatatacagaataactttattttatcttgtcagagtccatcactaatctaaaacaaaggtggcacttttttatgttaaccttaaactctaggccttactggaagccactgataggggacacttcactaccagatgtgtgcagtgcaacagatggtcatatacactgtgaggcactgaaattttgccttcagaggttctgaccagattggctgctgaaatagcccctaactttctgaaggcttgaagaggaaaaaataaagtttacatactcttgatgtgaagtgcatttaaatgtttgttggcttgttgcagttctatgaaacagagctgttaataatggttatgtggattactgtgatttgaaaactaaattcacaataacttacctagtagagatttagtgagttgtttcctttaaagaattttacactacatattttaatagtaaacagggatcacttttcctttagcattcagaatgacaccatattcttaaatatactccttccctgaagcgtgtttgtgtgtgatgccatatttctttttcaggtaaatgtagtcttccttataaaaatgaaattaaacctatgctctcaattcttttatattctaacaataaataaaaaagaaaagattactgactgtgcattgtacctgtatttatagtttatggttatcaggaagctctgtaagaaagaaaaggtcagcctcccaggcaaaccagtagtggaggttttacatttgtttgcacatctcagtatatttctgttgaggtaaagtttgcacagtcatctgacttctgatcaagcattagattttaacttgtttagattttgtcttaaacaccagtaatatggctcttgtttatcagctaatcttgaatttattctgtggtaaatcttttgagttgttgagtatatttgagattgattggattcaacctcttgttgaactgaaaacttaattttttctctgtatttttgttacaaagccactgatacgtgcacaattgtaattaagtatgttgcagttgtaaatattagagtttaatctcatgctctacctttatttagcaattacctaatttgccagtagctttataatttttaaagataattgttcattattttgtcaatgttatttgaacttggggtacttaggagcctctttgtagggactgtgcctaggtagcatgtcctaacatttgttctggtcttgcataacttcagtaatctttgtcattatatgtaactttgttgctctgtatggcataatattgtatccataaacatggtaattttgatacagttatacttttacagtggtacataatccaaggactagtatagaattaagctgagtgcaagatgagggagggaagggctttcttggtaatttagatgtgaaacctctacagagctatcatgtaaaaactacataaggtggttgtgctactgtataattgggggtgataataccaggaattttaataagattttgtaaagaatatccagaaaagtagtgaacttattttcagtagacatagaaaacaatgtgaatatttaaggtctgtgactatagttaaacttcactaagaatttgcagaattgttttgagatgtgtgaataaaggtaattttattgaatcttcattggtgctaatgatggacagttaaaaagatagctagtgtatattgttatgggtcagtacttattagtacttccaaaattgaatttgaaatgctatgtattcacttttcactctgtaaatgtaattctttacaatgactttatttattaaagggcagccagttgtcatttttacaggattgtgtgagctattcaaactcttcaacccctgaacagggtattaagcttccaaaataatgatggggataaatatggaaatcctttttaagttgtatttccattaaacaaaaacccttataattcatactatcatgaatttgctttatccatctcatttgcataacagttcatctgtctggtcccattaggctctaccaaagaaagactctgatgagtggacattattactgtgactcttgtaagtagccataaataaaccaaaatagtatcaaatttaggtatgaaattccacatgtgcaaagtactgttaaggtgataacatttttgatgagatttaaaaaaatatttgaaatattaaaaagcattatctttaaacatcctaaaaaagagtgagtcatttttaagttgtgttttccctagatcactgatttgttacctttacacagaagcacattgcaaagaaaggctttatttctacctcttccattcagttttccaatattgagctgtgtccctctgaatatttgccttagctatttcaaaataggtatnttcagaaccaaagcaaagggtggtttgttactgaaacattcttagaggcctacttaacgggcggcagtatccggtagtggtaaaacctcacagtttcctaattgcaggtatgtaaataccaaaaaagtcctgttgtcagccctaggtttatctttgaaagcagttaaatgtgcaccttggtcttcctccgtgtgttcagattccttctggttaaagttcttattcagagtcatctaaaagaaatttctaacatgatgtatggtttcttgaatgtcatgagtggctgcgtatattgctttgtagcaacagattgtattaataattaatagaatacctaatttttttggcctatcctctttgaactagaaatgactacttgagggctatttcagagaaccaatatgaaatgtttttgttagtacaaaataccattgccttaaaaggtttcaagcacattttcttttctatttgagaacttaaattgctgacttgtattcgttaagcaaccttagaaataaaccactgcttatatctgcatgaatattatgcatttcatgcgtacagttagttgattagatatttcagggttttgcattttctatagacatggggacttttttaacatggtaacgtcttaggaaaaccattctctcaaggtattacaccatttccaattttatccaaatgaaaagcatatctgcttaaatttaggatgtctttgctgagaatatttggaggctcttgttaggaagaatcatggattcagtatttctaacctgattactgcctcagaggctgtcttgaagggagncagtaggattcactgactacctttacccagatgagggatcaacaaatctcacacttaaactaaatgagttgacaggacaataggtgctaatctcatgtgccctaagatggacttatttagatagggatttttgcattggaaaagcagcacattctctgaccttgggtaccaagctatgatactaatttgagaatcacattctgatacgttaatatcagaaatcagtgagcaacctaattgctgtaagctgacatacatggaagccgaaatcaaaaggttgcttttgttagtttccctggagcatctatttttgtaatacattttgccagtgggactgaaaagctcaaaatgttttagacctaatatcatacattaattttctgctctgcagtgtcaatttgggcacagccagtttttacctctgtggcaccttctttataatttactgttacctattctgcctgacagattgattaagtaggttgataagatccatcgaagattgaatggctaggagtaattctgttctcgtataggcaacttaacttcactgtggaatccatttatctcaaagtttgagggctgtctactttattttcaagtttggggcggaaactcaaaatcccgagcattgccactttagtagtttgtttgatttgcctattgtttaataatgagtacattcttattaagtgatgagtacattcttaattttaaggtatgtttttttcaagcagcttcattttattaggaaaaatacatactcatttgttgtaaacagtgattgtggggtttcattttctgaatgtactcaaaactcccaacaacaattgaacaggatgtttgctaatagaaaatctaaaacaggaatatgtgtatatggcatgaattagtcattgactttaagcttcttatccatacaaggaactaataaaatgtttattgacaacataaaaaaaaggct

SEQ ID NO: 398806 - DNA, 6019 bp, Homo sapiens
  misc_feature (4244)..(4244): n is a, c, g, or t
  misc_feature (5055)..(5055): n is a, c, g, or t
aatttgtctttttgagtggatcattggggagaagggaccaaaccagctttgtatggtccctaatttcttgtgacactgataagttttatttacaatttcacattggcaaatactgctatattttctcaaatatctgttgttggtatttaacctctatccccagtaattctgaacagcaacataaaaagacttaaatttggaactttgattagaaaaggctagctgtgacacatatttcatgccccatatttggcatatagtggaaggagaaaggtagtatttttgcagtatttaataacattgagccttgaagctgtttggcaaaaggtaagtttcctttgtggctttgctgaaaaacaaggcatagatttacatagatacgtgtttaattctctgcttcactaaagaaagcaaatgcctattaagccacttcagttgggataatccctgattattgtgagattgaaattactttgtcaattttacaaatagtttttatctttccatttacatatttaccatgacattacaaaagaaaaataccacaaaaaatttacagtgttatctatatagtgattattgcaaatatactatcctcctctccttttataaaatacttcaattttagatgtaaaaacaaaattttaaatattaatatattagtaatatactcgggagtgagtgaggggaaatgttcattttatgtagattttttagtactagaattttataacttagcttttaatttaataaaataaggttttatactctagacttaaagatagagtttaaattttgctctaatcttactggtaaatgtttttctttgttttacatacttgaatttttatggctctccattttcaaacctgctctgcaacagtctgcatcttacaaccttctgtcttcagtacaaaccaacagtgatagcatgtgtatgcattcatttggcttgcaaatggtccaattgggagatccctgtatcaactgatggaaagcattggtgggaatatgtggatcctacagttactctagaattattagatgagctaacacatgagtttctacaaatattggagaaaacgcctaataggttgaagaagattcgaaactggagggctaatcaggcagctaggaaaccaaaagtaggtgggctacggacatctcagcaccctcgtgaaactggacaagaagccagtggagaccaacggtcctgatgccaatcacgagtacagtacaagcagccagcatatggactacaaagacacattcgacatgctggactcactgttaagtgcccaaggaatgaacatgtaataatttgtttaggtcaatttttcctttacttttttaatttaaaaattgttagaatggaaaaattccttctgatctagcagtggtaacccctgctgttgctgccactgcttcaatatttgtaagtgctgctttattcttcattctgaaaagaagagattatagtaaacaagtctttatctccacatatgatagtgttataaatactgtaaaagcatggaaggtgcaaaactcagtatttctacaattgcagctaagaacattaggatgaatggctggctgcttctaggaatataagatgcctcaagcattcattatttatgatttgaatactgtagctattttttgttgcttggcttttgaatgagtgtaaattgttttcttttgtgtatttatacttgtatgtatgatttgcatgtttcaatgataaagggataaaacagtatactgacaactgtttacaagaaagtggagaaaaatgtacatacatttttgtatgtttagatattaccgtaaatactcaggattggagctgcttgtaagtataacaatatacagaataactttattttatcttgtcagagtccatcactaatctaaaacaaaggtggcacttttttatgttaaccttaaactctaggccttactggaagccactgataggggacacttcactaccagatgtgtgcagtgcaacagatggtcatatacactgtgaggcactgaaattttgccttcagaggttctgaccagattggctgctgaaatagcccctaactttctgaaggcttgaagaggaaaaaataaagtttacatactcttgatgtgaagtgcatttaaatgtttgttggcttgttgcagttctatgaaacagagctgttaataatggttatgtggattactgtgatttgaaaactaaattcacaataacttacctagtagagatttagtgagttgtttcctttaaagaattttacactacatattttaatagtaaacagggatcacttttcctttagcattcagaatgacaccatattcttaaatatactccttccctgaagcgtgtttgtgtgtgatgccatatttctttttcaggtaaatgtagtcttccttataaaaatgaaattaaacctatgctctcaattcttttatattctaacaataaataaaaaagaaaagattactgactgtgcattgtacctgtatttatagtttatggttatcaggaagctctgtaagaaagaaaaggtcagcctcccaggcaaaccagtagtggaggttttacatttgtttgcacatctcagtatatttctgttgaggtaaagtttgcacagtcatctgacttctgatcaagcattagattttaacttgtttagattttgtcttaaacaccagtaatatggctcttgtttatcagctaatcttgaatttattctgtggtaaatcttttgagttgttgagtatatttgagattgattggattcaacctcttgttgaactgaaaacttaattttttctctgtatttttgttacaaagccactgatacgtgcacaattgtaattaagtatgttgcagttgtaaatattagagtttaatctcatgctctacctttatttagcaattacctaatttgccagtagctttataatttttaaagataattgttcattattttgtcaatgttatttgaacttggggtacttaggagcctctttgtagggactgtgcctaggtagcatgtcctaacatttgttctggtcttgcataacttcagtaatctttgtcattatatgtaactttgttgctctgtatggcataatattgtatccataaacatggtaattttgatacagttatacttttacagtggtacataatccaaggactagtatagaattaagctgagtgcaagatgagggagggaagggctttcttggtaatttagatgtgaaacctctacagagctatcatgtaaaaactacataaggtggttgtgctactgtataattgggggtgataataccaggaattttaataagattttgtaaagaatatccagaaaagtagtgaacttattttcagtagacatagaaaacaatgtgaatatttaaggtctgtgactatagttaaacttcactaagaatttgcagaattgttttgagatgtgtgaataaaggtaattttattgaatcttcattggtgctaatgatggacagttaaaaagatagctagtgtatattgttatgggtcagtacttattagtacttccaaaattgaatttgaaatgctatgtattcacttttcactctgtaaatgtaattctttacaatgactttatttattaaagggcagccagttgtcatttttacaggattgtgtgagctattcaaactcttcaacccctgaacagggtattaagcttccaaaataatgatggggataaatatggaaatcctttttaagttgtatttccattaaacaaaaacccttataattcatactatcatgaatttgctttatccatctcatttgcataacagttcatctgtctggtcccattaggctctaccaaagaaagactctgatgagtggacattattactgtgactcttgtaagtagccataaataaaccaaaatagtatcaaatttaggtatgaaattccacatgtgcaaagtactgttaaggtgataacatttttgatgagatttaaaaaaatatttgaaatattaaaaagcattatctttaaacatcctaaaaaagagtgagtcatttttaagttgtgttttccctagatcactgatttgttacctttacacagaagcacattgcaaagaaaggctttatttctacctcttccattcagttttccaatattgagctgtgtccctctgaatatttgccttagctatttcaaaataggtatnttcagaaccaaagcaaagggtggtttgttactgaaacattcttagaggcctacttaacgggcggcagtatccggtagtggtaaaacctcacagtttcctaattgcaggtatgtaaataccaaaaaagtcctgttgtcagccctaggtttatctttgaaagcagttaaatgtgcaccttggtcttcctccgtgtgttcagattccttctggttaaagttcttattcagagtcatctaaaagaaatttctaacatgatgtatggtttcttgaatgtcatgagtggctgcgtatattgctttgtagcaacagattgtattaataattaatagaatacctaatttttttggcctatcctctttgaactagaaatgactacttgagggctatttcagagaaccaatatgaaatgtttttgttagtacaaaataccattgccttaaaaggtttcaagcacattttcttttctatttgagaacttaaattgctgacttgtattcgttaagcaaccttagaaataaaccactgcttatatctgcatgaatattatgcatttcatgcgtacagttagttgattagatatttcagggttttgcattttctatagacatggggacttttttaacatggtaacgtcttaggaaaaccattctctcaaggtattacaccatttccaattttatccaaatgaaaagcatatctgcttaaatttaggatgtctttgctgagaatatttggaggctcttgttaggaagaatcatggattcagtatttctaacctgattactgcctcagaggctgtcttgaagggagncagtaggattcactgactacctttacccagatgagggatcaacaaatctcacacttaaactaaatgagttgacaggacaataggtgctaatctcatgtgccctaagatggacttatttagatagggatttttgcattggaaaagcagcacattctctgaccttgggtaccaagctatgatactaatttgagaatcacattctgatacgttaatatcagaaatcagtgagcaacctaattgctgtaagctgacatacatggaagccgaaatcaaaaggttgcttttgttagtttccctggagcatctatttttgtaatacattttgccagtgggactgaaaagctcaaaatgttttagacctaatatcatacattaattttctgctctgcagtgtcaatttgggcacagccagtttttacctctgtggcaccttctttataatttactgttacctattctgcctgacagattgattaagtaggttgataagatccatcgaagattgaatggctaggagtaattctgttctcgtataggcaacttaacttcactgtggaatccatttatctcaaagtttgagggctgtctactttattttcaagtttggggcggaaactcaaaatcccgagcattgccactttagtagtttgtttgatttgcctattgtttaataatgagtacattcttattaagtgatgagtacattcttaattttaaggtatgtttttttcaagcagcttcattttattaggaaaaatacatactcatttgttgtaaacagtgattgtggggtttcattttctgaatgtactcaaaactcccaacaacaattgaacaggatgtttgctaatagaaaatctaaaacaggaatatgtgtatatggcatgaattagtcattgactttaagcttcttatccatacaaggaactaataaaatgtttattgacaacataaaaaaaaggct

SEQ ID NO: 398807 - DNA, 1605 bp, Homo sapiens
aatttgtctttttgagtggatcattggggagaagggaccaaaccagctttgtatggtccctaatttcttgtgacactgataagttttatttacaatttcacattggcaaatactgctatattttctcaaatatctgttgttggtatttaacctctatccccagtaattctgaacagcaacataaaaagacttaaatttggaactttgattagaaaaggctagctgtgacacatatttcatgccccatatttggcatatagtggaaggagaaaggtagtatttttgcagtatttaataacattgagccttgaagctgtttggcaaaaggtaagtttcctttgtggctttgctgaaaaacaaggcatagatttacatagatacgtgtttaattctctgcttcactaaagaaagcaaatgcctattaagccacttcagttgggataatccctgattattgtgagattgaaattactttgtcaattttacaaatagtttttatctttccatttacatatttaccatgacattacaaaagaaaaataccacaaaaaatttacagtgttatctatatagtgattattgcaaatatactatcctcctctccttttataaaatacttcaattttagatgtaaaaacaaaattttaaatattaatatattagtaatatactcgggagtgagtgaggggaaatgttcattttatgtagattttttagtactagaattttataacttagcttttaatttaataaaataaggttttatactctagacttaaagatagagtttaaattttgctctaatcttactggtaaatgtttttctttgttttacatacttgaatttttatggctctccattttcaaacctgctctgcaacagtctgcatcttacaaccttctgtcttcagtacaaaccaacagtgatagcatgtgtatgcattcatttggcttgcaaatggtccaattgggagatccctgtatcaactgatggaaagcattggtgggaatatgtggatcctacagttactctagaattattagatgagctaacacatgagtttctacaaatattggagaaaacgcctaataggttgaagaagattcgaaactggagggtaagagaattgacagggtttaacagaatttcagtcttttatgtaacatttacatagctaaccagtttgaatttttgtggttaaataatctttgcagtattcctgaataattcaacgtatctcaagttacatatactcacatattcaactactgagtccagtggactttgctaaagtacattatacttttaaaaaattttttgcagtgattatgacaaaagtatcctcttcattttacaaatggggaaactgaagcctagacaagttaaattactttctgaagtgctgggctaggatttaacttgtatctgattctaaaatgggtgttttcaattttttatagccttttatgcctctaaggcatttatttactgacaacataaaatcttgaaccccaggtcattttatttccatatgtttaatatataatgtttttaatatataacttttataagacaagaaatttgcattaaattattttgctata

SEQ ID NO: 398808 - DNA, 763 bp, Homo sapiens
tgaatgaaggagcgggcggaggaggaagtgtcatggcgtcgggccgtggagcttcttctcgctggttctttactcgggaacagctggagaacacgccgagccgccgctgcggagtggaggcggataaagagctctcgtgccgccagcaggcggccaacctcatccaggagatgggacagcgtctcaatgtctctcagcttacaataaacactgcgattgtttatatgcacaggttttatatgcaccattctttcaccaaattcaacaaaaatataatatcgtctactgcattatttttggctgcaaaagtggaagaacaggctcgaaaacttgaacatgttatcaaagtagcacatgcttgtcttcatcctctagagccactgctggatactaaatgtgatgcttaccttcaacagactcaagaactggttatacttgaaaccataatgctacaaactctaggttttgagatcaccattgaacacccacacacagatgtggtgaaatgtacccagttagtaagaggtaggtgatccttgaaacttttaagataagtattaatgctttttattatctgtaattgatttgggtgctattttgtttttctagccttttgttaggtttcattaaaattagggagaaatgtcattttttaagcattactttttagtgttctacatctacttctatttgtgattctacctggtatgttagcttcctttaaacataggtaagaatctcatttcactaaaactccggaggg

SEQ ID NO: 398809 - DNA, 6873 bp, Homo sapiens
  misc_feature (5098)..(5098): n is a, c, g, or t
  misc_feature (5909)..(5909): n is a, c, g, or t
tgaatgaaggagcgggcggaggaggaagtgtcatggcgtcgggccgtggagcttcttctcgctggttctttactcgggaacagctggagaacacgccgagccgccgctgcggagtggaggcggataaagagctctcgtgccgccagcaggcggccaacctcatccaggagatgggacagcgtctcaatgtctctcagcttacaataaacactgcgattgtttatatgcacaggttttatatgcaccattctttcaccaaattcaacaaaaatataatatcgtctactgcattatttttggctgcaaaagtggaagaacaggctcgaaaacttgaacatgttatcaaagtagcacatgcttgtcttcatcctctagagccactgctggatactaaatgtgatgcttaccttcaacagactcaagaactggttatacttgaaaccataatgctacaaactctaggttttgagatcaccattgaacacccacacacagatgtggtgaaatgtacccagttagtaagagcaagcaaggatttggcacagacatcctatttcatggctaccaacagtctgcatcttacaaccttctgtcttcagtacaaaccaacagtgatagcatgtgtatgcattcatttggcttgcaaatggtccaattgggagatccctgtatcaactgatggaaagcattggtgggaatatgtggatcctacagttactctagaattattagatgagctaacacatgagtttctacaaatattggagaaaacgcctaataggttgaagaagattcgaaactggagggctaatcaggcagctaggaaaccaaaagtagatggacaggtatcagagacaccacttcttggttcatctttggtccagaattccattttagtagatagtgtcactggtgtgcctacaaacccaagttttcagaaaccatctacatcagcattccctgcgccagtacctctaaattcaggaaatatttctgttcaagacagccatacatctgataatttgtcaatgctagcaacaggaatgccaagtacttcatacggtttatcatcacaccaggaatggcctcaacatcaagactcagcaaggacagaacagctatattcacagaaacaggagacatctttgtctggtagccagtacaacatcaacttccagcagggaccttctatatcactgcattcaggattacatcacagacctgacaaaatttcagatcattcttctgttaagcaagaatatactcataaagcagggagcagtaaacaccatgggccaatttccactactccaggaataattcctcagaaaatgtctttagataaatatagagaaaagcgtaaactagaaactcttgatctcgatgtaagggatcattatatagctgcccaggtagaacagcagcacaaacaagggcagtcacaggcagccagcagcagttctgttacttctcccattaaaatgaaaatacctatcgcaaatactgaaaaatacatggcagataaaaaggaaaagagtgggtcactgaaattacggattccaataccacccactgataaaagcgccagtaaagaagaactgaaaatgaaaataaaagtttcttcttcagaaagacacagctcttctgatgaaggcagtgggaaaagcaaacattcaagcccacatattagcagagaccataaggagaagcacaaggagcatccttcaagccgccaccacaccagcagccacaagcattcccactcgcatagtggcagcagcagcggtggcagtaaacacagtgccgacggaataccacccactgttctgaggagtcctgttggcctgagcagtgatggcatttcctctagctccagctcttcaaggaagaggctgcatgtcaatgatgcatctcacaaccaccactccaaaatgagcaaaagttccaaaagttcaggtagttcatctagttcttcctcctctgttaagcagtatatatcctctcacaactctgtttttaaccatcccttaccccctcctccccctgtcacataccaggtgggctacggacatctcagcaccctcgtgaaactggacaagaagccagtggagaccaacggtcctgatgccaatcacgagtacagtacaagcagccagcatatggactacaaagacacattcgacatgctggactcactgttaagtgcccaaggaatgaacatgtaataatttgtttaggtcaatttttcctttacttttttaatttaaaaattgttagaatggaaaaattccttctgatctagcagtggtaacccctgctgttgctgccactgcttcaatatttgtaagtgctgctttattcttcattctgaaaagaagagattatagtaaacaagtctttatctccacatatgatagtgttataaatactgtaaaagcatggaaggtgcaaaactcagtatttctacaattgcagctaagaacattaggatgaatggctggctgcttctaggaatataagatgcctcaagcattcattatttatgatttgaatactgtagctattttttgttgcttggcttttgaatgagtgtaaattgttttcttttgtgtatttatacttgtatgtatgatttgcatgtttcaatgataaagggataaaacagtatactgacaactgtttacaagaaagtggagagagctgcttgtaagtataacaatatacagaataactttattttatcttgtcagagtccatcactaatctaaaacaaaggtggcacttttttatgttaaccttaaactctaggccttactggaagccactgataggggacacttcactaccagatgtgtgcagtgcaacagatggtcatatacactgtgaggcactgaaattttgccttcagaggttctgaccagattggctgctgaaatagcccctaactttctgaaggcttgaagaggaaaaaataaagtttacatactcttgatgtgaagtgcatttaaatgtttgttggcttgttgcagttctatgaaacagagctgttaataatggttatgtggattactgtgatttgaaaactaaattcacaataacttacctagtagagatttagtgagttgtttcctttaaagaattttacactacatattttaatagtaaacagggatcacttttcctttagcattcagaatgacaccatattcttaaatatactccttccctgaagcgtgtttgtgtgtgatgccatatttctttttcaggtaaatgtagtcttccttataaaaatgaaattaaacctatgctctcaattcttttatattctaacaataaataaaaaagaaaagattactgactgtgcattgtacctgtatttatagtttatggttatcaggaagctctgtaagaaagaaaaggtcagcctcccaggcaaaccagtagtggaggttttacatttgtttgcacatctcagtatatttctgttgaggtaaagtttgcacagtcatctgacttctgatcaagcattagattttaacttgtttagattttgtcttaaacaccagtaatatggctcttgtttatcagctaatcttgaatttattctgtggtaaatcttttgagttgttgagtatatttgagattgattggattcaacctcttgttgaactgaaaacttaattttttctctgtatttttgttacaaagccactgatacgtgcacaattgtaattaagtatgttgcagttgtaaatattagagtttaatctcatgctctacctttatttagcaattacctaatttgccagtagctttataatttttaaagataattgttcattattttgtcaatgttatttgaacttggggtacttaggagcctctttgtagggactgtgcctaggtagcatgtcctaacatttgttctggtcttgcataacttcagtaatctttgtcattatatgtaactttgttgctctgtatggcataatattgtatccataaacatggtaattttgatacagttatacttttacagtggtacataatccaaggactagtatagaattaagctgagtgcaagatgagggagggaagggctttcttggtaatttagatgtgaaacctctacagagctatcatgtaaaaactacataaggtggttgtgctactgtataattgggggtgataataccaggaattttaataagattttgtaaagaatatccagaaaagtagtgaacttattttcagtagacatagaaaacaatgtgaatatttaaggtctgtgactatagttaaacttcactaagaatttgcagaattgttttgagatgtgtgaataaaggtaattttattgaatcttcattggtgctaatgatggacagttaaaaagatagctagtgtatattgttatgggtcagtacttattagtacttccaaaattgaatttgaaatgctatgtattcacttttcactctgtaaatgtaattctttacaatgactttatttattaaagggcagccagttgtcatttttacaggattgtgtgagctattcaaactcttcaacccctgaacagggtattaagcttccaaaataatgatggggataaatatggaaatcctttttaagttgtatttccattaaacaaaaacccttataattcatactatcatgaatttgctttatccatctcatttgcataacagttcatctgtctggtcccattaggctctaccaaagaaagactctgatgagtggacattattactgtgactcttgtaagtagccataaataaaccaaaatagtatcaaatttaggtatgaaattccacatgtgcaaagtactgttaaggtgataacatttttgatgagatttaaaaaaatatttgaaatattaaaaagcattatctttaaacatcctaaaaaagagtgagtcatttttaagttgtgttttccctagatcactgatttgttacctttacacagaagcacattgcaaagaaaggctttatttctacctcttccattcagttttccaatattgagctgtgtccctctgaatatttgccttagctatttcaaaataggtatnttcagaaccaaagcaaagggtggtttgttactgaaacattcttagaggcctacttaacgggcggcagtatccggtagtggtaaaacctcacagtttcctaattgcaggtatgtaaataccaaaaaagtcctgttgtcagccctaggtttatctttgaaagcagttaaatgtgcaccttggtcttcctccgtgtgttcagattccttctggttaaagttcttattcagagtcatctaaaagaaatttctaacatgatgtatggtttcttgaatgtcatgagtggctgcgtatattgctttgtagcaacagattgtattaataattaatagaatacctaatttttttggcctatcctctttgaactagaaatgactacttgagggctatttcagagaaccaatatgaaatgtttttgttagtacaaaataccattgccttaaaaggtttcaagcacattttcttttctatttgagaacttaaattgctgacttgtattcgttaagcaaccttagaaataaaccactgcttatatctgcatgaatattatgcatttcatgcgtacagttagttgattagatatttcagggttttgcattttctatagacatggggacttttttaacatggtaacgtcttaggaaaaccattctctcaaggtattacaccatttccaattttatccaaatgaaaagcatatctgcttaaatttaggatgtctttgctgagaatatttggaggctcttgttaggaagaatcatggattcagtatttctaacctgattactgcctcagaggctgtcttgaagggagncagtaggattcactgactacctttacccagatgagggatcaacaaatctcacacttaaactaaatgagttgacaggacaataggtgctaatctcatgtgccctaagatggacttatttagatagggatttttgcattggaaaagcagcacattctctgaccttgggtaccaagctatgatactaatttgagaatcacattctgatacgttaatatcagaaatcagtgagcaacctaattgctgtaagctgacatacatggaagccgaaatcaaaaggttgcttttgttagtttccctggagcatctatttttgtaatacattttgccagtgggactgaaaagctcaaaatgttttagacctaatatcatacattaattttctgctctgcagtgtcaatttgggcacagccagtttttacctctgtggcaccttctttataatttactgttacctattctgcctgacagattgattaagtaggttgataagatccatcgaagattgaatggctaggagtaattctgttctcgtataggcaacttaacttcactgtggaatccatttatctcaaagtttgagggctgtctactttattttcaagtttggggcggaaactcaaaatcccgagcattgccactttagtagtttgtttgatttgcctattgtttaataatgagtacattcttattaagtgatgagtacattcttaattttaaggtatgtttttttcaagcagcttcattttattaggaaaaatacatactcatttgttgtaaacagtgattgtggggtttcattttctgaatgtactcaaaactcccaacaacaattgaacaggatgtttgctaatagaaaatctaaaacaggaatatgtgtatatggcatgaattagtcattgactttaagcttcttatccatacaaggaactaataaaatgtttattgacaacataaaaaaaaggct

SEQ ID NO: 398810 - DNA, 7192 bp, Homo sapiens
  misc_feature (5417)..(5417): n is a, c, g, or t
  misc_feature (6228)..(6228): n is a, c, g, or t
aatttgtctttttgagtggatcattggggagaagggaccaaaccagctttgtatggtccctaatttcttgtgacactgataagttttatttacaatttcacattggcaaatactgctatattttctcaaatatctgttgttggtatttaacctctatccccagtaattctgaacagcaacataaaaagacttaaatttggaactttgattagaaaaggctagctgtgacacatatttcatgccccatatttggcatatagtggaaggagaaaggtagtatttttgcagtatttaataacattgagccttgaagctgtttggcaaaaggtaagtttcctttgtggctttgctgaaaaacaaggcatagatttacatagatacgtgtttaattctctgcttcactaaagaaagcaaatgcctattaagccacttcagttgggataatccctgattattgtgagattgaaattactttgtcaattttacaaatagtttttatctttccatttacatatttaccatgacattacaaaagaaaaataccacaaaaaatttacagtgttatctatatagtgattattgcaaatatactatcctcctctccttttataaaatacttcaattttagatgtaaaaacaaaattttaaatattaatatattagtaatatactcgggagtgagtgaggggaaatgttcattttatgtagattttttagtactagaattttataacttagcttttaatttaataaaataaggttttatactctagacttaaagatagagtttaaattttgctctaatcttactggtaaatgtttttctttgttttacatacttgaatttttatggctctccattttcaaacctgctctgcaacagtctgcatcttacaaccttctgtcttcagtacaaaccaacagtgatagcatgtgtatgcattcatttggcttgcaaatggtccaattgggagatccctgtatcaactgatggaaagcattggtgggaatatgtggatcctacagttactctagaattattagatgagctaacacatgagtttctacaaatattggagaaaacgcctaataggttgaagaagattcgaaactggagggctaatcaggcagctaggaaaccaaaagtagaattccattttagtagatagtgtcactggtgtgcctacaaacccaagttttcagaaaccatctacatcagcattccctgcgccagtacctctaaattcaggaaatatttctgttcaagacagccatacatctgataatttgtcaatgctagcaacaggaatgccaagtacttcatacggtttatcatcacaccaggaatggcctcaacatcaagactcagcaaggacagaacagctatattcacagaaacaggagacatctttgtctggtagccagtacaacatcaacttccagcagggaccttctatatcactgcattcaggattacatcacagacctgacaaaatttcagatcattcttctgttaagcaagaatatactcataaagcagggagcagtaaacaccatgggccaatttccactactccaggaataattcctcagaaaatgtctttagataaatatagagaaaagcgtaaactagaaactcttgatctcgatgtaagggatcattatatagctgcccaggtagaacagcagcacaaacaagggcagtcacaggcagccagcagcagttctgttacttctcccattaaaatgaaaatacctatcgcaaatactgaaaaatacatggcagataaaaaggaaaagagtgggtcactgaaattacggattccaataccacccactgataaaagcgccagtaaagaagaactgaaaatgaaaataaaagtttcttcttcagaaagacacagctcttctgatgaaggcagtgggaaaagcaaacattcaagcccacatattagcagagaccataaggagaagcacaaggagcatccttcaagccgccaccacaccagcagccacaagcattcccactcgcatagtggcagcagcagcggtggcagtaaacacagtgccgacggaataccacccactgttctgaggagtcctgttggcctgagcagtgatggcatttcctctagctccagctcttcaaggaagaggctgcatgtcaatgatgcatctcacaaccaccactccaaaatgagcaaaagttccaaaagttcaggtagttcatctagttcttcctcctctgttaagcagtatatatcctctcacaactctgtttttaaccatcccttaccccctcctccccctgtcacataccaggtgggctacggacatctcagcaccctcgtgaaactggacaagaagccagtggagaccaacggtcctgatgccaatcacgagtacagtacaagcagccagcatatggactacaaagacacattcgacatgctggactcactgttaagtgcccaaggaatgaacatgtaataatttgtttaggtcaatttttcctttacttttttaatttaaaaattgttagaatggaaaaattccttctgatctagcagtggtaacccctgctgttgctgccactgcttcaatatttgtaagtgctgctttattcttcattctgaaaagaagagattatagtaaacaagtctttatctccacatatgatagtgttataaatactgtaaaagcatggaaggtgcaaaactcagtatttctacaattgcagctaagaacattaggatgaatggctggctgcttctaggaatataagatgcctcaagcattcattatttatgatttgaatactgtagctattttttgttgcttggcttttgaatgagtgtaaattgttttcttttgtgtatttatacttgtatgtatgatttgcatgtttcaatgataaagggataaaacagtatactgacaactgtttacaagaaagtggagaaaaatgtacatacatttttgtatgtttagatattaccgtaaatactcaggattggagctgcttgtaagtataacaatatacagaataactttattttatcttgtcagagtccatcactaatctaaaacaaaggtggcacttttttatgttaaccttaaactctaggccttactggaagccactgataggggacacttcactaccagatgtgtgcagtgcaacagatggtcatatacactgtgaggcactgaaattttgccttcagaggttctgaccagattggctgctgaaatagcccctaactttctgaaggcttgaagaggaaaaaataaagtttacatactcttgatgtgaagtgcatttaaatgtttgttggcttgttgcagttctatgaaacagagctgttaataatggttatgtggattactgtgatttgaaaactaaattcacaataacttacctagtagagatttagtgagttgtttcctttaaagaattttacactacatattttaatagtaaacagggatcacttttcctttagcattcagaatgacaccatattcttaaatatactccttccctgaagcgtgtttgtgtgtgatgccatatttctttttcaggtaaatgtagtcttccttataaaaatgaaattaaacctatgctctcaattcttttatattctaacaataaataaaaaagaaaagattactgactgtgcattgtacctgtatttatagtttatggttatcaggaagctctgtaagaaagaaaaggtcagcctcccaggcaaaccagtagtggaggttttacatttgtttgcacatctcagtatatttctgttgaggtaaagtttgcacagtcatctgacttctgatcaagcattagattttaacttgtttagattttgtcttaaacaccagtaatatggctcttgtttatcagctaatcttgaatttattctgtggtaaatcttttgagttgttgagtatatttgagattgattggattcaacctcttgttgaactgaaaacttaattttttctctgtatttttgttacaaagccactgatacgtgcacaattgtaattaagtatgttgcagttgtaaatattagagtttaatctcatgctctacctttatttagcaattacctaatttgccagtagctttataatttttaaagataattgttcattattttgtcaatgttatttgaacttggggtacttaggagcctctttgtagggactgtgcctaggtagcatgtcctaacatttgttctggtcttgcataacttcagtaatctttgtcattatatgtaactttgttgctctgtatggcataatattgtatccataaacatggtaattttgatacagttatacttttacagtggtacataatccaaggactagtatagaattaagctgagtgcaagatgagggagggaagggctttcttggtaatttagatgtgaaacctctacagagctatcatgtaaaaactacataaggtggttgtgctactgtataattgggggtgataataccaggaattttaataagattttgtaaagaatatccagaaaagtagtgaacttattttcagtagacatagaaaacaatgtgaatatttaaggtctgtgactatagttaaacttcactaagaatttgcagaattgttttgagatgtgtgaataaaggtaattttattgaatcttcattggtgctaatgatggacagttaaaaagatagctagtgtatattgttatgggtcagtacttattagtacttccaaaattgaatttgaaatgctatgtattcacttttcactctgtaaatgtaattctttacaatgactttatttattaaagggcagccagttgtcatttttacaggattgtgtgagctattcaaactcttcaacccctgaacagggtattaagcttccaaaataatgatggggataaatatggaaatcctttttaagttgtatttccattaaacaaaaacccttataattcatactatcatgaatttgctttatccatctcatttgcataacagttcatctgtctggtcccattaggctctaccaaagaaagactctgatgagtggacattattactgtgactcttgtaagtagccataaataaaccaaaatagtatcaaatttaggtatgaaattccacatgtgcaaagtactgttaaggtgataacatttttgatgagatttaaaaaaatatttgaaatattaaaaagcattatctttaaacatcctaaaaaagagtgagtcatttttaagttgtgttttccctagatcactgatttgttacctttacacagaagcacattgcaaagaaaggctttatttctacctcttccattcagttttccaatattgagctgtgtccctctgaatatttgccttagctatttcaaaataggtatnttcagaaccaaagcaaagggtggtttgttactgaaacattcttagaggcctacttaacgggcggcagtatccggtagtggtaaaacctcacagtttcctaattgcaggtatgtaaataccaaaaaagtcctgttgtcagccctaggtttatctttgaaagcagttaaatgtgcaccttggtcttcctccgtgtgttcagattccttctggttaaagttcttattcagagtcatctaaaagaaatttctaacatgatgtatggtttcttgaatgtcatgagtggctgcgtatattgctttgtagcaacagattgtattaataattaatagaatacctaatttttttggcctatcctctttgaactagaaatgactacttgagggctatttcagagaaccaatatgaaatgtttttgttagtacaaaataccattgccttaaaaggtttcaagcacattttcttttctatttgagaacttaaattgctgacttgtattcgttaagcaaccttagaaataaaccactgcttatatctgcatgaatattatgcatttcatgcgtacagttagttgattagatatttcagggttttgcattttctatagacatggggacttttttaacatggtaacgtcttaggaaaaccattctctcaaggtattacaccatttccaattttatccaaatgaaaagcatatctgcttaaatttaggatgtctttgctgagaatatttggaggctcttgttaggaagaatcatggattcagtatttctaacctgattactgcctcagaggctgtcttgaagggagncagtaggattcactgactacctttacccagatgagggatcaacaaatctcacacttaaactaaatgagttgacaggacaataggtgctaatctcatgtgccctaagatggacttatttagatagggatttttgcattggaaaagcagcacattctctgaccttgggtaccaagctatgatactaatttgagaatcacattctgatacgttaatatcagaaatcagtgagcaacctaattgctgtaagctgacatacatggaagccgaaatcaaaaggttgcttttgttagtttccctggagcatctatttttgtaatacattttgccagtgggactgaaaagctcaaaatgttttagacctaatatcatacattaattttctgctctgcagtgtcaatttgggcacagccagtttttacctctgtggcaccttctttataatttactgttacctattctgcctgacagattgattaagtaggttgataagatccatcgaagattgaatggctaggagtaattctgttctcgtataggcaacttaacttcactgtggaatccatttatctcaaagtttgagggctgtctactttattttcaagtttggggcggaaactcaaaatcccgagcattgccactttagtagtttgtttgatttgcctattgtttaataatgagtacattcttattaagtgatgagtacattcttaattttaaggtatgtttttttcaagcagcttcattttattaggaaaaatacatactcatttgttgtaaacagtgattgtggggtttcattttctgaatgtactcaaaactcccaacaacaattgaacaggatgtttgctaatagaaaatctaaaacaggaatatgtgtatatggcatgaattagtcattgactttaagcttcttatccatacaaggaactaataaaatgtttattgacaacataaaaaaaaggct

SEQ ID NO: 398811 - DNA, 447 bp, Homo sapiens
atccagttgctacagcatcatttgttggaaaaaagtagggcttacaaaaaattactgccattgatcagctctagtgcctttgtcaaaaataagttcaccatataaggtggacctatatctggggtctctattctgttctaatgatccatttatctatcaatctttatgctagtatcacacttccttgatgactattgcttgaggataattcctgaagtcaaataatgtatattgtctaccctttcttctttttcaaaattgtttttctattccaggttctttctatttctatataaattttagaattgacttatcaactttgtaaaaatacctgctggaattgtgaacctgtagtttaatttggggagaattcatagtttaaagcactgaatgcattttgataaatatattcctaagtattttattctttgagtcttgtgaatgtta

SEQ ID NO: 398812 - DNA, 202 bp, Homo sapiens
gctcctcccactattttgaagcaaatctagacatctgatcacttcttccatatacttcaggctgtagctctaaaagacaagaactcttaacaattaccacagtatcattattctccctagaaattacaataatttcttattctcttcaatatagactcagtgttcctacttccacttatcttgcgaatcctatagatttttt

SEQ ID NO: 398813 - DNA, 506 bp, Homo sapiens
cagaagacctaaaggtgaagagtgaaaaattcatcaagtcttagataacaatgtatgtttaagaaataaaggaatgaattttctgaaaacgagggtataacttcttagcccaagtcaaaatctagaatgtctgcatattaaaatgaggaatcttatcataaatgattaggtgttcttagagaaatattaaagactaaaaatcatatataacgtcagaatgttgcagtttcacttgaaaacagggagtttaaaaagaggacagtccatactaggaagatggtgacataaaacttccctcctgaaatactatctatctaaaatccctgtcttagagacatgcaaaagtgaacgtgtaaatgcagactctgataagactctagtttgaggttgtctatatccaaacccaatatgtcctatggcctgaatcagccatatttctattctcctcaaagtacacctattgccattacaggctttatgcttccctttattttccatattctttt

SEQ ID NO: 398814 - DNA, 491 bp, Homo sapiens
gtatcctaggaatctgttgctctcaagcagtcatccttaggaaactaagctctgaaggcttctggaagtatttttaagaagtaggaagctgctcttgaatttattgcttttctttggaaggaaaggaagagagagtatttttaagaagtaggaagtatttataagaagtaggaagctgctcttgaatttattacttttctttggaaggaaaggaagagagagagagagagagagagagtatttttaagaagtaggaagtatttttaagaagtaggatacagtagggagatctccctactgtatccaagcagtcagtgtcctcccacgtccctaacgtggctctaccttcaggtataatctgttgctgcttgaaggctcagggcattcagcttcaccccaagctgtccttctcattgctctcatctgggacatcccccttctctgggggccttgatcctggacctccacctcctccccaccccgagccctgc

SEQ ID NO: 398815 - DNA, 490 bp, Homo sapiens
cccagaggtacccttaagactggaggatcaccaggcgggccctgacctcatcacaggagccctttaaaagcagtttcctttgcctggttgaagaaatcggagggatcaaaccaaagaaggttttctgttgttgagatgagggggccacgtggcaaggatctgagaactgctcccagccaacagccagcaagacaacaagaccttaactgcaaggaagtgagttctgccaacaagaagagaatgggcttggaggcaggtttgaccccagggcctccacacaagaactgagcccaactgcccacttggtttcagccttgggttactaagaattaggaggtaatgaatgagagttgttttaagctgttggttttgtggtgatttgctatgaagccatatcaaactaatatacacacagaggtgttggcccctgggccattcctaggaagccagctctgcgaaggaggaagaagggcagagaggcacacagagc

SEQ ID NO: 398816 - DNA, 185 bp, Homo sapiens
ctgcactggctagaactttcaggttttaggcaatatattcttattatctaatagtggtagaaatgtaccatgtttctgatgttaaggggaatgcctctaggttttggtgcaatgttcatttgagatttttttttcttttttctttttggcggggggacgagtctcgctcgctctgtcgcctagct

SEQ ID NO: 398817 - DNA, 351 bp, Homo sapiens
ccaaggctgggcactcagtctggcccttggggttcccaacattgagcccccagccctgatcggtggcttcttagccccctgccccccaccctttagaactttaggactggagtcttggcatcagggcagccttcgcatcatcagccttggacaagggagggctcttccagccccctgccccaggccctacccagtaactgaaagcccctctggtcctcgccagctatttatttcttggatatttatttattgtttagggagatgatggtttatttattgtcttggggcccgatggtcctcctcgggccaagcccccatgctgggtgcccaataaagcactctcatccaccc

SEQ ID NO: 398818 - DNA, 386 bp, Homo sapiens
gcacatcattgtagcctgttgagcttttaaacatcccagtgaccaaactgcactccagactaattaaattagaatatctggggatgggacccagatacatgcagttttttagagcttcaatattaattgattttaatatgaatccaaggaagagaactactgatctagtgcagaagtcattaaactagggtgaaatctgattcactgcctatatatggaaatagagttttataggaacacaacatgtatatttattattgtctatggctgttttcatgctacaatggaagaatttagtaattgtgaaagaaccaattttgcctacaaaacctaaaatatttaccttttatggaacatacttgccaaccccagtgtagagagactca

SEQ ID NO: 398819 - DNA, 686 bp, Homo sapiens
atgataaacattgccccagtctctctgttgagcctgcttgtgtcaggtgaaggtgagggatcgggagtgatggagatgcatacagatcagcaccttctctgtacctgctggacccccatgtgcacccttctccctccagcctgggctactctcctcctggttctttctaatcttaaacttcctggtgagcattgccccagccacactttctccctggttttgcttaattccacttatgcatcagtcatttcaacagcatgaatgtggttctgtacagtgatgtatgtggagatttctaaaatattctatgtgtgatttctgttcccaactaggttctaagtgccatcaaagcacggttgggtctcccttgtatcttccacagtgtgtagaaatttgtgctgcccagagctgtgcctagttcatagaaactgactggaagcacattgctgagggaggtttgttgaattggtttttaaggtttattgaaattgatttgctgaatttttctgctagttcaaaatgtgaattaggacctggtcagtttgaaatataccaaattctatgccctttctcttacctatcatcaaattgtagtaatgtatttcaccccactggacttatcttcagagttttaaaagagaggagctctcgacttagaggtaatatgaacagatgaacagacactg

SEQ ID NO: 398820 - DNA, 415 bp, Homo sapiens
gactctagaggacccccacgtatcggggttgcaaattaaataggagaactgaaagttagctaatatctgcaaacttacttcctcttaaatgaacttgtccatcaaaccttcagatttcccctactttctcccttaaagaaacagatcaaaaatatttcgtgatgcacaagctagctaatgtcacacagctgaagcactggagtgaatgaaagttgaagatatggcagactccttgaggctaaaattactgcaacctagatgttgaaaaaatacctagtaaagaatagaaactgagggccgggcatggtggctcacacctgtaacccagcattttgggaggacaaggcaggcagctcacttgaggtcaggagttctagaccagcctggccaacatggcaaaaccccgtctctacta

SEQ ID NO: 398821 - DNA, 609 bp, Homo sapiens
gggacctggatgtggaactgcagtgtgccttgcaaacttgaagagaacgaccttgataatggatggtgaagcaagaaagaggagcctgaggctgagcgcagtgactcacacctgtaatcccagcactttgggaggctaaggtgggcagattgcttgagcccaggaatttgagaccagcctggataacgcgtggtgggcagttccaggacacctgacatgttcccactgcagaaaccacacgggtttctccagcaccactgagacttgctcagcctgtgtagagtagcctggacatactggggctttattttcctgaggacaaccctcaaccaatgagtgccaggaatcattttgccttttctgggatgctccagaactctaggaggacaaaaaagcccttcatgtccaacattagaggaaggcagcatcctccaaagaagagtgactcaccctgaccagctggcagagaagcccaaggccaggccctgggatgtggagagccagtcccagcctggtctggaaggaggcgtgccagggtggcaatgatgcatcacccacgtggtttactggccttgactaacctgaccatgacttagcaaagctgtgagg

SEQ ID NO: 398822 - DNA, 402 bp, Homo sapiens
tctgtcgacaagccaagaaaaagactcatcaattgtgggcaaatgatgcaatatcagaagacaactttatgttccttgtcttagtccattcattcaacaaatgtctattttttgttatctccatgcaaatgagttacaggctacttgaaatcatcttgttttacagtaaatttttggttgtccatagtcaatatgacatggctctaaccaaacaattcatttcaaccatggatggccaggtggggtggctcacacctgtgatccagcaatttaggaagctgaggcaggaggattgcttgagggcgggaattcaagaccagcctaggcagcacagtgagaccctcatctctacaagaaacttgaataaaaaagagaagaagcgagaagcatggactctggtga

SEQ ID NO: 398823 - DNA, 352 bp, Homo sapiens
tagagtctgctcctcacgtgttcattctagggtcatcatatccgatgtagatgatattggttgcacatgtcatatgatcagtgttgccagccatgttcatgcctgacaaggtatggcgattcggcgtgtgcaagtgatcctcgaaactcgatcggcagacatactcgctagggactggcgcgtcggtattgtaacatttatagccaccaccttcttccccctttaaaggccctaatgaacctacatagggcacacgcaagacattaacttcttcctgccagaagcttctatttgctcgatgagggtccttctaggcaagcaccacagctccaacacctcccactgttcacat

SEQ ID NO: 398824 - DNA, 626 bp, Homo sapiens
aaataaagcctccttttttttctggagagctggccttgagtctctgttttcagcttcagacctctggggcttctccggtcctgttagatgactaacagtgaaaatctgttgtttagcgtagccacctccatcaatgatcttagccagatcttctgaataacttgctgcagcttctaaatcagcacttgctgcttcgctttgcacttttatgttatggagatggcttctttccttaaacctcatgaagcaacctctgctagcttccaactagctgttgatgactgttagatcagtggagtagattgcaccgaagctgaatactgctgggtggccgttcccctaaacagaagctcttcacagtaaccaacgggtagacaccttcttacttacctagaggagagaggctccagcacacaacacagaggctgatgtggtctagatatcagtagtgtccccacccgtcacaacctgcactgtttggagtgactgcagctcacaccactcagcatttactgaaatgtctcactcagagccctttacgcaaccaatgcttggtttctgttgaataataaatgtgatatgaatacatgaaaaaatgttcaaatacataatgagtaaccattcta

SEQ ID NO: 398825 - DNA, 300 bp, Homo sapiens
atctctcaacaaattagatatagaaggaacatacctcaacacagtaagggttatatgacaaatccatggataacatccaattgaataaagaaatgctaaaatatttttctctaacaaccagaacaaaacaaagatgtgttcctctaccccacttattcaatgcagtacaaaaagtcctagacatgaaaataggcatgagaaagaaataaagagcatccaaattagaaaagagaaagtcaaattttccctctttgcacatgacacagtcttatatatagaaaacctaaagactttgccaaa

SEQ ID NO: 398826 - DNA, 956 bp, Homo sapiens
acactagaggcacacagtattgagtataatgagacttacagagaagaatatagcaatctggggaagcagaccacacttactgaaagtagcactgcagaagtagtgtttattaatttagattgtaatttgaaattgccacattattcatttctaagatttcaaattgctttatatctgacagtttgtacttcagacctgcctatttttgttttacaggtcctatttagttactaatggatattgatcctttatttctcagatttgttttgatatgtttatcacatttttctattaagagaaattccacttagagtcagttcctttccaaagttgattttgttggctctctctcatggcattgcatttcttcacattttacagttgtgatttgcaagttttttaagtagactttttagtttgtttcattctttggtagattgtattaatgtttctaattctttactccttcccttttacagaattataactggacatcttttgccaggtgacttttcagtgccttccactatagtagatggaatatacttccccactccattgagtccattttttgttggctaacctgtagttttaagattgtaatttttttaaatctagttaccttgattgctttttagagagctattagtcccaataacttagaccaccattatttaaaaatggaattcctaaccacaatgtgtgcacctcatcataggaaggaacacaaatgggggagtagaagaaaacagaaatgtattaataggcgacagtgagtacttcagctttatgtgtaatgttttatttcttgtattacaaagtaaaagatatgaagcatttgactaaaaatgttaatttatataatttgaatgatgggtacatgggcagttgttatatttatatatacttttatgtattctaaatttttttctcaaaataaaaaagagaaacagtca

SEQ ID NO: 398827 - DNA, 623 bp, Homo sapiens
acccccacttccatgtctgtacaggctttgtgtgtgtttgttttgagtggatccagtgtggatagtatgattagatactctctgattctgcgtcttactcttttggacactattttaattgtgcccttaaaatttggtgtttgtaatctgaggccaggttaaggaaagagctatgaaaggcatttatttggaagagagtgataaagtgaggaggttatatatttactctgaaggtttacagtatttgatgaagtctcttcttagagattacacctggggatccaggcaaagatgtagggtggcgcagggctcccttctgacaattctctacatcactgggccaaaaaaaggcagtttattggtacagatgacccttctctcccacctcttctgcctgccataagttttcaaaatatgtagccttgacaagaattggaacttgtaccttcctgcatttcagtgtgggcttttcttttttttctttctttctttaaatggagatgaggtcccactttatagcccaagctggagtgcagtggcactatcatggctcactgcagccttgacctcctcagcttaagtgatcctcccactccagcctcccaagtagctgagactccatt

SEQ ID NO: 398828 - DNA, 671 bp, Homo sapiens
agacacatttgttaaagcaaggtgtacaatgaaacctgcaacatgatttgtctgtttagtaaaacacagaaaatctaactccgcctggcttacgaacacacacatgtgttagaatttgggaaaaggaaagggagggaggccggctacacgtgaacttttggaaaatctcagagggtctggggcaccaggtggagaccatggcagccttcagggatatgaggtgagtccttcaactacatttgcaaggttttatttcttaggaaaatatttaaagcaaatatttcaaaaatgactaaatctgagtggtagggagtcactgttttatagattattcacttttccctgggcttggaatgtttcgttttttcaaaggtcaaatgagatgctgcctttccaccagataaagatttacctggtgcctctgttactgcccagcagcgcctgaggacgtgggggctgctgcccaacacggaggctgggctggcctggtccgtgggctcaggttctcatcctctgcacgtgcatctgcctcctgtgcgtctctgtgcacacgcttgtatctggatgcagagtcctgtgcccagtgtacatgcacagatgtgcgcatctgggtagatgtgctggttcgctgtgtgagcatgcacagacccttgttcaccgtgtgtgcgcat

SEQ ID NO: 398829 - DNA, 358 bp, Homo sapiens
agggctataaacaataacacaatgaaaaaaatcaaacttaggtaacaacatgataaagagaacagtaactcacatctcaatatttccattgaatgtaaatggcctaaatgctacacttaaaagatacagaatggcagaaaggatttttaaaaatcacaaaccaaatatttgctgtcttcaacaggctcacctaacatgtaagaattcatataaactcaaggtaaaagggtgtaaaaagatattccatgcaaatggaaagcaaaagtgagcaggaatagctattcttatattaggaaaacaaaaaacagacttcaaagggttaatggtaaactatataatgataaaaggatcaatccaa

SEQ ID NO: 398830 - DNA, 203 bp, Homo sapiens
gactctacaggatcccctcgttgtcagtgaggccgtcgtcagtgtttcaagatgggtggctgtttctgtagagcagccattggctggggtcccggggctgcccctttggcagggcacatggtccctgagggccacagatgccctgcactttgtcacctcacatccaacttacttcacctctaaagaaagcacatactgaaaag

SEQ ID NO: 398831 - DNA, 398 bp, Homo sapiens
gatcacgaggtcaggagatcaagaccatcctggctaacatggtgaaaccccatctctactaaaaatacaaaaaattagctaggcatggtggcagcgcctgtagttccagctattcaagaggctgaggcaggagaatggggtgaacccaggaggcggaggttgcagtgagccaagatcatgccactgcactccagcctgggcgacagagcgagactccatctcaaataataatcataataataaaagaatgggatttgaagagttggagctgactgagcagtgggtagtgcctccatcagttctgcaaggaagggccagagaccccaggatagagtgtaataagaagtgccacccaggtaaaacagagaggatttctttccagtgaactcaagaatctg

SEQ ID NO: 398832 - DNA, 602 bp, Homo sapiens
taacaatctagggaactgtcagtgaactgcattgtgatttacactaggcatttaaaatatttccaatggattaaagagtttttgaacatagggggtttcacatttcaagcccaaatacctaaatataattgcacactatgctcctgtcagtatacttgctggagcaaagtagttcacagcaaccagcttagctctacttagaaaagacttgcttaggaataattgaagtggtagaaatgtgtatgtggtcatcctcattgagacatttagaaactggtattgcatatggtgtcatcctctttaagccactctgtttttaacaaaaatgaaataaatatgtgagtttacagctcacatgaaggaattaaacattttctgggaggtaatttaataaaaatcagatgattcaagaaatggttaccttcatgttttgtttatttgtttgttttgttaaagaaactagttggaaaaatgctttgttcggatatcttaaaataactccataggtagctgttctgtgattgccgacttggggtgtggaaaagttacaaaatgaaatagagagctattatttagcaattaagaacacactttgcttcttt

SEQ ID NO: 398833 - DNA, 635 bp, Homo sapiens
actacagaggatttggagtggaaggcaggaattaacatttatcagcatttatttaatatgccagctggtttatgtaattttcatttatttttatagcaatcttatgaaattatctccattgtagagataaagggattgagactgagagagatacagtgacttgcccaagatctcaaggagaaagttaaggaatctggtttggaagctaaaatccaacccaaaatttatactctcaactgcaaattctgtcttcctgccaccaaagcaacttttactgctttcaaaaggttatttgtcctctctttctatatgtatatacttagtttaaaaagacataatgggtagtttgcccttgcagaatgaactcagaggtgagcttaaagagctttcagaaataatgttctacagctcaccctcatcttataaatgatgaaaatgaaacatgaatgagacaggaagatttttgttccaagctctttggctggtgaatgacagtcttctgacctccaacccagggttttgcccgtgatatggcaatgattcttccaactcaggagaatgagcccaaggccagctggaactaatgttttttcaagactcagtagcccctggttagtgtcaaggagtcacattcc

SEQ ID NO: 398834 - DNA, 758 bp, Homo sapiens
  misc_feature (19)..(19): n is a, c, g, or t
aatcagctcggtccgattngctctaacggcgggattagaattcaggccgtctggggtgggattagaattcaggccgtctggagccgggattagaattcaggccgtctggagtcgggattagaattcaggccgtctggagtcgggattagaattcaggccgtctggagtcgggattagaattcaggccgtctggggcgggattagaattcaggccgtctggagtcgggattagaattcaggccgtctgggccgggattagaattcaggccgtctggagccgggattagaattcaggccgtctggagccaggattagaattcaggccgtctggagccgggattagaattcaggccgtctggagccgggattagaattcaggccgtctggagtcgggattagaattcaggccgtctggagctgggattagaacccagatcgtgcgggtttagaggctgcacactcaactactgtgctatgtagcctctccccttgaaggtcctgggggatccctgagtttcctgtcctttcaacaggacaggtaaacctttaacccccgccaaggtgccattttcctgtttctagaacattcctcagagcctttgcacttgcagtttcccttgccagggtgccctgcctgcctcatccctgcaggtaactcagtgtttctgctcagttgacccctccccagtgagggcctccccacaaccccagctaaaatagctcctccccgtcatcactctgctcctagctcggattct

SEQ ID NO: 398835 - DNA, 323 bp, Homo sapiens
atggtggcttgcacctgtagtaccagttacttggaagactgaggtggaaggatagcttgagcctaggaggttgaggctgcagtgatcatgcttcagctagggtgacagagtgagactgtattaaaaaaaaaaaaaaaaaaaagagattctgctccaagcttccaacattttagaaaataaatgagatatattagataaacacattctgggtttccgggcagacacactgtgaaaattaagtgattttttttctaaattatttaatgtatattttaaatagtgaaatagaaactaatgtatactaataatgagggctttgtgtt

SEQ ID NO: 398836 - DNA, 162 bp, Homo sapiens
aataccttagaaataaatgcataaatttttttctttctgtttttttagaccgtctcgccccattgctcaggctggagtacagtggcatgatcatggctgcagtcagctgcaattgtgccactgcactccagcctgggtgacagagtgagaccctgtcaaaaa

SEQ ID NO: 398837 - DNA, 534 bp, Homo sapiens
tgggttctacattcttcttcccttgatctaggtctctttccctttgccagtaccacagtcttgattactatggttaaatgatgagccttaaaattgggcagagtgattcctcccacttccttctttgtagggagtatttttgctagtcaagggctgggctgcttgttgtcactgggtctccttttctggctttgcatgcccacccttgatgctacttttgaatcttggattcattttctaggtttctctccagaggggtttttgttttactaaaggaaataaattccccttttccagggaattttttcttttttcctctgagtacgctaaaagctaaccctagaagttaaaattgtggatgtgaatgatgttatttttgcccccttaaacctgccaaactcagctggacaaagtagcatgtgtgtgtaatcctagctatgcaggaggctgaggtgggaggatagcttgaagtcacaagttcaagaccagcctgggcaacctatcgagacctcatcttttaattaataaaaaaac

SEQ ID NO: 398838 - DNA, 403 bp, Homo sapiens
aggctgaggtgtgaggatcacttgagcctgggaggcggaggctgcagtgagccaagatcacgccaccgcactctagcctgggagacagtgagaccctgtctcaaaaaaacacaaacctattatgctgttatgattaaatgccattatcacaacaggtcacgctgtgaggcatgaaaatttttattacattttttattcaaattcagttgatttattcatcaaacatgagatgtctgaaaaacatttcatatggtgcaagagttaaattaggcagggcacagtggctcatgcctgtaatcccagcacttgggaggccgaggcaggaggatcgcttgagcccaggagtttgagaccagcctaggcaacatagcaaggccctgttctttaaataaataaataaata

SEQ ID NO: 398839 - DNA, 495 bp, Homo sapiens
gggtgtatctatcaggatatttctgggcctcattcaacccattgaaggcctgtacagaacaggaaggctgattaagagagaatctctgtctttgaggtggaaaatcagtcttctgccttgtgacgtggactcagactggaactcataccgtcagctctcttggttttcaggcctttggaattggcctggaactataccattggctcttctgggtcctcagcttatcacctgcagatcttgggacttctcagcctccagaaccatagaagccaattccatatagtaaagctctgtctctcatctatatatcttatcggttctgtttctctggagaacagactaatgcatccatattgacaggaaaatagttcattcattgtaattgctgtatactatgccactgaatgagcatatcaatttgttccattaccctagtgaagcattattgggttgttcccacttttcccctcttataaatcaatagcaatgcagtga

SEQ ID NO: 398840 - DNA, 529 bp, Homo sapiens
tgctactggaccttgacagacacagcccttaaaccctttctatagagactctcttccaccctgaattgattaaaagacaggcatacttatttaatcagcccatcaacgatgggccttgcactgttttagactactgttttagattactgccgttaataaacaaagcagataatgtggagtggtcaaggagcattcatttaagggagcaagatgtacacctgccacgtaaacaagataatttccaagacaaatgtaatgcagaaactaaaacacagtaacaatatagacagtgactctggctggcagggagggtcatgtaggatacggtgatcagggaagcctctctaagcaggtgttattggacctgagtaacaagtaaacagagacctgcgaatagagctttccaggagtgagatctgaaagaaaaagactgaaaggtgagaaggagcttcagatgtctgagaggtggaagaaaggtcagtgtggctagagcttaatgagcacagaggaacaaggtcagagcacattt

SEQ ID NO: 398841 - DNA, 159 bp, Homo sapiens
tgagaaggctgccttgtggctggctgtcaaacagctggagattcattttatcttttcgaggggtgtgtgtgcgttgttgttgttgtttggggggtggtggtggtggttaatatgctgcaactgaccatgattggaggttcattttatttatttttgtaa

SEQ ID NO: 398842 - DNA, 324 bp, Homo sapiens
gcaacctagacaagagtactgcctcctcttcaaaagcaaaaggaagagagcgaatcatgtagtgattcccagcccttactcattgaggctataggaggggatgggaggaccctgaggtctgcagtgagaagcaggactcagagacaatgcactctgcatgatcatcttggcatctagtggggttccctgcaggtaatgtgacttgtacttcaatttcaacacaatctggaacacacagatcttaatttggaaagctgaataacaggagaaagggggaagaggggaggaaacaaaaacaacaacctggaaacttctagttttatg

SEQ ID NO: 398843 - DNA, 300 bp, Homo sapiens
tggtccatatgggtttctctgacggagaatgaagaactgaaacttctctggcaagcagtgccaggcagaaacaccactttgtccggaaaggtatccccactgacggcctccaatctacaacctgcaatctgaatccttgccaggctgaagaaaccaacagcttctgttttgtctcccaaccctcccatactgccttgtctgcaagagaaaggctggtaccagtaagaagaaggaaagccgtcccctggcaactgtttgaggaagatgctgctgcaaaataaaatcctaaaaaccacacca

SEQ ID NO: 398844 - DNA, 624 bp, Homo sapiens
atttttttatgtgatatacaactcagtagatgattagtatatgggatgtcagaaaattccaaaattttgtcctaatatttgtgcatttatagagaaatttaaaggtgaagtctgagtttttttaagttttactgaaaaaattatcaggactgactgttccagggagtagtgtttttttagccaggtaaaaagtcagaaacaaataaaacctcatgtatgccaaaagtttgtgatactgggtcatttcctttccctaggtcagttaaatctacttgttttgtttctttggaataattgttgcaaatgagttatcaaaacttcgtccttgtcatcctctgcctgttgtttctcattttagggaaaagcagtagctttgctgtgctttttattatctatctttccctgtctacctttacaaatgaaaattattgcagagtgcaagtactatattcatgtctatgtatatgtgaattttctttctgagttaacatgaagtatatagagtatgtgtaataattgtgtgcttttttgtgatgaacttcagtgctcaattaattttatggattaaagagacctgaactacagccgttcatatccaagtgctgaataggacagacctgaaga

SEQ ID NO: 398845 - DNA, 373 bp, Homo sapiens
tgtggcctgaagtttgtgaacctctgtgtttgtttgtttgtttgcttgtttgtttgtttatttagagatggggtcttgccctgtcacctaggctgtagtacactggcacgatcataacttattgcagcctcaaactcctgggctcaagagatcttcctgcctcagcctctcaagtaactgggaatatacaggactgtagtcccaccacgatggctaattttaaaaatttgttatatttttctagagacagggatttactatgttgcccaggctggtccccaactcctgggctaaagtgatcctcccacctcagtctcctgaatcactggggttataggtatgacccacagcacatgactgtgttaggggatta

SEQ ID NO: 398846 - DNA, 271 bp, Homo sapiens
gaggctggggcagaaggtcacttcatttgcccattcctaccgctgcacccacagcccatggcgcacagccactcttggtcatgtgcctcatcacatctcaagtaggagatgctgcagcctcctactcggtgcctcaggcaaccagaggaaccacgccagagctccatgcccaggatgacccctgccccttctaaaccatttggtctgcacattgccttaggatcaagtccagactccttagagtggcttatacccttctgatgggtctccc

SEQ ID NO: 398847 - DNA, 426 bp, Homo sapiens
gggagcggaaaaatatggaaggcaagggaaagctgggtaaggaagagtgcagagtgtaagaagttctcagaaataccagaaagttgtgggaatttgttaggaagtcagtcaagtagggtatgagatttttttttaaatttgcgggcttttcattcactgtcagccgtgagccaccaagatccttgggtgactttctagcaagtgtaattttgaactgaagcgtggtcctgttcccattctgagtagagccacttcccatcacacgatgattgtggtgactgcagcttgactgcggcttcttgcattgttctggcctttcccttctgcagaacttagaaccattttcttgtgggtttgtgatcacaaggctgacctgagactgacagttctttcaaagaagtcagtcttgagctgtttttggaatct

SEQ ID NO: 398848 - DNA, 371 bp, Homo sapiens
tcctgaaagtgagacaaagttatctgtaacagacacctatgcttacctacccagcccccaggccatgcgagcagaggagagggtatcatttaaagggcccgcagcagcaaagaggctttctctcctctgtctttgacccatctctgttctgggtaacttcactaacctggtccctctaaatctgtgcctactttggaatccaccaagagtctgtttctgccctaatttgcccacatgccagctctcatctgcttccctgaccacagttccagcctagtggaaccatttctggtttggagctagattcatctttcaaagcagagagtgagaagaaaattctctaactcttgatgcacagaaggagttcagta

SEQ ID NO: 398849 - DNA, 647 bp, Homo sapiens
ccaagagaaatccagaacttgtggaagaaaaattcatattaccccttcagcaaatttaagaaaaacctgtcattgtactagttagaagcttattatcttaattcagtaggtttatgtagaccttaacaaaaggaaataaatatcttgtaatgagtattgaccaaattctctcagtgcatggtcactctgagtctgtttgccttcttccaatttcatttctttcccttgtgtgattggtttaatttgtgtatgaatcatgtcttgattttaaatgttgtcttaccaattatttgctttttggcttaaggagtttgttattttctaaaaaggaaaggatacagagagtcttacaaattgtgtttttatcatagtatttacacatgtaaacccaaatttattttaataggatatttgaaggatctgtatttatctatttatatctatgtatttatctaccaatctactattgatttcatagggcaggagagagggagagagatgaccctgtcattagattctgaatttaaaagtatcacataatagaaatctggagtaggtataattacccttattgtatctttttaaaatttgccacaactaatgaaaatgtcttttacttccttaacaaaagaatatgcctccaaagg

SEQ ID NO: 398850 - DNA, 639 bp, Homo sapiens
gcacgagagagagctagcaccatgagcttcaataccctgtcggtcatttcaaaaaaatgaagcataaacgatgtgcatatcagtaacttccagaaaaacttctaaccatatttaaatttcttttaaacatctcttatctaactgaactaggaggagaagtatctttttctcctctccgggcagacaaagtgcagcatctgtgtgaggaactataaacattaccgcctaaagtaataaatgaatcatggtttgagtagcctgatagagtgtttcagaacaagagcattattcctctttttctgacttaaactgtttctaacaatcataaaattagtcaaagttattgtgtattcctcaaatatatcaggatgaccttattacagtcataagatcataccccttttttgttattaaacattccaatggacacaatgtggtagttcagagacattgagaaaataaaaatataggccaagcgcggtagctcacacctgtaatcccagcactttgggaggccgaggcaggagaatggcatgaacccgggagcggagcttgcagtgagccgagatcacaccactgcactccagcctgggcaacagagcgagactccgtctcaaaataaataaataaataaatgtg

SEQ ID NO: 398851 - DNA, 468 bp, Homo sapiens
tatattttttaaattcccttttataaattccttcacaaaaggcattgaaagtcacaaaagcaccaatcttatataatcaaatttcatttttgaacaaaaattgatataaaatatcttaatctgcactttaatcaatatacatggttctaaatggcttttagccacatgtgaacagtaaataagcactcaggagataaaaatttgatagcacagaagctattcaaaagaatgtgtaattagcttgaaagatagtcccaaaacaaaaagttgcagaagtttctattgttcttttaaatagcggcaattttacaataaaaatagagattccaaagaaaactgaagtctaatctacatttgtatatataaattacagtatatatttaagctgcctcaaatataaccaaaatttaccctgtcggtcatttcaaaaaaatgaagcataaacgatgtgcatatcagtaacttcca

SEQ ID NO: 398852 - DNA, 477 bp, Homo sapiens
cactttacactcaatagatggctaaaatcaaaagacactaagtgatggccaggatatacagaaattacaaccctcagtggatgatgggaaggtaaaatggtacagccactttggaaaagtctggtacttcctcaaaatgctaaatacaaagtgtccatataacccaacaatttccttctaggtatatatattcgagagtaataaaaacatcagaaacttctacatgaacattaatagtatccatactagctaaaaagtgaaaacaacccaaatatctattgttaaatggataaacaaaatgtgggatactaatacagtggaaaattattcaacactaaagaggcttcagtactggcacatgctacaacatgaatgaccttcaaaagaaagacaaatccagtcacaaataatcatacagtgtatgatctcatttatacgaaatgtccagaaaaggcacatctatagaaaccaaagtag

SEQ ID NO: 398853 - DNA, 605 bp, Homo sapiens
tgtgataaaataatagacgttaaggaactgcaatattttcatccatattagtaaatcaggagcatcaggaaaaaagagaataagtgttaatcaaactgatagatcattggatatccttatgaaggttgtatttgcagcatcaggtagagttcagctcttcctgtgacgggtaaagtctttatctctatttttctcccaagtgttgaccttccaagatattattctgcaaatctcttagcaagcacatttctgacttgtacagcattgagcttaaatctgtattggaacaacatttcaaccgtatttgagtcatagattatgttagtaaaatgtttatgtttaaaatttttagggaaaagcaccattctacttctaattcacagtgtaggtgatgacttatatttgtaggaaaagtaaagctacagcgcggtgttttctctagtattgctctaccgtcagagagtattaccctattattgttctctttaaatacagggtaatatttggctgtgttctataatgccaacaaatacttcaccttaaagggcattttggaaaagttcttgtcaagattggttgacattattataatcaaattaaagttt

SEQ ID NO: 398854 - DNA, 102 bp, Homo sapiens
tagggaaagggggttcctcagtgctctttatttggaaaagagatacggggaagtttgggtgggacacaaacggtgacaaaactttttttttttttttttttt

SEQ ID NO: 398855 - DNA, 687 bp, Homo sapiens
ggatctgagcctcctgacatccgaggcccctcttggtggggagagccagaaacccaagatactgccgtcagttaaagactcgaagttcacattttaaaaagtgcaaggagacacccggttttaggtacgttggggtgcaaggtctgaaggctggaatctgtggctcccttctttcagctctgtcatccctcttgtctgggtgctgcccacctggtagaaaggggacctcaccttgccactccactagcctgccaacaccaccaggaaggcgacccttcatcctggtggctccagtaaaaatcccagggaaggctctgattggatcagaagggccaagtccccatcccaggatgaatccctatggccaggggccctggagcctctgtccagtctgtgtcacatccatattttcagcccagcaatgggatctgcctgatctccaccactggggctgagcatagagaagaggaggttccagaggagaacagggggcccttatgagaagaggggagggatggtaaacaccccaaaaatgaagatattcatgacagaccccctctgatgctgaaatttgtgttgtctttggaaggtgctgggctaagctgtggagtgcctgcatctggcctggctctgctggggatgagcagtgccatgtggcagccccgtcccttctggggcttcaacacc

SEQ ID NO: 398856 - DNA, 289 bp, Homo sapiens
tgagaaaataagggagtgggtggggtgatggtgatgagggtttgtgctttctagtaaatctgctaatccttaatcctgtgaagagggtgggtgttagcaattcactgatgagacaatactggattatgtgtaattaagctgagatcagattagcataactagaattttttttgagacggagtttcactcttactgtccaggctggagtgcaatggcacgatcgcggctcactataacctctgcctcccaggttcaagcgattctcctgcctcagcctccctagtagctg

SEQ ID NO: 398857 - DNA, 675 bp, Homo sapiens
aatagcattctccaatttctcttccttcctttatttttgctttgttgaatagtttcacccagaagagaaagagaaaatccctgaaagcattacacacaaaaggtcatttgtcctattgccagctcaatgataaaagctcagagagtgaatagtactcccctgcaaaataagcgttgataattgaaacaccaaacaaacaaaatagataccaaattctttgaaacaatagtctactgctgccctctcaaattgggatacatttttcttttcttacaaatcaaaaaccctaaaaccctaaaggattcactctccaaaagcctttctcttgagttttgtcctgcaatttgaataagctctttgtcttcatactgtcctcacattgctgagggagctctgatgagcatatacccctctttccaagagggtatggtgacagagcagaccctagcccctgctgctgttctcttgctccaccaagagaatgagtggcagtgctttctgtgaataaaacaaaaaaatgtaaagcatacatcaaactgtacagtcagtactgaaagtgcccaagtgccatcctgttcatgccgtgagctatatgattggcctgggtgtagaagcctgaaggtgaattatcctgttgggttcagatgagtgcaaattagctgcaatttaagtatt

SEQ ID NO: 398858 - DNA, 2264 bp, Homo sapiens
  misc_feature (796)..(796): n is a, c, g, or t
  misc_feature (878)..(878): n is a, c, g, or t
  misc_feature (952)..(952): n is a, c, g, or t
  misc_feature (1172)..(1172): n is a, c, g, or t
  misc_feature (1208)..(1208): n is a, c, g, or t
  misc_feature (1260)..(1260): n is a, c, g, or t
  misc_feature (1346)..(1346): n is a, c, g, or t
  misc_feature (1572)..(1572): n is a, c, g, or t
gggggcagcaggaagagctttgtgtacattcccagtctccagtgtggaccaagggaagccattacctattctgactcatatgggaccttgcagaagtctggcaactgactcaggcagtggtcttacgttggaagaagctcccaactgaactttgtgatacaaccttgagtagggaagaactcctttagccagaactggggggtaagtgggaagtgtgctgcaatcatgagcataggagctgggcacccctgtcgtgcaggtgcgcttttcatgcatggcttgaaagctgtggttgttatccctgcagagaaggtatatggcctgggggagttttgagttctgtgctcagatggcctggaacttagggtcgttgctgctagtagaaagctgtgggtgtgagatctgccttgccaagtgtgtgggagctgggtgggacttaccactgcctgctactccacatttcctgcagtacttttctgttcaacagaggcagctatgctcctctttggaacattaccccagggtccagagaactgtctcctgactcccacaggggctgctgcttgctctgcacatggagagtcagaccaaagacctgcctaactcagcccccacctggctttgcccctctacctgcctggtatcttaacacaaaggacagaaacttttgggagctttatgcccaccacctgagaaaccggagtacctctcttgggtaacataaagcaagcacaaatcccactgctactaccatagctggtgctcttttgcaagtgccacattttggctggaggcnagctgacgcagtccattacagcatctccaagttgaataataccacacccaggaaggagaaaacttgtgtgtgacctcagctntcaccattgcctacacaaccctggctaaccaggaggtcctaagtctgtacatgtgaccagttcattactactanaaccagcatttgagaaagccaacacactaaggctatctataaccaaggaatttcacaggatctacatcactcccttgccacccccatcagagctggtgctagtacacactcctgggaaacttaaagacaggtcacatctctggatcccttgaagacattccccagaaccagcctggagtttaccagccccactgggcaacttgactcaggggcaacagcnttcacagtagtctggccctcaggggctcctactccnaggggaagggagagtgcagctcatcaaggaaacaccctgtaggacaaaggancctggatggcaggcttgagtcccagatctttctgctggtgggaagtttctttcagcagatgcacagttgcaatgctgggttcaacngggaaagtctgcagttttgccccaacaatcaggaggccctggtgcccatgaaggatctcggagaagggggggttcttctcctccttgtccaccactgcagacacagctggtgttctccccacaggagcttagcatgagtgcacctatacacaggctttctgtaacacttcagggtgactgcatctccacaggaggagcaccttccaggtgcaggcttgcatgagangtagggtcacatttcctctctacttggtacatcagcatttctgccgatgaaaagaggcacttgtctgatctgaacagctggaacacttggtcaggagtgtgtctgggaggtggatagctttcctgttggcctggcaggggagctgagatggttatggccattccctctgataagacctcagtgtgtttcactgagggtgcccccagccacttctgtcaaggctgggacttctgcccaccattgagtgttgcatttacccacctgctttagctacagctggttttaatctgtggacacctttcctattggccccaatcctgaagcattcaatccagtaaataaaatactggggaataaataaagaagtacacaccaagggggaatcaaatacacttcaagatacctctgtcattccaaccctataggagacagtgaacttgctcactcaccgagcacgttggtactgcaaccagcatctgaggaagccatcatacaaagactctctataaccaaggaactcatacacagtcttcagccctgaaagcaccaagagccaaattaagctataaactataaacattaaaagtcacatccttaaagggggaaaataaatttaacaaaatacaaataaaaaataagttcaagaataatcaggagaaactgtctacccaaactaaacccaaagctagcag

SEQ ID NO: 398859 - DNA, 2472 bp, Homo sapiens
  misc_feature (796)..(796): n is a, c, g, or t
  misc_feature (878)..(878): n is a, c, g, or t
  misc_feature (952)..(952): n is a, c, g, or t
  misc_feature (1172)..(1172): n is a, c, g, or t
  misc_feature (1208)..(1208): n is a, c, g, or t
  misc_feature (1260)..(1260): n is a, c, g, or t
  misc_feature (1346)..(1346): n is a, c, g, or t
  misc_feature (1572)..(1572): n is a, c, g, or t
gggggcagcaggaagagctttgtgtacattcccagtctccagtgtggaccaagggaagccattacctattctgactcatatgggaccttgcagaagtctggcaactgactcaggcagtggtcttacgttggaagaagctcccaactgaactttgtgatacaaccttgagtagggaagaactcctttagccagaactggggggtaagtgggaagtgtgctgcaatcatgagcataggagctgggcacccctgtcgtgcaggtgcgcttttcatgcatggcttgaaagctgtggttgttatccctgcagagaaggtatatggcctgggggagttttgagttctgtgctcagatggcctggaacttagggtcgttgctgctagtagaaagctgtgggtgtgagatctgccttgccaagtgtgtgggagctgggtgggacttaccactgcctgctactccacatttcctgcagtacttttctgttcaacagaggcagctatgctcctctttggaacattaccccagggtccagagaactgtctcctgactcccacaggggctgctgcttgctctgcacatggagagtcagaccaaagacctgcctaactcagcccccacctggctttgcccctctacctgcctggtatcttaacacaaaggacagaaacttttgggagctttatgcccaccacctgagaaaccggagtacctctcttgggtaacataaagcaagcacaaatcccactgctactaccatagctggtgctcttttgcaagtgccacattttggctggaggcnagctgacgcagtccattacagcatctccaagttgaataataccacacccaggaaggagaaaacttgtgtgtgacctcagctntcaccattgcctacacaaccctggctaaccaggaggtcctaagtctgtacatgtgaccagttcattactactanaaccagcatttgagaaagccaacacactaaggctatctataaccaaggaatttcacaggatctacatcactcccttgccacccccatcagagctggtgctagtacacactcctgggaaacttaaagacaggtcacatctctggatcccttgaagacattccccagaaccagcctggagtttaccagccccactgggcaacttgactcaggggcaacagcnttcacagtagtctggccctcaggggctcctactccnaggggaagggagagtgcagctcatcaaggaaacaccctgtaggacaaaggancctggatggcaggcttgagtcccagatctttctgctggtgggaagtttctttcagcagatgcacagttgcaatgctgggttcaacngggaaagtctgcagttttgccccaacaatcaggaggccctggtgcccatgaaggatctcggagaagggggggttcttctcctccttgtccaccactgcagacacagctggtgttctccccacaggagcttagcatgagtgcacctatacacaggctttctgtaacacttcagggtgactgcatctccacaggaggagcaccttccaggtgcaggcttgcatgagangtagggtcacatttcctctctacttggtacatcagcatttctgccgatgaaaagaggcacttgtctgatctgaacagctggaacacttggtcaggagtgtgtctgggaggtggatagctttcctgttggcctggcaggggagctgagatggttatggccattccctctgataagacctcagtgtgtttcactgagggtgcccccagccacttctgtcaaggctgggacttctgcccaccattgagtgttgcatttacccacctgctttagctacagctggttttaatctgtggacacctttcctattggccccaatcctgaagcattcaatccagtaaataaaatactggggaataaataaagaagtacacaccaagggggaatcaaatacacttcaagatacctctgtcattccaaccctataggagacagtgaacttgctcactcaccgagcacgttggtactgcaaccagcatctgaggaagccatcatacaaagactctctataaccaaggaactcatacacagtcttcagccctgaaagcaccaagagccaaattaagctataaactataaacattaaaagtcacatccttaaagggggaaaataaatttaacaaaatacaaataaaaaataagttcaagaataatcaggagaaactgtctacccaaactaaacccaaagctagcagaagaaaagaaataacgaagatcagagcagaacttaataaaattgaaacaaaacacaatacaaaagatcaatgaaacaaaattagttatttgaaattataaacaaaattgatagaccattagctagattaaccaacaaaagaaagaagattcaaataagctcagttagaaataaaactggagaaattacaaccaacatcacagaaatac

SEQ ID NO: 398860 - DNA, 123 bp, Homo sapiens
ctggttcagaattaatcacttcttactttctaagtggtctatctggttctagtgcagtctcctcactttcctggtgtttggtttatctttcaagtcaccatcttgttcatcatccgagtatta

SEQ ID NO: 398861 - DNA, 417 bp, Homo sapiens
gtaaaagtttgtcatcacacctgctctgatcccccaggggggcctgatactcggctgcagtcctgcacaagtgcccatggaggatgtgtccaccagttcattcttttgacacttggaaagaagtggaacgtggattcagatttggccagattacattcagaggagagtaaaacatggccaataatactatgaggaagctgaggatcagagaagttaaaaaatgtcatccaagatcacatatccagaagctgcagagccaggacttgaactcatgtctgtctgactccagccatgcttttaatcactctgctgggctcattagtacctatcaggcctatgattgtgtccttagtgattagcactttccccagagctggaaatgagatgcgagagaaataaaaatgcttgagatctaaa

SEQ ID NO: 398862 - DNA, 511 bp, Homo sapiens
ttccatagtaaaggctagcggttctacagtgctggaagatgctatagaaatctcacccctgtaagaggtgccacttcagaatctgcccccacctcctctcttgcctgccaagccaataactaggattgaggtcatgctgggcctggtctatgtttctgccaccctctgtgatggtgagtctgaaggaactggactgcctgaacaccccacagaacatcactctgatctattacattgacaacatcactatgattggacaagttgagcaagagcccatggaggatgtgtccaccagttcattcttttgacacttggaaagaagtggaacgtggattcagatttggccagattacattcagaggagagtaaaacatggccaataatactgtaagaccaatggtgtgctttctgagacggtgaatgcctatagaatctgtcaatatgaccgtatttttgcgtgtgtgttgtaaagtgcatataacataaaatcgacgattttaaccgtttcaaa

SEQ ID NO: 398863 - DNA, 463 bp, Homo sapiens
ctttatatttttcttttttttttttgagacggagtctcgctctgtcgcccaggccggagtacagtggcgcgatctcggctcactgcaagctccgcctcctgggttcacgccattttcctgcctcagcccccgagtagctgggactacaggcgcccaccactgcccccggctaatttttttgtatttttagtagagacggggtttcaccgtggtctcgatctcctgaccttgtgatccgcccaccccggcctcccaaagtgctgggattacaggcgtgggccaccgcgcccggcgaaaactttgtatttttcaagttcagccactttaaaaatacttgtggctgggccaggcatattggcttacgcctgtaattccaacactttggaaggctgaggcaggaggattacttgagcccaggaattcaagaccagcctgagcaacaaagtgaaaccctgttggtaca

SEQ ID NO: 398864 - DNA, 269 bp, Homo sapiens
ttcttgattcttctggttttgatgacttacatctgaaggtgtcattagtaaggatggaaaacataagaagtttagggacaattgtgagttcaagttgaagtggagttggggtgtctgtggggcattcttttgatcttaagaggcctgagccccaggagagaagtgagggctggagacaattattgaagagtgactaggattgatcgtggtagccatgaatgtcgttgaaactccacagggatggccaaaggatcaaagactgagcagac

SEQ ID NO: 398865 - DNA, 111 bp, Homo sapiens
aaaggtaagagcaggctaccagtatgggaggaggacagtactatggagtgagacccctgctgcagtgcagtttgcagagattatgaaagttgaaggtatatcacaaacact

SEQ ID NO: 398866 - DNA, 637 bp, Homo sapiens
aggtttccacaggatgagtttttttctgagggctgtgacgaagaatctgttccatgcctctctcctggcctctggaggtttgcgggcaagctttggggccttgtagatgaagttctccaattcctgccttcatcttcaaatgatgctctccctgtgtctctgtcttttcacaggatatgcattccctctgtgcatatccttctctggacccaaatttctctttttataaggacatcagtcctattggattagggactagcctcatgacttaaacttggattgtctctgtaaaaaccttatttccaaataaagtcacattcttaggctctggggctaatgacttcaacatatatttttggggagacacaattcaacccataacaatatcatatgcacaaaaaacaaaggattgtttttaaaaagggtgattcagaataataacactgatttgtctagaactccttcagtttttgggaaacaattgcaggattggagtcataggctgacaagggatttagctgatggtgaggctcaaaagtcaaaatgcaatcaaatacattaaaatatatttaaatatcctgaagccctttataaaaatgctcttaaagcccacaaattcatttagtcttcctgtact

SEQ ID NO: 398867 - DNA, 832 bp, Homo sapiens
ataagttaatcaaatttttgcattagatcataaaactggaaaatcacacttagttttaccacaaagttttcactttattttctgaactatttctgcaaaagcaacagtattgtctgactttggtaagtgttttgtgagcttacactttttcattcaattaacatttattgacccttattatgtcccaggcattttgttctgtaggacaaagttcttggagaaaaccaaaaatcatctctgctaggggcttctttcaataatacaagactaagttcatttttctgagcctctaaatgtttgctgtttacaattcatacagggtgactacattgacagctgaaagcaatacatattttatttttttttaatttaagaagtgtgtactttatgataggtgatttgggtcagctgtcagattgaaaaagcttttttctttgtttcctctgcatcaagaccatttttcagcattaatatactgtcatatcatcttctatttgtcattaccatacagcatgcctgtgcatttagaaaaagcaacagaaaccacaccatgtcattacttcttccgtatttaataacagaaactaactcttgcacatttagggactagctcctctccttggtcttcagaatataaactttgccatcaaagtatatggaactcacgtggggttcactggtcttctaaattctacttcaaaatttatctcccaagttgtactcaatattagctatatatttttatgttcacatgtcaaatacgctccctttcagcctgccttgtgtttcaaattctcttttccttacaacattgcttgccatgtcttcattg

SEQ ID NO: 398868 - DNA, 344 bp, Homo sapiens
gcagaaagcaagcgggaagatggaagatgtgcccatgccagccttggatctctcagcgtcacacacgacgcccaggaaggagtgaatgatgcacagatgaccagaaaccaggagaagaggccagtgacacaccagaccaggaggcccagctcatggggtcatcggacccaccttgaactctgaaggtcacacattcaaaagccacaggaagtctggagatggcagcagagagctgggaagctcagaggtgtcaggatgaacctggggctgaaggcggaacagttggagattgagacctgtgtataggttttggtcgacgtgggattgcttgtccctgggagcca

SEQ ID NO: 398869 - DNA, 649 bp, Homo sapiens
gcctggtgaaaggttctgtataccctgcagatgccagcagaacggagggggtccagccagtctctggcagtgcccgcctgcctcacccctgtcagtcacatgctacccctctgctacccaggaggcccccatgatcctccctgaggcccagcctgcctcttgtccttctagctgacctcatacactcattggtgctatggcagggccttccctctgtagggcacctgcaggtttcggggggcctcttggggatacctgtccttgttcatggagacctcaggctccctggggaggcaccagggtggagaggggctatatttttttcaaggtggtaagccatctattgcatgcccacctggaccacatctatctctgcctttaaaaaatttattaaaattttttttttagagacagggtcttgctctgttgctcaggctggagtgcagtggtacaatcatagctcactgcagcctccaactcctggtgtctctgtctttttcattttttttttgagatggagtcttgctctgtctcccaggctggagtgcaggggtgtgatctcagttcactgcaacctccgccttccgggttcagcaattctcctgcctcagtcccccaagtagctgggattgcaggtgcccacaaccac

SEQ ID NO: 398870 - DNA, 395 bp, Homo sapiens
tgcatttgctgttgagccgccctctcgctctatgtgtgtctttaaccctcaccttcccttggaaacctaacaagaagcaggagccaggaaggtaggaggaagacagaagcccatggtgttaaaaacagccacaggaattatgtagaacagtgattctcaaagtgaggtccacaaactctcggggctcccatgacccttgtaggaggtccacacaagccaaaatatctctatatggatactaaggtgttatttgttgatttcgttctcatgagcacatgaatgcagaatggagatttccggaggctaccggaaaggtgatattgcaacaaactggagaaacaacatcatgaaatttctccattttaatttctaataaatatcaatgtttataagca

SEQ ID NO: 398871 - DNA, 507 bp, Homo sapiens
tgaatcagggaataggtctaattttactctgtgaacagacttgttgaataattttagcttattacatgtatcacattttaggcacagtattatatgtgtacatcaataattctttcagttcacaatgctttgtgatacaaaggttattcttgctccttttttacagatgtgaaacctgaaattagtgatttgccaaaggaaatgatgagctgtgatcccaggtctgtctaacctatacttgtctccaaacggtaggacagtgtttccgttctctccatagtgagattcagcctctttaatgcctcttttagcaaaatattacaatgaactcttctccaatgaacagtgagcaatgtctccttgagcaaactttcttggatgaattgagatgaggcaactgaagaaggcattgaaaactataatattccttagaaattaagatttcttctcatcttgaataatggctcttacatcatcctaaagtataaaatactttttttctgaaaa

SEQ ID NO: 398872 - DNA, 305 bp, Homo sapiens
aagccgctttccttttgtgccaagtcaaaggccttagattgtaaaacacagggcactttgattgcaaaaacaaaaatagtggtaaggtagaattaactgacccccaaatgccttttcattaccaatatccttattttggaggacaatggtatcttccaaaatgaggcagtgtgacacagtagttagacctttagactgaatttgccccttactaggttggagcctctggtgaggagtttcacctctgtgcctcagtttcctcatgaagaggatgatacagagataatgttccctgtcatgttgag

SEQ ID NO: 398873 - DNA, 138 bp, Homo sapiens
catcattatcagcctttttggaatatgtccaggaaaagccaggatactcaataatgtatgcattcatttcaaaacatggaatatcttttcttggcaggcccagtgttatttgtaggagggtacagtaatgaacaatat

SEQ ID NO: 398874 - DNA, 253 bp, Homo sapiens
gttatttggttgctttcggtttggatgtgggagtttggaaaggctctcaggggaactccaatgcagtctgagcagccttgggaggcttgcaggtgctgaaaaggccttttatcttttcctcttactctcactcactctttctgcaatacttcaatcgttaagcagtcatttaaggcacaatagaagctgggcatggtggcacatgcctgtggtcccagctactcaggaggctgaggtgggaggatcccttgag

SEQ ID NO: 398875 - DNA, 121 bp, Homo sapiens
gaacacaggtaaaagggatgtgatctgaaaactgtttggtgtgtagaatggggagagaaaaaaggaagcaaattaaattgaaggaggaaatatggtaaatttaatttttgagtttattatt

SEQ ID NO: 398876 - DNA, 280 bp, Homo sapiens
taaaccagagcattggaagttggactagtgcaaagctttcaggggaccaaagtccctgcagggtcacaggtgcagtctgagccttttccttcctgctccacagtgcaggcattcctgcccctttccccaacatgaaacacagccacctctgtggtctctatcaggttgctaaatgattttccgaacctgagttagccagcggccctgtgagctgccagccatgctgagtgactgttctaaaagggcctgagctccttcaaacagcccatgtagaaggttc

SEQ ID NO: 398877 - DNA, 611 bp, Homo sapiens
cctgtcatatggcaaaggccacagaacaataaatgcatttcttttaaactgagaagtaactctgatgtgtttttacaagagaattacttccatttctctgtaatttcactgctttcaaatccaagagcaaaattcatacttagaatgacatttaaaaggaaagccaaacgggcttttattcattatatcacaacacttcttacttcattaaaacattctttatgcttgataattttcagattgataatacattaccagattaaggaataggagtatgatatacaatgatatacaactaacagtttttggttctttttttgagacagggtctcactctgtcacccaggctggggtgaagtgtatgtgatgtcagctcactgcagcctctgcctcccaaggtcaagcaatccttctgcctcagcctcctgagtagctgggattacaggtgtgagccactgcacctggccctttgactctttatacccactctgtttcccaccccattagtcaccaaattgattttcttggttttatctgtcttgtctctccctccttgccatcactgtcaccctaattcagtgagcctctgcttcctgcttggcctcttgcct

SEQ ID NO: 398878 - DNA, 423 bp, Homo sapiens
ctttcaagtttttccttttgattctcagttgccagtgcatttttttttgtcattgctaaggcgaagcatggaaagagctctctgggtacaatcaaaatttaaaggtagactaccatgtctaccttgtcatactcccaacatgtggaacccatgtgttgggaatatgacaatcaaaagagaaactctcaaaaggaagaggacattgagggtgatggcatcaggactccatgtattagcacttttttttttttcctttgagacagggtctctctctgtcacccaggctggagtgcaatgacactcaggtctcactgcagcctcaaccaggagagctcaagccatcctcccaccttagtactcctgagtagttggactacaggcaagcatcgccatgcctggctaacttatttttaaaattctttt

SEQ ID NO: 398879 - DNA, 460 bp, Homo sapiens
atcatagaaaggcaaacaggagctgagccagttgaaactgaagcctacaatctgaggtggggggtaatctcgagcagaggtgctagatggtgagaaaacaagtaggactttcggctgatgggtagagacaaggaccttagtaaagagtattcatgtgctcaagaggaataacttcctggctaattctgtcgtttttctcgtttttaaattattgatattatgttttctgctcttaaaaattactgtgtccacagaggtctacagaagaaaaaaagtaaaaaaataaataaaaattactaatgtgtaatattttagctatgcattaagttattaagtaaacttttgttagcaagactgataacctactatttataacattgttttactgtgaattgaaaccaaattaattttagaccacatcccatttgaaatttggaattacttgtgtttgtatgtcttg

SEQ ID NO: 398880 - DNA, 363 bp, Homo sapiens
acgtagggatagtagtatttttggttggcttcaagctttgatgagtttttgtgtgttttgttttgttttactttaaaaacctgctttttaaacacgtaaatccttatttggctaattttcagggcacagtgtgagtataaactcatatgagagtctattgttctctagaaactacagattaaggtgtctttaacagactgatgtctaattattacataaaggcatctgatttttataccaggacacctataagcacattattatagaggtggaacatttgataactctgccatgctacagtctgtaactgaccttttgccttgccatggattctaccctaaggggaaaaacaacctgacatta

SEQ ID NO: 398881 - DNA, 411 bp, Homo sapiens
tcccttgtttctttgcctctctacttgctgcactgtgtacctgtccaggtgtgtggccctgtgaggatggctgcttcacatcccaggaatcagaccacgtggaaggaaccaggctcggtggtcaggacaccagagcccaagtcttagccccatccctctccaaggcaggcataactcccaagcctcagtttctccacctgggaatgactctagctcaatggtggctgtgaatatcaactgagatgtgagataggaatatatttcttagaagcccagaacactcttggaatgaaagtttattgtgatttacgagttatcagccaaatttgttttctttatgttgaaacccaacattctttcccagtccacataaatcaagtatgtgggaggagggggatttgatccactgcc

SEQ ID NO: 398882 - DNA, 408 bp, Homo sapiens
gagagttcggctcccaggaccttgacctcgctacatgggcagagaacgcccaggtgttgttgcaattgttgtgctggacgatgagtgcccgggggcgggggcgggggcgggggcttgacgcaggtctttgcagctctaaagctcagtttacaccatctctcaacattaaaatattgtgtactggggtttaataataaaactgtacagatgtgataatatactaaaactttcacttaacggaagaggtgcctttaaagaaaaaaccgcacaggggcatcatttgggctagtgaaggccctttttcctccttctttattaaggtataattgacaaaaattgtgtttacggcgtacacatgttttgattatgtgtatattgtgtcaaatatatacagcttctgaaaacaga

SEQ ID NO: 398883 - DNA, 296 bp, Homo sapiens
gaatccggccggcgtcggtgctgggaagatgtcaggtcatcagcactgccatcctcatctacccagtgcatatcaccaaagatgagacgactctctcatcttctgcctctaagacacactgcggttggttccactgtggtacaaacagcctacagctcctgctaacttgctacagtaaggtgatctcctctaaggtacctcctatacggtgatctcttcacaagcaccagtcaggccattttagaacaggtctgggatgttgatattttccttccaaagaaccctgatactctaca

SEQ ID NO: 398884 - DNA, 394 bp, Homo sapiens
gcatacagattaccataagaataaaatcagcaatataaacataggaaaagtaacagccctgaaattattaaatttaactcaaatattttattaaatacttactccatgacctggatgcaacaagacattaggagacacaagaggtacaaactgtggttcctgccctgacatcgcttactatctgagacagtagaaaactcgttaaattattaaagaacaattatgagccagactataaccaaatcccataatgagagatcatctgcaagtgcattggaagaggtaataggaaaaaaagggagagattactagggagcaccgtagttggagacatcttcagttatgaattgtggcctatcttgtactgtaaaggctaggtgatatttgaaggatg

SEQ ID NO: 398885 - DNA, 370 bp, Homo sapiens
aagaaacgagattgagaatcagattaaattgaaattaggcaatttttgtttttgccaaaagattcccttagaagaggaaaaggtcgggccgggcgcgttggctcacacctgtgatcccagcactttgggaggccaaggcaagtgaatcacttaaggtcaggagtttgagaccagcctgaccaacagtggaggaaccccggttctaataaaatagaaaaattggccaagcttgatggcgggtgcctgtaacctcagctactctggaggccaaggtgaggcgggagaatcacttgagcccgggaggtgaaggctgcagtgagccgagatccagcctgggcaccacagtgaaactccatctcaaaaaattaaa

SEQ ID NO: 398886 - DNA, 346 bp, Homo sapiens
gggaaaggaagataagacaatgagggcaatgttgggcatttcttggattcttcttcagttgtccagtgattgtcacctttcttggcagatgcaagagttcagtgaatgaataaaatagatatttggagtgtgactctgaacacctctcgtcaaatatttgtttgagcctttaaagagtctcgtggtagaagcaggtgttggcatctctctgaggccttgtacctgtgaggaagaggatttgggagacgggagaggaagcacaaagcagcagtggagtgaaccgctggtgtttcttatttcacatgttttcatctcaaagaaactctcccttagagcacccagtcaa

SEQ ID NO: 398887 - DNA, 427 bp, Homo sapiens
actcaacgccctctgtgtgctcggcactatgtgacacactttcataccttgacatttacaaccagcctgtcagctaatattgtcttccttttacaaatgaggaaactgagattctgtgagattaagtaacttcaccaagagcatgcagtttgactgaaagcacatttgtgacatatgggtcaaaggaactaatatttcatttgtcataaggcctggtgagtcaatatagcctagtgatgaagagtttgcctgggctgtgttttaatccatgccttagcgcttcaagctttgtcacttaggcaagttacttgatctttctaagtttcagtttccttaatcttaagataaaaatgaaagtaattcttactctatagtaaatggcaagcccatggtacatagtaagtgctcagtaaatgtaagcttaagg

SEQ ID NO: 398888 - DNA, 693 bp, Homo sapiens
ctctgtcggccaggctggagtgcagtgacacgatcttggttcactgcaacctttacctcctgggttcaaacgatcctcccacctcagcttctcaagtagctgggactacaggcgcatgccaccatgtctggataatttttgcattttttgtagagacaggattttgccatgttgcccaggctggtgttgaactcctggactcaaacgatcacctgccttggcctctcaaagtgttgggactgcaggtgtgagacaccgtacccagccttgttttgtttttgaagatgagctgaggttatcagtggaaaagtgatttggaaaccataaaatgagatttgggaatgtaatagagaatcaaggcgaagactaagttttctgggagtttttaaaaagattctttcgtgactgtgattctcagaaaaggtttgaggcttactgactagatagttgattttcaattttttattcaaataattttgcatttgttgtgactctttcttttgcaggtgacggaaatacaattcagacagacttaaccaagagagggactttattgactgagtaactagaaagcctagaagtagttctacttttagacacagctagacacagggaggtaaattatgtcattaggactcactctctccccctttggctctgcttttctttgtacggtgtcgctatggggcaggc

SEQ ID NO: 398889 - DNA, 239 bp, Homo sapiens
gctttgggttgaaatagaaacttcagcctaaactgtcctaggcaagcaacaagacaatgtctgggctcacaaatgataattccagagaataaggaaagcatgctgcagttggggctgtactggagctccattaaggtcacctgttctgtttccttccctatctcgcttggctttgcctgctgtggagagctccatatttaggcatgtttaggcccttgtgtttacaatgtggctgctcc

SEQ ID NO: 398890 - DNA, 575 bp, Homo sapiens
ataaacactgctgttttcaaggttctatactgtgaactcttaagtgtttaggtaaatgtaggtataagccctcctacaaaggaattcagtttgataggagagaagataccagcacagactttccaatttttgaaaacaacagtggaagtctgtagctcctaggatctcctatcctagatctcttttcccctccttagccagactacctccagagaaatctctagatccattgcctcccagtcattccccaacaggccccggcatacagtaggagcttggtggaatgtttattaactaatgaatggtcaacacaggtaaaaatacaaaatgctatgaagtttaaaggaggaagagatcacatggctattaactagcatttatttaacaaatgggtgttggttttctcaccctaatacaatgaagttgtcagttaaagattagtttatcttaatgttttcatttgttattttctgaatgcctatatgcaggaaaatgcagatgactctgatggtataaaagtctgttcattcatctaaaagaactgtcataatgggggtctagatatcttttgttta

SEQ ID NO: 398891 - DNA, 287 bp, Homo sapiens
atttttaagaattacttttggtttcaaccacagtttgtagcacatatgtctgtgtagcatatttgtacatactccttcttttgttcgtgttgaaccaagaaaatagactggtagtaattctactttgttaacactcccagattaaaagaatatgctatattaatgctctatgtggaagttagagtgatatgaaacattattttcttagcaacttagttggattggctttctttcctgaaaaccacacacaaaggctattttagtgtactgctttggtttaattttct

SEQ ID NO: 398892 - DNA, 434 bp, Homo sapiens
gttcacatgaagctggcatgcttcatggttctttctttgccgcttcctcggaatcagtgcaggatttccaggatgccagaagacagctcaggatttggctcagggattcagcttaaggagtgtctgtcaggaaggctgtgccctgaggataaggaaatgcaaagacaaagacagagaacaccctcttgggaaggaaagttggccttgcccttacccaagactgtgccagccaccacagatgagaagcagcattctccccattctcacctcaccaggagctttgacagacctgagctgctctgcccaacagaccccagggagtgcccgttcgcctcatctggtttatgtcacattgttctgccttgagtcctgtcaacacctgtatctgaagaaaagccagtgtggataacaggttctggaatcttccctcccac

SEQ ID NO: 398893 - DNA, 500 bp, Homo sapiens
cagtgcattgtcgcagggattagatgacacaggcggtgtgggcttctcagccctggtctggtgcatagtgggcatttggtgaagggtgtagctgttgcttttctggtgccaggtggagctctggctggattccaagcgtgtggcaagggtgaccaggcacgcacctgcagctgtcttcatccacgacctgcccttcctcctacctaaacccagctccagtttcagagcccaccttttccttcctcctcagagacctctctcccttcccactggtctgttccctctgcctcagtctcccaaacagccaatgttttcctttagagatgttctgaagcacaatgttgacaagcctagactctggggccacactgtctgggtgtccctcctctgccccttacctcctgtgcgatcctaggcaagttccttagttgttctctgcctcagtttcctcatctgagagaataaagagcccactttatacggtggctgtaaagaccaaa

SEQ ID NO: 398894 - DNA, 362 bp, Homo sapiens
tgacccaggcaggtaacccagtgaagtgggaagggtggactgcagtgaacacaagctttcaaagggtggtcctggagaagcagctatttcaaaaccatgtgggccaaacatttctatggaacagataattccttgaagcccatctgtaaaactctagttgatgggagtgtatacttttaactccattctttaaacatataaactactgttttgaatcttgctgaatgctccatcatgtatcttggactcctttccctatgagcacctgtagctctaccttagacttgtcagtgtccacaaggtactccattgcatgggtgccccaaaatgtatccacacagcccccagggagagagatttgg

SEQ ID NO: 398895 - DNA, 98 bp, Homo sapiens
tggaggtggcaagaaggatgacaaggacaagaaaaagaaatatgaacctcctgtaccaactggagtggggaaaaagaagaaaacaaaaggatcagatg

SEQ ID NO: 398896 - DNA, 218 bp, Homo sapiens
gaggaatacatttgtggagcacagattaggagagattggtgcaggggtggggggtggcaggaagatattaaggttggaatttagggaggtgagctctgtgggttggtttcatgcatccagctcaccattcaacctttcctgttaacttcctatattaaggaggctgagattaagaagacagggactcgtggcgtaagggcgagacagacatagaggtg

SEQ ID NO: 398897 - DNA, 427 bp, Homo sapiens
tgtcttttctttatgctgaaaacatcctattataattattctcctccgactattttgaactgtacattggattattgtaaattatagtcaccccactgatctatccaacactaggtctcatttcatctctcaaacggtgggtttgtgctcattaatcagcctctcttcatccctcctccctgctgccacttttgcgcctttaatctatgtgttatggggatgtccatatttgataaaactctgtcccattcatggcacaagctgcaacctaactatagtagtttaaaatactgtgaatgaaatatttgtcatacatctgcatgattaaattttcttcgtgaaacgtaaagccagaaactcagtgcatgtgagttataaatccgtggtggtactgatagcttaatcctgcatatttcaaagaatcaaa

SEQ ID NO: 398898 - DNA, 484 bp, Homo sapiens
cccttacctaaaaccttctctaagcatagttctcccaagtcaaaatgattccttggtaatattatggacattttagaaaacccagtaatgcattcaaaactttggagaattctgccaaagtgtaatctgttttcaatcacttaccatttactgagttcataacaacgggccaggcaatagtggcagatgatttaagacgcagtccccgaccttgtgaaagtcatggtcactctaatggcatgagataaacatatgaaccaatagaggaggaaatgacattacttgaaaccactaaggtggctccacagaggaagtgacatccaatccaagacctgaaggatgacaggagctgggcaaagaaggcaaggaagacagccagtgtaaaggagcagtgccaacaacatcaagtacagagtgcaaaattaggcagaatccaacccttaagaactaagccaagcagccaggtgcggtggcccatgcctgt

SEQ ID NO: 398899 - DNA, 129 bp, Homo sapiens
catcatcattccccacccccatccccgctaacaacccagctccaaccaggtctgggcaaggttatggcgccctcggaaacggagaaagggctcggtgaacagcgcggcgcacagacatggcggcggccg

SEQ ID NO: 398900 - DNA, 274 bp, Homo sapiens
tgctaatctgctggtgcggagttcagatctccgaagcctccctggagtatttctaggactcttaccgcttcccttataacgctgtgaccccagcgaggattttttttttcctttaaagaaaagctaaactgtgcagttaccgcaggagatttaaggaggaggaactggcggggggaggggggcattccgtctataaaaagcgccttacaaagtcctgaagtctggaaatgacagcggaggatataaaataaaaaattttaactccgatccaact

SEQ ID NO: 398901 - DNA, 280 bp, Homo sapiens
gtaaagacagggtattgccatgttgcccaagctggtcttcaattcctggcttcaagtagttctcctgccttggcctcccacggtgctgggattacaggcatgagccaccacactggccttgaagtacttttaatgctttcaaaagtccagatgccttgaagcagcatcaaccaccacacagaatggagatgaggatactaggaaaatgtgtaactacaccttggttactgcatccaatggttcagtcattagaatatgcaaataaattgttccaacttca

SEQ ID NO: 398902 - DNA, 388 bp, Homo sapiens
gctgaggaaaccaactgccagcactgcagcagcaaaagccctgtagttttttccaccttcacagtctccaggtgcctggccctctaatttctccttcctctgtccctgaaaccacctaagctgttcaataccatggtcacccagaccagacccagggactcaccccagtggccatcgcattctctgggtgcctaagccaatacccctcctctatggagtcaccccagctgctgcctctacaagtgctctgagccaaggacccagcacagctaccatgcatgtgcctgcacacagccatgcctccccatccccaggttctaactccagcatcacgtttgcaccctcagctaggccccgcggctgcatgtgcacacacgcctccagctca

SEQ ID NO: 398903 - DNA, 409 bp, Homo sapiens
tccctcggtgctcttgatgttgctggatttctgcctatagccgactggttctccttagaagaaatgcccctttgagcaatgcattctgaagtgtctggcctaggctggcgctgtgctgtcttgggcctgtctcaatcagggcccatgcccaagaggaacaaagctccttccacaaagaataagtgaggccatgcaaccttttctgaggggctgccgtgtgccaggtacccagcacaatgtcacattcattataacccagccttgtagacacgccaagcttccagcacctcagtgccttcacgtgtgctgttctctgtgcctggagaacctgcccggccacagatcccttatctccaggtcgcagcctgttgatcagtcagggaggccttttctggcctttcgtcccccg

SEQ ID NO: 398904 - DNA, 476 bp, Homo sapiens
ggcagctccctatgttgctcaggctggtctccaactcctgggctcaagccatcctcctgccttggcctctcaaaatgctgggatttcaggcaagagccaccacacccagccaacctgtgttgttttgaaccaatctccagttgttcacatttgtgattgactgggtttgttgttcttgtcatttttggggttttttttttttttggtttttgtttttgtttttttgctatttataaatactgcgattgagtagtattgtagaaataagttaagtttgggtcaactgattttttttaaggatgtgtttcttgaatctcctacctttcctttcagtcctttcctgattcttcttctgacttctttcatcatctttttcctgcttccaaaatgtatgtatcactgaagcctcaactcctattcctttgcctttacctaccgcttcctaatgttctcatgtatccatactgagtccctgt

SEQ ID NO: 398905 - DNA, 876 bp, Homo sapiens
gttaggtatcattctgtgacctggaggatggtgccaggaatagacccttgcccagcttccattgtctcagtgaacacactgaatcattttgttggtggcagtgctgctgctttttggtgtaagacaggtggcattttctgacctaactggttattcagttgctggggctctctttggcgtggagtgcctgtgtgactaggtgacctgttatttatgtgactggaagaacaggttgaaatgttggcattagatgtgcactgctgccttccttctgtggcctcttcgtcagaggcaggcagtgtctttggaggtttactatggaatgtgcactgagcaggcatgttacaccttctgagtcttggatctggagttgctgggaatttggtcttgaacagtgagtacttttccactgtaaagcaaaactgtacacttactcttgccagcacatgccagctgtccatagctttggctctgctgcattaacaagtttaaatagggtgtgtgtgtgtgtgtgtgtgtgtgtgtgtgtgtgtgtgtgtagcaggaaggtcaggacagaggtaaaactatttggcaacacttttcctggagtggagcaattgccttcacttaagagaggggaaggaaaaagtcattaaatggagattaaagtaaaaacagagaaggaaagaagaaaatagtgggaaaaaaatggaaaacattgaagggctttgagaccccacagtgttattttatttttctaacttttttttttcctgtgcttctctggcacctagatacttcctacaatttgaattcctttaactgtcatggagcattgatgattaaccagatgaatgaagtgtttggcttaattattgagacagcatgtgcaca

SEQ ID NO: 398906 - DNA, 209 bp, Homo sapiens
ttaaggctccacccttacaacctcatttaaccttaattaccttcttccgggctctacctccaagtcacattgggggttagggcttcaacatataaatgctggggatacacaattcagtccatagcgaacagcaatggaacaccatttgtgttcccctcacacatgcagctattcactacttctcactacagcatatttgagtgcctact

SEQ ID NO: 398907 - DNA, 587 bp, Homo sapiens
ttctggtccttatcccaacacttcttctggaactcccaaaatgtgaaatattgttagcttaatagtgtctcatatgtcacgcaggcattcttcattcttttttattgttattttttaaatctgtctggtttattgcaaaacacctgtcttcaaatttagaaattatttcttctgcttgacttagccggcttttgaagctttcaattgtattttttatttcattcatttaatttatcacctccaggatttttgtttggttctttttcatatctaactctgctggatttcccatttagataatgaattgttttccctgatatgtttgtattgtctatttgtgttctcttgtatctcattgggtttccttaagatttcctttactttggagtctattattggagaattattgtgttcttttggcaagtcatgttttcttgtttttttccccccaagttttttgtgtccccaagttgatatctgcatatctggaataacagagacttccaattttatggagtagccttagtaaggacttttcctgtacacgcgtctgtagtatcatttgggtagggtgctttggctttggt

SEQ ID NO: 398908 - DNA, 405 bp, Homo sapiens
cagccatcaccacattcaagacacggagcactccattacccagtaacttcccttctgtcctatctcagtcacctaatacctcccctcaccttaggcaaccctggatggtttctgttgctggataacagaattgtcttttctagagtttcatctgaatggaatcatacaattatgaatgaaaaacacacaggtatactgttttgtgtctggcctctttggctcggcataatgtctcttcagatcctttcacattgttgcatgtatcaatatttcattcgtttctatttccgagtagcatttcattgtatagatatatcatcatttgcttatgcatttatttattgatggacatgtggatagtttccagttgttggctattatgaataaagctgctatgactattcg

SEQ ID NO: 398909 - DNA, 1403 bp, Homo sapiens
tgcctaacttttaattttaactattgtttatctgtatgcttaatttggctttttattttttttgttttcctagtgcatttggattttacttagcttttattatgaagccatgtgtttcagtttttttctgtatgtgtaggtgattgggcttatgaattgatcaggagcatggaggaataggtacatctggattagcgagtgtgtgaattcttgagctgatgggcctaagctctaaaggatagattagttgtcagcatattctggtctagatagtatggcatagtttttaccagtatgctttcttttccccatcttcccagtttgctttttactctaatggcttgaaaaagtataggttaggttggaagtgagagaacaaaaatctgctaatttaactctgaacaaggaaggctttaggctgatgtttgaaaagtgtgttccatggaatactggtctcctgaggtagtctgagaaaagaagggtcctgtagtccaggaagttctgcatactccttttgtgaattcaggatgtgttgccatattaagtctccaggatttgcagtcaagaaagttaacttggtttaactgagcattttctgaaattacttggttaaggaaatacggtttttctttcttttattcttggtactagttctgaggatatgttaagggaaattttaggggattgttaaagatctgtggatccttgggtggaggcaggtttaaacaataattgtttgggaatcttaattttgaatgagagtgctggctcaagtcaaatcaaagtaccccttggaaaaaaaaaagttatattattccacttaggttgggcttcaggtttcaattgaaaggaagcaagaaaactgtccttgtctggctttcattaaataacaattcagtcaaatgatttcagtaatgaattttgtctaactcaaatgcatttgttatttaaataaaaattaagatgtgctgttttttaaaaatgtaattctctaaataaaaaaaattaacatagaatcctgccagcttaaacatcaaactgaaacttactttaaaataggtatatacagagaaatatgctcatgttgtaactcatgcctggtttactaaatttgggaatgactgaattgtgaggtgaagaggaattagtaaattttggaaagaaaaatacttatctttgttaggtcatttaaacaaacattaagatgcaattttgtgagatctgtcagtaacaccggttgttttctgtgaacttagattttaatctattaatagaatatattatctcccctcattcagttatatcataaagttttggtgacctttgtagcctttataaaagggaagtctaagggtggatagtagaatagcattttatttggaaggccctaaagatttttgtaa

SEQ ID NO: 398910 - DNA, 467 bp, Homo sapiens
cctatctgaaaatgttgagtaaatttctgctatgactagtagattcaggagattaaatttacttaatcgtcagtacaaatatacctcttcttatgtgctctttatgaaaataaacacatgaacaaaaactgagttgatcttcctaaaatggacacattcatacaaagctaaatcatcttctatcacatactgaaggcaaatgatcgcatacttagaaaaacagaggtgtatcttgatgtagtgtgtatacttagtattatgcctgacacttcttcacactgctcttcatgtgttcacaagcatataaatgtgcaactccatttctataaagtcaaattcatctaacgttacatagtctggttgatatttctatatcttttcctcctttaaatgtgactagctatttacgccataacaattctggtgtagcgctgatttagcatttttattggaatgtgaaagctctt

SEQ ID NO: 398911 - DNA, 106 bp, Homo sapiens
gaaaatatatataatcagcaacacctctgtgaaattgggcaaatgatttaacctccctgaattgagtttccttatctgaaaaatcaggataatcattcctgctctg

SEQ ID NO: 398912 - DNA, 423 bp, Homo sapiens
  misc_feature (421)..(421): n is a, c, g, or t
gccgaaaagcaactcacgattctgccaagtgacctgaaatgccaatgcagatgatctctgacttaccctggtttgaattaggatttttttacttttatgttggatttatcaggacataattccatcctcagtggaggaacatctggacttaaaatggttcaacttacaacttttcagttttacaatgggtttttcagggtattaaatgcattttcaacttaggatatttttgatttccagtggatttattgggacatagccacatcataagtctagaaacatctgtcttagaaactcacagcgtccgaaatcttcaaagacatcaacaagaaattttagcacccttgccccaacaacacaccagcgccaacctcaccggacaccccccgattttcccacggtattagacaaggagagccanag

SEQ ID NO: 398913 - DNA, 353 bp, Homo sapiens
tttgagatggagttttgctcttgttgcccaggctggagtgcaatggtgcgatctcagctcacagcaacctccgcctcccgggttcaaaccattctcctgcctcagcctccagaagtgagactgtctcaaacaaacaacaacaaaaaaaatcagtcaattctcctgactctaggatcaagacagctgtactcacggtaccttataaatggctggtgctcaacatatagtagttgaataaacaaactttcttttaatcagtagttcccaaacctggatgctcatcagaaccccctatggaatttgtaaaaatgaagctccctgaaaagcccactccattcacatctctcgaatca

SEQ ID NO: 398914 - DNA, 198 bp, Homo sapiens
acttcttagctttcctcagatcaggaagtgaatatcatcttagacactttattacaaaggatcaaaaatataaatagattcatattgtaatatttgtagttatctgggagacttttcttctctttttacctatagtggaataaatactataacagtttttgagtatctgatatgatagcacttgatataatatgatgt

SEQ ID NO: 398915 - DNA, 633 bp, Homo sapiens
gaaaaggatgttctttagcaacctcactcgtttgatccattcatcctgtccggggtaaggggtgttcccagtgtatcggtggggcataaaaaggggagtaaagcctggaggaagaaatgaaaggtgggagagcaatctggtgggagagaaggggagaacggagacatggagagaaagggggagttcttttatgtgtttagtatcccaaggaaaacaagggttctatatatgtaaattatttcagataactagtattcaactctttttcttcaaatctctctaagggattcctcgtgtgcctgcctttggggtctgaatggctcaggtcactcctgtggccaggcgtcctgccacactgcctctcgggacacgctccaggctgcaacaggctcagagctctctgccttatacagtatataagacagctctggtcttccgagctttttatagatgctctgtctcctcccttactgtcaggctgtcagctgtcacttctagatgttctcccagaacgtatacctagcagcctagtttgttgcttctaaatctagtgaactaaaaaagcagaaaaccaaacttgttagaaatgtggctaaagtaagagcacagaagctctacatggaagcccaagga

SEQ ID NO: 398916 - DNA, 340 bp, Homo sapiens
atatctacataaccatgatcacatcagcacttcttaaaatattatggtctgtacctcaagtgagttgaacagttaccatatgacgcagcaatttcactcctagttatataaccaaaaaggaacaatttgaaaaaaaaaaaacaagaaaccaatcccatttacaatagctatcaaaaacaacaacaacctaggaatcaatttaatcaagaaggtaaaagacctctgcaatgaaaattacaaaacactaataaaagagattgaagagaacacaaacaaaggcatcccatactcattgattagaagaattaatattgttaaaatgaccatactacccaaagca

SEQ ID NO: 398917 - DNA, 1128 bp, Homo sapiens
gacctttgtctctcgctgcatctggagctctaggtcgcctcttcgctactctgtgtcctctgctcctagaggcccaccctctgtggccctgtgtcctgtaggtattgggagatccacagccaagatgccgggaccccttagaagcctagaaatggaatcattgcaatttagagatgtggctgtagaattctctctggaggagtggcattgcctggacactgcacagcagaatttatatagggatgtgatgttagagaactacagacacctggtcttccttggtattattgtctctaagccagacctgatcacctgtctggagcaaggaataaaacctctgactatgaagagacatgagatgattgccaaacccccagttgtgtgttctcattttgcccaagacctttggccagagcagagcataaaagattcttaccaaaaagtgatactgagaaaatttgaaaaatgtggacatggcaatttacactttaaaaaaggctgtgaaagtgtggatgagtgtaagttacacaaaagaggttataatggacttaaccaatgtttgacaactacccagagcaaaatatttcaatgtggtaaatatgtgaaagtctttcatcaattttcaaattcaaagagacataaaagaagacatactgaaaaaaaacctttgaaatatatagaaggtgacaaagcttttaaccagtcctcaacccatactacacataaaaaaattgatactggagagaaaccatacaaatgtgaagaatgtggcaaagccttcaaccggtcctcatgcctgtaatcccagcactttgggaggccaaggtgggaggatcacctgatgtcgggagtttgagatcagactgaccaaaacggagaaacccagtctctactgaaaatataaaattggccatgcatggtggcacatgcctgtaatcccagctactcaggaggcttgaaccctggaggcagaggttgtggtgagtcgagatcattgcactccagcctgggcaataagagtgaaactctgtctccaggaaaaaaaaaaatttatttgtgtataactttaaaagcagatttttggaagcattgtaattacattaaaagtatacttgttccagctgcgtg

SEQ ID NO: 398918 - DNA, 764 bp, Homo sapiens
gacctttgtctctcgctgcatctggagctctaggtcgcctcttcgctactctgtgtcctctgctcctagaggcccaccctctgtggccctgtgtcctgtaggtattgggagatccacagccaagatgccgggaccccttagaagcctagaaatggaatcattgcaatttagagatgtggctgtagaattctctctggaggagtggcattgcctggacactgcacagcagaatttatatagggatgtgatgttagagaactacagacacctggtcttccttggtattattgtctctaagccagacctgatcacctgtctggagcaaggaataaaacctctgactatgaagagacatgagatgattgccaaacccccagttgtgtgttctcattttgcccaagaccttttatgctctgctctgggagctacgagtagccgccgagaggccgcggagccagcgacgaccgacccagccgagccgccgccgccgcgcgcccccatggcggccgccaaggacactcatgaggaccatgatacttccactgagaatacagacgagtccaaccatgaccctcagtttgagccaatagtttctcttcctgagcaagaaattaaaacactggaagaagatgaacgaggaactttttaaaatgcgggcaaaactgttccgatttgcctctgagaacgatctcccagaatggaaggagcgaggcactggtgacgtcaagctcctgaagcacaaggagaaaggggcatccgctcct

SEQ ID NO: 398919 - DNA, 659 bp, Homo sapiens
ttgtgtgttctcattttgcccaagacctttggccagagcagagcataaaagattcttaccaaaaagtgatactgagaaaatttgaaaaatgtggacatggcaatttacactttaaaaaaggctgtgaaagtgtggatgagtgtaagttacacaaaagaggttataatggacttaaccaatgtttgacaactacccagagcaaaatatttcaatgtggtaaatatgtgaaagtctttcatcaattttcaaattcaaagagacataaaagaagacatactgaaaaaaaacctttgaaatatatagaaggtgacaaagcttttaaccagtcctcaacccatactacacataaaaaaattgatactggagagaaaccatacaaatgtgaagaatgtggcaaagccttcaaccggtccctcacaccttactacacataagataactcatactagagagaaaccctacaaatgtgaagaatgtggcaaagtctttaagtacttctctagctttactacacataagaaaattcatagtggagagaaaccctacatttgtgaagaatgtggcaaagcctttatgtacccctatacccttactacacataagataatccatactggagagcaaccctacaaatgtaaagaatgtgacaaagcttttaa

SEQ ID NO: 398920 - DNA, 443 bp, Homo sapiens
gccacagcacatccaggaatcagctacagccaaccaaccaatcagtcaagaagataaaggtggggaggtgctaggtagtaatgattagtaaatgatgcctgtaaacaggagtggcttctttgttgtaggagttgagtccttcactccattacgaagctaaccatatctaccttgttccagttccttcccttgagcactggccaggtttttaggctactgtagtgtatttcaaacttcagtacctcaaaagtttctccttagagagagaaattctcatgaactctcttgctaaagtaaatacgttttcttagagtgtggtttatgtagcaccaaaattaagatcatctgtacaccctttatgattataacacttacctaactatgaaacttttatatattttaaatataataaagcaataaaccaatgttcaaatggactaact

SEQ ID NO: 398921 - DNA, 659 bp, Homo sapiens
aagccatctgtgaagggaatcacttttcttttctggacttgtttccaggtgcagctgcaggggatgacaccgaagatacaagcactgagttcactgacagtattgaggaggaggctgcacaccatagtcaccagcaagtaagtcagtgtcagggtctgggacttccagggtggacagcacacagcccttctgaggtctgatagtctcctgcagcccttgcggacttagtgagaagatatctttttacataaactacttctcagtcatctacctgttctccttgaacttcccagctgcctttccaacccatatcttcactccatttttctctccaatccaccctttggtttgtattgtatctctttcttctgcttccttccccctcctacccacctttgcccctatttattctctgtagctatagcttcagaagcatttttacttgcaagacgatggacacattccccttgggctttttgtaactgaaatgcaccacagaagacagggagtcatcgaagggctgctcggggaggtggcagggcggaggaactgcttgggaagaaactccaagaagattggaatgctttcgcgggaatctgtctcaatgtgggactcagtggtgcagcggaggaccttgagcagagttgcctgtgcgtggg

SEQ ID NO: 398922 - DNA, 3688 bp, Homo sapiens
tacaattcagaacctcaaggaaactctgaaaagcagggaacgtgagactgaggagttgtaccaggtaattgaaggtcaaaatgacacaatggcaaagcttcgagaaatgctgcaccaaagccagcttggacaacttcacagctcagagggtacttctccagctcagcaacaggtagctctgcttgatcttcagagtgctttattctgcagccaacttgaaatacagaagctccagagggtggtacgacagaaagagcgccaactggctgatgccaaacaatgtgtgcaatttgtagaggctgcagcacacgagagtgaacagcagaaagaggcttcttggaaacataaccaggaattgcgaaaagccttgcagcagctacaagaagtattgcagaataagagccaacagcttcgtgcctgggaggctgaaaaatacaatgagattcgaacccaggaacaaaacatccagcacctaaaccatagtctgagtcacaaggagcagttgcttcaggaatttcgggagctcctacagtatcgagataactcagacaaaacccttgaagcaaatgaaatgttgcttgagaaacttcgccagcgaatacgtgataaagctgttgctctggagcgggctatagatgaaaaattctctgctctagaagagaaagaaaaagaactgcgccagcttcgtcttgctgtgagagagcgagatcatgacctagagagactgcgcgatgtcctctcctccaatgaagctactatgcaaactatggagagtctcctgagggccaaaggcctggaagtggaacagttatctactacctgtcaaaacctccagtggctgaaagaagaaatggaaaccaaatttagccgttggcagaaggaacaagagagtatcattcagcagttacagacgtctcttcatgataggaacaaagaagtggaggatcttagtgcaacattgctctgcaaacttggaccagggcagagtgagatagcagaggagctgtgccagcgtctacagtgaaaggaaaggatgctgcaggaccttctaagtgatcgaaataaacaagtgctggaacatgaaatggagattcaaggcctgcttcagtctgtgagcaccagggagcaggaaagccaagctgctgcagagaagttggtgcaagccttaatggaaagaaattcagaattacaggccctgcaccaatatttaggagggagagactccctgatgtcccaagcacccatctctaaccaacaagctgaagttacccccactggccgtcttggaaaacagactgatcaaggttcaatgcagataccttccagagatgatagcacttcattgactgccaaagaggatgtcagcatacccagatccacattaggagacttggacacagttgcagggctggaaaaagaactgagtaatgccaaagaggaacttgaactcatggctaaaaaagaaagagaaagtcagctttacccctcaaacatgggagaaaaagtttcagcattttaattcaaattggtaaaaggctgagcaacccttaaagctgccataatggaagaagactgtgagctagcttaaaaaagagagaatgaaggggaagaaacaaaacccctgtgtggcagagtgtcgagatgagatgagcatttatttgtctccgtcgaattccttacggagataaggtgcagctgcaggggatgacaccgaagatacaagcactgagttcactgacagtattgaggaggaggctgcacaccatagtcaccagcaagtaagtcagtgtcagggtctgggacttccagggtggacagcacacagcccttctgaggtctgatagtctcctgcagcccttgcggacttagtgagaagatatctttttacataaactacttctcagtcatctacctgttctccttgaacttcccagctgcctttccaacccatatcttcactccatttttctctccaatccaccctttggtttgtattgtatctctttcttctgcttccttccccctcctacccacctttgcccctatttattctctgtagctatagcttcagaagcatttttacttgcaagacgatggacacattccccttgggctttttgtaactgaaatgcaccacagaagacagggagtcatcgaagggctgctcggggaggtggcagggcggaggaactgcttgggaagaaactccaagaagattggaatgcttccaaagcaagaatctttctcagtgaaatctcattatacaaagagaaccttatgcaacctgacaaaccactgaggtcatggtgactcagtgatcagcagatggtacttcaacagcaatcccctgtcaaacctcagaacttgaggctgaaacattgcttccacccaccatcagtgaagatgtaactagcatgttacaagagtgaataatctggacttcagagattaagtcaccaatagtgatctcacaagtactcaccggaactcctataatgtctccactttgtccatgccatttagcaatctcatctcctaaatggactgtgcctatgattcttaaggagaaagtgaatcattggtagatatcctgcacaagcagctggactttccagtaatagctttcttggggctattaggaaaattaaacaagaaatgaggctttctgggtctgcctgtatgtcttctgcataagaaaaagaagagacatcgaatcaaccaataagaagagcccaaataagcatcctcaaatcttttgggatttggcacttggggacatgagtagttgtctgggatacgtcatattctcaacagtttctttgtagtagtaggatcaccttcttataataggatcaccttcttgttgctatagctgtacccgaccttcccttctcccttgagtgcttgcatgagctccacttttccttttgcttgaacagcttctcctgagtcctccttaccgatggttgtgactttaattatatacatctctgtccctccagacagatccctctgtcctcactctctgatttcattgaggatcttgggtgagagagagggacctgcaggatgaacaaatgtctactctaagacagctagattgggaggttggctggtcactgatggttataatgactgtgggacaggattaacttcagaataaatgaacaggagacacagatatgaagaaagtttctgattgatatggtctgaagtactcctggtattgcaagtcatttgctctaattctcaattgtaggcaaactgatttgtaaatttgcttcttcagccttctttcctgtagcctagcatggagaatctgaccagaccccattttgagaaggtcagcctacactggaatgaactttttacattagggcatttgtatttccctcacaatacttgccacattacttggcataggagagatgcttagtgtaattatgagttaacaagcctttggatcagggcttgactcatgatagacaaagtatatgcctgctggatggaagaatctcttgggcgagcaccatttttctttccatcacctttccttgaaaatatatcttcagctttgggtaggaggaatcttggtgtatgaaatcattgcaaatttacttcatcttttctggagtttgaagttgtgactctcctgctaccaattaaataaagcttactttgccataac

SEQ ID NO: 398923 - DNA, 2047 bp, Homo sapiens
aagccatctgtgaagggaatcacttttcttttctggacttgtttccaggtgcagctgcaggggatgacaccgaagatacaagcactgagttcactgacagtattgaggaggaggctgcacaccatagtcaccagcaagtaagtcagtgtcagggtctgggacttccagggtggacagcacacagcccttctgaggtctgatagtctcctgcagcccttgcggacttagtgagaagatatctttttacataaactacttctcagtcatctacctgttctccttgaacttcccagctgcctttccaacccatatcttcactccatttttctctccaatccaccctttggtttgtattgtatctctttcttctgcttccttccccctcctacccacctttgcccctatttattctctgtagctatagcttcagaagcatttttacttgcaagacgatggacacattccccttgggctttttgtaactgaaatgcaccacagaagacagggagtcatcgaagggctgctcggggaggtggcagggcggaggaactgcttgggaagaaactccaagaagattggaatgcttccaaagcaagaatctttctcagtgaaatctcattatacaaagagaaccttatgcaacctgacaaaccactgaggtcatggtgactcagtgatcagcagatggtacttcaacagcaatcccctgtcaaacctcagaacttgaggctgaaacattgcttccacccaccatcagtgaagatgtaactagcatgttacaagagtgaataatctggacttcagagattaagtcaccaatagtgatctcacaagtactcaccggaactcctataatgtctccactttgtccatgccatttagcaatctcatctcctaaatggactgtgcctatgattcttaaggagaaagtgaatcattggtagatatcctgcacaagcagctggactttccagtaatagctttcttggggctattaggaaaattaaacaagaaatgaggctttctgggtctgcctgtatgtcttctgcataagaaaaagaagagacatcgaatcaaccaataagaagagcccaaataagcatcctcaaatcttttgggatttggcacttggggacatgagtagttgtctgggatacgtcatattctcaacagtttctttgtagtagtaggatcaccttcttataataggatcaccttcttgttgctatagctgtacccgaccttcccttctcccttgagtgcttgcatgagctccacttttccttttgcttgaacagcttctcctgagtcctccttaccgatggttgtgactttaattatatacatctctgtccctccagacagatccctctgtcctcactctctgatttcattgaggatcttgggtgagagagagggacctgcaggatgaacaaatgtctactctaagacagctagattgggaggttggctggtcactgatggttataatgactgtgggacaggattaacttcagaataaatgaacaggagacacagatatgaagaaagtttctgattgatatggtctgaagtactcctggtattgcaagtcatttgctctaattctcaattgtaggcaaactgatttgtaaatttgcttcttcagccttctttcctgtagcctagcatggagaatctgaccagaccccattttgagaaggtcagcctacactggaatgaactttttacattagggcatttgtatttccctcacaatacttgccacattacttggcataggagagatgcttagtgtaattatgagttaacaagcctttggatcagggcttgactcatgatagacaaagtatatgcctgctggatggaagaatctcttgggcgagcaccatttttctttccatcacctttccttgaaaatatatcttcagctttgggtaggaggaatcttggtgtatgaaatcattgcaaatttacttcatcttttctggagtttgaagttgtgactctcctgctaccaattaaataaagcttactttgccataac

SEQ ID NO: 398924 - DNA, 684 bp, Homo sapiens
ctcacaagtccatgaggcactttctattattcctttttatagaggaggaaacagacttctgaagctaagtaacttgtccaagctaacatagctaataagtagcagatccagtatcaacctaggcagtatggctccattcctccaccatgtgccatcagttagtacagaaatagaaaccatcgctatgatagcaaatatagtgtttagtattcctttcagcttatcgttttatgcttccccctgttaagttacactggggagaaaacaaataaatgaactgagtgtccatttatcctcatctaacattaattgttacatgccctgaacaaataggaaaaagacttatttcagaaaacaatatgtatgtaagtggccaccagagatagttttctgtatggtttgtattcattcctgggacatgtatttagagacttctgtgtagcaggcctatgctagatctggtaaaacaaaaatgagtaaaacatgatacttattctcaagaatctcacacctccttcttctatgatagattcttataagccctttgatatttagcagaggcatttctttcctccagaagcttacagtgtcctttctgcattaggatcttagtgcaacattgctctgcaaacttggaccagggcagagtgagatagcagaggagctgtgccagcgtctacagtg

SEQ ID NO: 398925 - DNA, 3844 bp, Homo sapiens
tacaattcagaacctcaaggaaactctgaaaagcagggaacgtgagactgaggagttgtaccaggtaattgaaggtcaaaatgacacaatggcaaagcttcgagaaatgctgcaccaaagccagcttggacaacttcacagctcagagggtacttctccagctcagcaacaggtagctctgcttgatcttcagagtgctttattctgcagccaacttgaaatacagaagctccagagggtggtacgacagaaagagcgccaactggctgatgccaaacaatgtgtgcaatttgtagaggctgcagcacacgagagtgaacagcagaaagaggcttcttggaaacataaccaggaattgcgaaaagccttgcagcagctacaagaagtattgcagaataagagccaacagcttcgtgcctgggaggctgaaaaatacaatgagattcgaacccaggaacaaaacatccagcacctaaaccatagtctgagtcacaaggagcagttgcttcaggaatttcgggagctcctacagtatcgagataactcagacaaaacccttgaagcaaatgaaatgttgcttgagaaacttcgccagcgaatacgtgataaagctgttgctctggagcgggctatagatgaaaaattctctgctctagaagagaaagaaaaagaactgcgccagcttcgtcttgctgtgagagagcgagatcatgacctagagagactgcgcgatgtcctctcctccaatgaagctactatgcaaactatggagagtctcctgagggccaaaggcctggaagtggaacagttatctactacctgtcaaaacctccagtggctgaaagaagaaatggaaaccaaatttagccgttggcagaaggaacaagagagtatcattcagcagttacagacgtctcttcatgataggaacaaagaagtggaggatcttagtgcaacattgctctgcaaacttggaccagggcagagtgagatagcagaggagctgtgccagcgtctacagtgaaaggaaaggatgctgcaggaccttctaagtgatcgaaataaacaagtgctggaacatgaaatggagattcaaggcctgcttcagtctgtgagcaccagggagcaggaaagccaagctgctgcagagaagttggtgcaagccttaatggaaagaaattcagaattacaggccctgcaccaatatttaggagggagagactccctgatgtcccaagcacccatctctaaccaacaagctgaagttacccccactggccgtcttggaaaacagactgatcaaggttcaatgcagataccttccagagatgatagcacttcattgactgccaaagaggatgtcagcatacccagatccacattaggagacttggacacagttgcagggctggaaaaagaactgagtaatgccaaagaggaacttgaactcatggctaaaaaagaaagagaaagtcagatggaactttctgctctacagtccatgatggctgtgcaggaagaagagctgcaggtgcaggctgctgatatggagtctctgaccaggaacatacagattaaagaagatctcataaaggacctgcaaatgcaactggttgatcctgaagacataccagctatggaacgcctgacccaggaagtcttacttcttcgggaaaaagttgcttcagtagaatcccagggtcaagaaatttcaggaaaccgaagacaacagttgctgctgatgctagaaggactagtagatgaacggagtcggctcaatgaggccttacaagcagagagacagctctatagcagtctggtgaagttccatgcccatccagagaggtgcagctgcaggggatgacaccgaagatacaagcactgagttcactgacagtattgaggaggaggctgcacaccatagtcaccagcaagtaagtcagtgtcagggtctgggacttccagggtggacagcacacagcccttctgaggtctgatagtctcctgcagcccttgcggacttagtgagaagatatctttttacataaactacttctcagtcatctacctgttctccttgaacttcccagctgcctttccaacccatatcttcactccatttttctctccaatccaccctttggtttgtattgtatctctttcttctgcttccttccccctcctacccacctttgcccctatttattctctgtagctatagcttcagaagcatttttacttgcaagacgatggacacattccccttgggctttttgtaactgaaatgcaccacagaagacagggagtcatcgaagggctgctcggggaggtggcagggcggaggaactgcttgggaagaaactccaagaagattggaatgcttccaaagcaagaatctttctcagtgaaatctcattatacaaagagaaccttatgcaacctgacaaaccactgaggtcatggtgactcagtgatcagcagatggtacttcaacagcaatcccctgtcaaacctcagaacttgaggctgaaacattgcttccacccaccatcagtgaagatgtaactagcatgttacaagagtgaataatctggacttcagagattaagtcaccaatagtgatctcacaagtactcaccggaactcctataatgtctccactttgtccatgccatttagcaatctcatctcctaaatggactgtgcctatgattcttaaggagaaagtgaatcattggtagatatcctgcacaagcagctggactttccagtaatagctttcttggggctattaggaaaattaaacaagaaatgaggctttctgggtctgcctgtatgtcttctgcataagaaaaagaagagacatcgaatcaaccaataagaagagcccaaataagcatcctcaaatcttttgggatttggcacttggggacatgagtagttgtctgggatacgtcatattctcaacagtttctttgtagtagtaggatcaccttcttataataggatcaccttcttgttgctatagctgtacccgaccttcccttctcccttgagtgcttgcatgagctccacttttccttttgcttgaacagcttctcctgagtcctccttaccgatggttgtgactttaattatatacatctctgtccctccagacagatccctctgtcctcactctctgatttcattgaggatcttgggtgagagagagggacctgcaggatgaacaaatgtctactctaagacagctagattgggaggttggctggtcactgatggttataatgactgtgggacaggattaacttcagaataaatgaacaggagacacagatatgaagaaagtttctgattgatatggtctgaagtactcctggtattgcaagtcatttgctctaattctcaattgtaggcaaactgatttgtaaatttgcttcttcagccttctttcctgtagcctagcatggagaatctgaccagaccccattttgagaaggtcagcctacactggaatgaactttttacattagggcatttgtatttccctcacaatacttgccacattacttggcataggagagatgcttagtgtaattatgagttaacaagcctttggatcagggcttgactcatgatagacaaagtatatgcctgctggatggaagaatctcttgggcgagcaccatttttctttccatcacctttccttgaaaatatatcttcagctttgggtaggaggaatcttggtgtatgaaatcattgcaaatttacttcatcttttctggagtttgaagttgtgactctcctgctaccaattaaataaagcttactttgccataac

SEQ ID NO: 398926 - DNA, 169 bp, Homo sapiens
ggaacagggtttcttatcactcactattggtgaatgcatacttgtggcaaccactttgaaaaacaatttggtagtactaattaaaaatttaaatgtccttatcttttttttgagacaggatctcactctatcacccaggctggagggcagtggcacaatctcagctcac

SEQ ID NO: 398927 - DNA, 457 bp, Homo sapiens
acagagtctgttgcccaggctggagtacagtggcatgatcatggcctgccgtcacctcaaatttctgggctcaagcaatcctcctgtgtcatcctctggagtcgctgggattataggtgtgagccaccatgcccagctccgatctttaaaaagtgaatcagttgacaatgtttaaaatttaagatgttacacaggcacacaggcgtgcacacgtctagatttccatcttgttacaaaaaaactttctcagtacctggcctattccccgatctggcaactctcagctagaatggagtgtgggcttctgtccctaatgtttggggaaaggcttctcaattcatcatagcccccaaaccttgatgagcctgaaggtcaggaaacatttgagctgctgttttttttttctaataggcgttaaggggaaagtgaaagattgttgggctcaggattctatcaa

SEQ ID NO: 398928 - DNA, 241 bp, Homo sapiens
gtttgttacagtccatgaacctacctgcattggtgcctcattattacccaaagtccagagtttacatttgggttcactcttggtgttgtacagtctatgagtttggatcctgttatgttttaaaactcctgcttcttttagccctgggcaccttgacactctgcctagcagtttcccctgacgtgggtccatgtatggcaggcatggaaagaggaatcctcactggctcagccatctgtct

SEQ ID NO: 398929 - DNA, 132 bp, Homo sapiens
agagattgacaaagagttactgtttatagttaatcttgttctcattaattttttgctgcttattcagtggttatttttattagtttttactttctggttttatgaaataaaatatttagattgagattggca

SEQ ID NO: 398930 - DNA, 409 bp, Homo sapiens
agtgtccacacctgtaagatgcccacagctagagcttggattgcaaccttcctgttaaatttcttaaggccaattaaacctatgttcactggatattgaattacagggggtcccaaagtcagcattgcctcatttatttccacacatctcccaaagctggttagcgtgatggtctttgagacccaactggtgggctcctgagtttccttctgcccctttctgtagggtaagcgtgagctgttatttgatgcttgctttactttttttaagtaaaagctgttcttaaagtgactgacgtgactttccacttagtcttttgcagcttaatagtgaacgccctcagaaggaccagtctctatttgaactgatttgggaataaatctgtttattcctagaactaactatgact

SEQ ID NO: 398931 - DNA, 600 bp, Homo sapiens
gtagtcccagctactggagaggctgaagcaggaggatcgcttgagcccaggagttcaaagttacagtgagctattatcatgtcattgcactcaagcctgggtgacagagtgagaccttgtctctatttttaaaagttgttgtgtttagtgcaagagaccagtgctgtagtaccagttcttgatttacgtatatgaatatataaaacctgtgaggacagaaaaacaagaactagagggagaactagcatacaaaaaaactgaataaagctttgtattcccaaactgaaagaaagaagtacaatttttaaaaattttgtgacattctaataaaatatcttccaagaatacactaagacaacagttcgtttatgttttgaacaggtcactcactaatcaagaaagacagtaagacgaggagttccctcaacacgtggtccctccccatccagatttctggtttctttagaccattccgggtctaggtgtatagacaagaaatggaaaacatgggaaactggaggccagtacctcagtcacttccacattacctacatacacaaagattcactgtgatggggattaaaaccattcagggctgac

SEQ ID NO: 398932 - DNA, 326 bp, Homo sapiens
tctactgccagacattatggagctccaatttatgttatttcttttctcttgttgcttttagaatgttttcataatcaaactcccaaatatcaaggataattaaatgtcttgaggtagttttatttgggttaaatctgcttggtgttctatgacttccttatacttgaatactgatatcttattctaggtttgagaggttctctgttactatcactttaaataaactttctacccctgctctctcactacctcccctttaaggccaatgattcttagatttgcctttttgaagctgttttctagatctttcaggcatgcttcactct

SEQ ID NO: 398933 - DNA, 393 bp, Homo sapiens
agccactgaccaccctgcctcagcctctcatttcctactccaccaagaacaaaactttgaagccgccacacactcctccctgctccctcatttctccattcctggatttgtcccagcctcaaggctctgaaatggaagcaaatgaagctgagagctcccgccgcctgcgcggcccagagcctcagcaggttttgaggttggaaagggccaccgggaagatgaggcctttcaccggcctctgcctgcagctgacaccaattgattgattgatttcctaattgtctgcttaatcctctacaagagggtgggtttattatttaagcaagtcaactcaaaaatagcaaaacaaagcagcctcccaagaaccagcagcagctgaggagtagaacaaaa

SEQ ID NO: 398934 - DNA, 478 bp, Homo sapiens
tggaacattaagtaaagaatccctcattataggatgcaattttgctcgaatgaaattcatttcaccagataattaatgtagtatgtaatcaccttaaattcttcttaatggtgatgaacctgtggttttaaaaaaattcctcttagttagtcactccctctaaatcccattagcttttgtattcttttatttggggacaataacaactttattgaggtatgattcacccatttaaaatgtacaattatgtggttgtcagaatattcagagagatataaccatcaccacagtcaattgtagaacattgtcatcactgcaaaaaaagaaaccctgtaccctttagctattgccttcctgttttcccattctcactattcctaaggagccactattctactttctgactatatagatttgcctattgccagcatctcatataaatggagtaaggtaatatgcggtctcttgtgactggctg

SEQ ID NO: 398935 - DNA, 623 bp, Homo sapiens
atcatttttatgtaaagtaaatcattacagttattgctgaagaccgcccccatgaaccccaccctgcccatctcttcctccatgccccaaagtaaacactgtcctgattttgattttattctcatatgtgttttgatatatgtgtatatattcacaaatgatatatgattttgttttgcatattttaaaactatataaatggcattagacatatcatttccccacttgcttttttttgcccaacttactattttctgagatttatgcatgttaatgcatgctgtgtgcacccattcattttcacctcagcagcatattccattgcacgaatgtgctgtcatttgtttattcattccactgtcaatggacgtgtaggttgtttccaaacttttgcttttataaatagcggatgcagggaacgtttttacatgggcaagaattcctctaatggatataagtattaatgctgtgttatgggtgatacacatctccagctaaggaaatgttgctaaatttcccccaacgtgcttgaactaacttctactgtcaccactagtctgaatttcagtgtggccgtgcccacactagattatcaacctgtttacttctgactctgatgggtg

SEQ ID NO: 398936 - DNA, 739 bp, Homo sapiens
ggggcgcgggcggcggcgaggctgcccccgcgaggaatgcgggatcctggggttccccgcacgtggctggtgcccaggcagttccgcggttgcttagagacgggactgtggctgccctcatccccattgcgtctttttttttttttttttttttttttatcccccccccggcctttctataattcctcacgcggaagggttgggggccatctccctcttgagaaaggtcctctggggagagggggggcccgggggataaccgcgccgagagggttctctgggggcgcgcctatggaggacctgccctgggcggcgccacaaaaacactttgtgcgcccgcccatttttttccccccaggggtccctctcttttgggctcgtgatagggcgccctcttcctacgcgccacccaatctcgagggttccccgttgttgcaaccgggagaacaacttattgccgcgcagagtgcgcttcgaaaacgtgggcgatctacgtcgaacaaaaattgtgtgtgccccgtggagcccccacacactttcttgctcctcccaaattgcgcgcgctactcaacttacggcgcagcactctcattgttgccccccccggcaacacggtttccatacagaggagaccccaaatataacaccgtggcaaaggaaggggcggggcaccccctttgggggcacattcctgtatcaaccctcccaccgtgttgaccccggtttaacacccagcttt

SEQ ID NO: 398937 - DNA, 399 bp, Homo sapiens
cagcagaaattattttcccatagttctggaggaaagaagtctgaaatcaaggggtcagcatggttgcgttctggtgagggctctcttcctagcttgcaggcaaccaacttctcatcgtctccttacatggcagagaatgtctcttcttataagggcacaaatcctatcatgaggattccacctcatgacctcatttaaaccaattatctcccaaagacctcctctccaaatgccctcacactgggggtttgggcttcaacatatgaatttaggaaggaaacagtccagtccataatagtcacattatgaggtactagaggttaggactaaagcacaggaattttgggggctatacaattcaacccataacagtctgcgttctggccccactgagataaa

SEQ ID NO: 398938 - DNA, 272 bp, Homo sapiens
ctctactttcttacctgggctttgccaatagtagagcttgtgacctatctctgggcccagcacctagatgttatgactctcccgcctggtccatgcacacaaaaaagagagtgacttatactaggatcaacacacaaatgattctattcttctgcattatcccagcccacatggcttattgtgacatctctaggttcatcatctagatgatatgactctccttcctgggaactgtccataatgaagattgtgacacatcacttggcccagca

SEQ ID NO: 398939 - DNA, 349 bp, Homo sapiens
aaagggtctgcaaccaactcaaatgatcgattgaaaccaactcatattactgatagcactgaatgtgtaccaaacctcaggccatgggtgcctgagtcctagtgttcctatgacatcccctgggagtggtggaactctacctttcaatgatgggaagtcttgggcaagagcaggtctcctccccttgtccagtatagacagcttttgtgtctaactctgcctcagcagctggcctatacctgggggcaagggttggacaggtttctagctccaacatcagtggtagatgccttttgttttatgtgagagaagcaaccacgttttgtgcctgtgctctggtggtgctcta

SEQ ID NO: 398940 - DNA, 361 bp, Homo sapiens
gcagacaaaatatttggcattgtttcaggagaatggtttcctaatcctagtacatccactaacttcctatcagtacatctatgctctcagtggcaaagggaagctgctaccacctaatctgttttttacaaagttgttctagcaagtgatatctttcttacaaatgcaagtgacacaacagcaacgctacaaacttaaacacctggtaactaattcaggtaaaacagctcctttaaagttaaaaactaaatatcattatattggtcttcattgaaaaatgttacaatgaaacactaatcaagcctaaaagagataactaagtataaaatgggtgttcgaagatttagctttaaattttgag

SEQ ID NO: 398941 - DNA, 527 bp, Homo sapiens
ccatgcctggctaatttttttatttttgttagagacgggtttcaccatgttggccaggctggtcttgaaatcctgacctcaggtaatccgcccgccttggcttcccaaagtgctgggattacaggtgtgagccaccgcgtgcagccatctcttcatatctttaccttccccctactgtttccagccttgagtattttctgttctactttctacttttcacttctatgaggtaaactgtttttagcttccacatatgagtgagaacatgcagcgtttaacttttctgttcatggcttatttcactgagtataatgtcttccagtccatccatgttgctgcaaataacagaatttaatcctttttgtggctgtatagtattccatggatatattctggatattaatcccccctaggatgtatagtttgtaaatattttctcccattctgtagattgcgaagaaatattttaaagatttataaagtacatcttttacatcttttatatttaccaaatgagtgaaaactga

SEQ ID NO: 398942 - DNA, 1779 bp, Homo sapiens
  misc_feature (1553)..(1553): n is a, c, g, or t
  misc_feature (1556)..(1556): n is a, c, g, or t
  misc_feature (1568)..(1569): n is a, c, g, or t
  misc_feature (1599)..(1599): n is a, c, g, or t
  misc_feature (1779)..(1779): n is a, c, g, or t
aatgttagcatcttgtgaggctttttctaacctgccttgtaaagtcacccgtttctattctctgtcgtcatctgatgtgatcataggatctccttatttacctctttcattagcatatgaaccccatgagggtagacacctttttttttttttttttggagacagtctcactctgttgcacaggatagactgtagtggcacgatctcggtttactgcaaccttcatcgcctccctggttcaagcgattctcttgtcttagtctcctgagtagctggaccacacccagctaattttttgtgtatttttagtagggatgaggtttcgctgtgttgatcaggctggtcttcttgaactcttggtcacaagtgatccgcctgccttggcctcccaaagtgctggcattacagctgtgagccactgcgcccagcacctttttttgtcttgtttactgcgaaatccccaacaactatagcatttccaggcacatagtagatgcttaagaattacttacttacaagagcacaaacatcggcgaataaaaagaattacctattgaatgaatgagagttagctggtgcaaaaaaaaaaaaaaaaaagccagtgcagattgagagacctggccatagaaaattacaacgctcagggataaggtatggcaaggaacgttttttgttttttgttttttttttcgctttattgccgaggctggagttcagtggtatgatctcggctcactgcaatctccacctcccaggttcaagcaattctcctgcgtcagcctcccgagtagctgggactataggcgcacaccaccatgccctggtaattttgtatttttagtagagacggggtttcgccatgtttgccaggctggtctcaaacacctgacctcaggtgatccgtccgccttagcctcccaaattgctgggattacaggtgtgagccactgtgcccagcctggcaaggaacttgaggagtgggtggagagaacgctgagatggagttgttttcagacgtttccatttgtcccagatagcgattcccttaaattgtggcttaggcttctgttttctaaaatattcttaggccaggtgcggtggctcacgcctgtaatgccagcactttgggaggccgaggcaggcagatcacctgaggtcaggagttcgaaaccagcctggccaacatagtgaaaccccgtctctactaaaaatacaaaagattagctgggtgtggtggtgtgtgtttgtaatcccagctacttgggaggctgaggcaggagaatcgcttgaacccgggaggcggaggttgcagtaagccgagatctcgccatccattgcactgaccttgggcaacaagagtgacactccatctcaaaaaaagtacattccttaaagtcatcttgaccttagtttatacttgtagttaaattctctcataagaaacaaatctgctgagattacaggcgtaagccaccacacccggccagaaatgctttttaaaaacggttccacccgggcgtggtagctcacgcctgtaatccttcaaggcaggnggntcacctgaggtnnggagttcgagaccagcctggccaacatggngaaaccccatctctactaacaatacaaaaattagctggatgtggtggtgcacgcctgtaatcccagctgcttgagaagctgaggcaggagaattgcttgaacctcggaggcagaggttgcagtgagacgagattgcgccattgcactttaagcctgggcaacagagcaagactctgtttn

SEQ ID NO: 398943 - DNA, 457 bp, Homo sapiens
  misc_feature (457)..(457): n is a, c, g, or t
aatgttagcatcttgtgaggctttttctaacctgccttgtaaagtcacccgtttctattctctgtcgtcatctgatgtgatcataggatctccttatttacctctttcattagcatatgaaccccatgagggtagacacctttttttttttttttttggagacagtctcactctgttgcacaggatagactgtagtggcacgatctcggtttactgcaaccttcatcgcctccctggttcaagcgattctcttgtcttagtctcctgagtagctggaccacacccatctctactaacaatacaaaaattagctggatgtggtggtgcacgcctgtaatcccagctgcttgagaagctgaggcaggagaattgcttgaacctcggaggcagaggttgcagtgagacgagattgcgccattgcactttaagcctgggcaacagagcaagactctgtttn

SEQ ID NO: 398944 - DNA, 577 bp, Homo sapiens
aaaaccactaggaactggaacaggagagtggagacagactgcaagccagaccagacaaggagggtgaccttcaaaggtgccaaatactgcccacaggttgacggagaggaagatttctcagcagacactggatgtggtgatggcaccatagcagagtgaagggcttgtcaggcacagtctatggtgtgggcttcaaagctggcgtttcagggaggaaggaagaagaggagtctagaagcatcaacaactacacaaagaggactcttaacccattccacaccctactgcacaagggcagggagaaaggaaggagcccccgtctgggggctgcaggagcaggcagtgcttaggggacagccaggtctcaagaataaagagatggatgaggggccaggggtggtggctcacgcctgtcatcccagccctttgggaggccaaggcgggcagatcactttgaggtcaggggttcgagaccagcctggccaacatggtgaaaccccatctctactaatacaaaaattagccaggcacagtggcacacacttgtagtcccagctactcaggaggctgaggcagg

SEQ ID NO: 398945 - DNA, 690 bp, Homo sapiens
acagcttagaaatactcagtgggtctttggcatagttgtttatactggacacgacaccaaactcatgcagaattcaaccaaagcgcctctcaagagatcaaatgttgagaaggtgactaacgtgcagatcctggtgttgtttggcatcctcttggtcatggccttggtgagctcggcgggggccctgtactggaacaggtctcatggtgaaaagaactggtacatcaagaagatgggtaagtgtcggggtgggttgcttgttccagtggaagaaaaccatttttgagatgttcttgcagccatggttgaagtgtggtgtccctgctgtccttctgttccctttggttactgtacataatgccagcctttcaaggagaattgagattaggatcatgtgatgaaatgaagatgggcacatttgggacttgtcttatactcaaatggttatttttaaactctgtgttaaagtattttcttagtggttgccctaggaattacaatgtatttcccaatttatccaaatctacttttgattaatactaacaattctagtcaaacacagaaatgtcactccagcgtacctccatttcctctcctgcttggtgctgtcattgttatattccatttatctgtgttgtcaactccaaaatagtgttataataatttgtgtctcttaaagaagctaaagga

SEQ ID NO: 398946 - DNA, 318 bp, Homo sapiens
acagcttagaaatactcagtgggtctttggcatagttgtttatactggacacgacaccaaactcatgcagaattcaaccaaagcgcctctcaagagatcaaatgttgagaaggtgactaacgtgcagatcctggtgttgtttggcatcctcttggtcatggccttggtgagctcggcgggggccctgtactggaacaggtctcatggtgaaaagaactggtacatcaagaagatggacaccacctcagataattttggatacaacctactgacgttcatcatcttatacaacaatcttattcccatcagtctgttggt

SEQ ID NO: 398947 - DNA, 474 bp, Homo sapiens
ttatcaaaaagctgttcccacagcagataacagaaacataaaattgcaaataattatagttcatatatgtgatcatataaatattgcttgtaataattttataacaggcctccctgatatccctgaaattggttacactgaaagactcattaattctctcttccaaaaggattattgacttcctgagtctgaaaagtactccaaagtcaaggcaacaaaatggcccattacttcaaaagaggtggaagccacactaaggtaaaacataattccgagctgctaacttggcaatgttttgtttttttgtgtgtgtttctcttttacttctcgcacggtgtcttccactagaaattagatatcagagtagcaagtcgttcatttaaagcaaaaattatttatggcagtatgattttaaagccaattttaacttagtaacagcatttaacaacattatgaggactaatatatgtattt

SEQ ID NO: 398948 - DNA, 806 bp, Homo sapiens
cagtggtcatgtttatttgaatgtctaagtaaaagaaaagggtacagttattagcagtagaatattcgggaagtcctaaatttaaataccaaaatgtatgaaaatcccagcactttgggaggccaaggcaggtggatcacaaggtcaggagatccagaccatcctggctaacacggtgaaaccccatctctactaaaaatacaaaaaattagccgggcgtggtggcgggctcctgtagtcccagctactcgggaggctgaggcaagagaatggtctgaacccgggaggtggagcttgcagtgagccgagatggcgccattgcactccagcctgggcggcagagcgagactccgtcacaaaaaaaaaaaaagaaaaaaaaaaaaattcaagccaggcacagtggcttacgcctgtaatcccagcactttgggaggccgaggtgggtggatcacgaggtcaggagctcaagaccagcctgggcaagatggtgaaaccccgtctctgctaaaaatacaaaaagtagccgggcgtggtggcatgtgcctgtaatcccagctactggggaggctgaggcaggagaatggcgtgaacccgggaggtggagcttgcagtgagccgagatcgcgtcactgcactccagcctgggtgacagagtgagactccgtctaaaaaaaaaaaaagttatgaaaggaagtcattttctctctaaatgggtataattgaatcacatagaatatttatgtttgaaatgtttgtttttgggtgctgtaaagaaatagtacttgaacataaatttatttagtaag

SEQ ID NO: 398949 - DNA, 489 bp, Homo sapiens
ccaaatctaaattccttaataaggagaacacaattcctcatgatctggatcctgacaattcctccagcttcatctactttaccattcattcttgtcccagtgttccagctgcctaggcaacttgcatgtacataccatacgtatcctgtggccttggcatatgctgttaccctttcaagaaacacaccttcccttctacacttaaatttctatatatagttgttccttggtatccactgggttcattccaagagcctttgtggatatcaaaacccatagacacttgagtcccttatataaaatggtgtagtatttgcatataacctacagacatcctctggtaggctttattttctttttctttttttttcagacagggtctcactgtgttgcccaggctgaagtgcagtggcacgatcacagctcactgcagcctcaacctcctgggctcatgcgatcctctcatctcagcctcctgagtagctggca

SEQ ID NO: 398950 - DNA, 422 bp, Homo sapiens
aggggtcagggtgcaatgccgggaggggctcgtcgggtcccgggtccggcggctcgcgctggggagcgtggctgcccccgtcacccccaccgcggctgcccagcagcccgcgcgccccttcccctccggcctcgtccctgtcaggccgccaccatcgccaccctcgtatacataagtcagtaaaagcaagatgcttccacttttggatgacttaccgcgcggtcgcgacccttcccacgaagaggcttttcactttgctgtcatattaggtcagcttggaagaagtgatcaccaagagacacccaagatcttgtttaggcaataaatgaatgaagaccatggattaagaaccgttgctagatatgtagaatattaaaaggtggaaaaggaaggtgctcataactcctggttttctggaccaa

SEQ ID NO: 398951 - DNA, 115 bp, Homo sapiens
cagcatctgagtgtgacaatatgcagtatattggcaaccaggaaagctcaatcgagcttcagtgtctagcatttttagtaaggttttattatgtacggatgacagactgaatcat

SEQ ID NO: 398952 - DNA, 398 bp, Homo sapiens
tatcacataatcacgtaggggaaaaagagatcataagtgaaaagatggttgaaccatgtttagataccatgtgcatagcagattagaaaggtctgtaggaggaaatctggtttggggttaaaaaacaatttattaactccacattacctttcaatagatgtatctaattattaaaggaagagggatatttacagtgttgtggtggagagcccatggtgtggggtcagataggtctggacacaaaccccagctccacatcttactagtatgtgacactggacaacttgttgatgttctgagcctcggttttccttccatagtgcagaaataaaaatggcttcgtctcaaggtgcttatactttgttacaaggattgtagaaattaatgtatgcagagct

SEQ ID NO: 398953 - DNA, 282 bp, Homo sapiens
agaaaagaggccatttcagtgaaaatattcacctggttattgtgattgctatgttgaagcattgttattgcagacatttcttcattctactcaggaccaagggcccactgatttcctcctgccaacaaaggccaggatgctctggggactgaatgtgcaagcccaaaggttgtattgtcttgtttccatatatagtattaaattatgggctatccaacagttaaagaagctagacctcttggtagggaaaagaaataaaacattttctttggagagtaactt

SEQ ID NO: 398954 - DNA, 638 bp, Homo sapiens
gtcctctcggcggcctctccaggtgcaaaacttcctcgagtcagcctctccaggtccagctcctcctgcctcccagtggcctctttcagtccagcccagctcgtggctgtaggcagccttcccaggccctgcttttgacttttggcggcctcttcaggcccagaacttgatctccagtcagcttttgcaggcccggcatcctgcctcccgaaggcctctttcagcccagcccagctcgtggctgtaggcagccttcccaggccctgcttttgacttttggtggcctcttcaggcccagaacttgatctccagtcagcttttgtaggcccggcatcctgcctcccgaaggcctgcacgggcccggcctcggaatcacagcagactctccacgcccagctagctctcacctcactgtggcctccccagtccaaagctcctgcctttcggccgcttcggcaggcccagctcccgcctgccagtggcctctttaggcccagctcattcctcacaatggcctttccaggccccatttttcccttccggcagcctcttggcctctaattttttttatcttttgtgtataaatcccaaaatatggaattttggaatatttccaccattatataaatattttggta

SEQ ID NO: 398955 - DNA, 115 bp, Homo sapiens
ggatttaatttgctctactttttctggtttcttgtgatgcaaggtaatgtgattttaaacttttcttcttgttacttacttttttattttttattatactttaagttctagggta

SEQ ID NO: 398956 - DNA, 703 bp, Homo sapiens
  misc_feature (703)..(703): n is a, c, g, or t
gttccaattgagattacagagttgaaaaggcaaagtaataagagcaatttgggtggctatttacactgtgctttgctgtttgatagccttttctgtggaaccttggtttatttctaggggaaagattagtttttcctatcagtctacatatttatcaagaacagtttttagggacaaaatcatttgcatttgatttatgtaatctttgttaattttgtagaaatttggaagaaaatattatagtgagtaaagataatgacttcttttccagtttggtttttttgaggagatgagggaggtgttttttttttttcccccttaagggcaaatcctgaactgtaacttataaatatggagctcttccttgtcaggagtttcagcttacaaatagcttcctaccaccacagggagacagagtgttatcagtccacacacccaaagcaagaaaaaaaagaaagaaaaaaaaatttggggggcggccgcggccaaagaagagtgttctaaaaccctctcgtgggggcgcggggcccaagtgagggatggaacttgggacaaacggtgggaccaaaggaacccgccggcacgacaagcgcgggggtccccccaaaaaaaaaccgcgcggcaccggtctgcggacaatccaaggggtgcggggcacacgggtccaacggggcaaggagcagatacccgcgcgggggggggn

SEQ ID NO: 398957 - DNA, 569 bp, Homo sapiens
tagtcagcctcccttggttggggagagggtggattcgattaactgtcattccaaattactgaatgtgttttatttggagcagttaaaaagttttgcttgagaatgataactggagaaccataatatgtatagggtttgtacaagaccccaaaatagccttgtgcaaattactttgtcttgtctgatattttatgtgtaaaattggggttaggacaacgaatatttcaggtggttttgtgaattaatgagatgttatctaaagcatcaagtatagtgcccagcatgtagtagatactaagtaatctaattcatagtgatagggacagtagccagagccaggatttagggcaaggcaatcaggctcctagggcgaggaatttaatggggcactaattcccagcgatgaactctgtacttgcatgaatcagaggagcgcctcagatttttcacgatcagtgtcttgcttccctcactgtagttcctgccctagtattagcaacagatcagttttatcacctttctctgtttaagctttatgtatcattaaataaatatttaaaagcttgttt

SEQ ID NO: 398958 - DNA, 181 bp, Homo sapiens
taaagcaagggacctctgcagtacagaaatggacaggttcagagtaggagatggcactgtaccctggcagagtaaggagagaaaacaccttgagaaaatctatactgacacatgtcaagttccagaacactcaagaaccactttactcaaaagattcactaatgaagaagtaactacagat

SEQ ID NO: 398959 - DNA, 350 bp, Homo sapiens
ctgttcctcctgcctggttaaggaaggaattggaaaggattcctcaagcagtcaagggtttcccaaagccaccctaaccccagccagtgccttcttcaagaacttcagagtatggagaattacccaaggatctaataacgtgagcctgaggtctttctttcacaggacctaggataacatggaaagtgagctcaaaagacacaggctatgtgccgtcagtgctaatgccaccccgacctatagaacccatgctgccgttctgtgacccaaggggacatcgccaaaatgctgctggcaaccctagcgagttgtgtacattgttacttttaggtttccttccatctcagaaa

SEQ ID NO: 398960 - DNA, 426 bp, Homo sapiens
cggcgtggtggcaggcgcctgtagtcccagctactcgggaggctgaggcaggagaattgcttgaacccaggaggtggaggttgcagtgagccaagatcatgccactgcactccagcctgggtgacagagcaagactcccgtctcaaaaaaaaaaagaaaaaagtacatgaagagccattatactatgttctctcaacttttgtgctttattggaaatgtccataataaaaagttatctttaattattctccagtgagaagagtgagtctacaggactcagatatcactcgccctgtcccaacacattatcatggcgtctttatcttctataagaagacaatgagatttttctaggaaaaaaagctcaccacttcccatgtgttctggatcccaacaagtcaggtctcctgagacattttgcttctg

SEQ ID NO: 398961 - DNA, 654 bp, Homo sapiens
gcaggtttggtgaagagaagcctgaagaagcaagctgaggtcaagcctacattcctgcccactccactctgtcagttcacatccttcaaccagtgctctggatctgagtggtgcctcccaaactctgaacttcaaacccaatgcgggtatcacatgtttctcctgtcctttctgcactgctgaactttgaccccaaccacatgacctagcctaaaagactggacattggatcctgacagctcacctgtccatttgctttccagcagtctgcatatactcatcaactttccagactccgtgagccctagcaagcctgaggcctgatttgtctaaagcaagtgctgaacttccaccagaattgaaaatgccaaaagtttcatccccttgtgtgccattgagcaccacgcatggctgccagcaagggaactttggatctttacaaagagctcagttcaaagtctttagagagccgtcctttctggtggagaaatcataagtcctatactgcttattatggtctccaaattgttgattgtgacaaagcaagttttgtgtacaggaaacaacggcttcccttctcctttggaggatctaaaaaaaattgatcttagataacaagccataaataattacagaaacactcagcctttgcct

SEQ ID NO: 398962 - DNA, 491 bp, Homo sapiens
aatagttggagtgcatctaagagaagaaagtgagaagatgggaaatgtttttctcttccttcttgcaataaatgttcattaaacacctttattgagtgcattctatgtgccacacgctgttctaggtgcaaggagtacagtagagaaggtctttttcttcatgaactatgcattgcaataggggagtcagacaataaatgaataggctgggtgcggtggctcacgcctgtaatcccagcactttgggaggctgaggcaggcggatcgcctgaggtcaggagttcgaggccagcctggctaacatggtgaaaccccgtctctactaaaaatacaaaaagtagccaggcatggtggtgggcgcctgtaatcccagctactcgggaggctgaagcaggagaatcacttgaacctgggaggcagaggttgcagtgagccaaaattgtgccattgcactccagcctgggtgacaagagcaagactccgtctcaaga

SEQ ID NO: 398963 - DNA, 183 bp, Homo sapiens
tccagtttacacccccagctttatctttgccactttctttcatatccaatagacagaaaagcatagccagtatctaagaacagaaaacataaatcatcttagccttagagtccctgaatctttgcatctttgcagagatagcaagcacataaatggggatcaccatttgattgtctgtttttt

SEQ ID NO: 398964 - DNA, 430 bp, Homo sapiens
tcagcggggattcccagacgcacgcttctcctgagagagtccagcccctcctggcggccgtggtccctggatgcgggtgctcgaggcctgttcttctccctgtggcggtggtgagtgtaatgcctcagaagactctgccagggcattaaacaaagtcatacgcgaaccccccggtgcacggcaggggactttgtcacctgtgtgcttatgcgtgagcaacagcgcctgatgactcttgggaagagccacaacaaagcgagggcctgcaggcggcagtggccagggaaccctagcccacaggaactcaagcagcttcagagaaggtcttacttgtttccggggagaggccagaggctccgggaacccaattcaatatgtaatatatagcagtgtccacgctatggtctaagcaaaggcaagaggagaaata

SEQ ID NO: 398965 - DNA, 490 bp, Homo sapiens
agaaagatggtggaaacgtgaggtccaaaggccttagcttgggcatggtctatgtccctcctgttcctattccatttgctgaaaggagtcttatcgccaagtccaacagtaggatgggttgggagagaagggagtggattttttaacacgtcataccacacccttctgggcttggtcttgggtccaagctgccctggaatttggagttcggggtcttgtacttccactcgacacatccctgtgtctccatagcaactgtttactgaccccttcctctactccctctgagaccctggccatcctcctggggtcttcagtgggcaaagcttcggccctctggctcgaagcgtctctgtttcttgcatttctgcctgcatgctggggaggcctggaaacactcaccctggttcctcaatagaactgctgtgacaattagaattcttttgtcaaactgttctttatctaaattcagagagtaaatttaaaaaat

SEQ ID NO: 398966 - DNA, 544 bp, Homo sapiens
atatacaaaatggactattattcaggcataaaaaagaatgaactcctgttatttagagcaacatggatggaactggaggtcattacgttaagtgaaagaagtcaggcacagaaagacaaatgtcaagtgttctcactcatctgtgggagtcaaaaacatggatctcatggaggtagagggtacaatggtgattcccagaagctgagaagggaaggcagggcaggatgaggagaagttggttaatgggtacaaaaatacaattagaaggaataagttctagtatttgacagcaggaagattacagttagcaataatttatcgtatgttccaaaagagctagaagaattctaatgttctcaacaaaaagataaatgtttgaggtgatgaatatcccaaattccttgatttggtcatcacactttgtatacagatatcaaaataccatgtgtatcctaaaaatatgtacaactatatcaataaaaaatacaaaaaagacaatatacaataaccacgttgagtccactccagtaaagcagctcaccat

SEQ ID NO: 398967 - DNA, 329 bp, Homo sapiens
  misc_feature (109)..(109): n is a, c, g, or t
  misc_feature (112)..(112): n is a, c, g, or t
atgtggataatgatacctacttctttggattgttgaagggattgaataaggaagtgtgtgtaaagcaccctgacactgctctagcacttagtagatgtcctgtataggngcnccccccccccccccccccccccccccccccccccccccccccccccccccccccccccccccccccccccccccccccccccccccccccccccccccccccccccccctccccccccccccccccccccccccccctccccccccccccccccccccccccccccccccgcccccccccccccccccccccccccccccccccccccccccccccc

SEQ ID NO: 398968 - DNA, 446 bp, Homo sapiens
ccagtcatcagtactttgcctctcagctgcacacccacgcttctttgccctgctttgtgacagtaggagtctggtgggatgaaggggcttcccttcctctcttcctgggctcttccagtgcagactgccagcaggatatgagtgcactggcagcccagctcaaggattccagcttccagtcccagcttgagagtcccagcttacccacctcagcccagcctctgtggtccagctctggcccagggcagcctagagaacaggaagtcatcctccatccactggaccacagcctcggccctgggctgtgacccctccaagtcccatctttccttggtattctctctcagccttagggtgttctttagtgttctgtttagaacactaaagttagaagttaatcccttattaccagttaataatttttcatattaaatttgccctgttcc

SEQ ID NO: 398969 - DNA, 590 bp, Homo sapiens
tttctattcctgtgttttggtgactatgtggtatgctgagatcaaatgaaagtagcaattcccttcatagcagataaaacctgtgaattgtagcacgggacttttaaaaatattttttgtaaagcatttttagatctggtaccttgaaaagtactagaaaaatcaatatcattgccagtgcttatttccacctcagtccatagtttctcatatgtatgattttcagctattttttccatgggtaagttaagttgcattcagtataggttagcaatggtaatatattttacaaaatactaagtactttctagagacctagtattagttcacatttttaagtaataaaaagtttaactagaaaaagagcattctctttaaaattagggtataatttatatacagggaaatgtacagattaattattcagttcgatcagtgttgacaaacgtatacaaaagtgtaacccatattttggtctgatgtagaacatttctgtcaccccagaaggtaagttccttcatgccctttctcagttattccctctgtcttcaccagaagcaatcactgctgagttctattactatagattt

SEQ ID NO: 398970 - DNA, 579 bp, Homo sapiens
actttgggaggccgaggcgggcggatcacttgaggtcaggtgttttgagaccagcctggccaacatggtgaaaccctccctctactaaaaatacaaaaattagctgggcgtcgtggcacacatcggtagtctcagctactcaggaggctgaggcaagggaatcgcttcaacctgagaggcagagggaggctctgtctcataaaaaaaaaaaaaaagaaaaaaaaaatcatgaaattatttaataataacttctggtagcctcaacacatatatatgtaacacagacaactttaggattatttattttacaaaatttatttcacaaaacatatctgaaagatttattctgaggatgagttattcttcagaaggaagctacataaagaaactaagactggtggccaagagttgtgaaagcactcaaggaaaaaattctgaaatcctagtcaaaatattttacagactgatatggtttggatatctgccccttcaaatctcatgttgaaatgagtgatcccccatgttggagaggggcctaatggggaggtgttcgggtcatgggggcagatccctcaggaa

SEQ ID NO: 398971 - DNA, 394 bp, Homo sapiens
aaaaatgagttattgcttctttttctgtaaataatatttattaaattatgaatgtaaaaaaatgtggtgatatataacaactgagcttcatattaatggtatatttaagctttataggatagggtgaagtgattttaattattggggtttggtaaaggtttataccaaacatatttgtttcatagtgagccccttgttgtatagtaagtctgattttattaatttgtacagagaaattcctttgtaaaatatgactgacttttcttcctcttagggagacagattaataatatttcactattaattaggttccatctgctcatcctgcctttcattctaaaggttatacttattaccatattctcaaaccgacccaactgtgtaatcaaagttt

SEQ ID NO: 398972 - DNA, 458 bp, Homo sapiens
tgcccttgtactagcagtggtatgtgtaatatatttcgagaaacactgcactaacacctactgtttacatactatcaaaaaccccagttctgccactaattagttgtgccactatggacatttcactttctctttctgggtttttttctttaatttaggataagttatctaccatctctaaaatctctccctgctttaaaattttgttatttaaactctaaagtacaatctgtcttgctctacagaatgtacatctctctcttttatgaacattgtatggcgtagaggaattcagaactacaaaacattcatgtcctgtcattttacctctgtcctaaatttgcccctttttcaagtctcatgggatggtaggtatatctttcttttctttttttcttttctttttcttttcttttttttttgagatggagtctcgctctgtcgcccaggctggagtg

SEQ ID NO: 398973 - DNA, 1146 bp, Homo sapiens
cttggggccgatgccatttctaaaagtgattgagtaaatatcacaggtgggcaaatcaaagagaaggatattctggttgtttcaaggtccaggtaattcaggccatggcacaggtgatcctgagcttaggaagaactcacccatgcctcaggggcccagctgccctcctcccctcactgctggagcacctacaacagctgtgaagcatcttgtgcttttggagccttgacatgggaaggaacaggagaaagcaggactgatgtctccagaccaccccttaggcaaaccctctttggtagcatcttagacccaaatatttttttccttcacgtcacgttgcctgaattttttcaccttagtttgttgtactgccaaatattttatttggaataacaagtacctttgagaaaaaaaaaagcacatacaaacttcagctcccctttgaggcttagctccaacagcacctttcctttccttcttagaagtaagctttctgggtttgaattcctacagcacacattctgactcatagcatctgtgacttgttatttcacatttccatggatgcatctcatctgccttgctgcactgtaggcccttcggcttttatttttttttaattcttaatctttatgggtacatagcaggtatatatatttatggcatacgttagatgttttgacacaggtatgcaatgcctaataatcacatcatggaaaatggggtatccctcttctcatttatttgtgttacaaacaatccagttatacttttagttattttcaaacgtacaatgaaattattgactatagtcaccctgctgtgctgtcaaatacccggccttattcattcattataactatttttgtcacccattaactatccccacctccctcccaccctccctcactacctttcccagcctctggtaaccatccttctattctatatctctgtgggctcaattgttttgagttttagatcctgtggcccctttgaccatgcagatcatggcctattcatcttcacacctagataggagcctgcgcagtgcctggccaggagcaggcataagtgtgtgcaaatagaggaataaatagcagggcagcaactatgtctggaggtcattgtctttcctgtctcagt

SEQ ID NO: 398974 - DNA, 512 bp, Homo sapiens
gatccattgtcttttgggcaggtgattgtgatactataggagccggtgtcctgttgatggcatcccacaactttctaacctctgttgtagagttttgttagccacgatttggaccaacctgcagttaggccaagggctgctgatccaattggattaaggaactctgctgtttgagcatgttggcttcattcattggtatctcctacgccaagtcctaggcttggttacaaagggcaatgaagggtcttttctgtccttaagcactcacaggtagcttaacagtaatgccttggattccttccttcaagagcgacagcaggaagcccagcttctctggtagcagagcaggggtcctcaaagcagaccgtgaggtcagaggagcactggagtcaggagtttccatctccaccctgctgagtaaactgtagttacccacacagaaaaggaggctctccaggctgacagggtcacaaagacacacgactatgagatggaatgactatagctagaaa

SEQ ID NO: 398975 - DNA, 156 bp, Homo sapiens
ccaagcaccgtcaactacacattgttattcaccacagagaaagtatcaaatgtctgttgcattaagtggcaaaatttggtaactaataaatttcaatccatttaaaaacactgtaaatatagtataaatgttgtcgattcaactaatgattccata

SEQ ID NO: 398976 - DNA, 955 bp, Homo sapiens
actatctcagatttactgaggtttatcttctggtggtagattatccataagaagagtgatgtgccagaatcactctgggatccttgtctgacaagattcaaaggactaaatttaattcagtcatgaacactgccaattaccgtttatgggtagacatctttggaaatttccacaaggtcagacattcgcaactatcccttctacatgtccacacgtatactccaacactttattaggcatctgattagtttggaaagtatgcctccatctgaattagtccagtgtggcttagagttggtacaacattctcacagaatttcctaattttgtaggttcagcctgataaccactggagttctttggtcctcattaaatagctttcttcacacattgctctgcctgttacacatatgatgaacactgctttttagacttcattaggaatttaggactgcatcttgacaactgagcctattctactatatgtacaatacctagcccataataggtatacaatacacatttggtaaaactaattttcaaccaatgacatgtatttttcaactagtaacctagaaatgtttcacttaaaatctgagaactggttacactacaagttaccttggagattcatatatgaaaacgcaaacttagctatttgattgtattcactgggacttaagaatgcgcctgaataattgtgagttcgatttgttctggcaggctaatgaccatttccagtaaagtgaatagaggtcagaagtcgtataaaagaggtgttgtcagaacaccgttgagattacataggtgaacaactatttttaagcaactttatttgtgtagtgacaaagcatcccaatgcaggctgaaatgtttcatcacatctctggatctctctattttgtgcagacattgaaaaaattgttcatattatttccatgttatcagaatattt

SEQ ID NO: 398977 - DNA, 343 bp, Homo sapiens
atgtgttttacttttagtcattcaaataggtgataatagtatctcattgtggtgttagtttgcatttccctaatgactaatgatgttgaacatctttgtatgtgtttctttgccatccgtatattttctttggtgtagtatctgttcaaactttatgtcagttaaaaaaaaagacccaattgttttcttcttaatagatttggagagttctttatatatattctggatactagtcaagcctttgtgaaatatgtgatttgcaaatattttctcctgttctgtggcttgtctttttattctttcaataggtagactttaataacatcgttttgttttcttttta

SEQ ID NO: 398978 - DNA, 232 bp, Homo sapiens
tgctgggagttagacacacttggctggagctcccatgtagcctctaccaattttggtatcttaggcatgataccaatcagcctcctgagcctcagtttcttcacctgtcatatgcagaaaacaatacctccctaattcacttcaatcgcattgcagttatgagattacaaggagatgatactgggaaagagtcccaaaagaaaaattctatgcagatgaaagagattcttga

SEQ ID NO: 398979 - DNA, 461 bp, Homo sapiens
agtaaatgctcaataaataaatgtttacttaataagtattaaaaaatctgctggccttaacataatggccactgatctctttttcttttgtagagactgggtctcactacattggccaggccggatttgaattcctgggctcagcctcccgagtagctgggactacaagcatgtaccaccatgcccagttttctgcagcagtttttataaaccaaattttccaaattagaaagactgaccaaagaagcacttttatacgaggaataacttacgtatggagaatctcaacttggaccagtcaagaccaactccagcgatgaagccagaatgtaatatatctcaaaaggctaaagaagtccattttcccagatgtaaattataattaaaaaatagtgagccaaactctaatatcccaatgtgataatctttcaaataaaaatatgggctgtagttcaggaaaa

SEQ ID NO: 398980 - DNA, 475 bp, Homo sapiens
cattctcttacctgtgttcaggtccacacccacgagctgacctgattctgaatgttctgcttaaattttaactaatgtttcctgaaggtcaaaaccagaattctgagcaagaacctaaagtaaacaaatttaattcctgagaaaacaggaagaattgatatttaaaaaaaaaaaaaaaaaaaaaaggctgggcatagtggctcacacctgtaatcccagcactctgagaggccgaggcgggtggatcacaaggtcaagagatcgagactatcctggccaacatggtgaaaccctgtctctactacaaatacaaaaaattagctgggcattgtgacacgtgcctgtagtcccagctactcaggaggctgaggccggagaatcgcttgaaactgagaggtggaggttgccgtgagccgagatcatgccactgcactccagcctgggcgacaagagactgcatctcaaaaaaaaaaaa

SEQ ID NO: 398981 - DNA, 435 bp, Homo sapiens
aataagctgcaactggaattggagtattttcaaatgaatgacttcttagttaaaaaacacacacacacataaatagcgtttgatattttgtgacagtgtctaggtgagcaaggcaagaagtctaatagctacaaaagccacaagccacttataggtgtcttggtaaagaaataggggtttttaaatgtaaataagaaatacaaatttttttaaatggggagtgaatccatttgatctttgttcaatagcaaatgacttataaatgcttgtcacaccttaaactatttcaaatgacaagtgtcaaaaaatctctcttgcatgtagccttgtaagtctcttaaaattctggaatttttttaaaaaaagatgtctattggatataacactattgtattctggaaacaaaaaaccctttgtccatttggcagattaaaa

SEQ ID NO: 398982 - DNA, 606 bp, Homo sapiens
  misc_feature (40)..(40): n is a, c, g, or t
  misc_feature (157)..(157): n is a, c, g, or t
  misc_feature (428)..(428): n is a, c, g, or t
  misc_feature (457)..(457): n is a, c, g, or t
cgagaccagcctggcatacatggtgaaaccctatctctanttaaaaatagaaaaattagccaggcgtgatggcgggtacctgtaatcccagctacttgggagactgaggttgcagtgagttgagatcgcgccactgccctccagcttgggcaacacnagcgagaccccgtctcaggaaaagaaaaaagaaattgtctgatatttatagaattttcaaagtgtgagaaataaaacttcagacataattcgtgcttcatactatattgaattagatgattttaaagtctcccgtatttaccactgtatttttgtctgcgtatataagttccatgcacctatactatggctaacaatattttactttgactaaaatttgttacacaatacttaattattagtgttacttattattgaaagacattagttgnaaatttctttcagcctgatttcatccatntttctgccaagaggcaattgtaaattattggattgactcttctacatattgtttgtagttgttaagaaagtacttactggtagaagttgaattttttgttgcccttattctccattgtctgtttagcgaatttttctctgcgatggctc

SEQ ID NO: 398983 - DNA, 152 bp, Homo sapiens
tagatcgagctcggtaccgattacgctcctagacagaacaattaggcaagaaaaaaaaagcatctagattggaaagaagtaaaattatacctgtttgcagaatacactaacttatatatagaaaaccctagagattccacaaaaaaactgtt

SEQ ID NO: 398984 - DNA, 330 bp, Homo sapiens
gaatcgagctcggtaccagtgaaacgcagctgaaggggtggtggggaaatagtgcaaaggacaagagaaatgagtgttggacagatgagcgaggaggcaaaggtagtctcagcttatatccttcctgctttggagtatgaggagttcctgagaagcaaggacaccctggagcccagtgtttgaaagaatccagtttctctaagttcagcactcaaaacttcctcagggccagctgatcagacccaaatccttgctcatgtctgaccacaagaagtgtttcccaagcttcctcactggacagctacccaataagggtatgactttgagggg

SEQ ID NO: 398985 - DNA, 429 bp, Homo sapiens
aggaataaattctggcggtctattgcacagtaggatgactgtggttaacaacattgtttcaaaatggctagaaaagattttggttgttctcactacaaagaaatggtaaatacatgaggtgatggttttgctaaataacattaaaatatcaccatatcccataaataagtaaaattgttatgtgtcaaaaatgaaacaaaaatatataatgttggggggtattaagtgctatgatgacaagtaaagcaagtttggcataattttgggagttggcatattaggttaaggtaaagccagttacttttgttatgtttatgaattcctaggcctcttgacaaacactgaggttctcaaacattggcaaacacaagtcacattaggtaaacatacaaattcttggccttagttccatatattttattctgaaca

SEQ ID NO: 398986 - DNA, 227 bp, Homo sapiens
gatcagctatgggatgaccaaactccaggggaaagatcatcttcccactctgtcccctttccagctccgcatctctcaccgagagccatctccatcactcagtaaaatcctcacattcaccatccttcaagtctgggtgacctgattcttcctgaatgctggacaaagacttgggtaccaagagggcagggcttacagggctgtcacccttattctccgctgagctg

SEQ ID NO: 398987 - DNA, 241 bp, Homo sapiens
ggggttgctcatataatgggcagggaggctgaagaatcaggcttgggggagttgggaacgagcagataggatttagcagcaaaaatgatttcatggttttattcaattgcagtctctagatggaaaccatttttttcttctgaacttgtgtcctgctattcaagattcaaagtcacaggagagagaatccaactgtctgaatctaggttctgctattgacacatggttgccctggaacaga

SEQ ID NO: 398988 - DNA, 142 bp, Homo sapiens
ggttgttggcaggactcagtttcttactggctgttagctggaagtcactctgtcctttaccaggtagctctctccatcagaacaaacagagccagaaagagaatcggagcaagatggaagtctcagaattttgtaacctgat

SEQ ID NO: 398989 - DNA, 435 bp, Homo sapiens
tgggtcactgcagtgcatctttatgcaatgtggctcatattagcattttggaaatactctacacatttctgtctctgcaatgtaactgtaaactaaaatgatggagcatcgcatttgtcaataagatggataataatagaaacaagaggggtcccactcaattctataccctgagagagtcagagttctaacgaatatgcagataaagctgagacctcctttaagatatccaggagagctttgcctggccttctgagcagaggggctctgaacaatgtaactattaaatatacaatgcagaaagaattgcccttaatactgggcagggtgcacactgtgaggaattttttaaggagtcttttaaaatagaaaatggcctgtttgaaagaaaatggattataacaattgtgtccttctgggatccccagatatttc

SEQ ID NO: 398990 - DNA, 442 bp, Homo sapiens
agagattgcatcttgtgagtctgtagaaatggtcaaggccttgtcctctcttaggtccagagctcaggttaatgcagattttcccggccatctgtgctgaagtccctttggggaggctcctggctggtttcctgtaggtagacagctacacgtcctgcccttcattggcttcttttcatgaagctcctgccatctacaaaacatgtctcccttcttgaatcacatctctgttattgaaactctagaagtcgaccgggcatggtggctatgcctataatcccagcattttgggatgccaaggcgggtggatcacctgaggtcaggagttcaagaccagcctggccaacatggcgaaaccccgtctctaatacaaatacaaaaattagccaagcatggtggccactgtactccagccttggcgacagagcaagactccgtctca

SEQ ID NO: 398991 - DNA, 555 bp, Homo sapiens
acagagaataaccccagaagtagatctctgcagcatcattggaatgaggacagtgatttttttttaagaatgtcttttttgaggaagaggcaatgtgcctggaccatagtggttctagttggggaagcccgggccttttcctccttacccctgggaaaccacatcgctagtgctgtccgtccacagggacccacccacttggcagggtagagcttctagaaccagagccaaggcaggcaggagactctttaaacagttcagagggaggaggcaggagcagggtctgagtggaagctgggtgctgcaggctgtggtcagaccagagaaggccgattccacaggactggggtcagagagcaggggtcagagagcaggagccagagcgggcctcggcctctccctgggaggccacggcacctccctgtgcctggggccttcatgactcgagggtgtctaccccaaagctgctgcaagcattcagagagagaagtgcccagggcccagcagagagcaagccctccacacgtgtttctctccctcttctttcagaagcaa

SEQ ID NO: 398992 - DNA, 440 bp, Homo sapiens
gaggtgatctgaggtccccggcagaatcacactcaaagtcaaagcagtatgcaattaagtgagaatccaggatacagacatcaagaacagcagaggctcagagaaggatgaggctagcatggccagagggtcaggctcccagtcctcatacatcaggccagaaacaaggcacctaatgcctctcctggtattgcaccaagagcacttgacattaggagaatctacaagatcatgctacactcctgcttagaaatcttccatggctgctcctctcaacctcagggtaaagttttaactgcttagcctggcattcaaggcctttcctaatctggctcagactgccaattttttttttttttttttttttttatttttttgggaaaaaaagcttggccggggatcccccgcgggggaaaacagagaaaaaccccccccacaaa

SEQ ID NO: 398993 - DNA, 441 bp, Homo sapiens
ctattatccattagagtttattaagcaatgaaagaaatgaaggcataaggataaaacgtctgctcaaatttctgagcagtcactttctcattagagctcttgtatttggggactctaatgtggaaataccgtgagaatttaaagaacaaatagtacatcctcctcccttagaaggtatcagaatttttaatttttatattatattgtattatattatattatattattattatattgtattatattatattatattatattattgtattatattattatattatattatattatattatattatattatattatattatattatattttaagacggactctagttctgtcacccaggctggagtgcagtggcgccatctgggctcactgcaagctccgcctcccaggttcacgccattctcctgcctcagcctcccatgta

SEQ ID NO: 398994 - DNA, 497 bp, Homo sapiens
atttcagaagggcaggtgtgaagcaagctgttcagcattagggatggtgatggctctgaggccccatcacaccctatgggggagagcgaatgttacaggaggctttctggtgcctcgtgcacatggactgtgcatgtgggattttgcctaaggtcagccttatatgcattgtggaactagggtatggaaaaccatgaaacatgattattttcttctagcatgcctgtctatgacttcaactggtggtattctttgtactttataatctacattatcattaatacctacatcttcaagtctgtctttctggccatggtgtacagcaattataggaagcattttcacatactgtgtgtgtgtgtgtgtgtgttttgtagtgatgaacagaacttgttatttacccaattctattatctatcataatagtaaattagctactataatagacaaaagtatgactctcagttaaataagagattttttaaaaatcttgttac

SEQ ID NO: 398995 - DNA, 437 bp, Homo sapiens
gtcctgatgagacagaaaggcactcactgggcacctgaggtcaccaaatcctctcagtgcggcctgagattcaaagaagggggacttttgggagtggcctacctgaaatctttacatcagaaactcaagcaagaaagagctggggaggacagctgcctgattcgccagccaaccaacatgtgccctgtctacgcaggcagacaccagtgctgcctagaggcgctcaccgtcctgtagagggagatcctcgtggaagttaagggcaaggtgctccgcatgctctgacaggtgtcctcgggttaggaacacagggaggactcgcgtctggccagggccaacctgtgtcttctcttggctctccagaatgacccagggtgacctgcagagccctctcagtacctgcagaggtcccttcctctgatcctctttgcctgctc

SEQ ID NO: 398996 - DNA, 368 bp, Homo sapiens
aggtggctattccaaggagaagggggaggagggagtcttgaacagtcccttagctctctcctactgtatcttgaaaaaagattagaattattccttagccataaggggtaagggtaggagaaacgcatacaagtaaaaggaaaatggattttacctcaacatgaggaaaaactgttgaacagccaaaactacttgaagatgaaatgtgatatttgaaagcagtaggtagacagtttctgatggtaatcaagcatagattagataaacacttggtgggaatgttgtggcagggtttcagatcatcaatggatgtttattcttcaatattaagaatctggttagagacttctgaggaaaacaaacaaaaa

SEQ ID NO: 398997 - DNA, 284 bp, Homo sapiens
atctcaaaaaaaataaaagcttcagaaagattcaagaagtactgtattcatgaaataagaataaagggttggccgggcacagtggcacacctgtaatcccagcactttgggaggccgaggcaggccaattgcttgagcccaggagtttgagaccagcctgggcaacatggtgaaactcccttgctacaaaatatagaaaaattagcctggcgttgtagtgcaggcctgtagtcccagctacttgggaagctgagatgggaggaccagaaggttgcatctgcagt

SEQ ID NO: 398998 - DNA, 594 bp, Homo sapiens
tgaaactggcttttcaggtttgacccagctagatgcctgggcagtcccaggctcggttctcctcacccctgtggagctaaccccaacctcctagccccgaccccaagggtgggcagaagctggggaccaagcagctggctggggctcaaggggtccctgaggcggagccccctgccaccaggggtcattctgggcaagccgggccccttttcctgagaatggggcaggggcaaatggagtgcatgggagtctggtggtgccagattgaaggggcctcagaccctttcccagcccttccaagtagctttcactggctgggtggcctccgttgcacaagcaggcccctcaaccagcacccctcatgagctggccggtccccaccttggggagctgactttctagggtgcgctcttggtttagggggagtcgtccaggtctcccctgcctttcagggaccatcaggccctcccctaggatcttcccagctacagtccctgcccagggcacccccagttgctcttggctgtgagggcctccgccacaccggctccagttcccccacctcagtgtctgtgccaggatcacattttgccc

SEQ ID NO: 398999 - DNA, 478 bp, Homo sapiens
caggctgtgaactcttgcctgcaagtatctgctaaggaaagccattttgtgtatctgcctccggtgtgctggaattacctgtggaccgcttatggatgtcattaagatgatcttcgtgaaatacttgaacatcatgtcaaggaccagaatgaaagctacggttattaatgacgaacgctataataggcatttgagatgccatttttgggctcatgaaatattgagcttattttgaagatctaggatatgcaggtccatgtttgttttggctataaacttgaagaccgaagaagcagaccattttttttgaagaaagttgattggatattgacttttcttgtaatgatgttattttataaagtgacccactatattaatttggattttgtgtttactctttagagaaatgctctattcagatccgattgggaagtttatgtttggatatttattctatttaaatttttatctcaatctc

SEQ ID NO: 399000 - DNA, 505 bp, Homo sapiens
acagatttcacataagaagcttacaagaagtacaccaaagattacatgacactaatcaaagggcaccttgaagaacagagaccagaaagagtaacctcttttatgccaggggctgcagaacaaatcaagcacatccttgctaatttcaaaaactaccagttctctcattggtgaaaacatctatccagatggcctggttgatctactcgactaccgtgaggatggtgtgacccctatatatgattttctataggtatggtttagatatgtaaaaacctagtttacttctctctctctgcccttgtttttcctgcatgttcaacatgtccctccccctcacccctttccccagcccccaccctctcaaaaaaaaaaaaaaaaaaacctgagattgtacttttgtacaggaggttcaaattacaaatggcaattttatgcacttcgccgtattaacgctgccgcccgggcagcgctcatgtgaccctccgtggattaacatcctgct

SEQ ID NO: 399001 - DNA, 401 bp, Homo sapiens
tccagcaactagccagagtccatgctctattttctaaaggcaaaatcaggtctgttttcacaagtgacagtgaggccagaagattttgaaatcgcttgtgaaaatacgagaagacaaactttcccaattctgaaaattgaccttgtagaaaagatatgcatctgtaatgcttgtgttttatgaatttaatttcaaaggaaatgtattcaaatggtccaaaaaaccagaaggtatagaaagctatgaaatgaacacatctgtcctctttctgatacccacaccaccagtatcactgctgctctttttatatatccttccagtttctttttgcatatccaagtaaataaaatttggatttttaccaccatcatcctccccctctttacataaagtatagtgta

SEQ ID NO: 399002 - DNA, 247 bp, Homo sapiens
gtgctgggattacaggcatgagccactgcacctggcctaggactggtgtcctaagaagaggaagagacacttaggtggaaggcacacagagaggccacgtgaggacacagtgagaaggtggccgtctgcaagccgaggagggggcctcaggagaaaccaaccctgcaatcaccttgatcttgggctttcagcccccaaaggtgtgagaaaataaacttcggttgataaactgctgttgttgaagcca

SEQ ID NO: 399003 - DNA, 866 bp, Homo sapiens
ctactcgttaccaccaagctgctagtgatagttacctggaacttctaaaagaggctaccaagcgagatctaaatctttcggatgaagacggcatgactcctactctcttggcagcctaccatgggaacttggaagccctagagataatctgcagtagaggaggggaccctgataggtgtgacatctggggaaacactcctctacattttgcagcctccaatggccatgcccactgcgtctcattcctggtcaactttggtgccaacatctttgccctggataatgacttacagactccactggatgctgctgccagcagggagcagaatgaatgtgttgctctcctggacaaggctgccactgcacagaacatcatgaaccccaagaaggtcaccaggctgaaggagcaggctcagaagaatgccaggaggcagatcaaagagtgtgagaggctccaggagaagcaccaaaataagatggcccacacctacagcaaggaggaatccgggactctctcttcttccaagggtaccttctccagatcatccccttcaaatgcttctgctcctggcacattcgggtcactatctaagggcattaaagacactttcaagatcaagttcaagaagaacaaagatacagcagaacaggtggggaaggaaggcagaagtgggcagaggaacgtgatggaagtgttcagagaggaagaggaagactcgttctcaggggacttcaaagagaagctccagttgtcagcagaggaggacggcagtgtgcaccatgaatccattctcaatcgtccaggtctaggaagtattgtttttagaaggaacaggatatcgagtcctgaagacatctcagatagc

SEQ ID NO: 399004 - DNA, 687 bp, Homo sapiens
ctactcgttaccaccaagctgctagtgatagttacctggaacttctaaaagaggctaccaagcgagatctaaatctttcggatgaagacggcatgactcctactctcttggcagcctaccatgggaacttggaagccctagagataatctgcagtagaggaggggaccctgataggtgtgacatctggggaaacactcctctacattttgcagcctccaatggccatgcccactgcgtctcattcctggtcaactttggtgccaacatctttgccctggataatgacttacagactccactggatgctgctgccagcagggagcagaatgaatgtgttgctctcctggacaaggctgccactgcacagaacatcatgaaccccaagaaggtcaccaggctgaaggagcaggctcagaagaatgccaggaggcagatcaaagagtgtgagaggctccaggagaagcaccaaaataagatggcccacacctacagcaaggaggaagagacacttaggtggaaggcacacagagaggccacgtgaggacacagtgagaaggtggccgtctgcaagccgaggagggggcctcaggagaaaccaaccctgcaatcaccttgatcttgggctttcagcccccaaaggtgtgagaaaataaacttcggttgataaactgctgttgttgaagcca

SEQ ID NO: 399005 - DNA, 573 bp, Homo sapiens
aagttattctgcatttccagaaccacaaccatgccaatgcttgacacagttaaataaaaattaactttcatttctctttacctctgctgacgtggtcaagattaaaagtaaactctcggtttccaggaatggtcaagaaattaaatgttatggacatagagaaacatacttcatgctgcatgctatttactcattttcaaagatccagaactaagatgtcagaaagaactgagtcactatacctggctcggcttccagccctaccaccactaaagaagcaacctccaagtgtcaactggctctatcctcatttcatcacttctcatcacttctctatcccctgcaagctggcttctgtccccctcactctaatgaaactgctcaggtcatgggactcataggaagttctcagtacttttttctttcttgcttctcagagtgttcgacactatgaaacactccctccttgaaaccccacgctgttactctgcactctactgcctctccccctgcctcttgagctattctttcttcatctgcttggcagctcctcttcctcctccagggagaact

SEQ ID NO: 399006 - DNA, 921 bp, Homo sapiens
aactccacagggtgacatgacgaaaatcttcatgcacccttcttcaggtattgtatagttggccttgagacaaaagccttcacacagtagaagttctggcactcatctgggtgcacaagcatgatgcagtaagtcctgtcatttggtgcctggggaagcaatgagtagtagtaggaagaatcagcttaggaaccagacacataggggatttgaatcttaggtctgctgtctatagctttctgatcttgagccaaatcacttaacctctctcacctgcagtttcttcattaataaaatcagctataatatctaccttatgtagttttgtgagaattaggaataatgtgtgggaagtgcctggcagagcaggcattcagtaaatggcaggcaatattattacttcagtgttgtacttgtgtcagttatcatactgtggtagccatgctgtagtaggtaactgtggctgtcacaagtcaagcaccacagactgaattggttgtggagaccagtcctacattcttccttcagatgctacccatgcgtatagtgcgtgtaattaacccacagtttcagaacatttcatgttgcaccatataaaatttaggaatggggctgtctgctctcttttttggccttgtgtgacaatatgtgcttcagaaacattaaggaatataccccattaaggctgtcctaaattgtttccatttcttacaaccatataaaacgggaaattttcctcatacttccatagtgtagataacctagttttcctataagtaaatctgcatagaaactaatatgtattcttattttgctttatttaaagtcttaattgttttccaaatgtgccaagcttgtgttttatcaaatccttgccattctaattttcccattatagaaaaaataaattaaatttcaaaa

SEQ ID NO: 399007 - DNA, 164 bp, Homo sapiens
agtgggtaaacgtgcatgcttccctaaactcttactaaagcaacatatccaagcttatctgatgtggaaaatggcaaatcactttttcaaatttgtattcccatttgaattataataaacatctttttattaagcttataagctacatttctttctttctcttg

SEQ ID NO: 399008 - DNA, 260 bp, Homo sapiens
tgtcaggattacaggtgtgagccactacacccagccaatgtttgtacctctattgggaggcacataatacctagtttctctttttaggatgtaaggaataattgacatttattgactgaagccatcgtttcatcgggggttgcaaaatagtgctattctaattctgtttccttctgtagttgccagcttgactacttctatgcctgtaaacttccagtaatcaagtacttagttatcctgagatacagtctgtataggag

SEQ ID NO: 399009 - DNA, 579 bp, Homo sapiens
agacagaaagatgagtaatataacccctacgtaaagaagctcatagactaatgaggaatctcatattttgtgggaacacttattacttaggtaaaccattagctttcatttcctcctctctaagtccagataataataataatacataactcagagggttatctatgggggaaaatgaaattgtgaaaagtactacaaaaatgctatagaatgttagatgacatattattgactgagggatttctggataagagattactaactcatgttttctgaatctcgtgatttaaaattttgtagtaaattagttatgtgttgtgtgataaaccatataaaatttagtgtcttaaaatcacaacactttattgtttctcattgttttactggttgactgagtgattttctccctggtcttgtttgggctcattcgatatctcctcactcacctgtctggtgcctcggtgatggctgttgtgtgagccgctttcatcatgcagtttcttcattaggtagtccagctggattttcttacatgacagcagaaacagtcaaagatgtaacaacagaatggcaaggcct

SEQ ID NO: 399010 - DNA, 353 bp, Homo sapiens
gaaaaggtcagggagccgaaggcctgtgggacgtgaccaactcagcattcctctggaggctatatgatcaaacagcaaactgtttatcaagaatgcaggatatgggcaaactcacacttccctgccaccaaaaggtttgctgagggacatgtctcccttgcaccgggctccttgaagttatctaatgagaaatctagcacctattattcaaaggatgcagtcttgcaagcctgctgtgaaccaaacggctgactgacaattacctgacaatcaccctgcctttctcgctctctcttttgcctaataaatatggagggctgtgtaaagctcagagcccttgtccactagaggca

SEQ ID NO: 399011 - DNA, 181 bp, Homo sapiens
gaaagtaaattctacttgaagctaaaatcatataaagagattttataaggaagaaacacaaagcagcaacctgtaaatttcagcctaaagaaattcaaatgcacaaccgtgaactttggtactgatagacataagagaggaaagtgacccacagagcctgcagcacaacttaaggaatctg

SEQ ID NO: 399012 - DNA, 624 bp, Homo sapiens
gtctgctatttgctcaggtttctgacacaaggtggtgatctaatactacataggaatgatgaaaaccttttaaatcataattgtttgctaatagatgaagcctgctaggaagttacacagagcatgagtgaactactagatgttgtaatttttataaaaatatgctaacaagtatggtaaccctacgcagaatcaaggaccagtcttcccaccacttcagtcttttcgagcatgtaactgtttaccctgaactgcactgggaaaaaagccctgagtatctcgcatagcacctcatacagttgtcattcagctcagcacaaaagctatgcatttgctctttggagagtttttaacaggttattcataactacagtggctcacagagttgatgggaaatagggaaaagagagagagaaactgatttacaataagtcctgtataatatggctatatgtagtaaactggaatccttaggaaagcattgtgtaaaagcatggatgcatatattttttgttattctatgataagcagtttaaatcatttattttggttttaataaacttcagtattttaaaaacccattcatgtgataaaatgattcttgatcctccagcaattccagat

SEQ ID NO: 399013 - DNA, 419 bp, Homo sapiens
caagaagagctcctcattgtcagctgcctgtgggtctaggggccctttgctccagcagaaggtgctgcagtgagccacaggactccaaatcaccaggtgctgagcagctaatattcccagacagcccttataaacagcagcacccaaacctggagtacttggtgctcaagtagtgtatttgtcttctccccgacaacacaggcaattaacaaggccaccttcccttgtttgtcaaataaggagagtatagtaataggggacacatttcctgccctaaaatcatttctccagcagcataccctggccctggatcacctctcctcaggaataatgagagatttcaggattgtgtatcttcttttcttgctgtgactcttgttttataaatttcctgaaaaaagttcattccttaacccatt

SEQ ID NO: 399014 - DNA, 436 bp, Homo sapiens
cagcattttgggaggctgaggcaggaggattgcttcagctcaggagtttgagaccagcctgggcaacacggtgagaccccatctctattaaaaaaaaaaaaaagtaaggttttcactggatgtgtgagcagctgcatggaccagggccgtgcatcacatgggtaacatccgtggagcaaggtcacacgtgactgcttctctcactagaaatgagtttaaattctcagccaggcagatggtggtgtgaggctcaacttgatcaaaagtcacaaactttttctgcaaagggctcaagaggagtaaatattttcagctttgtagttgagatggtctctgtcgccacgattggactctaccatgctagcatcaaagcagctggagagatacgtaaatgaaagaccgtgtctgtgtcccaataaactttattgatacaaaa

SEQ ID NO: 399015 - DNA, 276 bp, Homo sapiens
agcatggacttaaagtctagatgtgttttgttgacatttaaatatgaatagattgatgatttaatgtattggattttttcttaattatgaagtattatttaggtatactaataacaaaatggagacgtgtgaagaaaaatattaatctttcttctccctcagtaccacctgtgaggaaatcagtgttaacagtgtgtacatttttctttactcatgaatatgtatagggttcattttcatatttttaataaaaattggattatattcttttcagta

SEQ ID NO: 399016 - DNA, 529 bp, Homo sapiens
aacgcaatatggttcttcattagagctcagtgaggctgcggattattttccccattatgcagataacaaaacaaggcttagagaagtgaataacttgcccaactagtaaatctaagaggcattaccaaaatacagacacttctctgactccaggtccagcggtttccccgacctactaccctcagacactgatattttggctggtgctatcagggtctgcaagagggtataaaaagagagaaggtatgcatctaaggggcaactgtatagcgttgtctcaacttccatcttcactggtgttttgctttttgccttcagtgcaggtgaccgcagggtgttggtgcactcacagagctgacagccagttaattttattcatggctttgatccctgtgccccttctagcatcaggagtgaacatgagagttttcaaccccaaagaaaatggcctcttgagggaatagtggtttgggtgaataagagaaaatgatagtttgatgaaatacaacctctgaatggatgcctgccg

SEQ ID NO: 399017 - DNA, 420 bp, Homo sapiens
gtttgcttatttgctttttaacctgtcagcttactggctagtctctctccaataatcatctatttgttagccatggtaattctgatgccactggatttggataacaagaaacctagaaaattattattctgatataataggttttaaagtcttgtttttattaaagtttcttccttgtttagagtctcatctcattcacattagtttgatttgttttcaggtacagagtctaaaaatattcatcagttacaccagttgttcgcaaccttgattactcttgggaatttaaaaaataacaagctagctgggtgtggtggctcacaactgtaatcccagcactttgggaggccagggcaggaggatcacttgagcccaggagttcaagactagcctgggcaacccagaaagtcttcatctcta

SEQ ID NO: 399018 - DNA, 435 bp, Homo sapiens
agccaagagcgcttgagttgagtttgaggggaagatgtggagcgtgtggttctgtgtacagtcagagactgtggcctgggggcagcgtctttcaactctcacctctgcagctcagggacctcgggagacctcaccaaacctgcagggcctccgtgtccctaagtgtgctgtgtaaatgccccatctcatgggggagagacagccacggaggccttcctctgaccatagctgatggactggcggttgctcaggtccggctccgagaatgttcctgtgtctgagcctggaagaggctcgggtcccccccggcgtggttcccttcccgtgtctgagcctggaagaggctcgggtccggctccgagcgtggttcccttcccgtgtctgagcctggaagaggctcgggtccggctccgagcgtggttcccttcccgtgtc

SEQ ID NO: 399019 - DNA, 841 bp, Homo sapiens
gcgcagctgggatgaaagcttgccaggacatccccaactcctcgggaagacagggatcctctgctgagctatttagggacttctccagtctactcgcttaaagcaatagctcgtattcagggtgactattctctgaaaccaggttcccactttctgctttggccttgacttgcttcatgacctagggtgaatcactcctttcttcttgggcccttttctctcatgtgtttgataaaataaaaacacatgcttcaaagtattagtgcaaaagagaataaagcatagactcttgagaaacatttttgaaagccccatggaaataaatgtagagttaccatattcttcttgaatatagacatcaaatagggaacaaatgtgctaagaaacccctttaagcccaaaataacttcttgaaatgcaagatcccaatgaatccttttagcccagggttgggaaagtgagcaagtgatccagatttgcatcccccatcaatgactgaccaccactataagcatgtctctcagggacaccaagaaagcactttgggaacttcaatcaaataggctacatgaagatgaaggaaaaaattacagcctttaatacaaaggcgatatcaatttgaataataatagcataagaccccataaagtaggtatagttttaatctccattttccagatggaaagtctctctcagagattggaaaaccttgtccaaggtcattcagctaataagccaggattcaagctcaggtctcccacctctcttacctctacttctttcccacagtaagagacgtatagaccagaccagacagacgtataatccagacatacttctt

SEQ ID NO: 399020 - DNA, 456 bp, Homo sapiens
gaaaggttcattcatagctctttgaaaatttttattttaataacttgtgtgctatgtaagactttcaatagctgtcctgtatgtgtatcttaaaaatacttttggtggcgtattacacttttctgtttgggctcacatttcagaactgtcactaaagctgttttctttgtttctggccccattctcctacccaagtacagcatatttttctagatatacaattatcatattgccattcttctgactgtaagtacatggagtgaccacagcctacatatttatacttacgcctaatcagcagagtagtgactggccatgttttgaaaagggatcttaaggcagaaagttgcaacaggagataaaaagggaatttggcagcagcttcttctttcagtgttgaattcattaaactttgtaacattgtttcaccccaaattaaatatcttttttaacacc

SEQ ID NO: 399021 - DNA, 486 bp, Homo sapiens
gaaggcggctagagatagaaaaccacccagctctgcatcctgagacaaagaagcctttccctgggctcatatgatagaggtacgttgcctctgggcctcagttttgccatctgtaaaatagggtgaaggtcagattagattgggcatattcagtgtgggatccccctaatgacggcatcagcatcacctgggaaactgcaaattctcctttatgacagtggctctcaaactttaatgtgcattgaaaccatctggaggagaggagcgtttcccacttgagaaccacacagcgggatcagggaggggcgaactatagtccaccggccaaatctggccatggcctgctttttatggcccatgagctaagaatagttttttccatttttcagtagttggggaaaaaaatcaaagaatattttgtgacatatacaaattatatgaaattcaaatctcagtgtccataaataaggtttcgttggcaaaaaa

SEQ ID NO: 399022 - DNA, 841 bp, Homo sapiens
gaaggcggctagagatagaaaaccacccagctctgcatcctgagacaaagaagcctttccctgggctcatatgatagaggaggattgcaagctcttcgctgaaggatcacaacttatatccctccttctggtactactaggaaacttcgcagttcaataagaagcattgtctcaaactaaatcattgcttgttgaatgagcacagactccgagcaacatgcagccggggttccatgacagatgagacctagcctgtccccaggtagcaacgaaagactgaaatgatttaaaagcaaccaagaaagggtcacaaggcattaatacagccacctggcaaagagcatatctggagacagacgttgacagccccgggtggacattagttctataggatgttgtaagaggaatgaatccaggcagggtgaggaggcggtgggaagtgagcccggccctgaaggtgggcaagagccaggcaagaagaggagaaagattgttctcatggtgggaggaatgcaaggccacctatggaaatacaagtggagcagtttggctggagaaaggggttgtgtttgcttatggaggccttggatgccccgttgggagaatggacctcactttctggggctgactgtgttgcgattttttttctcttgagccatgcctggaacacggtttgtattcaacagcaacacacaaactgacagttccctgcaaggctgtcatatgccacttgcttcacagaaacacctcgcttattttaagcctgaaaacaaagccacaggatgagtattattctcattcctatgctacagataagaaaatcgaggtttcaaaagacgga

SEQ ID NO: 399023 - DNA, 393 bp, Homo sapiens
tcgtcccatcagtcagtctcagtttattccactcggggaagatcctctgcttggccatctcagcaatgaactcggcaagaaagcctgtcacccaagaagcactgatgccgtcttgctcccatcagccagtctcctcccaaagtgctgagattacaagcttgagccaccatgccggttgaacttatttttatctgtgttggccatttgtagtttttctattatgctggttccatttttctgactttgaagagccttttgtggaaacgaagcctaaagtatatgtgagtactgctttgtttcgtcagtttttgttttaaagagacttttcagtgtaatgcaagcattttcccttgaaggctgtgtttcctgtcaatcctaagctttcctccagca

SEQ ID NO: 399024 - DNA, 303 bp, Homo sapiens
cagacgatacaaatgcttagaagagtcactgccaattcagttttgttgatagagattattgtagcctctataacattaaaaacatcaggtttttgactggttccaccaagtacaagacttcaacttttctctgatatccttttacagaaaacttagcgtagagatagtcaattgagtctgtgatacactcaggacaaaagaatgtcctttacacataaacaatgctcaagtgtaagtctgggaattgttcctgtgctgtcttaatttctccactttaacagtgaagtgttcaagagatggccc

SEQ ID NO: 399025 - DNA, 583 bp, Homo sapiens
tagttcaaaactcctcctttctttaattgctaggtttaacgaagttgaaaaaccctaacttgggaaagtctctttgttctccccagctgctaatcacttcctactctttgttgtggaagagaacacataaagtcttattatttagaggcccctaacagaataggatactggtcctggggacagatccccaactatctgaatttaatcatgatgctcagggatgtgtgaaagtgtcttaggtgttcatgtctttgacgtttgacctaggttatagatgtctgtgaaattctgtcaccataattagatatagatactactgatttccttttcccagtcttccaacccagcctatgaccctgagtaaaaccttcttaaattcttttacttcagtagcacacaaaaaatcataattttggatcctgttccttgctctgtcacctgcttgctgcagttaagtctgctctgtggcagttttccatttgcaagcagggcacccttccagttaagttgtaaaattttatgtttaagtaagcccctgtgcccttgaagaataggagctacaggaatgtagagtccaaagaga

SEQ ID NO: 399026 - DNA, 185 bp, Homo sapiens
gactatttattatttttatgtacaggtatcaagtcctctagttactttgaaatatatataatattcttactagtacagtcaccctattctgctatcaaccattggaatttatctattctacctaactatacatttgtacccataaccaacctctattcatggtccctttcccccaccctcccaac

SEQ ID NO: 399027 - DNA, 555 bp, Homo sapiens
ccacccaatacactgaaacatctttatcccatccctgttccccagccatttggttctccacccccaaggcaaacagtattttcaatttcttatatatctttcaagatattttatgcatatataagtaaataagaccattctcctctttgcctgcttccttttttcatgtaatatatcttggagcttattccatgtctcaatatataaagagctttcttgtttttatggatacatagtcatcctgctgtttagacgtgccacaatttatttaagcagtcgcctattgatcaacatttgggttgtttctaatcctgtgctgttaatagtgatactgcaatgaataaccttgtgtatatatagaaatcactttgcatatgtgttattctcatcttgaataaattcctagaagtaggattgctagtcaaagagtatgtgcatttgtaattttgataagcattactagattgtcatggagagtaccactttgaactcccagaagtaatacatgaaaatggctgtttctctataccctcaacctttatcaattctacagtg

SEQ ID NO: 399028 - DNA, 468 bp, Homo sapiens
taaaagtttaaccacagttaagaccacgctgctagcaatgcaatatgagacagtgtctttccagaggagtaatcccttaaaaaccaaccaatcaaatgcagagatatgccccatccagctttgctaaatagaagcaaatagctcactttattgtacaaagactcaagaggaagacttagaagcccaccccctcccccattaaagagaaagtacagaaacaaattagaatcgaaaaaatcatggcctgattactaaatcaaaacgttaaatgtgacagttgtttttagaagcatcttacatttatacattttgatgacttttgtattaatgttagaaaattgaaagaaggcttcactggatgtcagtcgttacagaaattgaaatatccaaaagtatatgtataaccaattgagtaatttccgctttccttacacacttgaaataaattttcttttgcttttacaaata

SEQ ID NO: 399029 - DNA, 547 bp, Homo sapiens
gcccagcctcagtcctgaaatgcttatgaatatatgaaaagcaagtgtatcaatggaagatatatacgtaatgtttacaatgaaatagcactatcatattcaatttttatcgtacccatttgaaactttcaaatggattttatacagacatttagattgcttccccaaatatcaaattttaaaaaactcttaaattcagtccacagatttacacaaaatgtatcatcctttcaaatctcaagagagttatgactaaactgggccctacaaattagtttatatgaatccagataacagtaacaaataaatcttcaccccaaaaaaataaactatatttaagaagtatttgattatcttttacattagagagtcctcagtagacaggcaaatcaaagaatcactgcaggcctgtgataacattcgtttaaatttgctaaattatccatgctgttcccctcctttagccaaaaaaaaaactgaagtttttttagtttgctaattattctatacaacagagattcacctactttaaaggatcttcatacaa

SEQ ID NO: 399030 - DNA, 159 bp, Homo sapiens
tttttttctatttatagagttacaggaagttgtcttagctgctgatttgctggaaggtgacatgatagctgggaagaacttggaagactttctaagaaatgttgggattaagtcacctaaagaagaggtagagaaaattcttcaatcagattttgtttc

SEQ ID NO: 399031 - DNA, 272 bp, Homo sapiens
aaaagtttcattgtccatcctactgcctcagtagagattttatctaaactcaattagataaaaacaaataccacaggaaccctaggaaagcaagtcgcgccttcttgtgatgaaacggtccaatgctcagcatccttttcctttaggcagaagatatttctatgtggcctgttcatactaatatgagaagtcttatccttatgtccttaactttaaaaggtcagaaaatagattgtaaaatctatagaataaaactatgtttctgttgaata

SEQ ID NO: 399032 - DNA, 377 bp, Homo sapiens
tctggtggctgaggcaggagaatcacttgaatccaggaggcacaggttgcactgggccgagatcgtgccactgcactccagacagagtgggtgacagagcgagactccgtctaaaaccaaaccaaaccaaaccaaaaacaaaaacacttccatccccgaatgctctgctcagggagactgatttgagtaataattaagctccaatctcccgcacagctggctctgtgtgaattgctctttcccctgtcttgataaatggggtctgtctaggcagcgggcaaggtgagccctttaggtggttacaccttcacgtgggaacatggaattgagcagaaactgattccatgcctcccccaccctcaccccctgactctctt

SEQ ID NO: 399033 - DNA, 532 bp, Homo sapiens
gcaaaatgaatcccctagcctttgtcctcacctaccctaaggcaggtgtgtatgcttgaattccttccgtatggctgtgagcaacttgggttggagacatatctaaatcctttttacttccactccctatatatagtagatgctcagtgtatatttgtggcattgaatggaggaccagaaggtagggtgcaggtgactcaacagctgtacatgattaggaggagcctatgtggggtggatttcagcaccttggacaggagcagatgtgtggtggggttggactctcttctggagacccagacaattcagtctccagatttctggcagtggctgtcttttgagggccccagccacaaaggccacatgcctctgataggagctgcctacatcaggctttgtctgacttgcacgctcagcttcccaccctaacccacttcccttgttgcacatagcttatgttttagggactttcctggaagcaaaggcagtcacatctggcataatcataataaagaaaacaactatcatttgg

SEQ ID NO: 399034 - DNA, 381 bp, Homo sapiens
tcttagtctagagatggagtgggcttcccagagtccaggaacgaaaagggattaatgctgggctctcgcaaaaacaaaaaacaaacaaacaaactaaacaaaaccaggaactgggctttgtactttacaaagtactagggcatctattatgccaccagtagggttccagcctctttacaaccgccaggtttccattttatagccccagaaactgaggccagagggggtaaatgccttgctaagaatcaataactgttaagaaggtccaggggtggtggttcatgcctgtaatcccaacattttgggaggccgaggtgggagagtcacttgaccccagagttccatctagcctgggtgacagaggcagagacctgtctcaaa

SEQ ID NO: 399035 - DNA, 126 bp, Homo sapiens
caggctggtcttgaactcctgccctcaagtaacccacctgcctcagcctcccagagtgttgggattacagacatgatccaccgtgctgggccagtttctccactttatgatgactttttttttttt

SEQ ID NO: 399036 - DNA, 536 bp, Homo sapiens
gcacaatgtctactataaagtagatgcccctattacttccctctttacatttcttcataatccttataacgacctcatgttgtaaggattattaactctagtttacagatgaagaagctgaatcacaggaaggttaaggagtaagcctacagtcacatacctggtaactgtcagtacccagatctgctgtgccctaaaacttgacatggacatgttacctcactggatattttactctgtcatattatgaagttcagaactttgtttgaattatgcccattatgctttaaattttaatacaagaacaattattttcaaaaaccagaatcacccataatttccactcataattttagaggacaaagacctgtaaatagcctacctatctagaaattcagtaacagaggacacactccagatctcaaaatgaactagccaaattactcattacaagctctcatttacacagagaatgatttctaaatgcatatcaataagaatgagtggggagcaaatgaaccaaacataccacagaa

SEQ ID NO: 399037 - DNA, 408 bp, Homo sapiens
tgtatttaaaatactataaggttattattgcttatatatctaaaaatgctccaactgtccaaacaaagcttatgctgttgatgatatttatcagtggctctgaacacttgcatatcataaaattctccctcaaaatttaaccttaaactctttcaggcttgtcttggtcacagtgggaactgaggacagctgctcatgtttttttatagaacagctcttaacatgcttttgctcttgcctcccactgcccaacaccagctgcatacacacagtctacttgctgtgtgcatgctctggctcctgtctccttttccttcagcctagttagcctggttttgtttggtttcatcatacaatgtatctattagtaaaacttttatgaactctgattatagtactaaactcata

SEQ ID NO: 399038 - DNA, 478 bp, Homo sapiens
ggccaggggcccacagtgtccacaggcatggctcgcggggaaacgcagtgcagcgcacacagaggtctgggtgcaggtagaagccatttgctgcccagccgggtcccagccagccagcccagtcacctgagccaccctggggccatgctcagatggtctctgggtccacctgtgcctgccttgctgcttccaggcaccttggccgagggcagtgccctaccacccctacacacacattagccgtgtgtgcacacatgtgcccacatgcacatgcacacatatgggatgggaaaacagaaagcagctctttgcccccacaggaagggggtcactgcttggcctggtcttgtcagctgcagcccctgggcctctggggggccatgtcctctggccatctacctagggccacccctcagtaaagaaccccgggcagggatcctgtttgtgaaaatgcctgaatacaaggtcatctcagcca

SEQ ID NO: 399039 - DNA, 437 bp, Homo sapiens
agcatttagaaaatctgcatacttcagtggaccaatgttttttaaatgaccagtgtctgacattgcaaaataatttgtgggtaatagtttcattcaaaatatatacaacaaaagatttgaatgtaacagtatacataaagtatatgtttacataaagtatacataaagtatatgttgataaggtttcagatttcacaatgcaactagcccttcagaaactaccactcattgagttttgatgtggtatcaaagaagaataattatttgaaaaggtcattataatactccccttttccaactacataaatgtgtgagtccatactttcttcaaatatgtcaaccaaaataatactttgcagcagattaaatgcagaaacagatatgagaatccagctgtcttctctcaaaccagacattaaagagatttttaaaatgcc

SEQ ID NO: 399040 - DNA, 195 bp, Homo sapiens
tttgcagatgtgctgcctatctttttggaaggagcagagaaaccaaaggaatatttcatttaaagtcagacaacagtcacatctctgaaaaacatttgttttacttgagaagaaaaaacattaagtgctgggacaacaggatttataatactatcacaggatttttggagtattagccattgcaacacccactaa

SEQ ID NO: 399041 - DNA, 208 bp, Homo sapiens
ccagatggggaggactgctctgctcttccaatggtcagcctggtaggatggctccctgtgaggaagggggtacgactggggttgccagcgccccctgaggctggatggatttaactcagagtcagggttagggagccctgccctccaggccagttctcacaagctcgagaggttttcctgcccatcggtttgactcctggggctgcag

SEQ ID NO: 399042 - DNA, 554 bp, Homo sapiens
agtgtactgcacgtcctttgtgtcacctctcctaatcctcctagtacggtgtcgtgaatgtgtcccatttacctgtgttcatccttcatgacctctggtacctggttgatgcttgtatgatttaataattttttgggttgcagaataaaaaaacttggctcaagctgtctgtgacaaagactgtgtgatttatcaaggtctgtctcatttttcttttggtagacacataggacagatgcatttcctagtctcctttatgggtagcttgggactgtgtgactagtttgggccagtgggttgaaagtagaggtaatgagtgttatgctagactgaggcataggagagtggggatgagttttctgggttcttgctcccctgccatggtgattctggaagctttgtgttccatgatgcatagctagaaaatgatactgacctggatccctgagtcactgcttggaggagagtttctctggtgggtggctggatccactatagactttctaagagccagaattgcatgggatctattcaacttgtttttacccctgagt

SEQ ID NO: 399043 - DNA, 339 bp, Homo sapiens
aaccaaaatccacaacatacaatatatgcttacaccaaacactgtcacagaagccaaaaatactatcccagtacaatgaaatgaaaggctcacaagaggataggattcacagagaataatcagcagttaggattacttaggattttacaaaataattaaaatgaagtaatccatacagttgatgttgaactgtacatctaaaaactgaaaccttaatttttttttggtcatgaatctccattctcggtcagtactttaaacaaaatttcactcgtaagttattaacggggccttttctaaaatggatgtggctggcaaatggcatacaagtagctaagg

SEQ ID NO: 399044 - DNA, 229 bp, Homo sapiens
ccataagccctaaagagaaaacaagaaagaagtaccttttgttgaaagaatcagcaactacataccaatcatcaaaaggcaggtgaaggcatgtgtagtatattcaggtggtagtcttgtttctaaactgcttgtagtctgtaagctgtggctgtttgcgaagcaaatgctttccagatggaaaacttgactaagcagaaaacaagaacttatgccacacacagttagc

SEQ ID NO: 399045 - DNA, 410 bp, Homo sapiens
gaaggaaggcaggccagccattcaaattgattcgaacatcagattctttgaacttgcacatgtgatgtggtttgactcccttataaatacatcgaatttggtggcttaaagctttagagtggatcatgaagaatctcacaggggtcaaatgagactctggccccaaattatggatctgtacttggggtacattttctttcctggcccctacaaaggtgagcagaagacacatttcctttggtgtcagaagtggcttcatctttgtggtcctgcagggtaaagtgtgacacaagagaagacttaggtccagaagatgctatacataaagtggggaaagcaccttgcccctaaatgaaggcccctgagacatgcactcttttctgcccttcacatgatgaagtctcactttg

SEQ ID NO: 399046 - DNA, 776 bp, Homo sapiens
ttgtccaagctctcccagtgagctgatgccagagccaggactagaactcaggtctcccaattctcagcacagtgtgattttccttgcagaatgttgatgctcaaagaacaggaaccccagaaccccagggaggtaaggaagaagagcacagccaggatcagaagagtgaagaaacaatgatgtcccacaggtcacagggagtaagtagctgctctaggggtgaacccaagagtggtgattcactgtccaaactactggctggaggagagctcgtggtggtcatgtacgtgtgtgcatgtgtgtgtgtctatatttgagtggggcaagggaggggattggggaccgggggagaccagccttctaaacacatgatacaaatactatggctatgacacaacaggtgtttgtcaacctgttccagctcttcccaactatggcagtggctatggcctaacagctggaggcaggaacagggcagtgacaagaatcagcaactgcataggggcctcatcaatttccagtcctccatccagaagaggacaggacatgctcaagctgccccaaagagaaaggacaaaggagaggaattctgagatgcaagtccctatggaagaggggacagagttaaattccagcagtccaacagactatggctagagccatagtcttctcttacctgtatctttaacgttcagcttactattggttccttattatctcctgttagtgaggttcctttcaaaaacaataaaacaaaacaatattttcccgctcaa

SEQ ID NO: 399047 - DNA, 716 bp, Homo sapiens
gaaaaaggggcacagtgatgacagtacactttgatacaaccattctcccaagagacgcgatgacgagtatgtgcgtgactctggagggaaagggtctacatctgtctctgcttgtgcctcggatgggttttacagtagacgtaccactgaccccgcctcttcaccagaatgttgatgctcaaagaacaggaaccccagaaccccagggaggtaaggaagaagagcacagccaggatcagaagagtgaagaaacaatgatgtcccacaggtcacagggagtaagtagctgctctaggggtgaacccaagagtggtgattcactgtccaaactactggctggaggagagctcgtggtggtcatctcttcccaactatggcagtggctatggcctaacagctggaggcaggaacagggcagtgacaagaatcagcaactgcataggggcctcatcaatttccagtcctccatccagaagaggacaggacatgctcaagctgccccaaagagaaaggacaaaggagaggaattctgagatgcaagtccctatggaagaggggacagagttaaattccagcagtccaacagactatggctagagccatagtcttctcttacctgtatctttaacgttcagcttactattggttccttattatctcctgttagtgaggttcctttcaaaaacaataaaacaaaacaatattttcccgctcaa

SEQ ID NO: 399048 - DNA, 737 bp, Homo sapiens
gaaaaaggggcacagtgatgacagtacactttgatacaaccattctcccaagagacgcgatgacgagtatgtgcgtgactctggagggaaagggtctacatctgtctctgcttgtgcctcggatgggttttacagtagacgtaccactgaccccgcctcttcaccagaatgttgatgctcaaagaacaggaaccccagaaccccagggaggtaaggaagaagagcacagccaggatcagaagagtgaagaaacaatgatgtcccacaggtcacagggagtaagtagctgctctaggggtgaacccaagagtggtgattcactgtccaaactactggctggaggagagctcgtggtggtcatgtgtttgtcaacctgttccagctcttcccaactatggcagtggctatggcctaacagctggaggcaggaacagggcagtgacaagaatcagcaactgcataggggcctcatcaatttccagtcctccatccagaagaggacaggacatgctcaagctgccccaaagagaaaggacaaaggagaggaattctgagatgcaagtccctatggaagaggggacagagttaaattccagcagtccaacagactatggctagagccatagtcttctcttacctgtatctttaacgttcagcttactattggttccttattatctcctgttagtgaggttcctttcaaaaacaataaaacaaaacaatattttcccgctcaa

SEQ ID NO: 399049 - DNA, 324 bp, Homo sapiens
aagactcaggattgattccctggagagggtaggtagttctttgtctagttaaggatgggatgccataacaaacatgccaattcagtgaaagtacctactttcaagactcctgcttaactcccctaaatcagcagccaatgttagaagccaagtgttaaagtttttcagataattttgctataagcctatggagaaatttcattaccatctcatagcaaggcctatagtataagagcaggcctatagtagcatatgggggaaagtctaaaagactttgaaatggaccaaaagattattgagaaatggaaaactgcattgttttaa

SEQ ID NO: 399050 - DNA, 467 bp, Homo sapiens
agaccaggctggccaacatggtgaaatcctgtctctattaaaaatacaaaacttagccaggtgtggtagcaggtgcctgtagtcccagctactcaggaggctgaggcttgaaaatcgcttgaacctgggcagcaaaggttgcaatgagctgagatcatgccactgcactccagcctgggtgtcagagcaagattgtatctcaaacaaaacaaaacaaaacaaagagttaaagacataaaagactcaaaatgggaacaactcaaatacgcatccataggtgactggataagcaaattgtggcacattccatccatactgtaggatattgttctgcaataaagaatggactgctgggaagaaaaaaaagaaacagaattaaactaaattcccctagagttaaatatagaaaagcaaattattttgctttatttttaaatttttaattaattcaaagtgatttgctgtta

SEQ ID NO: 399051 - DNA, 184 bp, Homo sapiens
ccgttttagttaaaggtttccagtcacctcatataggccattgtaaatagaattgtattggtttttctgtcctctggtctttctcccttatggtcttctcttctgccattccagcccccctgataatagcaatgttgaactatttgtagttccctaaacttgctgtgctcttgaatgcctttgt

SEQ ID NO: 399052 - DNA, 531 bp, Homo sapiens
caatgagccatagcagggaatggaccgaactgtacatacaagatgaggaggggcctcgaacaacagggaagccccgtggagcacgcaggggagcctggacgcggggaatcgcctccgtttctcaccctgacagcagggagggcttcccggagctgacagtgaggcagacatcccggatcccagttatcacaggtgcagccacgcaacttttgggttaccttcccgccacgaaatggaaatgatttcctgagggccggaaagatcatttgcatcgggcctcaggtctggggctgggaaagcaggccccggccggaaaggaagactggaggccgccgccccagaggccggaccctcgcgtcccggccgcgtcccctcccggctggggatgcgcttcgggcgcggggctccctcgcgaggctggactgggtggagcccgagagcccctccggggagctggctgccggggaggcgccggggctgcggggccgcggggcgggccgggcctggagctccgcgctagaggcggccgca

SEQ ID NO: 399053 - DNA, 527 bp, Homo sapiens
taccagtgccctcacccacacccccacttccggcctctgttccttcctcacctctggggaaggctgcagggctccctagggaatgtcccctggttcctccactggctctctgcccagtgcttaacccttcttcccacacctacccattcagccagggcagtctcccacaaaactttctctccctggaccatggggcagtgcaaggaggacaggaagctgggtggaaggactgcaaaggagactgcttttcctgctaccctcaggtactgaagcccaagtaagagttttcagtagagagggagtagactgagtgttgggccctaggactgggcttccctgggtactatcccaacccctgagcctcgggagaggtggaaatgaccttcctctgcaccggcatgcccagagaagagagcctggagctgagacttgcaacttctagaaaacaaacacaaaactgaggccaagagagtgctgactactattaccaacaaaattcattaaacacaattttaaaaaatcaaaaa

SEQ ID NO: 399054 - DNA, 463 bp, Homo sapiens
cagaacacagggctggtaaatttgggtgccatggactttgattttgaggcaactgagtaccatgcagacattagaccagcagtttgtcaggaatgctcttggtgattattgccattgcttcttcattcactcaaccactattcaataaatcaaaagtcctatgcatactgctctgttttctcccatctgtcatttaccttccacttctaacatcactactatagtttagacagatccttttcatctcagatgcagattataataaacttctcacagttcccacagcctcatatctcttcctacccacaccttggtttccattgccaccaatttaacctttcctaacctcctcccacaccttttctcagcacaaaacccaaaaatgttgacagcaaactttgccatcgtcaggaagatagataggcaccttccactttccccaatcaaaagccagtaatgctct

SEQ ID NO: 399055 - DNA, 451 bp, Homo sapiens
agcaggaaaagagcgctttagagatcctcccttcagtatttggtagctaaaccctgagatggactggcaattacacctgcatttccacccaccctccagggatctagggcatcccagcctgcacactcctatcattcatccctgccccgccccccacatacacacaccccagtaaatgcagtgaagagtcatacaggatagggtcacacccagcaaacataaacattgtgatatgcaggtcatgtttgatgactgaacatttcctcctgtactacaattccctattgtttttaaaaggtgaatcactttattgacagcagcttgaaacttagagtagcaagactcttaatttgggggctggtggtaaggatatctatggtgggatgtacagaaaggataggagaagataaaccttttattaaatacttgagaattagttgaatgttaaaat

SEQ ID NO: 399056 - DNA, 796 bp, Homo sapiens
cccaggaggcggagcttgcagtgcgtggagatcacgccactgcactccagcctgggtgacagagcgagactatgtctcaaaaaaaaaaggcaaggcagaaggagaggctgggtttctgggctacttagggggtgggagatcaagagggcgtttgttttgcctggattactgggagtagcgctgtgcagggggagggcaaaaattgcgagtaaccctgattcccagattggctggcgaagtggtcaggctgctgttgagatagaggagagcaggctgttggggaggcacagctcccagctggaggcacctgccataccttagggggctcagcaggatgtcggggatcagcagggcatcaggcatagtctaaatgactttgagttgcaagagctatccctgtctacagccagagtcagcaaactaggccacggagcaaaatcaaagatattttatagggacttacgtgatgagaaaaaaacatattttcacaactttttagtgacaaaatttaaaatataaaaacagtggccgggtgcagtggctcacgcctgtaatcccagcactttgggaggccaaggtgggcggatcacgaggtcaggagatcgagaccattccggctaacacggtgaaaccccgtctccactaaaaatacaaaaaattagccgggcgtggtagtgggcgcctgtagtcccagctactcaggaggctgagacaggagaatggtgtaaacctggtcagcagaggttgcagtgagccgagatcgtgccactgcactccagcctgggcaacagagtga

SEQ ID NO: 399057 - DNA, 363 bp, Homo sapiens
catggtgactcggcacgaggaggaggtgggctactacagggacatgagctgcctaactgccatcctcctcctgtatctgccagaggaagacaacttctgggcactggatcagcggatggctgaggagaggcactccctgcagggcaaatctggagattttctcaagcctctttatgaaaatggagagacctcacaagagatgctaatggacagctgaccctgctcactgctccatcacaggtgcgtagtatacaaacctctactaacttcttgggcttctgaataaaggaaaggactacctaatgacagtaatagcttgactgctgaagaattatgtcaattaataaaaattgcttcatagga

SEQ ID NO: 399058 - DNA, 330 bp, Homo sapiens
gttgtttgttttgatttactatctcaatagagtaagcagttggagtgatttctcccttattcagattatacagctctgttcttgactgattccaccataaagcctcattctatgggcacagcacaaaaccagagtcacaatctaaatctggcctttccaggacacacaatagaacacgatcggggtgacccaagctgtaagaagttagagtcctcaccagcagtgggtcaattcactaggctgctgggggaaatacttgctacagggagggacaactagagataattacaataaactcaatccatgccgcaagaacctgaatacttccca

SEQ ID NO: 399059 - DNA, 493 bp, Homo sapiens
tggtagttatcagtggtcatctcctttgtgggatacccttggcttcctcccctagccctcctcctccttcctctggcagccttgagagcatcaggtggatgcatgagccggagcccgcatgtgtaagaacaggccttgctgctcctactgtaagtggactgagtgacaaggaggctttttcaaggtttcctcttgactgaaacattctcagattctaagatggcaatgatggtgtcattccaaagccaagcagctactgtttgatatcactggtccttctttaagtcaggccactgctaccacagcacctccattttaacccaaatgaatatgatattacaaccttactctgtagctctcactgatttgctgtcttaccacgggggcaaatctctgcacttgtagctttccccaaaatgcagggcgttcttctgcccaccataaaagatactataagaaactgtacgtctttggccacttaacagtacaaggc

SEQ ID NO: 399060 - DNA, 454 bp, Homo sapiens
tcccaaacaccagccccactcccgcccggactggcaacagcagacgccaaaggataaagggggtatatttaataaagtgagtagatttcctagagtagggcacagcactgtcacctgctgcaagagacaagcctcccagtcgcccagccctgagtcacttcccctcccagcactcttgaggctcaatgcctgcggggggcaaaagacctggggcctccggagcacgccttccgaagcccacactcccctgcaaagacgcgcgcggggcctccctccagggcgcgtccccgcggctgccaaccagctctttgcgcccaagcccgcgccgccgctaccttggctaatggcagcactgaatgaaaggaaccgatgcaggctccggatttatgaatgtgcaggggaggaggggagggatatcatgtgacaataaaggagcgcgtcttattcacaaaaa

SEQ ID NO: 399061 - DNA, 418 bp, Homo sapiens
attataagtaatctagagatgatctaaaggataatcatgtactacataatcacattttggtcaacaatggactgcatatatgacagtggtcccataagattataatggagctaaaaaattactgtcatctaatgaggtcatagccactgtaatggctaaatttcatatttttagtacagacagcatttcgccatattgcccaggataattttaaactcctgggttacagcacaatgcattactcacacatttgtggtgacactactgtaaacaaatctactgttctacagtcttataaaaaagtctagcacacacaattatgtatagtacataatactggataatgataagtaacttactggtttatatatttactatactttttttatcattattttagaagttactccttctactt

SEQ ID NO: 399062 - DNA, 458 bp, Homo sapiens
ggcggagctcacacagtaatgctctgacatggggtggagctcacacagtaatctctggcagggggtggagctcacagtaatgctctgacagggggcggagctcacacagtaatactctgacggggcggagctcacacagtaatgctctggcagggggcggagctcacacagtaatgctctggcagggggcggagctcacacagtaatgctctggcagggggcggagctcacacagtaatgctctggcagggggcggagctcacacagtaatgctctggcagggggtggagctcacacagtaatgctctggcagggggccgagctcacacagtaatgctcactggccggctgctcacctcctactgtgtggcctggttcctaacaggccatggactggtaacgatctgtggcctggggactggggaccctgatttaaagaatcgaggacacactcacct

SEQ ID NO: 399063 - DNA, 206 bp, Homo sapiens
ctacaacagtatctaccaataatcacatacatgaccaaatagctttcacttctagctgccgttaagaagaaagaaaaggatgaaaagaaaaaaaatcctataaaccccagttcttgaaagcattagtctgtgctatgtgccttaggtacagattaaggaaacacaatttgttgatttattgataattgtgacagcaatcttccctc

SEQ ID NO: 399064 - DNA, 531 bp, Homo sapiens
cttgtccaggaatcatactttgagagtcagccattgctttagacatagagaaatgtgtgaatatatgaagtaggaagcatatatataagattgctcataacagtattattcatattaaccccaagatagaaaaaaagttcaagtatcctcagtagtgcagtagatatcattgtgtgtttacttatggaacaaaaaactagttcaaatagctaaggaaaaaaaccacactacaaacagctcctgcctgcatcaatatgtatgaatctcacaaatacattagtcataccttagaaccaagtcacaaaagattaagtgcaacatgattctattcgtaaacagtttaaaaacaaatgcagttaactgtattgtttaggaatacaaatataggtactagaattataagtagagatactagaattataagaaaaatcaagggaataatgatgataaaagtgagtgatagtgactacctcagggaggagagaaagtggatgtgattaaggacaaatgggagacttttaagataattgg

SEQ ID NO: 399065 - DNA, 252 bp, Homo sapiens
tatagctgaaaaaaagaagaaaaatttccctactatcaaatcttctcttcaacctgagcccaatgttcatctccctcactgttcctatcaccttccacttacctgtcttcttcatatgcgctgaggtccttgaaaccagaaagagtggagcttaatttaaattcatctcaatatcttcagctttaatctcactccccagcccaaatgagatgctcagtaaggtctgatgggtgattgaatggatggatattg

SEQ ID NO: 399066 - DNA, 1230 bp, Homo sapiens
  misc_feature (687)..(687): n is a, c, g, or t
cgtggtggctcatgcctgtaatcccagcactttgggaggccgaggtgggcagatcacctgaggtcaggagtttgagaccagcctggccaacatgatgaaaccccacctctactaaaaatacaaagttagccgggcgtggtggattgtgcctgtaattctagctatttgggaggcagaggcatgaggatcacttgagcccagaagttcgaaacaagcctcggcaacacagtgagatcctcttctctacaaaaaaaattaaaaaaaaattagctgggcgtggtggtgcatatgtttggtgtcagctacttggaaggctgaagtgagaggatcacttgagcctgggaggtcaaggctgccatgactgcgctgctgcactccagcctgggtgatagagcaagaccctgtctcccaaaaaggaaaagaaaacaaaaagaccaccaaaggggaaagatctaagttaccctaatcctaccacccaaagtagctttgctaacgttttggtttctatcgtatatgcaaatgtatcttcaagatatttaaaaaacaaatatttaggccgggcgcggtggcacatgcctgtaatcccagcactttgggaggccgaggcgggtggatcacttgaggtcaagagtttgagaccagtctggccaacatggtgaaaccccatctctgctaaaaaaaaaaaangttaccaatcaatgggccgcgttttaacacgtctggaccgtaaaacccttgcgttcccaatttaaagcctttgagcaaatccccctttggccaactggccgaatacgcaggggccccgaccggaggcttttccaaaggtgggcacctcgaaggcaagtggaattgtaggcttaaatttgtaaaaaatcgggtaatatgtgtaaacaggttattttaaccagggcgggattgggcaaaccctcttaataaaaaatctccccctcatgagtctctagggttcacattgaaaggccccctttaaggaggggtctcaccgcagggggcaaacccgtttttaagcgggcgcctctggacaatctcccacataaatttttggcggggggccctatctttatgtgcctcaaggggccccctttaaactttcggcgaacccctccgctgcagtaggtacatagagggctcttctgtcgtcctcacgcgggccgtcgttctacacacgctcttcctcccattcatgggctccctaccccgtctgtcttgtcc

SEQ ID NO: 399067 - DNA, 1410 bp, Homo sapiens
  misc_feature (867)..(867): n is a, c, g, or t
cgtggtggctcatgcctgtaatcccagcactttgggaggccgaggtgggcagatcacctgaggtcaggagtttgagaccagcctggccaacatgatgaaaccccacctctactaaaaatacaaagttagccgggcgtggtggattgtgcctgtaattctagctactcaagaggctgagacaggagaatcgtttgaacccaggaggcggaagttgcagtgagccgaaattgtgccattgcgctccagtctggacaacaagcctgggcaacaaaagcaaacccccccccccccgcaaaaaaaaagaaaagggttaggcatggtggctggccccaggctcccagcactttgggaggcagaggcatgaggatcacttgagcccagaagttcgaaacaagcctcggcaacacagtgagatcctcttctctacaaaaaaaattaaaaaaaaattagctgggcgtggtggtgcatatgtttggtgtcagctacttggaaggctgaagtgagaggatcacttgagcctgggaggtcaaggctgccatgactgcgctgctgcactccagcctgggtgatagagcaagaccctgtctcccaaaaaggaaaagaaaacaaaaagaccaccaaaggggaaagatctaagttaccctaatcctaccacccaaagtagctttgctaacgttttggtttctatcgtatatgcaaatgtatcttcaagatatttaaaaaacaaatatttaggccgggcgcggtggcacatgcctgtaatcccagcactttgggaggccgaggcgggtggatcacttgaggtcaagagtttgagaccagtctggccaacatggtgaaaccccatctctgctaaaaaaaaaaaangttaccaatcaatgggccgcgttttaacacgtctggaccgtaaaacccttgcgttcccaatttaaagcctttgagcaaatccccctttggccaactggccgaatacgcaggggccccgaccggaggcttttccaaaggtgggcacctcgaaggcaagtggaattgtaggcttaaatttgtaaaaaatcgggtaatatgtgtaaacaggttattttaaccagggcgggattgggcaaaccctcttaataaaaaatctccccctcatgagtctctagggttcacattgaaaggccccctttaaggaggggtctcaccgcagggggcaaacccgtttttaagcgggcgcctctggacaatctcccacataaatttttggcggggggccctatctttatgtgcctcaaggggccccctttaaactttcggcgaacccctccgctgcagtaggtacatagagggctcttctgtcgtcctcacgcgggccgtcgttctacacacgctcttcctcccattcatgggctccctaccccgtctgtcttgtcc

SEQ ID NO: 399068 - DNA, 136 bp, Homo sapiens
cagaaacctcatcagcagctgtgagactttctctggctggctgccaaccaaagacttcccacaatggttctaatttcaaactgcctgaccattatccttaaaaactattggagtgtgctaaaaggtctgatatttt

SEQ ID NO: 399069 - DNA, 525 bp, Homo sapiens
tggtgttctagaggatcccttccgggttggtgcatcccccaggtccctgccctagccccgcgggtgactaaacagatacatgttgctgcccactccacacagggctttgctgggcatggctggggcccatggccaaagcacagcatgccaggcagagaagggaggcaggcagctgggcagggtactcagggctgaatacaagagtcaggggcaatggcctttgagccaggcctccagcattggtgtgggaaggagggaggacatttctgaggcagggaagagccagggactcatgagtggcccaggctggccggaggactataggaaggagccatgcctggaggcactgaatgccaggcttaacctatcccggagccaggtgtgtgctcagggcctgcagaatgaagatacaaacgacatggagtccagacctgccatgctcagggagcccttgaaggtgcggaacagggctgagagtggtgagagctggctctaaagtgattgcctggttactgagtacaggat

SEQ ID NO: 399070 - DNA, 469 bp, Homo sapiens
atggcaggaaacaaggatcatgtagcatggctatcctattacacatatacgataaatcctcatataaaccatgaggtttagatacaatcactcttatttctcttattttgcggttgaaggagccaaggtcttacagttaaaggtgagggagcagaaattgacaatttttgtcttatatacaggtggcatagtcaaattatacacatatacacaaatttgcatatgtatacatgtagatatatatgtatttgatcaatttcattaatttcaatgatctatatatatgcattactttgggaacttacaaaattgctttgaaaaattataaaattcaatgtgctaaaagaggaataataaataacactgggagagttggaggaggataaaggaaatgaatcatttgaatatataaaatatctggaaatggcatgggtatcctgtatgttagcacattaaacagacctataaa

SEQ ID NO: 399071 - DNA, 385 bp, Homo sapiens
ggtaactccctgaggcttcaggcatgttgcagggagtggccttgcggtaccctctgtatctctctcccctttccctttcccccctgggctggcagaggcagatgaacagcggtttgggttttgcaatgggagtgcacctgggacacgaggatggtatgacttgagccttccctgtgggcgctcctgaggcagaggacccacgccgtgcctggtcgcctcaactccccctattctcttctacccctggttcttcttatgggggtgtggactgggcagggaggctgtggaggagatagggttacagaaatcccaggaagtggaaagttctctgagactcttctcctgagtggagggcagacaccgggaccccaggacggcagagcca

SEQ ID NO: 399072 - DNA, 507 bp, Homo sapiens
tcttttgtatcaaatgcttcaatttaacatactcccacttagagatctcatgaataatctttgttaccagtagatggtagaagatagttattagaatacttttggtgaaagaatctcagagttaacttgttttgaggcattaaaaaatttaagggtcatcagtgaattgatgcatacctgtgaggcttatagggtagagctgggaggtgatgcaaattgacagggcatatatcccaagatcaggtacagaataattgagttgatatgatgttagaccacacttggctcaatatttagaagtaagggaggaatttacatagtgcagtggagaagtatgaaattctttttacaggcttaataattttttttttctatgctattagctgtcatacctggggcttattaagagtcatgctattatacagagttaggtttgggagtagagaacttgaccaagagctgcaaagttatggctgggctttgggtaggaagaaaaaaaaggaagga

SEQ ID NO: 399073 - DNA, 256 bp, Homo sapiens
tgttcccattgaaattatttaaagcaaaaagtagaaaaaattgtgattaatttcatcaaggtacttattcctattagtttagtctatcacaagataaccagaagtcaaaactagttaatatgttttaaattttgcaaaggatcatagaaagtgtcatattttccctaaaaatttctgtatgatacattttaaaaaatacaactgattggtttttgaaactgaatgatacttatgtagcatgttataaagtatattt

SEQ ID NO: 399074 - DNA, 423 bp, Homo sapiens
tggtgaggggactctgttagctaaactgaggaaccacaggcagggtggccttgaatttcaggctgaaggacccatcacccaagagtcttggcagcttcctcagcaaagatgaatgggcttgttaggtggtttttgttacctgatcagtaattgtttcaacactagagtttgtcgttactgttgtcctgttatgaagaattctctttaacaaaactcatgggaaaagggactgactcatgtgcagtttggcctgaagcatttgcgtcagtattctgctcctggaagagtatactttgacttatgcattgcttgcttaatagaccacaaaagtcaacatccctctggaagaacagctcgtgcttggaggcgtcacaagctccaaaagatcctgttaaggcaggatgtagtgtgaaacccacaagc

SEQ ID NO: 399075 - DNA, 464 bp, Homo sapiens
agacgaccttgctttgtgaataatcatcactctgtcactgactttacctctcttatattaaaaaaatgaatttattgtgtttccggctgggttctaaatacaacaaatcacatgtaaaaatacactgccttcaagagagacttcaagagaagttcaaatctaactaaacttcagaatatttcgaaatatgagaaagtggccatggaaacacaaactcacacagcttatacaacattcccggagcaatcctgggtgatgctattcccaaaacatgaaatcacagacctgggagagacgaccacggccataccgcatcccagccccgacaggcacagaggtacaccctgaggagacccaggctccccgcggtctgagagcaggaaccctttgctttattctgatggtcatgagcaggcccttggctcaactccctaagtcgtctcacgggtaacctctaggtcagc

SEQ ID NO: 399076 - DNA, 201 bp, Homo sapiens
gtccgtcgtacatctctggttggtgagtgagtctatgaagacagaagtaccagttctcagcatgggccatggactcatcttgtccacctcatgatatgatctgagggtgtcataatcagctataaaggtaattgcatactcaaagatgagacggaccattctcagttgatgaccacattaagcatagtcatggccatctgt

SEQ ID NO: 399077 - DNA, 303 bp, Homo sapiens
agctaattttttgtatttttttttttagtagagacaagttttcaccgtgttagccagaatggtctcaatctcctgaccttgtgatccgcccgcctcagcctccgaaaatgctgggattacaggcgtgagccaccgcctccagccacaaatactttttagtcgccataagcataatcaagaaatcattttgcaaatggtaagcttttcatgttgtgtattctttcccatgattagagaggtaaaaagtggcctgggatgcataaagatgtcgtagacctctgcaatctgccacattatttcttt

SEQ ID NO: 399078 - DNA, 495 bp, Homo sapiens
ccactgttgagttttgagagttcttcatgcattccagatactggccctctgtcagatatgtggtctgcgaatatttcctccctgttgtagcttgtcattttccttctcttatagagtctttcacagagcataagttgtaatttgatgaggtccaatgtatccatttttccttgatggtaattgtgttttaaaaaataaagcttaaaattttgttttttgttttgtaattttgcactttttttgttttgtaattttgttttgggggctttgttttgtgttttgtgattttgtttttgtttttgttttgctttgtactttcgtataaaaaaatgaataagggactgctgccgccatctcttccttaggattcatcctctcctagcctgactgcaaagtggagtgcaaccctgcagaaaccccttcctctctggtccctgaatattcatgtgggggctgttcctgttttaagtgaaataaaatggagacagaataaga

SEQ ID NO: 399079 - DNA, 563 bp, Homo sapiens
tctttgaatcagtaaaggtatcaggaatggtcaagtcacttatccagtattattcatcaaccatctaatcatttcttgcagaaatagtaattgagaacctactgtgtaccaggcattcttctagacattggggatagagtgattagtaaaagacacaaactgctgtccttgtcacacttgatctcattatgttcacattctagtgaagacagacaatcaagaagaaaaatattaaaaataggtagtgctaagtgccaattagaaaataaagcagggaaaggggacagagatattgggaagcaaaaattgctgttgaaaatgaggtggctagggagggcctcgctgagaaggtgacatttccagaagcccttggggaagggagggaatcagtatgccagtatctgggggaagaacctagcagaagaggaaacagagcaaaggcccgaggtaggagcctgcctgtggtgccctcctggaggaagggaccatgccattctgctggagcacagtcgtgaggggaaactgaagtctttgagcagaacgtagtgatataatttatgttt

SEQ ID NO: 399080 - DNA, 243 bp, Homo sapiens
cagcttcccagtagctgggactacaggcgcccgccaccatgcccagctaattttttgtatttttagtagagacggggtttcaccgtgttagccaggatggtctccatctcctgacctcgtgatccgctcaccttggcctcccaaagtgctggagttacaggtgtgagccaccgcaccaggcccaacaaagcactcttaaacttagtggcttaaaaccattaatctcacaattctgcaatcaag

SEQ ID NO: 399081 - DNA, 643 bp, Homo sapiens
tagggccggccaattgttaggttaaacaaaaagcactgtggcaaaacttgactcacttcactacggctaataattacaaaaggttgtgctggtccatccctcactctacttacctgccaaagtttcaggcaaagtctcaacaattgggatctaacctttaaaatcatttctttaatgttgacactccaaattgtccataatgaccctacattctgctcctactgttaataatcaccaactacttaatagtttattaaaaagttagcaacagacaaatacaaagaacaatgtttccactgtgtaccatacggattacagctcttggacctttgcttgagaacacagctttccaaggcccaaagcacagcccctgtcatcttcatacttcaaatgcagacatgcaagatcaataactcaaggttaacttttcttagatgatagataagatagctaaacttttttaaaagcctaggtaaaaaagagatgttttaaacatacccttggctacagctcaacttttaggtagctgatcctttctccattcctgccttctttccttcaagcttttctacaatatagccttatggttggattttatgttaaaatgtacgaatgtggccgggcgtggtggctcacacctgta

SEQ ID NO: 399082 - DNA, 436 bp, Homo sapiens
ttttggctatgaataacaatgctgtgaacataggtgtacaaattcttatgtggagatgtgtttcagtcctcttgggtagaactgcttgatcacatggtaactattttttaatttattttgtttcttattaaaaaaatttttttttttttttttttttgagacagggactcactctgttgcccaggctggagctatggtgtgattatggctcactgtagcctcaacctcccaggctcaagtaatcctcccacctcagcctcctgagtagctgggaccacaggcacgtgccaccatgcctgattaattttttgtttgtttgttttttgagacagagtctcgctctgtctcccaggctggagtgcagtggcgtgatctccactcactgcaagctctgcctcccgggttcacgccattctcctgcctcagccgtcgacgc

SEQ ID NO: 399083 - DNA, 453 bp, Homo sapiens
gaaggtgaggtaggaagacaatagatgaggtttctgagagccgggttgatatactccaccatggggccaggctttgtagggaagtaatgaaaaccgggaggagctgatgggtccagaaaaaaagacaagaattgaggagctggggacctcaatggagtagaaaagctggtgttgagttaatggagtgagaaagcccaaagggtggaatgttgggatcagaaagcaggaatcctggaagtgaagatgttagccgcagaggggcttggggtgctgagaagattaaaggtgtagccctgggagcatcgctggagtgcaggtggagggtgctggagccggggacatcaaggctgtgtaaagttagggcattgatgggtcatgctcctgagcaaggagattttccacagtgatgcaggacagaatgaagaggaggactaacatcaaaacccttagact

SEQ ID NO: 399084 - DNA, 380 bp, Homo sapiens
gagcgctcaccatgccagattctgtgccaggtgctaaaggtggtaggaagaaaaagcaatgttccttgacaccagacatcagtgcttactaaacttcagtaagtcatggattagaggtgttgaatagtattcactacaaaagtttgaagtccatccgcaagagtaattggaccacaggttctaaattactgaccatttgtggacttcttagatttatattaatttgtatggtatattagcatttctctctctttcatgcaatacatatttgtaggtgtttttttgtttgtttgttttatgagataggttcgcactcctgtcacccaggctggactgcagtgagccaagatcgcaccactactccagcagcctgtctcaaa

SEQ ID NO: 399085 - DNA, 545 bp, Homo sapiens
gcagcgtgcttccgagggcttgggtgtagaggaaggggaacccgtctttcgcctgtgacagccttgcccttgggtctgggagcaatgaggactcggaacgtgagcctcctgctacaggtacaggccctgggggagtgagggcgctggcggacagcagtcttggcacttcacgttagcagattcggagtttctgcagcggctgaacccctgcactgggctggaagggggggacacccggaggcctgttaaccacactctgcctggactacaccatgaacatagatctttgtgcttttgaaatacaaaaaacgagctcacctggatacgaagtgtggttccggaagcagtatctggctgtggatggaggttatgtattccaccaacgatatcttcattattgttattttcctttggtagctgatctttcagagagatctgcagattcctcactttgctaagaagactctctgaaaacaggaagctaaggaactcctcactcccaagttgattacagcctcatggaagtgtggaattcttattaggaa

SEQ ID NO: 399086 - DNA, 218 bp, Homo sapiens
ttcattcgtgtgagggaggtaaagagcaaggtgtttaggagataatatcaagggaataccattttaacttggaggtaaggaaaggcctgaggaagtgatcttgatcttgggctgagacctgaaagataagaatgaactatctgggcacataatcaaggagacagcattccaggcaggaggaatagcatgtgtaggcccttcagtggaaaaaaaaaaaa

SEQ ID NO: 399087 - DNA, 473 bp, Homo sapiens
tcttgttttaaaatgatttaaaaataaatttctaattatggagaaccattggatcttgattaatatctaattaatcttaacctggaaaataacaaggaattggtatcttgccagtgtttagatttgtcattgaggaacatggcgtgtctttcaattactcattcaatggagttttgtaattatccctaaataggcaatctctagatcattcctgtgtgttttgtttgttgtttttattgtaattggcttattttttctttggtaaattttttccctttggtattgatttttagattttttcccttggaaacttccttttcttcagtgtttcccttcctacttgtcagtgtctctcttgaaaggcacaaacatccgtttccatcacttctgttttttttgtttttgtttttgtttttgtttttttgagatcaagtctcactctgtcgtgcaggctgaagtgagacttgatctca

SEQ ID NO: 399088 - DNA, 289 bp, Homo sapiens
caagagtgggagaggggcgtcctgtgacacattagtggggcttgctgtgacacccttaagaaagatagaacattcagtgtgatacaagtagatgagaaattatttgtgtcacatgggtggaggctccatgtgacatatgagtggaggaggtgtcgaacatgacacaaggatggaggaggaggggctccatgggacacctgggagggaggaggagctgaggatgacacatggaaggagaaatggctccatggaacaggaggtggaaggaggtgctgagtatgacacatag

SEQ ID NO: 399089 - DNA, 346 bp, Homo sapiens
tgcatgcctatactcccagctactcaggaagccgaggcaggaggaataacttgaccctgggaggtcgaggctgcagtgagctttgattgcatcattgcattccatcctgggcaacagagcaagaaaaagagttggagatagagataccactttgagaaatttcctcagataaacctggttgcaaagtgccaccctttgctcctcacccttcaataactgagagagcgagcagggagcaggcaggcagaaggaccattcccacaaaccagatgaggaaactgaagcttggggaggggaagtcagtgactgaaccaggagccgccttcagccttaggacagccaggcc

SEQ ID NO: 399090 - DNA, 169 bp, Homo sapiens
tcaagcagtcctcatctctctttgaagacagtggagttgattgtgccattaggaaaggaaatcctatttgaattaatttgcactcacaaaaatagggaatgttgcagagtgtaaaatacatctgatggtcagtggattttcgttcattcacccacttttcatttgggag

SEQ ID NO: 399091 - DNA, 430 bp, Homo sapiens
ttgttctggagctaaaattcacaatgcgagacttgctgctctgtccacccgagttggagttgcatccagtcctgcctcctgtctgccatgatctgttatgtttctttagtatctttcagtctagaccctcctgccccctctcccaatcacactgcctttttagagagaccagatttgtgttcttacaaaatactccatagtctgaattcttctgagcattcttacgtgccatttctttttcttttctttttctctttctctctttttccttccttccttccttgcttccttcctctgtttttctttctttctttcccctctctctcttctattccttccgtctttcttttctttttcttttgagacaggatctcactctattgcccaggctggagtgcagtggtgccatctcaactcactataactctga

SEQ ID NO: 399092 - DNA, 817 bp, Homo sapiens
aggggttgaggatgtgggcaggcaaagtagttctctactggacactccaggagaggaggggcacacgcagaccccagtgccatctctcctaggtctgcctaggcctccctgggagaggtgagtgtcatcagagcaatttaggcagcacttgttagcagctgtttctgagttttctggaaaaatcggttgtttctgggtgcgtgtgtttgctgtgggcaaagcttatatgctgtggacactggcagagtgagaatcagacagagaggggaaggagcagccgcctagcctccagcctgcccagccctcctccactctggcctcctggtactgttatggaaatgagtcagcaacaggctttctggaaaaggattctgcctgttggtcccagtggtcctccccaaccctcccaagtggagcatcttatctaggtctctaggtggtggcaaaagttctcaggagaacaaattccagggagagacacgagtagaaagaggcagagaaaaaggaggagatgcaattcggaaaatttttttcttcctcaatcatatcgcttgtatctctccccaaaagtggcattccaggcaaaggacaaacatgaaataactatgcttcaggggaaaaaagtttagaagatcttgcttcttgttaggagctctggcctgatttttcctgcctaggccccttctcctgcatgctggagaggagagggaccaggatattacatgctcccagatctcatccctcctccacgggctgtgtcacagaggagaaggggttattggcaccaaacttgatactggggctagagtcctggctg

SEQ ID NO: 399093 - DNA, 219 bp, Homo sapiens
tgtaaatcctaacgtgctgagattcaatgaaaataacttctcctatgtggaaaataacaattagaccctctcttgggtaggcaattttggcagttagaataatgtcatgctaaattagacagtgagaaagccatcacacaaaagggctataaaaatagccaaatcattttacatagcttaggttaaactgaagacagccgggtataatggctcatgcca

SEQ ID NO: 399094 - DNA, 387 bp, Homo sapiens
cttatgtgatcgttgtaagagttggtacttcctcaaccttttcagtattttctgggcctccgattttgtaaaataacatagcattaattcatgatggctttgtgaatataagaggattcaagagagttcgtggaagtttagggaaacttcataaacgaaaaactggaagtagctcaagtcagcctcagtaagggcaaaataaattgatatacctattcagcgaaatactgcacagctctgagaaccagtgagtcaattttgtatgccctgttaaagagtcgtgcctaagatatatttttacgttacaaaaatgtaaaactgcaaatagtatgagagcgtttacgtaaagatctttaaagctatatggatatataaacaacaaacgtg

SEQ ID NO: 399095 - DNA, 750 bp, Homo sapiens
gaaaaaataacaacaacagcaagtggtccatgagagtgaagtggaggtattaaaactaggctgggtcttctcttggaagatgacagactgagtcccacagtgcctcactccattcaaagcaattaggagtgtaggattgcagtgacaacggatctccagggctatcatagtgctttacctaaagataacaagagattagcccttagtgacagatgactaatatattctgtggacactgactgagagtttgggagtttctactgtccctctcaaggagcttagagaatatgtacacgggaagacaaaaattaaagaaataaatgtaatgcactgtataatgcataatgataaatgcatcttcaaggtacctaagtaatttagaagatattgcagtgggagaagagtactgagatattcaccaaattcctaccagaaaaaataacacttgagttggctgatgaaggttgactaggagttcattagacatagtagagaaagtcattttagaaaaaatgataataaccagctttgattgagagctcaattttgcttgtcctttttggaagtgtactgtatgtatgtattagtccattttcacattgctataaaaaactgtccaagactgggtaatttataaaggaaagaggtttaattgacccacagttctacatggctgggaaggcctcaggaaacttacaatcatggtggaaggggaaacaaacacatccttcttcacatggcagcaggaga

SEQ ID NO: 399096 - DNA, 401 bp, Homo sapiens
ccacttaggctcactataaatatctttctgaagccttccttgaatatactactctggcctcctacctttgctcaagctgttttcttttttctgtttcaccttcagctttatcttactcatgctaggtcagacttatcactgacttcactgcatttttgttggctgatttccagttagtcaaaataaaagaaagtggatagttttggcctttgaagcaaaaagagacacagggacctctctttccagcttccaactccggatatagcagttgatggtcgacatctcacagtaattattaggcactataattttgctaaatttacttaagctaaactaaagaccaccaagagcaccttctacggactgatgttatgtccctctctaaaagccatatatgttga

SEQ ID NO: 399097 - DNA, 347 bp, Homo sapiens
ttaaaatggtctattttggttactttttggaccattgtaatttcttattctcttcatagctaaaaaatatttgctcactgactatttgggtgaagaatgagaaaatgaaaagcatgtggattacaagtgacccggtgacaaggccattattttgaacccagggaggactacatgagtactcataagaactgctgccaatggaaggttttcattaaactcagaaaagcaggttgcttaaaagacagcccccaaatttctattcgattaagaccttgctgatcactgactacatgccactttccaagtcctctacaggcatcatcttatttaaccctcactaccttaag

SEQ ID NO: 399098 - DNA, 340 bp, Homo sapiens
catgaatagggcaaaggatgaacacagaggagtgacaaaaatataaaggtttttattcacttagtaaacattttattaaacatatgtgtatatttcccaggcattacgaggaatacagtaataagaaaaacagtgttgggggcagtttgggtagaggttattgtggaaaaccttgacttccaagcttaggagtttaaagattacttggtaaactatgagattctgtcaaaggtttgtggaaaagagaataacatgttgaaaattttattttaggaagcttaatatgacttttatattgaagtaagaatgaaatagagacatttcaatttaaatatctaaa

SEQ ID NO: 399099 - DNA, 644 bp, Homo sapiens
ggtgatgctgtttgtggccagtccctattaccttctagcactagaccactatacatctcccctctgtctccagagatttgccttttctggacatgccttgccagtggaatcacagaatggggtcatttgctgctgctttctttctgtcagcttaatgtgtttgagttccattccttttgtaatgtgtattattactttattttgattgacaaaaaatataataaagatataccacccatgtttttcctttcattccttgagatgtattcaggtagttttcatcatgaatagtgctgcagtgaatcttgttgtgcacgtagactttcatagcttataggcgcataactgggagtggaattgctgggtcaaaacaatagttccttcttaaacattttgagaaattgcctcattgtgttttaactggctgcactattttacactcccaccagcaatgtgaggttttcctatttttctcattcatgacaacactttttgttgttgttggattacaaggtgtaaagtggtatctctctgaggttttgattataatttccctaatggactaatattgaatatatttatacatactatttaaaatttgtatatattttggcaacggtaaaaatttctattaaaatctcatt

SEQ ID NO: 399100 - DNA, 252 bp, Homo sapiens
tacctctatctctgtaactcccatcaccctctgccctttagggacacaaagaacaaatagaatttctattccgtctgacagctggccattcaattatttattcatttattcaacagacctttattgagtaacaaccatatgtaggcgctgaggactcaaaggtcaaaaataccaaaccatgtccttaggaatgtcacggtctattacgtcatccccttgtaatagctcttttacagggcaaacactccttgt

SEQ ID NO: 399101 - DNA, 408 bp, Homo sapiens
cgcacccggccagtcttcccatttttaaaagccagaaaactgaggcactgggagctagggtggcacaagagcacatggatgagaggagtccaagccaattctgccagcctccaaagcccaggccctctatggcatcgctttccaggtgcagggtctccaggcacagcaacttagtggagaggggcacctgctgcctgccccatccagggtctccccctccaggcccaccttttcatcagcactgccttccccacgcccccggctgacacccctgagcgagtcacctttgccgctgccttgggtgtggaaccctgtgcctttcctgagtagtcattcattccctcactctggaacccacccattggctcctcattctttctctcactcctttatttattcaacaaacac

SEQ ID NO: 399102 - DNA, 516 bp, Homo sapiens
ctggggttagggaaattgcctctttccgtctctatctcttttaacttcgcagcgagagctggaagcagtgactgttcccatcacctagtgtccttctgtcaggggccgcttcggtagctacagaagcctagccgctggaagcttccttccccgacactccatacctccatgccacaccttttaggcaataaccaaatgtcattttgttctttccccttctcctgggcattatactgggaaactgtttacgcgcatcgaccccgcacacctccaaaaatctccactttccgggctccaagcagctctccgctactcagacagcccaggctaacacctcggatttccccatgcagtttcctctgcagcgtctcaatcacaaggctgtacgggcggcacatgccaacggaaccaccaccccttctgctccctcggggactcaagcctgctctcggtcaaagcacagaagcggctttcagctccgggcaggcggccggggcgtcgggggtactggaagtg

SEQ ID NO: 399103 - DNA, 438 bp, Homo sapiens
tcgctagaaacatttggatacatgacagttcgcttgctctgaccaaggaggaacagctgcccatactcagttccctgggtctaagagacactcagacaacatctttgttaaattcattatttgcaaaggcctgggcagaagaccaaaacagaaaaagaggagaaccaaatgacaactcggaggaaatgatcaggactgagaaggagaggagaaaatccaagaggccagaccctcacgtggaccctattgtctcttccttccaacctcccagcctataaacacctgtgctaagcccagctgcccagcccaggccccatctgtgggtgaggcctgagacttttcgaccttgccttggctgagcaccgttattaccacatgcctaagacccgtgctccaatgcatctatcaggaataaagctgatgtcttaagccccctgt

SEQ ID NO: 399104 - DNA, 239 bp, Homo sapiens
cctattcttcataaggcaaaataagaccaacagcatcctcttctatggcagattctcatccccgtagatgcaattagtctgtcactccatttggaaaatgttcacctgcagatgttctggtaaactgattgctggcaacaacagattctcttggctcatatttcttttctttctcatcttgatgatgatcgtcatcatcaagaatttaatgattaaaatagcatgcctttctctctttc

SEQ ID NO: 399105 - DNA, 206 bp, Homo sapiens
attaattgtttcagttacataggagccataggcagtaatagaaacatcacaagtattgtttccaaaaatatacccaactagagataagaccactaagatgttccctttattacctttcagcatttaatgataccagcttgtagcttccaaggtgatagagtgtgctgtgtacatacaaggcatagtaaacgtgtatttaaaacttg

SEQ ID NO: 399106 - DNA, 385 bp, Homo sapiens
catgaccctaaaacctgggtatgctaggaatctaggagaagagattcaaatgtattttcgcttggatataaaaatggggaggaaaagccacagtggtgacatgtcattttgcatacctcagaattccagagatccctagcttttgattctgtgcaggctctctgtggtactggctgtatcagctgctcttaaccatgaaccagaacatcttggagaggagctgctaagtgcctactgagtctgtagcatggaaaacatgtctgcaacgttaatggagagctccggtttctggggctgagagatttcaatcactgatattgtcagtgagtgagggtggcgggggccatggtgtatgcttgtctggaataaagaacatcagttttga

SEQ ID NO: 399107 - DNA, 264 bp, Homo sapiens
ggatttgagtaaaaatatccaacacaccatttgctgagcaaattgaataccgaatatactattgtaggaaattctggagtttccagtggctaaactggcaactcagtagagcctttgtggctaggaagagacaaaacaactggattttgttgaagagcattcccatttttttttttagaaaagtattgaaggagagagggaagcaacaaatctgatttagtgaagacgttttccttgacagcaggatttactcctgagttataa

SEQ ID NO: 399108 - DNA, 569 bp, Homo sapiens
ggtggcgcgtgtctgtaatcccagttacttgggaggctgaggcaggaggatcacttgaacctgggaggtggaggttgcagtgtgctaagattgcaccattgaactcaagcctgggcgacaagagcaagactctgtctcaaaaaaaaaaaaaaaataactttggggagctgagatgggaggatcacttgaaacgaggcgtttaatgccagactggctaaaatagagagaccaaatctctacaaaaaaattaaaaattagccaggcatggtggcatgttcctctatccctaactacttgggacgctgaggtgggaggatcacttgaacccaggagttagagcccacactgacctatgatgatggcaccactggcactgcagccagggcaacagagcaagacgtcatctcaaaaaagaacaaaaatgtaaagctagaaaatttgagacttttctagattgtccttttgacaagtagtttttatttacccacatttcttcaccatatttagctaagtctttgctgaacttactgatagctaactattaagtctgcagcagaatacatttttga

SEQ ID NO: 399109 - DNA, 525 bp, Homo sapiens
ataataatgacaatgacagtgagcactgattgagcgcctcctaggagccggggccctgcgtgcgtgcctcccggacatcatctaatttaataaacacggtgaaaggtaggtctaatgatcaccaccactcaaagtctatgaacgaggctcaaaaaaagggaagtcgctccccccaaggtcacagagggagtgtgcagggccagatttcatcctggggccacgctgaaatctgtgccgtccacaaccagcccggggatgctgcgcccgcccgatcgatgcatcactgggtccatgtaaacatttcagcccgaagtcgggcacaaaagaagcgcgcaaaagggacgagccgcgccgccgccagcgtcacccttgacggaggacccggctgcgaggcgctcctagatgcgccatttggggacccgggggtccgcctggcgtggccccgcagggtccggggcctggaggcctttgtctgtctgtccgcgggaaggggtccggggtggggtccgcgcgcggggcggccgc

SEQ ID NO: 399110 - DNA, 419 bp, Homo sapiens
agggctctatgtcatattgtatctctcctactgtggtagattgttgttcaaaactattctttatgtccacaggagaagtattcttccccaatccttgatttgatcttggctgtgtgacattttttggccaatggacattggtagatatgacacaaaaaggagctttaaatgtggttttgcatttggacaccccctttcttgattttgcattattacgaaaatggcttcccctgggtcactgttggttgttcatcctgggaatcagagtaaacacatgtggggtggacctgagtccaacccacaagaggcctagctgtacctgctgctagaagcagaaccactaagctaaacatatcctagatcagctgacacccagttgacttgcagacacccatgaaaaataaaaccttattattata

SEQ ID NO: 399111 - DNA, 642 bp, Homo sapiens
agaccctgccttgtatgcctagcaacatgtgaagatttctatttctaaatccagtcattccagttgtacttattactgtcattatgcagtctcattaaatattattaaaagcaattattatggatatgaagaacaaaagatctacttcctctacaaaaaccaaatcaaatgcattgaaaagagacaataaagtcaggtcaccttaaaaataaatactgtcatcttaagtttgaccaagacaaccataaaagattgaggaaggaaatcagatcatttaaaaatgggaagaatagtggtcttagattgctttgtaagtttctgtaagttcctccttcacctaagaaactgaagcttcacatggccaatgatgctgtgtaggtgtcacttgtctgtgagagccaatgaagaacattaatcagaagaaccaaactcaagaacaaggtcatttcctgcttcacaagggccatctttactttgaaagatacagaaagactgtgtatatccttgcttgtgatcttcccaatcagtagcatctgtttctaggtcagatggcatacaagttcctcctctgctaagagttactgcttttgtgcctccccaaaaagatataataaaaataagattgaatatggtcttttaatc

SEQ ID NO: 399112 - DNA, 478 bp, Homo sapiens
ctcctgaggtttcctttcccctcttctcacctgccccactcccagctccatcctgtgggtagaactcagtgtgctcacagctgaggtgtcttagcctcaattgtaatcttgtattatagtcatatattcataaatggtatgtgtttccatatatggaactaaccctaagtttttaaaagtaaccctaacttggctgggcacggtggctcatgcctgtaatcccagcactttgggaggccgaggcaggtggatcaccttaggttaggagttcgagaccggcctggccaacatagtgaaaccccatctctactgaaaatacaaaaaattagccaggcgtggtggcaggtgcctatagtcccagctactcgggaggctgaggcaggcgaatcgcttgaacccaggaggtggaggttgcaatgagccaagatcatgccattgcactccagcctgggcaacaagagtgaaactctgtgtcaaa

SEQ ID NO: 399113 - DNA, 510 bp, Homo sapiens
actctctccttcttactccctgaacaccagccaaaatgcccttctttcagttcttgctatgttcattctcacaggagggcctttgcatatgctgttctccttgcctcagattcacttgcctactctgtctacccagttaattcatctccattttgttttagagcacagctcaattgctacttcctcagataacacttctttttgagtctcccagactgggacatttccccctgacaaaaccctacttctaaaccaactcaactaccttcattcctgtatctcagctgccaagtgtggctgaaggaagtcaccaatgtgttccatcatcctcaagtgcacccttcaaaaaaaagtcccgccatctttttacaaacagccgtagcactatatgcctctacttcatagcactgaccataattctaatttaacacttatctctgtgacagctgcctggtgcctgcctcctccattttatatcagaagctccatgaagacagtctgctttctcct

SEQ ID NO: 399114 - DNA, 723 bp, Homo sapiens
ttgctgggaacagtacccgtgacagtccaggctgagacttgcggctgttgggatcatacccaaggttccagtggaatctcacacaaatcctgtctggttcattttctttctgtttgcacctcaggtcctcagttccctctgaggtccccaccatgcctttcctggcctgtctctccttcgctgacctccttttcaagtccctcccagagaatgctcataccttagtcttttctttccttcttccttcatctctctatttcttcatcaggtatgtatttcctgagggcctattatatgcctgttgtagttgctggggatacagcagtatccaagacaaacactgcctgccctccttgcagtccagaaagcaagcaatgaccactcaatgggatgagtgctactagacagtaagggacctgcggggggcagtttaggtgccctccctcaaccctgcagtttacagactttgtgaccatctcactctttctctaggacttgcccattctgcaagtctcaagacaccatttcttcccagtcctgactccctaccccacaccccatcatcattgtccgtagcacccactcccagccagtgctgcttccacagccttgccatctgaaactgccctttcacttttgccatctgctcagctccaagccgctcctgcctgtttctccaagtcttccatctaccactcccaggtttcgtcacttcattcccac

SEQ ID NO: 399115 - DNA, 181 bp, Homo sapiens
ctctcacgttcgtgccgtggggccagggtaactctcacgttcatgctagccgtggggccagcgtaagctccaccatcagcaggttcagggtttaacatggcaagtctgcagaggtgatccagtctctagaatctgtatgctgtctgactaacatggccaagtcggctgctcatcactgact

SEQ ID NO: 399116 - DNA, 298 bp, Homo sapiens
tgcccaggccagtcttgaactcctgagttcaagtgatccacccatctcggcctcccaaagttctgggattacaggtgtgtgccaccgcgcccagccaggaagctttttttatgggaacaattggcgtgttttcccgtctctgtggaattgtccctggaagttgacaggttttaccctgtgcagcatcagcaactgctgctgccctagtcaggggctctgggaagcagtaggagagtctgtgggctgatgttctaggtgccagcaggggacaggtagctgggggcagggggaatgatgc

SEQ ID NO: 399117 - DNA, 396 bp, Homo sapiens
agtcttccttttaaatattttatggacttcctagtacgttatccacagcagtgccccaaatccactctttgtgctcagctctatttccaactgtcagcaaaagtgcttgcatttcactttaaagggaagaatgcttaatctgtgtttataatcctaatccctttcttttccttggctttgcttatcagttgttccctgtctttctatctccttttactctgacttttagccaatcaaaatactgcctggatctcctgttttgtaagatcatatacaccctcctaatccctgttacatgtctcaggcagccagcctcctttgccttccctcactgcccactgccatgaaacaggagtcaccttttactgcctctacctgccacctacaaccacttta

SEQ ID NO: 399118 - DNA, 153 bp, Homo sapiens
ttctcttagctgcttgcctttggggacattttgctgcacattttaagaggactggaaagaaaaatacagttaaaacaaactagtctattttaggttctgttgatagtttagtgatgtactaggggaatgctggggtgtgtggtaggaaatgga

SEQ ID NO: 399119 - DNA, 630 bp, Homo sapiens
cttcttttggttctgacctctcattttggagaggtaggttctcaaagggagctgcatactggcatcgtctggaaacctttacgagaaaggaagccctgaggtttgattcaactagcctgggaagggtccagacattggttacttattgtactgttattatgagtttcttttggtttttgaaagaggttcttattctgttgcccaggctggagtgcaatggcatgagcatgatcacagctcactgcatccttgacctcccggtctcaagccattctcctgcctcagcctcctgagtagctgggatcataagtgcacaccaccacttctggctaatttttaaaattttctgtagagatggggtctccctatgttgcccaggatggtctcaaactccagtttccagcaatcctccagccccagcctcccaaagtgttaggattacaggcatgagccaccatgcctgggctgttattatgtcttcaatggtctccagaattttccagcgaggagctaaggcagaggacctttggtctagcaaagagggcagggtctatcactcaccagcaactcaacaaacacttctctgaggctcatttcctcatctgtaacaactcaaatgaggttgttgta

SEQ ID NO: 399120 - DNA, 326 bp, Homo sapiens
ggaggttgcagtgagctgagatcgtgccattgcactccggcctgggcaacaaaggtgaaactccatctcaaaaaaagaaaagtcaaagccaaagagatacattctaaaagcaactagagaaaaagagagaccttcaaagaaggtagaattagcctgacagctgacttatagactgaaacaatgagaggcaaaaataatatataataaaatttactgaaaaaatttgccaaactagaattctatacccaatgaaaatatcctttacaaatgaaagtgaaatcgacattttaaaatagataagaatggagagaatttgtcaccagaaa

SEQ ID NO: 399121 - DNA, 850 bp, Homo sapiens
ggaaactgatacaatgacacttgtttcttaagagaagctgattgaatccggtagcacattactgcacaattaatggctttaaacgagttacaagtcgtaagttcttatgttttggatcatgttgtggaatgtattccaaatgaaaaatggaggagaaagtgcacaacatcatatgcttcatggtatggcatatacatgtcaattatttttacatataactgtgatgaatgatacaattaaaagctatactacataatgcatacagttattattataaaaagttaaatattatgccacagtactaaaaataaaatatattcttctcaaatagtgaaaataagatatccttcatgttttttatgtcacatatgcttcctcgtttgaccatacctgtttttcttttttaatgaaataatttaatgatttattaaacaataatgacagagtatgggcaatttcctgaccattaatggcctacaaaaagtgataagacgattaccttgtcgtgaatttgctgaaataccctcctgttgcgttcaatgcatggtaaaaatattagaataaaagacaaataaatataaatacctcctcagttattgaacaatcaaaagtccagccgaatggatatacatggttgctgttccctgagtaggtacagcagctaaccttgtatcacaggtgtcccccctagcccactccccgcactccacctaattgtgaaacaccagctgtgactatttgctagatcaggaagacactgagggattttggggggtctgccgcatggcagcgatttcatcataaccaagtggcgctctcccacacccacgtgcagcagtccctggtcgcg

SEQ ID NO: 399122 - DNA, 494 bp, Homo sapiens
tgaaataagttcggattcccatgcccctcttcattcagtgactaattctcccgaagtagctgttaaaaagctaaatcctcaaaaagaagagcaggtacacttagaaaataaggaaaatgaacctattgattctgaagtaagtttggattataatatcatttttcattcagtgactggacgttctgaagatcccattaaagaaataagccttcacacaaaagagcacatgtacttagaaaataagagtgtttttgaaacaagtttggattctgatgtccctcttcaggcagcgactcacaaacctgaagtaattgtcaaagaaacatggcttcaaagagaaaagcacgctgaattccaaggtagaagtactgaattcagtggttcaaaaacaagtttagattctggtgtccctcattattcagtaactgaacctcaagtagctgttaacaaaataaacagaaagaagcaatatgttctagaaaacaagaatgata

SEQ ID NO: 399123 - DNA, 220 bp, Homo sapiens
aataagaggaaaagtttgttgttgataattcctcaaccactttcctcagctttcatcatgggcatccaaacgaaaatgtatttactcaaagtttttggtgtgaagctgtaactagcaacattcctgataatttcatgcctccttactagaaagcagagaagggcttttaaatgcacataaaacagaaaattgcaaacaataaaatgtgcaacttactgca

SEQ ID NO: 399124 - DNA, 335 bp, Homo sapiens
cggagcttcactcttgttgcccaggctagagtacagtggtgccatctcggctcactgcaacctctgcttcctgggttcaagcaattctcctgcctcagcctttcgagtagctgggattaacaggtgcatgccaccatgccccgctaatttttgtatttttagtagagacagggtttcaccatgttggccaagctggtcttgagctcctgacctcaggtgatccttggcctcccatagagctgggattacagtgtgagccactgctcctgacctttttttgttcttttaaaaaataggtccaggtatattcaggttgaaagaactgattagagttt

SEQ ID NO: 399125 - DNA, 426 bp, Homo sapiens
agattataaaaatcataattaaaattaaagggatatattaacaaattctatttatagttgtagttccatatttaaattaatctattaagaatcattaatacttttcactgataaaaataagtaaatattaataaagatccatatttgatgacttcttttgggactagattataaattccttgaagacaactatgttttgttcatctttgtcttccccaaaagggccagatatgatataatggctttcatataattgataatttataaaaaagttgactttttattcttattttcattgaaagcaaccaacgtattagtcttcaaatctattgccatcttttaaatttacacttttggtttttgtatcttgggagcatgattaagatctatgtagttttcccttattcttcatacaattgttttaag

SEQ ID NO: 399126 - DNA, 375 bp, Homo sapiens
ctaattttgtagcttcagaacaggtgtgactcaggcagaggaagggctacacaggtgtcactgtgcccacccctagggagactgctacagacagacttcccggtgggacccggcccccacccatgcatggtggccacgggcatgaggagggtgataatgacaaggggagccacgatgaccacagggtttatagagatctcgccatttgctgagcaatgtggaggaacgttacacacaccatgtcgcctcccccgatgcctgcagggcaggtatcattgccctgcattctattgaggaggaaattgagttggaagtgcccaagatcacgtcgttaataaatggcagggcctaaacaagcccttagccgctacaaca

SEQ ID NO: 399127 - DNA, 128 bp, Homo sapiens
aatactccaagttcctgcaagcaacagaggctgaaagctgttactgctgtaactgacctgtgcaaatataactggccagggcccttatgttcactggtgactacaactaaggccaaggctgaatgaca

SEQ ID NO: 399128 - DNA, 407 bp, Homo sapiens
cccaaaccccacccctcttctggtctaatagcttcaatttatttctctctactggattatgtcttttttaaaaatcacatttcctttaagcctgcctccctttttaaaaatagacaatataactgtttattaaaataaaggaagagaaagaaaataacctgaaaaggaaactcataaaagaaattaaaatggttgataaacatatgtaacaaaaaaaatttgataacagaatgaaattaattcaagagaaagatacatttttaacctcttcagagaacaaagatttgaaatgtttattatatatgaggtgaaggtactgtcaaaattcactgttgggcatatatatcattacaatcttgagagtagtgtggcaaattttattaaattccttccatttctcttgtgtg

SEQ ID NO: 399129 - DNA, 303 bp, Homo sapiens
ccaacattaaatcagaaatcaagcaaatgcttacccaacaaatatttgagccctcatagctgggtttaagatgactcagtgtgcaaaattattaattccctttttatttctctacctgttgaccactgttgagacaccaaatttggagtgacaggcatcagaggattacaacagggttggaactgacttctttaagcaaaagcaaagggtcttctgtgaccacaatatcatcatccatatgccttttcacataggatgatgtgttttttgtcactccatggggcctggtctgccattttcccc

SEQ ID NO: 399130 - DNA, 904 bp, Homo sapiens
accaccatccagtcacctcccacaaggccccaccttcaatattgggaattacaattcgacatgagatttgggtggagattcaaatccaaaccatgtccttttgcttttttctgttttgtttgtggagtagatttttctccatccctttactttgagcctaagggtgccattgcatgtgagatgggtctcttgaagacagcataccattggatcttgcttttttatccaagtcaccactgtgccttttaattggggcatttagcctgcttacattcaaggactcagtgacctttgaggatgtggctgtgaacttcacccaggaggagtgggctttgctgggtccttcccagaagaatctctacagagatgtgatgtgggaaaccttcaggaacctgatgtctgtagaagtcatatggtagagagagtctgaaggtaaggaagatggtcaatgtgaagagatcttcagccttgttccaaatggtatagtgaagacgacttttactggagtcaaatcatgtgaaagcagtgtgtgtgaagaaggcaatatggatcattcatctcttaattgctgcatcagagctgacactggacacaaatcagatgagtgtcagcaacatagaagccacataagcagtgtgtgaaaaccttcagctattgccactcctttcaaacacatgaaaggcctcacactggaaagaaactccatgtaagaaatgtggaaaaaccttcatttctgttcaaaccttttgaagatacatggtaatgcacagtgaagatgaaccttataaatgtaagttttgtgggaaggcctttgataatctacatttatatcttacacatgaaagaactcacactggagagaaaccctatgaatgtaataaatgtgggaaagccttcagttgtt

SEQ ID NO: 399131 - DNA, 749 bp, Homo sapiens
aaaaactgttggaactttgtatgggaaaccaggtaaaatgtatttgagtttgtaaccctgttgttcttatgatacatcctgccatcctatgattctcagaaatactgtaaaatgctttcctaaaagcctgctctgggcctcccttacatcctgtgaggcgcggaggaaagactaaataaatgtaaatcatggtttgcatcctttcagaacacatggcctggttaaagaaaaagccatatttgaagcattgtaattaggtgctacaggaattgagaatcctaatatttattcatccttttatatacatatcactttgtagttgttttttgcttgtttcttgtgtaaattttatccggtctagtgtcccattcgataaatagtatattttgctggacaaattacttcagaaagttatctgacatctttgtagaatagtttaatttactgtgcggggtattgtgcttaacattatttctcaaatttatcagactgaagaaggtactgtccccattttacaaataaggaactaaattcagagattatttagattgctcagtttctttaaaattgtagagtcagtatacagatttccctgagtccatatctttgttctttcaactctaccatactgcttcccaatccagtgttttgtctttgaatctaattaagtcattactttgccttcagctaatcaaatatagaagtacctttctatcttccctcttttaggcatagcatatcccttcata

SEQ ID NO: 399132 - DNA, 141 bp, Homo sapiens
ccacacagtgttgcccaggcaactatcgcttctgatggaagacaccatctgagcggcacttccaaaggcattttctgcagactatttgtacttcaaaatgctatggaaggacaaaaaattttatagacaaataactcaggg

SEQ ID NO: 399133 - DNA, 163 bp, Homo sapiens
gaaaaatagactcatctcttgataagaggagttgcccagacacattgcagagagcatggaaatagggaaaatataaatttgggccaccatttctgtcaatcttccccattgtccaatgatttttttctttcttccctatagtatcttagctactctcattctt

SEQ ID NO: 399134 - DNA, 159 bp, Homo sapiens
gggaagaggagacccacctgaggctcagccctagcccctcagcccacccacgggagagtttactgactggggaccgcacttgcccatgcctccagctacaaaacaattcaattgcttttttttttggtccaaaataaaacctcagctagctttaacaca

SEQ ID NO: 399135 - DNA, 631 bp, Homo sapiens
ggttttccctcttgtacaattgattcttttagacccagtgttattgtttgaaccatgtttcccaaaaagatgttgaagtcctaaccctcaataccgatgaccgtgaccaaccatattttgaaatagaatctttacagctgatcaaattaggataaggttattaggatgggacctaatcctgacagtgtctttataatgaggggaaatttgtacatcatgacaagcatgcatagagggaagatactgtgaagacatagggagaacactatctgcaagctattgaacagactagactaccagaagctaaatgagaagaatggaatggattctccctcatagtcatcagaaggaaccaactctgctggtgctttgattttggacttctagcttccagacaatagatttctgttgtttaaaccattctgtgtagttttgttatggcagccccaggaatctaatatactcagctacaatttaaaaatactttttaggataattataaatttataggatgttgcgaggataatacagagaggtctcatgtatccttcattcagttcccgccagtggttatatcttacagaattgtaatacaatataaaaaccagtaatatagcattcatccaatata

SEQ ID NO: 399136 - DNA, 522 bp, Homo sapiens
gcaagtatttggtagaaccctacagaggtaggaagtggctgttactagctgtttccactggtattctctggccatctcagagctgtttagggaccattccagctacaggggagggcaagatttagagtagactctcaaatgagtctatctgattctttggaagcacgagctctagtaagatagtttgaacaaagatgtgaccatgaggggttttgttttattttttaactagattttgatatgttgtgtgccgcttctccactgcacagattgaccaagagttagctgcagattgtggctcagtaagaaggtcttgtggtacgtgctcctgcggcccccacctcaaactcttgcctctggtgttcttgaaagaaatgaggggacctttgcccgagccaagggaaaatgcaagattttggaggcttagcccctttattgtttttttcctctgttgcttatattgatttctgcggcaaagagcagttgactgggattgaaagctactctgctggtcttggatgt

SEQ ID NO: 399137 - DNA, 240 bp, Homo sapiens
ttttaattaccaacataatttttagagttgtcactttcaacaaaatcatccctgaaaaaacttcacaagtaaaaatagttaaatacaacaacaaagaattgcaggggatagaaagaatcgatattgttaaaatcgccatactgcccaaagcaattagcgggttcagtgctattgctctcaaaataccaatgacattcatcacagaattagaaaaaaactattttaaaattcatatagaat

SEQ ID NO: 399138 - DNA, 651 bp, Homo sapiens
tttcctcgtgtctcatggccaagatcccattataatgcccagtttcattacttttgttgggcctatccttttatatgggtgtgcagaggggagatttacctatgggctgaagtctgtgacttccaacattcaattactaacattattgttgtgttgatttagtcattaacaatttatttatttagatatgacatattaagtcataaatatttactgtaaattatttattaaaatttctgagagtttttgaattccttgtcaaagaagatgaagaactgaacaaaggaaagggcaattttagaaaaaaaatagcactaaagagggtagggggagaaataaagcaagattgggtcctccttctctgctgggctcaataaggacctgatcattgtcccacaagcctcaatgagggctactatcaaacatgaaaatagattgatgtgctttaatcctttctgattaacttgctctgagccaatgaactctttacttttcttactttttattatagagaagttacggttgaagtgagccaaagattccaagaactggtcgacagaagtcttgcctaaccttggtccacaaagagaagttaatatagtttgtctttggaactgttgtacatctttccaattaccatcatctccttgc

SEQ ID NO: 399139 - DNA, 547 bp, Homo sapiens
tagtgtcactgtgggttgggtaggtggctttgctgatttttcgctggacttccacatttgaggacagttggttgtcatcagctctagaaagggtgtggctgttttacattggctgttttcctcacattcctcaagcaggtactgtaataaagaactggagaaatacagtcagatgggaagtagcccctgctgtcaaggagcttgccatctaatgggggagacaggcaagtaaaccaaagactacacagtgcagtatggtaagtgccatgattttgatgtgaatctctatgtgtgtttgtgtctgtgtgttttatgggggtcattatctctgtgtgtgtctgtgtgtctctgtgaatctctctgaatctctatatatgtgtctgtctcttgtgtttctatgtgtgtgtgtacacaccttcatcttacagaggaggtcccagcacagatggtgcaagcagccagccagacctcctgcacactgtgacgaagctggagcaagacaccagggctcaccaggtgaacatgtgacctggaccggtctaactcc

SEQ ID NO: 399140 - DNA, 2873 bp, Homo sapiens
tgagtattatcttcacatagatttctaaagaagaattgaaaaatattcttgctgcatcagaaatatgttgacaaaccaccttttgggtctgaaccaacaacaagcaaagttaaattatggatatccaagggagtctatagaaggtccatgcaagacattttgactacttgtctgaactagatatcccttgaatgtgcacacaaaaagtgaatgggtcatttgataagggaaaactaggttccaagatggctgaataggaagagctccaatctgcagatcccagtgtgagcaacgtggaagacgggtgatttctgcatttccaactgagcatggagagaaaatttatgtccttgcaaccatccatctccgtatcagaaatggaaccaaatggcaccttcagcaataacaacagcaggaactgcacaattgaaaacttcaagagagaatttttcccaattgtatatctgataatatttttctggggagtcttgggaaatgggttgtccatatatgttttcctgcagccttataagaagtccacatctgtgaacgttttcatgctaaatctggccatttcagatctcctgttcataagcacgcttcccttcagggctgactattatcttagaggctccaattggatatttggagacctggcctgcaggattatgtcttattccttgtatgtcaacatgtacagcagtatttatttcctgaccgtgctgagtgttgtgcgtttcctggcaatggttcacccctttcggcttctgcatgtcaccagcatcaggagtgcctggatcctctgtgggatcatatggatccttatcatggcttcctcaataatgctcctggacagtggctctgagcagaacggcagtgtcacatcatgcttagagctgaatctctataaaattgctaagctgcagaccatgaactatattgccttggtggtgggctgcctgctgccatttttcacactcagcatctgttatctgctgatcattcgggttctgttaaaagtggaggtcccagaatcggggctgcgggtttctcacaggaaggcactgaccaccatcatcatcaccttgatcatcttcttcttgtgtttcctgccctatcacacactgaggaccgtccacttgacgacatggaaagtgggtttatgcaaagacagactgcataaagctttggttatcacactggccttggcagcagccaatgcctgcttcaatcctctgctctattactttgctggggagaattttaaggacagactaaagtctgcactcagaaaaggccatccacagaaggcaaagacaaagtgtgttttccctgttagtgtgtggttgagaaaggaaacaagagtataaggagctcttagatgagacctgttcttgtatccttgtgtccatcttcattcactcatagtctccaaatgactttgtatttacatcactcccaacaaatgttgattcttaatatttagttgaccattacttttgttaataagacctacttcaaaaattttattcagtgtattttcagttgttgagtcttaatgagggatacaggaggaaaaatccctactagagtcctgtgggctgaaatatcagactgggaaaaaatgcaaagcacattggatcctacttttcttcagatattgaaccagatctctggcccatcaggctttctaaattcttcaaaagagccacaacttccccagcttctccagctcccctgtcctcttcaatcccttgagatatagcaactaacgacgctactggaagccccagagcagaaaagaagcacatcctaagattcagggaaagactaactgtgaaaaggaaggctgtcctataacaaagcagcatcaagtcccaagtaaggacagtgagagaaaagggggagaaggattggagcaaaagagaactggcaataagtaggggaaggaagaatttcattttgcattgggagagaggttctaacacactgaaggcaaccctatttctactgtttctctcttgccagggtattaggaaggacaggaaaagtaggaggaggatctggggcattgccctaggaaatgaaagaattgtgtatagaatggaagggggatcatcaaggacatgtatctcaaattttctttgagatgcaggttagttgaccttgctgcagttctccttcccattaattcattgggatggaagccaaaaataaaagaggtgcctctgaggattagggttgagcactcaagggaaagatggagtagagggcaaatagcaaaagttgttgcactcctgaaattctattaacatttccgcagaagatgagtagggagatgctgccttcccttttgagatagtgtagaaaaacactagatagtgtgagaggttcctttctgtccattgaaacaaggctaaggatactaccaactactatcaccatgaccattgtactgacaacaattgaatgcagtctccctgcagggcagattatgccaggcactttacatttgttgatcccatttgacattcacaccaaagctctgagttccattttacagctgaagaaattgaagcttagagaaattaagaagcttgtttaagtttacacagctagtaagagttttaaaaatctctgtgcagaagtgttggctgggtgctctccccaccactacccttgtaaacttccaggaagattggttgaaagtctgaataaaagctgtcctttcctaccaatttcctccccctcctcactctcacaagaaaaccaaaagtttctcttcagagttgttgactcatagtacagtaaagggtggaggtgatatggcattctgaaagtagggagggactaagtcagtcgtcatactaaac

SEQ ID NO: 399141 - DNA, 2807 bp, Homo sapiens
aagttctctaagtttgaagcgtcagcttcaaccaaacaaattaatggctattctacattcaaaaatcaggaaatttaaatttattatgaaatgtaatgcagcatgtagtaaagacttaaccagtgttttaaaactcaactttcaaagaaaagatagtattgctccctgtttcattaaaacctagagagatgtaatcagtaagcaagaaggaaaaagggaaattcacaaagtaactttttgtgtctgtttctttttaacccagcatggagagaaaatttatgtccttgcaaccatccatctccgtatcagaaatggaaccaaatggcaccttcagcaataacaacagcaggaactgcacaattgaaaacttcaagagagaatttttcccaattgtatatctgataatatttttctggggagtcttgggaaatgggttgtccatatatgttttcctgcagccttataagaagtccacatctgtgaacgttttcatgctaaatctggccatttcagatctcctgttcataagcacgcttcccttcagggctgactattatcttagaggctccaattggatatttggagacctggcctgcaggattatgtcttattccttgtatgtcaacatgtacagcagtatttatttcctgaccgtgctgagtgttgtgcgtttcctggcaatggttcacccctttcggcttctgcatgtcaccagcatcaggagtgcctggatcctctgtgggatcatatggatccttatcatggcttcctcaataatgctcctggacagtggctctgagcagaacggcagtgtcacatcatgcttagagctgaatctctataaaattgctaagctgcagaccatgaactatattgccttggtggtgggctgcctgctgccatttttcacactcagcatctgttatctgctgatcattcgggttctgttaaaagtggaggtcccagaatcggggctgcgggtttctcacaggaaggcactgaccaccatcatcatcaccttgatcatcttcttcttgtgtttcctgccctatcacacactgaggaccgtccacttgacgacatggaaagtgggtttatgcaaagacagactgcataaagctttggttatcacactggccttggcagcagccaatgcctgcttcaatcctctgctctattactttgctggggagaattttaaggacagactaaagtctgcactcagaaaaggccatccacagaaggcaaagacaaagtgtgttttccctgttagtgtgtggttgagaaaggaaacaagagtataaggagctcttagatgagacctgttcttgtatccttgtgtccatcttcattcactcatagtctccaaatgactttgtatttacatcactcccaacaaatgttgattcttaatatttagttgaccattacttttgttaataagacctacttcaaaaattttattcagtgtattttcagttgttgagtcttaatgagggatacaggaggaaaaatccctactagagtcctgtgggctgaaatatcagactgggaaaaaatgcaaagcacattggatcctacttttcttcagatattgaaccagatctctggcccatcaggctttctaaattcttcaaaagagccacaacttccccagcttctccagctcccctgtcctcttcaatcccttgagatatagcaactaacgacgctactggaagccccagagcagaaaagaagcacatcctaagattcagggaaagactaactgtgaaaaggaaggctgtcctataacaaagcagcatcaagtcccaagtaaggacagtgagagaaaagggggagaaggattggagcaaaagagaactggcaataagtaggggaaggaagaatttcattttgcattgggagagaggttctaacacactgaaggcaaccctatttctactgtttctctcttgccagggtattaggaaggacaggaaaagtaggaggaggatctggggcattgccctaggaaatgaaagaattgtgtatagaatggaagggggatcatcaaggacatgtatctcaaattttctttgagatgcaggttagttgaccttgctgcagttctccttcccattaattcattgggatggaagccaaaaataaaagaggtgcctctgaggattagggttgagcactcaagggaaagatggagtagagggcaaatagcaaaagttgttgcactcctgaaattctattaacatttccgcagaagatgagtagggagatgctgccttcccttttgagatagtgtagaaaaacactagatagtgtgagaggttcctttctgtccattgaaacaaggctaaggatactaccaactactatcaccatgaccattgtactgacaacaattgaatgcagtctccctgcagggcagattatgccaggcactttacatttgttgatcccatttgacattcacaccaaagctctgagttccattttacagctgaagaaattgaagcttagagaaattaagaagcttgtttaagtttacacagctagtaagagttttaaaaatctctgtgcagaagtgttggctgggtgctctccccaccactacccttgtaaacttccaggaagattggttgaaagtctgaataaaagctgtcctttcctaccaatttcctccccctcctcactctcacaagaaaaccaaaagtttctcttcagagttgttgactcatagtacagtaaagggtggaggtgatatggcattctgaaagtagggagggactaagtcagtcgtcatactaaac

SEQ ID NO: 399142 - DNA, 485 bp, Homo sapiens
tcttgtatatctgatgcttcacaaatccaaaatggagctctttatctccacccttctgttctgttccgctgtcttgtttcccatctcaagaaacactcccaccatctcagtggcttaaaaagaaacctaagacctgtacttgattctttccttttcctcattcctgcattgaattcctaagtaagtctggttccttctttgtctaaaacagaggtaaacaaactttctatgaagggccagttagtcaatattttcagcattgtgggccacatggtttttgttgaaactgtcaagtctgccattgtgtcaagacaacagccataggcgacatgtaaatgaattgtcatgttgagatctggcctgaggctgcttggatttggccatagtttgcagacctctggcttaaaatatttcacatctgtccaattccctccatctctactgctaacctgcaagttcaagccatattgcttgaccagactact

SEQ ID NO: 399143 - DNA, 526 bp, Homo sapiens
gcatacgtcaaaattttattacagtcttgaccgggcgtggtggctcacacctgtaaccctggcactttgggaggccaagatgggaggattgcttgaggccaggagttcaagaccatcctggtcaacacagtgaaagcccatatcttaaaaaaaaaaaatcacagtcttgctgcaagtgtaaacccactgggaattcaaagatttatacttggtagggacattttctaaaaatttattttttattacagtctgcctatgtagattaaactgcacgctcttaagtatacaggttgatgaatttttacatttgtacacatctgtgtcttaacaacccaattcaagatattagaacatttgcaggcctacagaagcccccctggaccccttcccaggcaatacaccctctctccaccccgaaaaatgttggccactcttctgacctctatcttgatagagacattttctaggagaagaaaatgattagataatcactgttagacaaaatagaaaagaaaagaatgttccg

SEQ ID NO: 399144 - DNA, 454 bp, Homo sapiens
tcaggaaagcaaagacttacagtgacaaagaaaacccaagttatctgtttcttttattaccaccttggcctcatttcctcctaataattattatctctctgatccaagcacacagacgtctctgctactccttgaacacaataagcattcttcttccttagggcatttgctgtagtttttccctctgccttaaatgttttaccccaagaaaacagcttggctaactccctcacatccttcaagttagatataatttcttaatgaagtctatcctgattattctatatagctctttaatattgtgacattcatcccatctctcacagatttctgattctcttaatctgttctactctttcattatgccaaagcacattttatcttcaccttaatgaatataatttcatgccactgcacttcagcctgggcgacagagcaagactctgtctcaaaa

SEQ ID NO: 399145 - DNA, 443 bp, Homo sapiens
actatgaattttttaatcatattatgaacacaagataactgacccattaacagaatatgaaaaaaataagcaatgataactagattcagtcacctttagtactttgctaaattttagtcataaaaatcttatagtttaatgaatattttacaaattgttatgatgaatgcttatttgtcagcataggaaagaatacatttcagtcaacagtgagtctgattgataactttagctctttacgtgtatggaatatggtctccatttgcagtcctgcctcaggccccacaattggatggagtaattctgctattaataataatattttcttacaagattaatactttaaagtatctcttccctaaccagaatatagttagtatgagaacaaggaccatacctattttttaatactgtattctcagtgaccattatagtatttgaaa

SEQ ID NO: 399146 - DNA, 195 bp, Homo sapiens
gagggtgcctgctggggataatgaaagagagaactggctttttgtgggaatcctggatgcagtgggctgaatggtggcccctaaaaagatatgtccatgtctgaatccctggaacctgtggttatcaccttatatggtaaaacaatgaatattaccttgtatggcaaaagatgtgattaaggattttgagaagag

SEQ ID NO: 399147 - DNA, 219 bp, Homo sapiens
taataaggccataccactcagacaccccagggtagaaaggggctttggtaggttgttctgccagctatttttaataatggaagaatagagcacagaatttaaaagggaaaccatatataataaatattatccaataagctctcagtacatcagctggtccttacctggcaatgctgaagctcaatcagagcagccctcagtggagatgaaagcatactt

SEQ ID NO: 399148 - DNA, 1447 bp, Homo sapiens
ctgctccttcttttggattattcccttaggaatatctccaaagagggattacaaggtcaaagagcatgaagtattttatagctcttgttttatattgccagattgctttctagaaagatccaatctttgggttggaaggaccttaaaggtcatctagtttagcctccccaccccctctgaatgcttgaatcccctcgacaatttatgatgccaccagcaatgtataagcatttctgtttaccaatagctctgccagtattgggttttgccatttttatttatttttgctagtttaataggtatgtatagttgttcttgaagagttgttttatttcattaattgctagcaaggctgagcacttttccatgtgatgatttactagttgtatttccttgtgtgtaaaatgttcattcatttcttatgaccacttgttaagaggaactgatctcatatatttgtatcagaactgtatttttatgttatattgtatagtttgctctcctgcccctctccttaaaactgaatggtgccaataatttgatactaatgactacaaaaaaaggtaatgcctcatttactagtattgttgtaaaatgaggaatgtatgtgaatattcagataaccgaggattaaccctttaagtgctgaatctttaaaattttaatatatttttttttgagggaaatctttctaaaatgtattacgcacttccctgccttagtaaacagagtatactggagagtatttaaccttttcttgatgagtcatggtcatgattataaacatcagccccttttataccttggtacggtgcagtgatatcattaagagctatcaatatgtgtagggcttggcttggccttttataggatattatgctgttctcactgatggttttttactgctctctgctctgtcagtggagctatccggggcaattgtagcgtttgggtccttttacccctatgtcccccggctatacttttaaaacagctttagctgttctttatcttgtgcacatgatacaaaatatgttcccgtacaatatggggctgtcacttcttgccaacccagcaccctcttcctcttctaacctgctttctgaggcttctgctcttcacctcctgctcgctgatggaaacctccagggcaaagctgaaggtttcttggggaagccaggaaagccagtatttcctatgtgtcagatctgcttggcttccaagaagggatgcatgggctttttggccagtgtttccaggaggctctgggcttcctgcttcttccccgcttcccccagagttcacagatgttgaagtttctgaaggttgacgtcactggaagtctgaccacaaacaagttggctgttactgtatttgaaacccagtacctttggcagctcacctctaaccagtaaaataagaggattccatggtttcagcagttgtc

SEQ ID NO: 399149 - DNA, 112 bp, Homo sapiens
aaacacagaaaggcatagccgtgttcaaatgaactcagatggggagagataaccagttaaacactcttaaaagcactgaaggcaggcccattctcttttgcagctcgtacat

SEQ ID NO: 399150 - DNA, 382 bp, Homo sapiens
tggggaggttgggctgggtgttttggtctcattgcctcctcagaaggggggtgaagatgtgagcggcctcccccaagtccctggcctggaagccactcacagagctgagtttgagtcctggagctcagcagcaggttcaaaactcagttctcgcactgctaactgtgggagcaactaacaatctctctctgcctctgtttctccatctgcaaaatggatcagggtaggtcaactactgcagcaaacaaagcctggagctaaataccatccagctatgggccccacctcaatgagccacacagagtgctcagaacagcgcctagcacaaatctgtgcccactgcaggttcgcgaggatggaaggctgtgccatccacaagaga

SEQ ID NO: 399151 - DNA, 486 bp, Homo sapiens
ccagcctccctctctgtagcagatttttgttgagtctccatgaggcttgatgttcagggagagtcatctgggaatgaagcctacatggtgttctcaggtacctctcagtccccttggggagatggatgggataataagataagggctgggagagagaggctggcatagggtgtagagaggccatcgttcttctgcagagaagtgtgagcattgctgtaatcctcagtcaccagctctcagtgtgaagaaaagggaagctatcccacctccttcaaacagaggccccatctgaggttatcaatattgtcatttatttagtggcccagaaccttccattttaaagcacagtataaaactagaaggaggctagatttgcagtggctcacacttgtaatcccaacattttggaaggccaagatgggcagattgcttgagctcaggactttgagaccagcctgggcaacatggtgaaaccccgtctctata

SEQ ID NO: 399152 - DNA, 390 bp, Homo sapiens
cgtaggctaaataatggctcccaaagatgtgtctacatcctaatctccagaatctgtgaatgttactttatgtggcaagtacgtggcagatgtaattaagtcaaggatctttggatggttatcctgaattatctgggtgggccctaaatacaatcacaagtgtccttataggagagaggctgaaggagatttggtaccaacagaagaggaggaggaaattgtgatcatgcagaaactggagtgatggagtcacaagccaaggaatgccagcagccaccagaagccgaaagaggccctgccaacaccttgatttaggcctaatgaaactgagtttagatttctggaccccagaactgtgaaagaataaatttctgttgtgttaagccccta

SEQ ID NO: 399153 - DNA, 297 bp, Homo sapiens
cgtaggctaaataatggctcccaaagatgtgtctacatcctaatctccagaatctgtgaatgttactttatgtggcaagagagaggctgaaggagatttggtaccaacagaagaggaggaggaaattgtgatcatgcagaaactggagtgatggagtcacaagccaaggaatgccagcagccaccagaagccgaaagaggccctgccaacaccttgatttaggcctaatgaaactgagtttagatttctggaccccagaactgtgaaagaataaatttctgttgtgttaagccccta

SEQ ID NO: 399154 - DNA, 346 bp, Homo sapiens
tagaaaccgctaagttacagaaatcctttctccatcttcacagttgtcagaaaaaataaataaaaaggcttatacaagagcatgaaaatacagaacaaacatcgaacaggaagccaaagccctgaactttagtctatactttattagtcttataccactgggcaaagtaataagcataaaatgatgggtcaaaggtgggttaaattgcaaatattacccacaaaagaatgaacgtaattgtattgatttgactgttagattctgtattatttttaaattctgaatttaacattatacatatgaatctttcacttgatgactttaaaataaacctattttgctgctt

SEQ ID NO: 399155 - DNA, 606 bp, Homo sapiens
gccaaatcggcttgctttttatcctcaagcgagagtgagggtggcggctgtgcggacgccaatcgggatcaccgaataagtgcagtggaaagaaagcacacagccacttaaccaattggccgacatcaaggacttggccttccgagcgggttcttgtgaatatgctaactttgtaaagcgggcgcaccacgctgtgcttgctattcacgcacttccaggagtctcccgcgaggctccacgtcctttcggggccgggggctcccagggcttgcctttcagggcagggagtggcaccagacaagtcaatcccagtcggtttgttcctttatcccttgcgtcaatcagtgttgactgagggcctgcaatgtgcatggctgttgggtggggagctgggtaggacctaggacctaggacccagtgaatctcaaagagggagggtcacatgggtccccatatgcttcactcccagaatctggaatctgcccaaagcagtagagagactttaagtctaccccagcccccacgcctttttaaaaactccctgtgttcggagagcaagtgttttaatattcgttttacagacgtactttcaagcaaaaaaaaaaa

SEQ ID NO: 399156 - DNA, 507 bp, Homo sapiens
gaaaaatatgtagagaaaactgcgtaactcttgggaaaaaatttttttttaaatttgttccaaatttgagttacctttaagggaactcatgttctcctttgacaagtcttcctgatgactaatgtattttcctccctcatgaaatttattcattaagaaaccattttggaatttgcaggggtgaaatgggtgaatcgtctgtgaggctcaatactagctccactaaagtaaacatagttattaaagtgtcatgactgtgtgagaaatagctgagtgttctgtaatttgtaatggagggatagcatggggcactttcttaaagtcattaagcaatttctccaagttagagaaaacacatttgctgcatctgagattcaaagtaggaactttgtgttacaaaactcataaatacttgttgaattacaaataaataattgttgaattacagatggcacctatcatgtctaaaatcctcttccatgcttcccattggtttcaaaacaaaat

SEQ ID NO: 399157 - DNA, 315 bp, Homo sapiens
tagactcagctcggtacctggcgatgtcgcgtgcatgtgggccataggggatgggacatggtgtcggctccttctctggggaaagcacagctatgtggactccaggcagctccctcagctgggtttaagttcctatgaggactgcattggcctgagtgttgaggccttcaactgtccagggtgttaatgtgtgttcctgggatcctttagcttaactccttactgttgggataagtcgctctgtcgcccaggctggagtgcagtggcacaatctcactctgttacccaggctggagtgtggtggcgcaatcttgg

SEQ ID NO: 399158 - DNA, 903 bp, Homo sapiens
atcgccatgtcaggaagtggcattggcaccttcatcctggctcctgtggttcagctccttattgaacagttttcctggcggggagccttactcattcttgggggctttgtcttgaatctctgtgtatgtggtgccttgatgaggccaattactcttaaagaggaccacacaactccagagcagaaccatgtgtgtagaactcagaaagaagacattaagcgggtgtctccctattcatctttgaccaaagaatgggcacagacttgcctctgttgctgtttgcagcaagagtacagttttttactcatgtcagactttgttgtgttagccgtctccgttctgtttatggcttatggctgcagccctctctttgtgtacttggtgccttatgctttgagtgttggagtgagtcatcagcaagctgcttttcttatgtccatacttggagtgattgacattattggcaatatcacatttggatggctgaccgacagaaggtgtctgaagaattagcagcatttttagaaaatcagtaagaaaaatgtacatcttaaggtctactattttacatttctacacagaattttagtgttaatgttccatgtgtctatactgtttatttcaaaactgagaaattcatgggaatgatgtattttgtggaatcaagaacaaaattatagtgggataattttacatcttaaatatttctttctactactgtaagctctactttggaattatctgagtagaaaatcagaagacattatctaactttgtagatacactgtatgattgggctttttgttcagattgtaatttcattaatagatgaaatatttatgctaatattttcttatttcaaaagcaaaataaaatgaatttattgtcctgtgaatggaaaga

SEQ ID NO: 399159 - DNA, 1225 bp, Homo sapiens
agagagcttgcctataccttgattatttcataaaatcacatgttaatacattgctttcagaatgaaatactgacttgatctgataggagaaaatggtaatatttcatagttgttttccaaagacaaatttaaatgttgtctgttatctccttacttagtttaagaatttagttttgaaccccattgactttgtcatttgcaattttaaaaatatttgggactgggcatggtcgctcacgcctgtaatcccagcactttgggaggctgaggcgggtggatcatgaggtcaggagatcaagaccatcctggctaacatcgtgaaactccgtctctactaaaaatgcaaaaaattagccaggcgtggtggcgggcgcctgtagtcccagctactcatgaggctgaggccggacaatcgcttgaacccaggaggtggaggttgcagtgagccaaaatcatgccactgcactccaccctgggcgacagagcaagactccatctcaaaaaaaaaaattggaaggtatctgtaaaatgtcaaagttaagatgaagttatatctgtttggaatagcactttgccctaaatatcatttcttgaattttcaagcctaaagatgtttaaaaatatgaatagttacaaatattcttatacatattttttatcatgatcacaacaaaattttgtttatgtggttctgcaatataatttctgtgaagtattacaagtatttatgaaaaataagcatagtgatcagaaattttaaagattttgtataaaaacatttgggagatttgactttatacatgcatagatttgcattttactttcccttttgaggcagcatttttagaaaatcagtaagaaaaatgtacatcttaaggtctactattttacatttctacacagaattttagtgttaatgttccatgtgtctatactgtttatttcaaaactgagaaattcatgggaatgatgtattttgtggaatcaagaacaaaattatagtgggataattttacatcttaaatatttctttctactactgtaagctctactttggaattatctgagtagaaaatcagaagacattatctaactttgtagatacactgtatgattgggctttttgttcagattgtaatttcattaatagatgaaatatttatgctaatattttcttatttcaaaagcaaaataaaatgaatttattgtcctgtgaatggaaaga

SEQ ID NO: 399160 - DNA, 788 bp, Homo sapiens
atcgccatgtcaggaagtggcattggcaccttcatcctggctcctgtggttcagctccttattgaacagttttcctggcggggagccttactcattcttgggggctttgtcttgaatctctgtgtatgtggtgccttgatgaggccaattactcttaaagaggaccacacaactccagagcagaaccatgtgtgtagaactcagaaagaagacattaagcgggtgtctccctattcatctttgaccaaagaatgggcacagacttgcctctgttgctgtttgcagcaagagtacagttttttactcatgtcagactttgttgtgttagccgtctccgttctgtttatggcttatggctgcagccctctctttgtgtacttggtgccttatgctttgagtgttggagtgagtcatcagcaagctgcttttcttatgtccatacttggagtgattgacattattggcaatatcacatttggatggctgaccgacagaaggtgtctgaagaattagtgtctgaagaattaccagtatgtttgctacctctttgccgtgggaatggatgggctctgctatctctgcctcccaatgcttcaaagtctccctctgctcgtgcctttctcttgtacctttggctactttgatggtgcctatgtgactttgatcccagtagtgaccacagagatagtggggaccacctctttgtcatcagcgcttggtgtggtatacttccttcacgcagtgccatacttggtgagcccacccatcgcaggtaagtttccagagag

SEQ ID NO: 399161 - DNA, 391 bp, Homo sapiens
caggaggggttagggaagttagacgagtgacctttggtaagattcatagtttctctgaagctgtttttctcatctgtgaagtgggacgatgtcttcacagggtcaccatatagcatttaggaagatgccctgcagccagtatattttagtttacttttttctcttgcctcccagccaagatgtgtctgtcctatataacttttcccgcaggattcttctcttttagttgataatgaggtgataatttcgtcggttttgctatctcgttaatatgtttcctttattcagcaaatattgagctgggggctaggcataccacagagaacaagacagatttctgctttcagggagcttacctttctctctgttttcattttaactccctaaacct

SEQ ID NO: 399162 - DNA, 388 bp, Homo sapiens
catggtcataagatgtttatagttgaggaaacaacctaaagattacctgcaaggacagacttctacaaaaacagaaaagcccagatgtcccaatacccataacaagatttgctttcaagataattatgcttttttttaaagatagttatgctttgatgtactcacacagtagaatgtcaaggataggtttctttaaatcaataccataataaatttggtcatgctgtctgcccatccgcatgtaggcacagcttagtttagtctttgtatagacaaagatccctatagaagaaaaacttaaagactatgtgttcctccacttgctttccaaggacactctattctataatggagtagctttcaataaactatctcttctcactgcact

SEQ ID NO: 399163 - DNA, 481 bp, Homo sapiens
tgttttgttgacttcagtatccccagcccttagaacaatgcctggtacataatagagactcatgaatttgttgaatgaagaaattcgttttaaaaatttattttctttgcttccttcattgtctggccttcctactttggttaatgcttatgttttcctgagccttactaacacgaggccgctcttaaaaaagagagagcgctgggtgctgtggtcacgcctgtaatcccagtactttgggaggccgaggtgggcagatcacctgaggtcaggagttcgagaccagcctgaccaccatggtgaaaccccatctctagtaaaaatgcaaaattagccaggtgtggtggcgcatgcctgtaatcccagctactcgggaggctgaggcaggagaatcacttgaacccgggaggtggaggttgcagttagctgagatcgcagcattgcattccagcctggacaacaaaagcgaaactccatctca

SEQ ID NO: 399164 - DNA, 743 bp, Homo sapiens
agtctatattgccctgactggtctcaaacttctaggctcaagtgatcctctcatcttggcctcccagagtgctggaattacaggcgtgagccaccataactggccgtgaaggcatttaggttacaattttatatttccatggcctttttacacacacacatacgtgcgcgtgcacacaaacaaaaaaacacctcacagtttgtctttgccattggtagtgagatcaccagattccgagggagggcaaaaacacactcctaaagaggctccacaggttctttcccagagtagacatgctggatgcaattcatgcagccactcagtgaggaggagcaaacatttatgtagggcctactctgagccagacacagggctcgggactacaggtaccaagataagtggttgctgctcttgagtttgcagcccagagcagaaacacaaggcattgaagtgactcagatacaggtttaaaagggctgcctgctctgaaatcatggatctttgaccaaatctgaagtccgcgcttcctgcacgaaagcagctgcatttaatacattcctacgtgccaagtgccatgcaaagctgtgggatatacacaggtcctgctccctaaggctcagtgccaagtggggaaataaaacaagggcattattttggatataattaaggaaatgagagaaggtcatggggcgtacaactaaccaccaggaacccaagaaaatgtagttctggcctccacctgc

SEQ ID NO: 399165 - DNA, 466 bp, Homo sapiens
atgtaaacatggaaaataatgttcttggaaaatggctcatgaaatgggaaatgcagatatacattattgattcatcacttcaaagttgaaggctattccttgcagcaaaaatcttctggacaaaaatagagggaaaaatcaaccaatagtttgagagaatgcagacacaatctactaaggactgaacagtgtccccccggttcatatgttgaagccctcatccacaacgtaatggtatttgggaggtgattcagtatagatgaggtcatgaggatgggactctcatgctgggattagtgtccataaaagaagagacaccaggaagctctatgcccttctctctgccacatgaagacctggcaagaaggcagccctccacaagccgggaagagcaccatcaccagacccaaccatgcacagcctccaaaactctaagaaataaacatctgttgttgaagccaaacag

SEQ ID NO: 399166 - DNA, 135 bp, Homo sapiens
gaactgaggcatagagaaataaccttacatatttaaataaatgggcctagtagtgaagaatgcagtcattggagctgggctggccagattagagctctggtttcccactcgtaagctgtgtaccttgggaaattt

SEQ ID NO: 399167 - DNA, 123 bp, Homo sapiens
cccacagcatccgaacaaggatgaaaccaattaatatcattcattgtaatcatggcatgccatgtcctacccacagctgataaaatccgacagaaagcattagactcccacaggatgggtaat

SEQ ID NO: 399168 - DNA, 446 bp, Homo sapiens
tatgttaagtgaaggaaaacagacccaaaacagtacataccttacaattccacttatataccattcctgaaaatgtaaaaatatagggacagaaatcatctcctggggctgggagcaatgccaggagaaggggactgactctaaacaggaatgagagaacttttgggaatgaaagaaatgttctacatcttggtggcagtagtggttacatgatacatacatctgtcaaaagatatcaaactgtacatttaaaagcgtgacatttactgtttgtaaattatatctcaaaaaacctaatctttgaaaagtatgcagatattgccaaattcccttccactaactttcttataccatttaatttacattcccaaagggcattctaaaagtgctggtacctttatcagcctcaatattatcagactattattttagacctctccaatttg

SEQ ID NO: 399169 - DNA, 840 bp, Homo sapiens
tgtgatacagcacataaacagaattaaaaacaaaagtcacatgattggagtgttggcaagatggctgaataggaacggctctggtctgcagctcccagcaagaccaatgcagaaggtggatgatttctgcatttccagctgaggtacctggctcatcacactgagactggttagacagtgggtgcagcctatggagagcaagtagaagcagggtagggcgttgcctcacccaggaagtacaagggggtggggaactccctcccctagtcaagggaagccatgagggactgtgctgtgagggactgtgttatctggcccagatactatgcttttcctacagttttcacaacccacagaccagaagattcccttgggtgcctacaccatgagggccctgggtttcaagcacaaaactgggcggccatttgggcagacaccgaggtagctgcaggagttatttttcttacctcagtggcgcctggaaccacagcaagacaaaaccgctcacttccctggaaagggggctgaagccagggatctaagttgtctaactcagtggatcctacttccatggagcccagcaagctaagatccactgggttgaaattcttgctgccagcacagcagtctgaagtcaacctgggatgctccagcttggtggggggaggggcatttgccattactgaggcttgagtaggcgttttcccctcacaatgtaaagaaagccatgtgggaagttcgaactgggcagaacccactgtggtgcggcaaagccactgtagccagtctgcctttctagattcgtcctctctgggcaggcatcataaaggtacataaatc

SEQ ID NO: 399170 - DNA, 106 bp, Homo sapiens
attttgcaaagaattttttctgccttaacagaagacacaggattcaattgtatatatgtaattctatgtatcttacaggctcagcaaagctctactcattgtctac

SEQ ID NO: 399171 - DNA, 165 bp, Homo sapiens
acccacaagcatggctaatttctgaatacctctcatactgccttgctttaaaatgaacttggaataaaatttcaaatgcccggtgacaataatgagacacgcagaggcagcttcaaagtttggaaacccaccaggacagcacaagggttcagaaagatgatcaat

SEQ ID NO: 399172 - DNA, 573 bp, Homo sapiens
tgcaattttaccatgtacttatggccaagcactacatagtcaacagacctcattaagttgtcaaaaagcattctcaggctgaggacgttaggcaacctggctttagttggcagaggtgcgtggacactgccaaggctcctatttctggttccagtggatgaggtggaggaggattatttgtaataatagcaaacagccaggtgcggtggctcacacctgataatctcaacgctttgggaggtggaggtgggaggatcacgagcccaggagtttgaggccagcctagacaacatggtgagactccatctctatgaaaaaattaaaaatcagctgggtgtggttgcgcgtgcctgtagtcccagctactcaggagactgaggcggaaggaacccttgagcccaggagttcaaggttacagtgagctatgatcgcaccactgtaccccagcctgggcaacagagtgagaccctatttctaaaaagagataataatagcaaacacacattgagttctaaccaggtgccaggcagtatactgagggcttaaatgcagcatcatgtctgtttctcacag

SEQ ID NO: 399173 - DNA, 623 bp, Homo sapiens
tgcatttcccttagcctactggctgacaggaaattgttggaattggagtatttcctagtttaggcagaatcctgattatagaatttcttgtctcttacaaggcgtgttacctcttttttttcttcttttttctttattctttctttttcttcctgttcactcctgagatcttactccattttaagacagttctaagtaagacttagctgcaataatctacaacatatggcttgtgaggaagatggaggaatgatttccattatttgtctgttaaagtcctttggaagagtttactgaagggccacgtaagaaataagttaatataatgaaccttgaatgtagtggtagaaggtaccctgaagagtagccggttttggtgggtggtctgggtgatcttcccaggtcagctgctgtaccttgtgagtgtcaaggatgagaagtgagtcaacaggaggaatggctctctaggccagcgctgtccaacagatatataaatatgagccacacatgtgagctctatttgttattttaaattatcatataactacgttaaaaaactaaaaagaaacattaattgtaatttttaaatttgacttatatccaaattattatatcatttcaac

SEQ ID NO: 399174 - DNA, 167 bp, Homo sapiens
caagagcaaaactccatctcaaaaaacaaacaaaaaaaatgttgcattcatcattgcatctgaacattttaagaataatctttcataaaaagttggcagttgcacatgaagttcaacatacacttagcatatgacccagtgattccactcctttatgcttatcttag

SEQ ID NO: 399175 - DNA, 300 bp, Homo sapiens
aggtgggggcaaagggaaattacccttgaagattgcacacagagaaaggtgttcaagagtcatttagaaccacaattaaaacaaattgttgaatggaaaagggaccattttcctaagttttccctgatgagtgaaagtgttatgtgacttattattaatacatttctcaaaaatggcttatttccaaatcagatgcagttctcttcatcatggatgagagttaggttgtcttttatgatatagcattttctatacatacacagtcaaaaaatgtgggccattttcttctttacctctcta

SEQ ID NO: 399176 - DNA, 451 bp, Homo sapiens
cctggggttatttttagcagggatgcagggaaggcacagttctccttgactttaactagggacaacccccacccctcagccaagactcactggaggaggccgggtacggaaacccccctcccagaaaggggaaatggtgtgttttctgttccttcaattcactagaatgggagttgcagtcaagcttggggttgaactgatgggaaattctaggttccaaagcctgtgggctctgccccatccctggtctctgtgtttccatgaatccgggaagcaagaggcacatggtgtctggagtcgaggtgccctgtctgtgggtgttggtgtccctgggaaactgcttggttatagccaggctctgtggactacacaggggcaccaggcattgtgggtggtgtttcacaggcgctggctaaataattcattaaactgagcatgtccgttccgtgta

SEQ ID NO: 399177 - DNA, 432 bp, Homo sapiens
acagtctgaggtgcgcggactctcaacatcaggttccctcggagaggctaagaccccaccgcccgaaccccacagtcttggcgggagaaagacgccccccaggagcacctggagggagggaagaaagccccccgcccctggacacggtgaagggcagaaaccacggacctccaaatcttggagctggaggctcagactcccctctctggaacacgagggcgctgggagcgcgacccctgagaactgcccgaatccagttccgcctggaacagggctcgggtccccaggggcccggcgtgagctccgtcgccgccgggcggctgcgcctcggagatcggggaagctgactgggggtcaccccgactcctctgcgccccccacccggccatattgtgctcgtggggagggggcgcgctgtagtccagcggccgc

SEQ ID NO: 399178 - DNA, 472 bp, Homo sapiens
acgcgtccttccgtgcctccatcgttcgcgcctcgctccaggagcaagaggggcagccccggccacagtccccgcggtcgcaagtgcgcccggaggccgacccgggcccctcaccactaaccaaaatgagcgcagaaaacgagtaccgcccgccgtcgccaccgaagctggctgcggagcgcgacaagccctcgccgcggctccggccccgaggggtccccgtgcgcccggcatagcccaggacagttcccagcgcgcgccgcggactcgggggacagcgcgctcgggggccggcagcctccagcgtccgcccggcccccaccgcccagtgccccggcccgagggacccgcgcgccccaacaaagttggcgcaggctctccggggaccgccccccacacggccgggtgcccgccggcgcgcaggcgtgggacgcggggaagggcacggggccgccgtcggggctcgcggccg

SEQ ID NO: 399179 - DNA, 394 bp, Homo sapiens
ctttcctctgtatggctcagaccaacgtttgtcttctggtcataggaaattatttccataaataaaatggaaccataaatgtattaagaagatggcttcactttttcctcctgccacatttatccctccatcctttctggcttatgctaacgtctccttcctgggagtgaggaatgatacagcaaaccctgtccattttctccttcctgggagtgaggaatgatatggcaaaccctgtcagttttgtttgtgatcacattgttacacatttatggttttggagcaccctaagcaacctcatctgcttctcacagataggagattcacttcctcagggaagcattcccaccttctctgactatgggagaataatattttccttttgattcaaggt

SEQ ID NO: 399180 - DNA, 394 bp, Homo sapiens
aatggaaaaccagttaacatggtttattcacccaggcctgagatccataatgaaggccatttttaaagttgagtcaccacaggcttgaagactggttaggattggggaactgagggttagagagtaaagtagaagggatggcacttttcttgataggagataattattgcagatattagtgttaagacctattctttttagtatttttttaaacacaaagtaacacctccatgttaccagcaatatttcacatttcaccagtgttcactaagcacctattgtgtgccagttcctatctgctggaagtgcacgattccgtgggctgtagcgagcacagtagcagtccattgggcccaattactgctgacctgagcaatctgttaaaacccggaaa

SEQ ID NO: 399181 - DNA, 364 bp, Homo sapiens
gagtgacaccatcagctctcccggttcttagaccttcagactcagactgagttacaccactggcttcatgggttctccagcttgcagatagcatatggtgggacatctcagcctctatcattatgtgagccaattcccataatgaccccccttttatctatctatctatctatctatctatctatctatctatctatctatctatctcatattggttctgtttctcaggagaaccctgactaatacacagacatatccaggagtaatgtttcacctgttgtctgggtatcccttaattcagtcaagttgatatctaaaattaaccatcacactaaataaaccaggtagtctcatttaacatttt

SEQ ID NO: 399182 - DNA, 471 bp, Homo sapiens
gctgagaaaacacttgccatagagtgcacatactgtaggaaagtacaaggattattctccggctgtcacccagcactgctaacttagaattatagataaaatatgctgtaattttaataattaatagctgactatgcaaaaatattattttctcctagcttcaaccaacaggtaacatatctgcctttcatgtcaggtactgtgctaggtactaaagatataaatatgaacaaattatagtctctgtcctcaaagagctcccattctgattggacaaacaggcaagtaagccatccgagtatgatgtggaaagtgtctgataaaagcatgtctgggctattacaggagtctaacctcactttacctgagcaagttagtaaaattccctccccttcccccaaaaatgattggtttgacacttaaagatgaattggagggagaaataggaatttatcagatggacaagacggc

SEQ ID NO: 399183 - DNA, 310 bp, Homo sapiens
acgagggtgctacttcttaatggagacagagaggagtatgttgagaatccaaaagatttattgggttgtcttttaatagttccacattttgtgataaaagttaatgggagactagctatagcaacccaaaaacacaagaccgcacatcgcttcaggaataaagggctcttcaggaataaaagttgaggtcactagtatagagtcttgaatgtcaagagttggagaagctgagactttactgcaagttaacaagttagcctgtcacagtttaatgaatgttgccaaatggcatgagattcttgggataggc

SEQ ID NO: 399184 - DNA, 539 bp, Homo sapiens
tgaataaagaaattgaagcacagagctggtaagtaacttgcccaagctacacggctgataggtggttaaactacaatttaaaagaaagccacatgtctccagaacctgtgctatcagcctttaagctgatagcaacctgtcacagacacacagtcattgtccccagactttcacaccgtgctctaatttgttaaattgagttgggtttgaaatcatgcacacatttcctctgacctttttcaatggtctatttcttcttactgagttccctgtttccctatctgctacaacccattgtcttctttttggagaaagtcttcttttaagtctgtgtctttttctgtcctttggtctccatttgagcgacccatgcccatcaagtgtaaaacctgcttgactgaagagagaagaacccacagctatgggattgtgcaggagtttgagttataagatcgttgaatatagtcagacgtttttgctgctgttgttgttgtcttaaataaatgtctaaggtaggagaaagttgttagatgtctttg

SEQ ID NO: 399185 - DNA, 265 bp, Homo sapiens
gtacaatttctattattcaaatgacaaaacccaatatcttcctccacattctccgtctttgtgctgaataagcaaatcttttctccaggtcaaaagtggtaaaataggtgaaatccacagagataatgaaatacaactatgggtaatataaaaaatgatgcagcattattggcagtcgtctctcagcctgcttttaggtttgtttttacctttgatcttatcaaaaaatatacaaaatatagctacttacatccatactctttaa

SEQ ID NO: 399186 - DNA, 160 bp, Homo sapiens
aaaattgttaattacctgtactacttgtgaaatggtagtttttgaaaatgaacttagatcagttgtaagtatatattacaaactgtagtgcaaccactaacattttttaaaaacaaatgtagttgatatgaaaatataggggagaaaaagaaatcagata

SEQ ID NO: 399187 - DNA, 459 bp, Homo sapiens
gaatcacttgaaccagggaggtggaggttgcagtgagtcgtgatcccaccactgcactctagcctgggtgacagagccagactctgtctcacaaaaaaaaagaaaaaaagaaatattaatctaatggatgcaaatattgttgaccctgacagcaaaactatggacacgctgattgcaaaagggttggcctgggctttctaggttgttttgtcacttccttcttgcttttattttgttctacatttccatttcttccttttcttactcttcctttcaccaaagaacttattcctccttctttctctcctctcaccccttagccatatgaggagtttcaagaaatgacagagtgaggaagatttctccccgggaatccacaaacccccatcacttctgcctccagcattagccacagactgtggctgggtttggggagacactggacgcctaatattctgt

SEQ ID NO: 399188 - DNA, 225 bp, Homo sapiens
tgggattacaggcgtgagcctccgcgcctggcaaacttccgttttttcattttcgaagtgggattgttgtgatctttgatgacaatgttcttgcagagggatgcctgactcccaaaaataagatataaagcactgacaagtaagttcctaattagagttggctgttatgacagccctaattatcttttttagtcctccttcctaaacatacacacacacactacc

SEQ ID NO: 399189 - DNA, 533 bp, Homo sapiens
actttgtgtggatgcagcatgactgtgagaatcacacgcctgcggggggcatgtgtgtgcacacacatgtgcacttttgtgtgtgtgtgcatgtacacagttgtgcccctgcacttcgcgtgactgggaatgtgcacctgtgtgcacaattgtgcatgcccgtgtatgcatgtgccttgcacttttaaatggagcagcagcaggtgaagtggggctctcctggactggcccccagtgtctggcgcctgcactctggagcagggcagttcactccttctaggttttcctacagaggacttcccctgctctgctttcatttacaggaaaacaggagtgccctgaaaaacaagttttgctgaaattcaaaactatcttccaaagtccttgcatctgaatcctgaagactccccagtgggtgagcccagaaacaagaccaccttctacgcgggagggtctctcgttacctaggcgccgtgtgccctggggtgagccacacccacggaacccaggtcactgaagcccaatccctgcag

SEQ ID NO: 399190 - DNA, 461 bp, Homo sapiens
agacaaaaccctgacatgtgaacatttactattatttaagctggaaacaaactttaccaaatgaatactgactataatttgctttaagttactttctagcttcctagtggaaatacacagaacagagcttcttaaaaaatgcccttttgggccaggcacagtggctcatgcctgtaatcccagcactttagcaagctgaggtgggaggattgcttgagctcaggagtttgagagcagccttggcaacactgtgagacctcacctctactaaaaatacatttttaaaaaattagcctggtgtgatggcacacacctgtagtcccagctagtcaagaggttaaggtgggaggattgcttgagcccagaggctgcagtgagcctggagatggaggatgcagtgggccgagatcacaccacagcactccagcctgggcaacagggcaagatcatgtctcaaaaaa

SEQ ID NO: 399191 - DNA, 161 bp, Homo sapiens
ccattcaaacaaattgttctaatttatagtttctgggaacttttggaaaaatggatgagagccccaggttacctgagatgctgttacatattttaatggtgctaacaatgtatattttgtcaaaatgaaacaggattttgaaagacttcataacagttgta

SEQ ID NO: 399192 - DNA, 627 bp, Homo sapiens
cacaaaatttaaaaatttttatgatatccatttctctatttttctttgattgtctgcacctttggtgttgtatccaagaaatcattgccagacccagtgttgtgaagctttgccctgttttcttctaagagttttttttagttttagcttttacattttggtcatggatctcttttgagttcatttgtgtgtaatttgttaggtaggtgagggtccaacttcactgttttgcacacggatattcagttttcccagcaccatttgttgaaaagtatgtattttccctgttgaactatctcagcacccttgttgaaaatcgtttgatcataaatgggatttttttttccttagggctctctattctgttctattagtctatatattttaataccagctgtggttttactttttaggttaaatcttaaatccatttgtaatttgttaaaaggaatgaggtatagggatcagcttttttcttcagatcatgtagctaatccacattattatcattctccattgatttgagatgcccacttttataaacttttttatatatggatttttaaaaatgtattcctttgatctttagcactctgttcctaggctaatcccatactattttatttt

SEQ ID NO: 399193 - DNA, 425 bp, Homo sapiens
ggatcctgagctcagtgatctcaaacaaacaaaaaactaagtagcacattgaaagaattgtgttaagagttagcactactcagtattaaagtccaagcagctaaacagatagaagctatgaaacttagcagaggttaaataactattgcaaaaccatagtgatgactattctaagttttctcaaaacttctctttggtatgttgttgttagattttgctttacattttaaccttcaacatttgttcaatgtatttattatatacatctctttctatatttatagatctagttatataccaaagaatggtatgaccagacatggtggctcatgtctgtaatcccaggcctgtgggaggatcacttgaggccaggaatttgagaccagcctgggcaacataggaagaccccatctctacaaaaaata

SEQ ID NO: 399194 - DNA, 586 bp, Homo sapiens
ccctgtctctactaaaagtacaataattagcagggcatggtggcaagctactcaggaggctgaggcaggagaatcgcttgaacccgggaggcagaggttgcagtgagctgagatcacgccattgcactctagcctgggtaacaagagcgagactccatctcaaaaaaaaccaaccaaccaaacaaacaaacaaaaaactaagtagcacattgaaagaattgtgttaagagttagcactactcagtattaaagtccaagcagctaaacagatagaagctatgaaacttagcagaggttaaataactattgcaaaaccatagtgatgactattctaagttttctcaaaacttctctttggtatgttgttgttagattttgctttacattttaaccttcaacatttgttcaatgtatttattatatacatctctttctatatttatagatctagttatataccaaagaatggtatgaccagacatggtggctcatgtctgtaatcccaggcctgtgggaggatcacttgaggccaggaatttgagaccagcctgggcaacataggaagaccccatctctacaaaaaata

SEQ ID NO: 399195 - DNA, 375 bp, Homo sapiens
aggtcaaggtaggaggataccttgagaccaggttcaacaccagcctgggcagcatagtgagacccacatctctatttaaaaaaaacaaatcaaacaaacaaaaagaatggtctgaaactggggctatccaagctgaacattgaaagcactatagctacagcaaagaagtagactattatttaaggcaatattatgagttcagtctctgcttggctcagagaggaactgtaaactcctctttgccattggtggcctttaggccacacatcactggtgttggcaagattgctttcaaacagattcaaaacggattgcatatgattctagagggtctagggtcatttaataaaggtgctgctatgcacatgcttgaag

SEQ ID NO: 399196 - DNA, 411 bp, Homo sapiens
ttccatgccactagaaagccgagcctgcagacagccttgaagaaacaggctggggagaagacaaagcattcaaagctgcaattcctgcccaaccttcaggtagaacattcagtggacagtttggattgtggaactgaggcctggagcaaaggtcaaggctgagggggcagacatggtggtacatttggctaagttggtggacaaactttgaagggagtaaaactccccaagagaaactaaaaaggaacaagaataagcagacctcttttatttatagtactgtctgtaattttcagaatattttttcttttctcctttgatcttagagccatctaatagctttgactagataccctggtatttttgttttctatctagaaaaataaaaaattgataaatcatcataccctt

SEQ ID NO: 399197 - DNA, 398 bp, Homo sapiens
acccagcctcagtccctgaaatgtaacatttccttccagtagtggttcccaaaggtgttgtatgagaagattctatgtgtacactgatgcaagttgtcaattttaatgactgtattagtctgttctcacactgctaagaaagacatacccaacactgggtaatttatcaggaaaaagaggtttaatgaactcacagttccacatgattggggaagcctcacaatcacggtggaaggtggagtaggagcaaaggcacatcttacatggcggcaggcaagaaagcttgtgctggggaacccctctttataaaaccatcagatctcatgagacttattcactatcacaagaacagcatgggaaaaacctgccacccatgattcagttacctcccactgggt

SEQ ID NO: 399198 - DNA, 762 bp, Homo sapiens
  misc_feature (28)..(28): n is a, c, g, or t
  misc_feature (33)..(33): n is a, c, g, or t
  misc_feature (36)..(36): n is a, c, g, or t
  misc_feature (41)..(41): n is a, c, g, or t
  misc_feature (44)..(44): n is a, c, g, or t
  misc_feature (46)..(46): n is a, c, g, or t
  misc_feature (52)..(52): n is a, c, g, or t
  misc_feature (54)..(54): n is a, c, g, or t
  misc_feature (61)..(61): n is a, c, g, or t
  misc_feature (68)..(68): n is a, c, g, or t
  misc_feature (82)..(83): n is a, c, g, or t
  misc_feature (105)..(106): n is a, c, g, or t
  misc_feature (109)..(110): n is a, c, g, or t
  misc_feature (112)..(112): n is a, c, g, or t
  misc_feature (117)..(117): n is a, c, g, or t
  misc_feature (119)..(119): n is a, c, g, or t
  misc_feature (121)..(121): n is a, c, g, or t
  misc_feature (139)..(140): n is a, c, g, or t
  misc_feature (167)..(168): n is a, c, g, or t
  misc_feature (171)..(171): n is a, c, g, or t
  misc_feature (204)..(204): n is a, c, g, or t
  misc_feature (207)..(207): n is a, c, g, or t
cagcaagggaatgaggagtgtttcgacntcagnaanatgangantnaagacngnacgcgtngcttcanctgactgcagccannattgcagatgggctcgttttgnnacnntnccccnantntcgacttatctaataggnnggtagataaggacagcatccgcagtgnnggnccagttgtggtgctggtgcagctggacgagagnagnaagtcacaggccctgtcattgcgcctctcttcccgcagaaacgtgaagagggctggtgggtggtgattggagatgccaagtccaatagcctcatctccatcaagaggctgaccttgcagcagaaggccaaggtgaagttggactttgtggccccagccactggtgcccacaactacactctgtacttcatgagtgacgcttacatgggatgtgaccaggagtacaaattcagcgtggatgtgaaagaagctgagacagacagtgattcagattgagtcctgaggcatttacttttgggtaaaggagagttgagcctgaattaggaatgtgtacattgtaggaatcctggttgtggggaccaggtctgtgggcctcaggtctggccagccagggctggtgctgtccccgcctacctccacttcctttcccttgctcactctggatccagtgacagcaggtgtcatgggtcaagcataaatcatatatagcattttcaggcatgttcctggtagttcttttgagtctgacattctaataaaataatttgtagaaacc

SEQ ID NO: 399199 - DNA, 419 bp, Homo sapiens
ttcctttatgctccatacttactgcatagagaccttcttgtttttcctttatccatttttaaatgtgactctttcttaaattctgaaaattgacacagattagttgccttacttctctggtatacacttgaattccctagttagaagttagttggagcctggatgttggtgtttatgttgtttctatcattcaggtgctatgatgagaggggattaagaggggctatgagcagcgacagtcaggatgcttaactctgtgcctcccttggtaatatgttcacgaggaggggttgggttgacagctttctgattgatatagcggcccattctcctttctttgccatatttggtgctcaactacagcagtaatccccagctaaaacaatggccagaggcaacagagcaagacactctcaaaa

SEQ ID NO: 399200 - DNA, 191 bp, Homo sapiens
tagcaagcttttagctgactttcacatcagctctaaaccctagctttcccctaactgccccaagcctagtttgtagtaggctgagtggcaacctagcccaaagtgggattatgatactccaacttagttgtggttgagttttatgtaaacatttttgtcgctatttcatctggcttttctagataaaatgt

SEQ ID NO: 399201 - DNA, 519 bp, Homo sapiens
aactttttccaaatagggtaaactcgtgattttgcgagaaaaggagaaggggaaagaagaagggatagggttgatttacagcttttacaacttatgaccaggaagttgtctttgaagaggaacttcgttgtcccaacaactccttacctcaagtgatccacccaccttggcctcccaaaatgctgggattacaggcgtaagccacctaggctcgccccataaatttttaataggagaaaagagaaactgtcaaccccatggtccaaagctcttcccattcatggacccgcaccccgagtcaggattctcccctgaccaccctcccgtggtccctgcacaatctgggagagacgccacactgcaggcgcagagctgcccagacagggctccaggccagggcacagtcgctgcacagggaagaggcaggacacccaggtgtggggaaaaggaagagagatcagatcgttactgtgactatgtagaaaaaggaagacaaaataaactccattttgatctcta

SEQ ID NO: 399202 - DNA, 587 bp, Homo sapiens
aagtgttggtgagtgtgtagagaaatgggagccttcatacatttctggtgggaatatagaatagtgcagctactgtggaaaacactttggtgtttcctcaataagttaagaatagaattaccatttgactcagcaattcctttcttgaatatacactccaaagagctgaaatatgttcacaccaaatttgttacataaatgttcaaaacagcattatttataacagccaaagagtgaaaataacccaagttgatgaatggataaacaaaatgtggtatatctatacaatgaaatatatgatttatcaagaaaagaaatgaagtactaatacaatatgaatgaactttgaaaacatcatgctgattaaaagcagccagtcatgaaaggggatgtatgataggattccatttgcagaaaatgcctagaataagcaaatttatagagcagaaaatagattagcagctgcttagggctgggcattggggtgaggtgggaatgggcattgactactaattgacatggggttttctttagtgaaggacaaattgttctaaaattaggtgataataatggctgtacaatcctgt

SEQ ID NO: 399203 - DNA, 440 bp, Homo sapiens
aaacagagtcccagttactgccagatgtgggagctattgtaacctgtaaggtctctagcatcaattcacgctttgccaaagtacacatcctgtatgtggggtccatgcctcttaagaactcttttcgaggaactatccgcaaggaagatgtccgagcaactgaaaaagacaaggttgaaatttataagagtttccgcccaggtgacattgtcttggccaaagtggtgactagatctccttaggtgatgcacagtccaactacctgctaaccaccgccgagaacgagctgggagtggtggtagcccacagtgagtcaggtatccagatggttcccatcagctggtgtgagatgcagtgccctaagacccacactaaagaattccggaaagtagcccgagtacaacccgaattcttgcagacctaagaagccactttttacc

SEQ ID NO: 399204 - DNA, 731 bp, Homo sapiens
aggtatagtgtgcagcatttctcatacctgtttgtccataaaaccctcagctgcatctcacaggattcatgttccatagaccatgtttgggaaatgctcctctatgctaataaaaagaacaatgttcttgtacagacttcatgggagattttgacagagcaggtctttaatgagcactgtcctaaaccttgggacaaaggctgataaggctcctggaggtagaaagaactctgtctttcaaaatgcaagccacataccgtggctcatgcctgtaatcccaacatttgaggaggccttgcacacatcttcacaagagcatgtagcatgcctgatgtaatgtcacgtccctgaatcccttgaaccccggaggcagaggttgtcgtgagccgagatcacgtcactgcactccagcctgggccaacagagcaagaccctgtctcaaaaaataacaataatgataataataataatgtcatggccctctagcacagagccccgtgcataatcaaagcttggtaaatgttcgtttttgaattagttgatttagcccaactcttttcactttatagaggaaaactaaattctgaaggacagaggagaccaaaatatttatggaagagctgaggctgcaccccagatccccagtttccggcttcctggttcacattctagaaaatacttccctcggtaccaggagacctcccacttcccatctcatcagtcccagcttt

SEQ ID NO: 399205 - DNA, 736 bp, Homo sapiens
agtgattggcaaatgatagctgttatttcattgcgtggggacatctgggaggagcgagaagagtcacagccagttacagagcagagaacactggactgagaagcagatctgaattcaagcccagttctgctacttaatagccgtgtgtcgttagacaagtcccttgacctccaaccaatgggaagaacaacgcgtctctcagcacagttgtgacaatgcctgtgaaagcacacggtgtccaagggctgccaaagtcaggcattgtttcacagactcagaatgtgacagcggcaggaggccttgcacacatcttcacaagagcatgtagcatgcctgatgtaatgtcacgtccctgaatcccttgaaccccggaggcagaggttgtcgtgagccgagatcacgtcactgcactccagcctgggccaacagagcaagaccctgtctcaaaaaataacaataatgataataataataatgtcatggccctctagcacagagccccgtgcataatcaaagcttggtaaatgttcgtttttgaattagttgatttagcccaactcttttcactttatagaggaaaactaaattctgaaggacagaggagaccaaaatatttatggaagagctgaggctgcaccccagatccccagtttccggcttcctggttcacattctagaaaatacttccctcggtaccaggagacctcccacttcccatctcatcagtcccagcttt

SEQ ID NO: 399206 - DNA, 301 bp, Homo sapiens
ccccaatactaagcccattgccaagccatgtttattttatctcttaaggttcttccaactctgattttctccacccagtctaccagcaccctacttcatgctgtcttctctcttaactaggcctctatcatggtcttctacttggtcttttacatttacttttgccagcttacaatacattatctaccctcttgtcagagtgatcttttcaaaatgcaattctgatcacgccattctgcttaaacccttgtgtgttgttgccttgctcacaatattaagagcaaaatccttaccatggtct

SEQ ID NO: 399207 - DNA, 402 bp, Homo sapiens
ccctttgtgaggcccgggatgggaggctccagcgccgtaggactgaggcagactccacggtgagaaagagacccgatctaacccaggcctttcatcagagcccaggagggaaggcaggaagtgggaccacgaggcccggggggcttctaactcgtctggccagggagatctgaattggggtgaagagcagaatctccagaacaaggaggaggtggtgatcatggagacagatttggctgaaatgcctgagaaaggagttctgtcttcccaggattctccccatttccaagagaagagcacagaagagggagaagtggctgctctgcgcctcacggccagatcccagaactgcctttttgttgagcacagaaaacgaaggaaatttgcatttccaatgtcctt

SEQ ID NO: 399208 - DNA, 814 bp, Homo sapiens
tgtcccttctcactctggcctgatcctctcctcgggggacgcggttgtgccacgggcggggtggtcgcggggtcctgggccagtgccccgagcgcggcagaatttgtccaaactcctgatgccccagcgtcacctcttccaggcgcccggttcccccagggacagcttcaagcggtagggacagacatctgaggacccagcctcagggatgctgtccccgggcttccaggctccagcgccgtaggactgaggcagactccacggtgagaaagagacccgatctaacccaggcctttcatcagagcccaggagggaaggcaggaagtgggaccacgaggcccggggggcttctaactcgtctggccagggagatctgaattggggtgaagagcagaatctccagaacaaggaggaggtggtgatcatggagacagatttggctgaaatgcctgagaaaggagttctgtcttcccaggattctccccatttccaagagaagagcacagaagagggagaagtggctgctctgcgcctcacggccagatcccaggcggcggcggcggcggcggcgcccgggagccggagccttcgcggcgtccacgtccctcccccgctgcaccccgccccggcgcgagaggagagcgcgagaaccccagccgcggccgggcgggcggcgaagatggcagaggcaccggcttccccggccccgctttctccgctcgaagtggagctggacccggagttcgagccccagagccgtccgcgatcctgtacgtggcccctgcaaaggccggagctccaagcgagccctgcc

SEQ ID NO: 399209 - DNA, 468 bp, Homo sapiens
tgagtactatagcttggtagtatatttcaaagtcaggtagggtaataactttagtgtttttttttcttgattgctttggctatacaggatcttttgtggggtatcatataaattttagatatatttaatttttattaagtatgtcactggtattttgataaaggttgtgttatatctgcagattattttctgtaatatggatatttaacaatattaatgccaattcatgaattagtactatttaattggtttagtatttaatttcttcctttaatgttctttagattataatgtaaggtgttttaactttttggttaaactgatttcaaagtgtagttattacatttattgtagatgagattgcttttaatttcattttgagatagttaattgttcttgtgtagaaatgctactgactcgtgtgttgattttgtattttgcaagtttaataaatttgtttattagttc

SEQ ID NO: 399210 - DNA, 386 bp, Homo sapiens
caattatgtaatgtcctaaatccccaatacagcatcatgcaaaatagtttcactgctgaaaattccctgtacttcaccatttcgtgcctcctcctctcctccacccctgacaaccactcatcattttactacttctatctttttgactttccaagaatgtcctagagttggaaatacagtatgtaggtttccagactggcttctttctagcattatgtacttttaagttcctccacgtcttttcatgacttgacagcttgttttgtaaaatcactgaatcagatttcattgtatggctacaacacagtttgtttattcattcacttggtgaaagatgtcttgggtacttccaagttttgacaattatgataaaattgctgcaagta

SEQ ID NO: 399211 - DNA, 438 bp, Homo sapiens
tcttctaatgtcaatctagaaacttgttttagtagtgcattttgagagaaaccatttggtatcatcttgcatggaaacatccgcttccttaggaatgaccaaaaactataattagtgataatgaatcttttatgatttggcaagagtgttttaagtggagttcttttgatgatatgattgttcaggtcaggctgaaagagccccaataataatgtttttctgactgttttcctctggtaatgtttgtgataaaattcctttgtcataaataaatattgttgctggtgcagactgaatatttgtattcccccaaaattcacatgtcgaaaccctaacccccaatgtgatagggtttggagatggggcttttgggaagtaattaaggttagattaggtaatgagggctggtccttcatgatgagattggtatccttatta

SEQ ID NO: 399212 - DNA, 161 bp, Homo sapiens
atgctcagaaaccttttattccactttgtatccaagatttcattaaaacattgttccttagagcatactttaaaaactatttggtaaggaatccactgttgaacttcaggtcttaatagcactggctttggtgctaaactgagttgaattccaagcctgtt

SEQ ID NO: 399213 - DNA, 187 bp, Homo sapiens
agcattttgtgattttgtcagtctgccactcaaaagaggtgatggcagattatagccagctagaaacagctgcaaaacgtgtattgtgagctgtgcctcacttctgtagtgtgtcacaatgctttatagtcctcaagaaacttgacagtcaaatgcaatgcatgttccttgcttaggggatagatcc

SEQ ID NO: 399214 - DNA, 538 bp, Homo sapiens
caatacaagaatgggcaacttctcaagcccaacttagcttcacctatcatcaggacctctctatacaaaaaccttccctctgctaacataatatttttaatacaacctaaagcagcttttaaagattttcttaaacccacccccattgattcaagccccttgttctcccctgctaccctcattggccaggcactcctatacatctgtgctactgtaaattccagatccattgtgggtgctttagacccagcacaatgcaacacaacaagcaccattattgatatttctcaaaattttgtttcactaaatattctcaacatcaaatgagattttctattctccctccaaatgttttaacacctggaccattcatccaaaatgatgcctctgagttctgcgtcagtcacccttcttggagtcaacccaacccatggtgttgaccaagccagtataaattatgcaaaaggtttcaagtctttaatttctttcagaaaatccttttctttgacactactagaaacatgcctatgtttaaaaa

SEQ ID NO: 399215 - DNA, 650 bp, Homo sapiens
cctaaagagaactaatcattatgcatctatagtattgtattttttattctagtctaagcttaatattactaaattgggaggtcctaacataagatctagatatctttgtctatgccttagtactaagaacagagtataataggctgggcacagtggctcacacctataataccagcactttgggaggccaaggtgggcagatcacctgaggtcgggagttcaagaccaggttgaccaacatggagagactctgtctctactaaatatacaaaattagccaggtgtgttggcacatgccgtaatcccagctactcgggaggctgaggcaggagaattgcttgaacccgagaggtggagttggcggtgagccaagatagttaggaaagatgctggtatggttattttttaatagtaataacatcaatacacatatcagatagataagatagattaggacaaagcaaataatgatgtcataaaatgaagtaaatcttaaaaccttaactttgaattgggtatgtcaaaatgaaaatattatttaatttcttatctcaaaaaatgtttcctactagcctctgaatcagtatcaactcagtaacactgagcatccctaccacccagattgtggtcttcaaataccattttccact

SEQ ID NO: 399216 - DNA, 570 bp, Homo sapiens
ctggaggtaagcaggtccagagtgcatgtcatatgccaccaggtcaggaccgtgaacaaacctgaggctgggcactagatcacttgctgtgttgagccaccatgcctgccaatgcccttagctctgtgaggatgtaaaatcaggtatgtgtgggctgctgtgctgggtttccagcaggcacggagctgttcgcaggctcaagaggggtccaatggccatcaaaacccacatgtccaggagtcggtggctgaaaccacaaaggagctccagtcaccttaaagaaagatggattctaccaatggcagggttcaatggtcccaaaccagccaggagatgccaacgcttgtggagctgaacagacacatactgaggatgccttcataaactgctcacaatcagggcttgaaatacagagcaacccaggaaggggaggggggtacaaaccttttgttgctcctggctcacagtgagataggagtttggcaggactagttttgcaagacaaacaggaggctaggtccccaagacacaggtcacaataccctcttgataagacatgattccttttaa

SEQ ID NO: 399217 - DNA, 390 bp, Homo sapiens
cacacggtggggggcaaagcccatgtgccttggggaagagaatcccttaagtcagcgtgagctgagttctgtagcattgagcactgcagactactcagcccttatagccctcttccctggccttcccaccctgctccccactccacctcccctgtggttttcttcctgcctctctggccatttcttcattttctctctctctgtctctgtttttctcttttcttttttttctttctttctctctctttcttttctttctttctctctctctctcctttcttttctctctttctctctctcctttctttctctctttctctctctttctttctttttttctttctttctttcttttcttccttccttctgtccttccttccttccttcctt

SEQ ID NO: 399218 - DNA, 406 bp, Homo sapiens
ccatgggagcctacctcttgcatcagtgtgacttggatgtgagggactctgtgagggggtcccaaccctacatttcccttctgcactgccctagcagaggttctccatgagcacctagcccagtgttggggcattcagtattaacataattaataagaaacaattcctttcttattaggaaagattgggctctcgccctgataattcgataacagaaatcagataaatacctaggtaacaaaaaccgtgtcattcattcagccaacagtttattcattcaacttagagatctcgtcaatttccatcaggtgtttcccatctgatgctctcaatcaccctgaagtaaatttacgaagagggaagtggggatcagagaagttctgaaattagtacaaatcgcctgttc

SEQ ID NO: 399219 - DNA, 737 bp, Homo sapiens
ccgaagataattattataaaggcagctaactttctgtgaactcttattacatgccagacactgtgtaagtgcttgacatatgcttgatatatgtaactgcttgacatatgcatgaattcattgaatttattcaattctctccctacgaggccagtactagcattagtctactttagagatgagaaaaccgagacacagaggtaaagtcccatgttaatactgcatgaggcagagctagcatgcagaccatccaacttcttatattgaactgtagcccatctgtactcaaaacacatcaactaattcgtctctggcactcaataagcaaaacagatttaccctatgccaaaagctgttggtcaaggagcataaagaatgaagcaatactgcctagaactgcatgctacagggtagggtgcaaaagcagataagctaaaccactgcaaagcattgctcacaaatgttttagaggattggagctgtcaactaaagtaactgaggtttttccaaactgtgttacataaggatggaactgtttcttatggtcgtccactttatagatttctggtctttataacctttcagaatgacagttccattatgtgtccagcctatggcataaatagcttttttttcccttaagtttcaaaaggcactccctggtccacctatttaagagtttgattgacaagcacaagcctgtgttctccattaatgtcaatcatttctccttactc

SEQ ID NO: 399220 - DNA, 689 bp, Homo sapiens
gcctggcgccgggggcagcgtgacccggccgctaccgtgtcacagctggcgactgacaaacagcaggcgacgtcgggagaactccccgagacacccgagacatcagccttctcgctccgcggccctgcaggacctgcccgccgggagccccggagtccgcggcagcgccgagggcccctcccccaggcctctgggctctgaggctcatccatggaataccaattctttttcttagtgttcacattggatttttctgttaaaaatagattgttggagttggctaacaagttgattacttccagtcaggcactctcttctgtaaagtctcttttgtaaactcctacaagcagctatttcactggatttgaaaagactgactaaaaagaaccatgcactgtaactctcaagtatacaggaatattgttattaggtcacagtgagccgagatcatgccactccactccagcctgggtgacagagcaagactccatttcaaaaaaaaaaaaaactgaaaataccaaatattgacaaggatttggagcaagtggaaccctcatacattgctgatggaaatgcaaaattatacagccaatttggaaaaataactgggtgtggtggtgtgcacctatttttccaacaacttgggagactaaggtaggaagatcccttgagcccaggagtttgaggtt

SEQ ID NO: 399221 - DNA, 450 bp, Homo sapiens
ctactttcatatttcacactaagtctgtttcaggtttaagtaagggtaaatccttctcccataatctggactttcgggttccccagtggggatgtgtgttcagaggcagcttttcccccttctcaccttaagaactcacagtttttctcctgtctcacagaatttgcagcagcctactacttctttcaaatgatctgtgaattcttttggttttcctggtacattcctgtggtggttcctagagcaaaagtccatggtgtaagtctccacacactgttctgtctgtccaagtgggagctgtacatcagccttgtctccaatctgccatcttgaattcttatctctaactattttgtaataacacttagcttaaaatacaaacacattgtatagctgtacacaaattctttctttatatcctaatcttataaacttcttcttgccaaaaaa

SEQ ID NO: 399222 - DNA, 385 bp, Homo sapiens
ggtaagttatgtattacttttatataaaagaaatatggaatttatatttatcacagatgcagtaaacttatggtttggcggtgattccatgtgggaaaaatatttagtttaaaaatactttagaaattattcttatgcttactgactgagagcatttaagggaatttctgttccttttaatttgctgccaaacttttcaaagtcatcatcaagggcttacttgagtatttgtgctgtgataagtagaaactctgagcataactataaagacaaggattacccaggaccattctttacattgttgaaatacaaacattttattaattatctatactaatagagttgttaacattctgtgtgtcttcagtagcaaacgaaaaataaa

SEQ ID NO: 399223 - DNA, 238 bp, Homo sapiens
ctatcccttctcaatctaatccctttatgtgtattcctgaccctatggtcctctttcacccaggcccttactcaataatctcctgccacatcatcagtcttttcttcttattccctcttcctaataggtctctgaatgaggtccttctcatgtgggtctctcctgttctaacaaatttttccaacaggctaccctctgaagataatcactgttctttcttttaagcttttcaagataa

SEQ ID NO: 399224 - DNA, 542 bp, Homo sapiens
tatttttcttattaaacaactcataatgcttgttttatgttctgtctctgtcaattccaatgcccaaagtattggggattcttaatcagtttctgctgatgcttgctcatggtggattacttattatgtgtttgctatttgatcgtgcgctcatacttgataaaattggtgggaatgctgaaaggcctgaatggtaggtgacttatttcctgatctaatttaggtttgcttctgctaggtatcaaagggcactggtagcctggaaccactttaatttcttggcctgggagttccctgaccatagagggaagagaaaatttcaacctcagacttaactcatgaggtcaggcctgtgattacaaaatcccagagaagcctcttcaccgagagcgtggacctgaaatgctccctcataggtcttttgagtataatcaacttctttctcactcatccttttaatgaagttgcagaccctttcaggggttttggtctaatgtaggagtttccagttaagcgccctcatagtaaataaaaggtaagtt

SEQ ID NO: 399225 - DNA, 386 bp, Homo sapiens
caggtggattacttgaggtcaggagtttgagatcagcctggccaacgtggtaaaaccctgtttctactaaagaaatataaaaattagccaggtgtggtggcacgtgcctttaatcctagcctgggtgacaaagcgaggcaagactccgtctcaaaaaaaagaaatctgatagacttcacttgtaatggatatttaattctatatttcatgttatcttttgtaagaatttaagattagtcaacaccaatcctatactcctctagaaaagtatctttgtagctctactcattatttcttatctctaacctaagttactttattacatattaatctgttcatttgttcacttgctcattgatgtaataaattagtaatctcaatttatt

SEQ ID NO: 399226 - DNA, 468 bp, Homo sapiens
  misc_feature (2)..(2): n is a, c, g, or t
  misc_feature (18)..(18): n is a, c, g, or t
  misc_feature (52)..(52): n is a, c, g, or t
  misc_feature (56)..(56): n is a, c, g, or t
  misc_feature (59)..(59): n is a, c, g, or t
  misc_feature (90)..(90): n is a, c, g, or t
  misc_feature (92)..(92): n is a, c, g, or t
  misc_feature (358)..(358): n is a, c, g, or t
  misc_feature (365)..(365): n is a, c, g, or t
  misc_feature (374)..(374): n is a, c, g, or t
  misc_feature (395)..(395): n is a, c, g, or t
  misc_feature (415)..(415): n is a, c, g, or t
angtcatggacaccgggntgattcacatcaagaccttccacagtgccccccntggnccngaaaacagccatcccccaaccccaggcaaantncacaggtggccccttgccagtctctgcagcctggccaacgtggtaaaaccctgtttctactaaagaaatataaaaattagccaggtgtggtggcacgtgcctttaatcctagcctgggtgacaaagcgaggcaagactccgtctcaaaaaaaagaaatctgatagacttcacttgtaatggatatttaattctatatttcatgttatcttttgtaagaatttaagattagtcaacaccaatcctatactcctctagaaaagtatcnatattgntcgataaanagcgttgaattgtcttgtatnagttaagagtttgtgagtgntttaaataaaattagttgattaagtattttttttcctatgattgaaaaaaaaa

SEQ ID NO: 399227 - DNA, 658 bp, Homo sapiens
ttgtgagataattgactacaatgttttacatcaccatgatttgaaatgcaagaataattaagaataaacttattaattgtcacaaatcatttaaatctgtacataaggatgtactaaattaatcaggcatcttaaaatattaatacttttttgcagaatattctccagaagcagttgtacctgcattttgtagtagaaaatcaggtagaatttgtttcccaagactaatcctcattttattctgatacacctacctgaagaaatgccttaatatttattaagatcctaatatatgcctgactctatgttaaaggtcttttgcctacataatttcatgtaatcctcacagccatcctaaaagggcagtattatcatctttattttgcaagtgaaaaaataatgtgcctcaactaaaggctggtgctagaaaatgctgaagccagaattaaactgaaatctaactgaagctaaaacacatgatttttccattatgccaagctgcccacccagaggaaaaaaaacagaatgtaaccaacaacatgttaccttcaattttatcacctgtatctgttcatttctggtgagatgtagaaatcacaaaggctctttcacaatccctgatggggctgaaaaatacatttggacgctaggactgcca

SEQ ID NO: 399228 - DNA, 514 bp, Homo sapiens
acgggattttcccatattatcttctagaatttttatggttcccagtcttagaagattaaaatctttgatccatctcgggttgatttttatataaggtgagagatgatgatccagtttcattcttctacatgtggcttgccaattatcccagcaccctttgctgaatagggtgtcctttcctcagtttatctttttgtttgctttgttgcagatcagttggctgcaagcatttgggtttatttctaggttctctattctgtgccattggtctatgtgcctatttttatgccagtaccatgctgttttggtgactatagccttatagtacagtttgaagtcaggtaatgcgatgcctccagatttgttccttttgtttagtcttgctttggatttgtggggtcttttttggttccatgtaaattttaggattttttttctagttctatgaggaaagtcattggtagcttaatggggattgcattgaatctataaattaccgtgggcaaatctaccg

SEQ ID NO: 399229 - DNA, 603 bp, Homo sapiens
tgagtagcaaaggactaaaggttgtgagataaactgcttttagcagcccaaagggccagctggaaagacgagaccagttacagagcaaatggcaagacagatctggtaatctgattcttagagtacttaaaaaagataagaaggatctattcctgatatacagggtacttggtggatgtgtccatgacctcgagatcgaaaacccattagttaatctttgtgacatctgaattttaaggatcttacccagtgaacatataactagtggaaatcctgataattggctaatgcaaggaagtgatacccatgtgtaatgcttatctttgtatccatttcatggggaaggtcatggaagacgacagcaaacttgagtggttaatgagagcttcactaatgttgtctgctgcaggcaataagtgaagtctctggcagtgggaagcatggacccaagaccgaaagctctggcactttatagcagtggtggggggtagataggacttagtgtggccccttaaagagcaaggtccaagtgattttctctggtgaatgtcgatgtggatctagtctccagggttagatccaggcaggtaacatcaaagtcag

SEQ ID NO: 399230 - DNA, 227 bp, Homo sapiens
tcgttggtgactcacaagaaagtccatcaatacaaaattgtacaacatccttgggtcacagttttgttcctcaaaattctgtatctattgcttcgtggttttctggctttttgtgcttcagagatgtctgaggcagcctacttttgacttactttttaggaagcctatttttcttgccttggtgcaagatttttttcttttgttcttacaatttaaaaatactacca

SEQ ID NO: 399231 - DNA, 630 bp, Homo sapiens
  misc_feature (34)..(35): n is a, c, g, or t
  misc_feature (46)..(46): n is a, c, g, or t
  misc_feature (52)..(52): n is a, c, g, or t
  misc_feature (69)..(69): n is a, c, g, or t
  misc_feature (77)..(77): n is a, c, g, or t
  misc_feature (82)..(82): n is a, c, g, or t
  misc_feature (99)..(99): n is a, c, g, or t
  misc_feature (117)..(117): n is a, c, g, or t
  misc_feature (127)..(127): n is a, c, g, or t
caccgagcttcccaggaacatcacatatcactgnnaaaatagcatngcatanatggatcaggccagtgnaaatgtanagaangccctgaagctgatggngtcaaatgaaggtgaatncaaggctganggaaatagcaaattcacctacacagttctggaggatggttgcacgaaacacactgatgggatcttctcccatcaggctaatcagaagcaatatcgccgagatcatgccactgcactccagcctgggccatagagtgagactcagtctcaaaatagaaagatgagtgctttacacctagtatggctaagtgttatttcatgaaacttttcagttgtctgtttatataagtctgtatttatgtaaatccatccatgcacatacacaggtcacccatttgcatgtatcccgtaggtcctggggccctgtgtagaaagcaggtctcatcgtggatcacagtcaagcaaacgttgaaagctgcagctcaggaggctcctcacgcccctgctatgccatctttgtcactacttccttcagccactttggattctgcttccctttctctaacttccagatgcatctttcttcccttaaagccagtcatgcattccagactggtagtgcat

SEQ ID NO: 399232 - DNA, 883 bp, Homo sapiens
tacttaaagtttaaggactgctttaatactccatgtttaattgttaattgagaatttaaaaatcaaaaatgccaactttgccttcgatgagatggaaaattatgctgctgtagaaggtaacataatgtaaaacagccaacattaccaaggcacacaaatgtttttggtatgtaaaattgctttgtaaaatatttgctccatctgctgaaagcggcaaagacaattttccctcgatagctaatggcccatttcggctgtgtggcaagtgattcgctgtggtggcggctctcattaaacagaatggtgaaaatgcggtatataattccatacttatgtagcattatccactcgctgcttctcgaggagtctgtccctcattatctaggcctccaccttgcaccaacatgcaggcctagcagttgatttgactcgagaagcgttttgtccaactgaggcacatatgttgtgcctccattccaaagctcagcacaactgctttgcccccgaccacaaacactagagaggttcattccctttcaactttccagcacttaaattgctgtatcttttttcctctcaccacagggggctgtggttttctttctaggctcaccctgtgcgcgctgcatgctgggggtttcaatagataaagattaaatgcttcttgaaattcttaattgaaatttgcacatacacaaaggcaggaaaatttttccctgggacaaaattgccatcatcaaagccccgacaagccctgtccttggttcatggtgtatgtgagggcctgtgatccttttctttcagggagttgtttacactactcccagaattacttcaacatctgctaaaggaacaattaaagataaataatccagggtggttt

SEQ ID NO: 399233 - DNA, 448 bp, Homo sapiens
tgaatgtaggtacttctacctcatcagctagaacaaagaaagtctaaataatcatagtttgttttgtagttggcatctcacctcataacttttaaaagaaaggttctgaatttgtcacgtttgctgcctaggtaatgtagtgacttattttatgctgcaaatgtctgcttgtttaggatttctgatataggctggcatgatttcattcttgtagacttacgaccaaattactctgtgctgattctgaaaagatttgtctttttggtgcatgtataagaacataagttgcctgatcttaagagtttttttctgattgggtatggtggctcatgcctgtaatcccagcagtttgggagacctaggtgggaggattgcttgaggccagcagtttgagacgagcctggtagcctggtcaacatagtgagaccgtggctctatttaaaaaaaa

SEQ ID NO: 399234 - DNA, 503 bp, Homo sapiens
cgcacagaaacagcgttgcccttggcctggagccattgtcctgaaaggggatccttcccaactggggcctgagactgatccctgagaagtggcccctccatcctggaacccctcctgcttgtgtctccttacttcctggtgatcaccgcattcaggctcagaatgccgcaggcctatcccactggaagctgccaaggtgcccagcgccctgttgcactcttgtcccacaggacgccaggcacagcagcagcatcaagggaccagcagggaagaggctgcagtgatttggggaaacagtgtgaaaatcacctggggcctggcgacacggggtcccgcctcctcccccatattaggtcccagagaaaatgacaatatgaacagctcatgtcaccattattaggcagagtctttattctttccttaatctttgccattaaattgagctctataggaccattttctgcttttaatgccaataaatgaaattccagagctgcttctgt

SEQ ID NO: 399235 - DNA, 363 bp, Homo sapiens
aggccaagctggccaagcaggcagagcactacgatgacatggccacctgcatgaaggctgtgaccaagtaggtcgccgagctgtctaataaggagcgcaacctgctccttattagaatgtggtcgggggctgcaggtccgcctggaggctcatcttgaacattgagcagaagactgacacctccgacaagaaccctcatcatgcaattgcttagagacaacctaacactttggacatcagacagtgcaggagaagaatgtgaggcagtagaaggggctgaaaactaaatacatacagggtgtcctccttctttccttcaagaaacctttttacacatctccattccttattccacttggattt

SEQ ID NO: 399236 - DNA, 441 bp, Homo sapiens
cagaaaataaatgacatatgtatatcatgtggggataaatagataaaaatacacggaaagacagttagaagccagccttaatctgtcttgggcccagacagcccttatctgttgggggcccagatgtgtctacagcattgttaacatctggtgagaggagaggagtcagccagccatcctgatgcgttttcttgctgatggccgatgatgcccaaatgctaagcagttcgcagtggttaactgtggaggaggcaaaggaggacttgaatgttttcctcttatctgtttcctgtatttgtgtgttacctgagtaaggtttcacttcctgtattactcatgtgatattttactttttaatttatgtacttttgtatggcttgtatctattttttaagagtaaaacaaaatgcagagattatctgcagtgttgtctaagatcct

SEQ ID NO: 399237 - DNA, 655 bp, Homo sapiens
cactgagatgcctttccactgccagttaacaccagatagcaaacattacagaactctgaggtcgttttggggagcctgtatcctctatttctttaggcccgaagtggttctcagagcagtggtgatttcttatttaagcctgtctacattagatgggcatgcgcataccaccattctgtaagattccaagtggtgtattcattttgttacatctgatgggaggaaacagaagaggaaaagaagcaagctcttttgggattgacatgattaaactcaacttcttaaaagcttttttcctctggtagaccatcttcaatttgtagatcctttatgtcagatgaggggaaaaaattacacatagtacattttatttggaatattgttagatagctgaattgtcaaagatcagaagttgttacatatttttgtctcttagataatatggaagtatataccttgtgtgattgcatttgggagtcttttttttccctcacttccatgctttcttaagaaagaaagagaccttttaacctttaaaccttttctttttctgagatttaactataagttaattgttcagaatggagggtattttctatcaaaccaatgcaaattttggtgattagattattggaccagctccataaggcctatt

SEQ ID NO: 399238 - DNA, 404 bp, Homo sapiens
agttttacatgggctagagccagccagtgtgactaaataggaatgttctttatgtgtaaaacggtaacattctaggaaataattatattaataaaaccatatttaaaaagtgttcttggccgggcgtggcggctcacgcctgtaatcccagcactttgggaggccgaggcaggcagatcacttgaggtcaggagttcaagaccagcctggccaacctggtcaaacgctgtgtctacaaaaatacaaaaattagctgggcgtggttgtgcgtgcctgtaatcccagctatttgggaggctgaggcaggagaatcgcttgaacctgggagaccgaggttgcagtgagccgagatcgtacccttgcactccagcctgggcaacagaggaagactccgtctcaaaaaa

SEQ ID NO: 399239 - DNA, 391 bp, Homo sapiens
cacctgaaacaaacttagtaggagaagaccagccttccaaaaaattattattttaatggaatataaagaatgaactaggaatagaatagtaagtatgtgtgaaggccacatactatgagtagatattaataaaatatgtgtgcatatatatagtataaagtctagaaatacaaacgaatatgtagctaaagatatatacatgtaagtaaatataagatataaagatatatatgcgtgtatgtatacatataagcatagatgtatataatgtctaaaacaggtatgtatataaacgtagatataaacaaaatgtacaataccatatataatgtacacatacagtgtaaaatttattaccatgtgaatgagaattaaaatatgaaaatcgcta

SEQ ID NO: 399240 - DNA, 270 bp, Homo sapiens
tattttatttaccattgtacccaagtgtctggcacaaccacttactattacaagttgggacttctgggaagcagagaaacatcagatttttaaaagaacatgaacaacaatggaaagattatgtaacaaaggttgaatataagagagtggataaaccatagaatagtttcaggatgattaaacctcaaataaaccaagatttgaaaaaaatgttgacaacaaaattttatgtagctatattcagaataaaaatataccaatgaatgttca

SEQ ID NO: 399241 - DNA, 398 bp, Homo sapiens
tgttagacgttagggaaacgtgggtgaagggtatatagaaattaactctgtgaactaatgtgccaacacttctgtaaacctaaaattgtctcaaagttagtttttttaagccgggcatggtggctcacgcctgtaatcccagcactttgggaggcggaggctggcggatcacctgaggtcaggagcctgagaccagcctggccaatgtggtgaaaccccatctctattagaaacacagaaattagctggccatggtggtgcacccttgtaatcccaggcactcaggaggctaaggcaggagaatcacttgaacctgggaggcgggggttgcagtaagccaagatgacgccattgcactccagcctgggcgacaagagcgaatctccgtgccaaaaaaa

SEQ ID NO: 399242 - DNA, 560 bp, Homo sapiens
gacctactgaatgttcttcccatggctggtcagtgctgacacctcaacacaggaagagaaatactcctatgaagtcatctgaagcctggtcatgccagggacacttcacgaaggcaggaacagtcctgtttctaaaagcccaaaatctaacagcctctctacagatataaaagcccaaagacatggaaagtttgtatgcagacaaccctagaagtaaggaaaagtgaatgacatatatgtcaatgcccagaaagttccttgagatcagacactgtacatttatgggatactttctaagtgccagctactgtacttggtgctggatcagtgcatccatttcccggggctcccgtgatgaagtgccacaaactggatggctttaaacaacagaagtttactctctcacagttctgaaggttagaagtctgccatgaagatgtgagcacagccagcctctctccaaaggctccagaggagaatccttccttgcttcttcccagagctccttggcatacagctgcattactccaagatttgcctctcttgtcacacagcattct

SEQ ID NO: 399243 - DNA, 419 bp, Homo sapiens
aagggaaggggacaatttgccaagtaggtgccttggtctactcccatttgaagtgtatctaacgggtaaacactcagtcaccacatgaatagggacatttctcccttccctacccgcttgtctccatgccaccttggagaggggtcacacatggaacctaccgcttccctgcccctttcccttcttcccctacaacacactgggacctgaggagccgaccctttgtctctgcctaagacactttgtctcttcctaggcttctctgaccagaagcagcaactggggcactggtttaaaatattcattccctgctgggcgcggtggctcatgcctgtaatcccagcactttgggaggccaaggcgggctgatcatttgaggtcaggagttcgagatcagcctgaccaacatggtgaaaccc

SEQ ID NO: 399244 - DNA, 426 bp, Homo sapiens
ccaaagagaactctaaaggtgggtaaattgaatagcatttctcctcaattgcaggacaaacaactccatctcacaagactggtgcttgttctgtttatttgtctttatgttgtgagcactactggacacgtgctggccactgtcacaggagatgaagggtgtagaacacttgatcagaatcaggggcatcagatcaataataggcaccctatactcttctgctatccaaaaagtgaaagatgtttttagaatctgtttcgacgtacaatttatttatcaactgggtactcagggagactctattttccagttcctcttgcatctacgtgtgaccacatgactgagttctggccaatggaatgtaggtggaaatatatacttgactttgagcttggtcataaaataaatacaccacttggccccctt

SEQ ID NO: 399245 - DNA, 727 bp, Homo sapiens
ctccttttggggaatccattcaaatgtggttctagtggcgtccaactctggaactgcaaggggttttgtaggaagctggaatgtggcttacatctggcagttggaaattctccccgtggaatctgaatctcccctggaaactctcccctgggaccataccccattattcgtactgctttagatacatggggagtgtcgaggtatgggacactctgctcctgctccctggtcttccctgaatgactttagctctttcctttgaaccccaaatatctgagacaggtctcggtcaatttaggaagtttattttgccaaagttaagaatgtatgcctgtgacacagcctgaggaggtcctgacgacatgttcccaatgtggtcggggcacagcttggttttatacattttagggagacatgagacatcaatcgatatatgtaaaatgtacactggttccgtcaagaaaggcgagataactcgaagtggggagaggacttccaggtcataggcagatacaagacaaatggttgcattcttttgggtttctgattagcctttccaaagaaggcaatcaggtttgcatttatttcactgggcagaggagggatgactttgagttctgtctgtcctcttgtccaccaaggaaattccttgtgagggcaggtatgtagcttttaaaaaacttagtagctattttttaggaactagaatgggggggttttgccctaa

SEQ ID NO: 399246 - DNA, 244 bp, Homo sapiens
tactgcattaaaatgtcaggtcagtgcaggtaataaagccgtagttgcttatccatatgacatcacctgttccactaattgatatttcttcctagaagcaaatctcaggagccaaaggtgcacaggtgccccatgtcactgggcctcgaataggaggaattactatagtatctacttatattgctcatccttcccttaccagcatcccaccgcttttggccaaagacttgggaagagtatagta

SEQ ID NO: 399247 - DNA, 337 bp, Homo sapiens
gcaattaccgtctcctacggagaaaatgccccttttccagcactgggcccaacatggatgcccttggggcgagggcaggatgcccttggctcgattttgcttataggtagattttcaccaagatggacgcaggagactcgcctgtcacctgctggagaaatcacagcatgcaaatcactttgtgccttctgcctttttattaggttaatacagacattggtaggttttatatttacagctaggcctggatgcctgcctgtgaccttttgaagggtacacactgtttgtttgttcatttgtttgtttttccaaaaaaacctctgtattactttttttt

SEQ ID NO: 399248 - DNA, 281 bp, Homo sapiens
tatcaagtagatggcagtaaaccattcatgaaaaacacctccatgatccaatcacctcccaccaggcccacatccaacattgggaattatactttggcatgagatttgggtggggacacagatccaaaccacatcagtaagagaatgcaagggagaacttaatatagttcattatttgacagacactaagcaccttccctgtactgagcagtattataagagcttcggatagatgaagcttttgtcctactgtagggaagtagataataggcaaataaatc

SEQ ID NO: 399249 - DNA, 249 bp, Homo sapiens
cctgtttcctattttggagtaacctgaagcagcaataagagtaggtaccaaaacatctatgatcattctggtccttggtaggaatacagtcacttagaacactgggaaaatagctctatgtcaagaaaatgttttcctacctgtagcatacctgtatgccagggtattatcaataaacttagggtcatcattttatacctcttcattgctcaaaatggtctgagatgctacagtatgatatacatgcta

SEQ ID NO: 399250 - DNA, 744 bp, Homo sapiens
acagtggctcacacctgtaatcccaacactttgggaggctgaggcgggaggatcacttgagcccaggagtttgagaccaacctggacaacacagcaagactgcatcttaaaaaaaaaaaaaaattagccagccatggtggcatgctcctacagtcccagctactcgggtggctgaggtgggaggatcacttgagcctgggaggtcgaggctgcagtgaaccgtgatcataccactgaactccagcctgggcaataggagaccttgtcataaaaaaaaagaaaaaaaaaaaaaaaagtctagacacaccagcaggactgcccatcttcaggaaacgggaaaactggtagatgtatgaaccttctcacaaatttatttgagttagtcatgaaaagaactaacatcctaaaacaatgaatacaggcaaattctccatggaaggagaaactataccagcagagcttatgtttttataagaatgcaaaagatatattaagaagcaagagaaggtaaaaatagataaggtaagcttttatgagtaatgaacagcctggtcttatgaaagaaagaaaatgtaacagaagttttagctagaaatgtcagaattaatgagtaaagcaggcatggcagcaataatctgttcaaaaattggtcacatatatggtcaccaatactggtcacaagtcatcttccagtattttgacatattcatggggatttgggtgctgtcacaagacaccacattg

SEQ ID NO: 399251 - DNA, 614 bp, Homo sapiens
ccccagggctcggctcccgtgtcagccctgtcacctgggaaatggctccagggccatcaccaccacttctgccccagggtccactcttgacacaagggcaccaggcaggacctctggctgagtcctcagtctcacccctttggagagtgaagtcctccgtctggggggcaatcagtgggtctggggcggccaggccgactggcctcagcagcgggcgcaccgctgagctgtgaccgtgcacctcaggcacatcgtttcggctaacgttcacacaacccgcagtgtgtgctcctaccgcacccccttacagatgagcaatgggaggctcagagggatgaagcagctgccaccgcacacccaccgcaccacacggcggcagcactgacgctgaaagccacgtctgctggcttccgaagctcctgttgttaatcgtggctatgtttcaaaactgcagagaagaaagcctggaaataaataaggggcaatgtcaaggttgcccaagtggtgctccttctttatccttctcatattctaaaatttctagaaggaattagacaaccaaaaaacctaagggatggggactagttagtctcaaaataaactcagaatattag

SEQ ID NO: 399252 - DNA, 443 bp, Homo sapiens
ataaattctgtctgctgttttctttgaagggataggctcactttgttaatatttgagaacataccatccatagaaccatagcttgtcagttgttctttcaataaaaatagtattccatgagaaaggcagagaattcagctcacaattcagtcacacaagtgcttctctttgagacaaatgttgtacttcagtatgcaggtgctttatgggtacttctcatcttgtgtcactctacttaaggaccaagatttaataaaagtaataatttttattgcttctccaaggtcattcttaagtcaaagaggcacttgtgtttttactgcaagtgtttggttatgaagaatatgatcactactactagtagtttggtgccaccatactaaggttccaacagttctacccaccactgcttttgtacctcaataaaaatatcaatgcagcaa

SEQ ID NO: 399253 - DNA, 438 bp, Homo sapiens
caaggatactctccatagaaagggaaatagaaccagggagtttcttaagattcagtcagaataaggccagttagctgggtcactcaaatatttgagagcactgagctaagcatatatttcaatagcaaaggtaaatttgtcattacagtcttttccatgtgaacttgtcattgtcatttttgcctgggcatctcctcttcacattggaaagagtgaggcttgtccattgtcagataggtcccaggcatctcagcattacttcttatcgttgtctgtcctttgattactacgtagcctcctttagctagaaattaaatgaagtaatggatacggatcacataataaaatgcttggcataagttaggagagcaagtattaatcccctttctgatgcttgccttttctatgcttctgatgaacactttattctcttaggta

SEQ ID NO: 399254 - DNA, 541 bp, Homo sapiens
atgctaaaggtaggaaaaatgatgggttcttctgctctgagagctgttctctcttcttttagacttttctaggctgttagcaaggaattggtgaagggaagcctttctttgttcaggtctccctttcagaccctggtgggttagccaagttcataggacgtttacatattagtcctccacttaaaaactagcttgtgttttgaaggttgctgaatagatgtcactaagtagtagaccaaaaagctcaccctaatgattgttttacagaatggaatatattaaaccatgacccttttaaaagatgcagtcagtggtttatatgacatttcacttattgcttattataatatttaattctgaaaaaaatgttttgatgaaattgactttactactcctgtaagttgttcctataagatgattttgcctcttaagtctttggatggtatttattactattctgagatttgtatctcaaatttggatgttataaagatgtcattatatatgtgtacagcatatgtaattaaagatgagagccatg

SEQ ID NO: 399255 - DNA, 556 bp, Homo sapiens
gagtttggtagctggagtccaaaccagttagtatgctgtacagtttagaaattagtgggttgcctgctgtcctgtgtgtttacataacagggcacctgaggtaggaagggccctttcaggactgatttcttgggggccagaatggacatttggagtctagagcaaatgcaataggagaggtgggtggcagggagcatctttatgaagctttgtatagaaggaacagtccagctttagtgagtgtggagctagactctgatctggatttgaattctggttcctgcattcattcaactgtgttactgtatccaagtaacttgattgacttgtgtgagcctcagtttcctcactgtaaaatggctattgtagtactcacttaatggagttattaaatgactaaacaaactccaaagagtatatctaaagccagctgccaccaggcctggtagcttatgcctgtaatcccaacattttgggaggccaagatggaaggattgcttgaggccaggagtttgagaccagcttgggcaatataacaagaccccatctctacggg

SEQ ID NO: 399256 - DNA, 197 bp, Homo sapiens
catcacatcaaataattaagcaacaccataatgaccagacccaggaaattctgtaaagctccccaactttcttgctctctacaatgcactgcgtaagtactctgcgcttcccaccctatgcaggggataaactcagtaactttcaggctgaaatcctactgttccctcttcatcctccccaaatccttccccccagt

SEQ ID NO: 399257 - DNA, 427 bp, Homo sapiens
aatcttgttctttactcatgggaaattgggagaggttaacccctcccaagtttatgtttgcaaattcatgtttatgggtccaggtgaaaaacttttctgaacacagcatgctacttctcttattacctctctctatttaaagaatggctaggctgagcatggtggctcacacctgtaatcccagcactttgggaggctgacatggcaggattgcctgagcccagcagttcatgactaagcaacatatggagattctgtctatataaaaaagtaaaaaattaactgggtgtggaagtgcatacgtctagtcccaagctacttgggaggctgaggcaggaggagttggaggctgcagtgagacgtgattgtgccgctgtatccagcctgggtgacagaaaaagaagagacccttcctttaaaaaaaaaa

SEQ ID NO: 399258 - DNA, 887 bp, Homo sapiens
  misc_feature (509)..(509): n is a, c, g, or t
gtgtgtttgcttgcgttgaggggagcaggaccataggccctagaggcccccagctgccttctgagactgggcgaaaccctcggcagcgcgcagggggcgctagggcgcgaggggcgggcactgacgggcaccaatcacggcgcagtcccaccctataaataggctgcgttggggcctttttttcgcatcctgcttcgtcaggtttataccactttatttggtgtgctgtgttagtcaccatgtctgaaacagtgcctcccgcccccgccgcttctgctgctcctgagaaacctttagctggcaagaaggcaaagaaacctgctaaggctgcagcagcctccaagaaaaaacccgctggcccttccgtgtcagagctgatcgtgcaggctgcttcctcctctaaggagcgtggtggtgtgtcgttggcagctcttaaaaaggcgctggcggccgcaggctacgacgtggagaagaacaacagccgcattaagctgggcattaagagcctngtaagcaagggaacgttggtgcagacaaagggtaccggagcctcgggttccttcaagctcaacaagaaggcgtcctccgtggaaaccaagcccggcgcctcaaaggtggctacaaaaactaaggcaacgggtgcatctaaaaagctcaaaaaggccacgggggctagcaaaaagagcgtcaagactccgaaaaaggctaaaaagcctgcggcaacaaggaaatcctccaagaatccaaaaaaacccaaaactgtaaagcccaagaaagtagctaaaagccctgctaaagctaaggctgtaaaacccaaggcggccaaggctagggtgacgaagccaaagactgccaaacccaagaaagcggcacccaagaaaaagtaa

SEQ ID NO: 399259 - DNA, 484 bp, Homo sapiens
gccgagattgtggcactgcactccagcctggccaacaaagcgagattctgtttcaaaaaaaaaaaacaaaaaaaaccacacatagagtagtataagggtgttatttagtaataagtaaatgttagaagaaacagccaaaggatttgatgagtgctttggggaagcagaaatcaagagtgggtatttccataatttttctttataagtttggaagtactgtttgacatcttaaagtatgtacatgcattactttgataaaaattaaatgaaaaggcgtatcactgcccaccaaaaacagacaagtagggtggatttgtgaaacgatcttcaggaaaccacaatttagacaaattcaccagtatcgaatactttagagattgccattgaagctgttgagtaattacctgagaattacccagaaatatgtgaaacagcttttgaactggattttcacatgtagcattgctcagagaaaactaacagt

SEQ ID NO: 399260 - DNA, 317 bp, Homo sapiens
ctgcccttgctgcccctgagacctcggatgagccgtgggcattgactctggctgtgcccgtcccccggtgagctgcagagagcgaggttcaattctgtgttttgtgtttttttttcttttctttttttgagacggagtcttgctcagtcacccaggctggagtgcagtggcacgatctggactcactacaacctccacctccagagttcaagtgattgtcctgtctcagcctcctgagtagctgggattacaggcaccccgctatcatgtatggctaattgtattttagtagagaaggggtttcaccatgttggcca

SEQ ID NO: 399261 - DNA, 740 bp, Homo sapiens
attgttaatactcttgataattgtcataactgccataggaaaggtacaaagtgctatgaggtttcaaaggaatacaaggcttctgtggttgttcataaggaatgggtaatttcattttgtaggcactattgagatggattttgaaggatggtcagaaacatttctaccagttacaaaagtaatatgtgcttatttaaaatttcaaaaataggctggttgtggtggctcacacttgtaatcccagcactttgggaagccgaggtaggtggaatgcttgaacccaggagttcgagaccagctggataacatggcaaaatccagtctctacaataaatacaaaaattagccaggcaggtggtatgtgcctgtagtctcaggtactcaggaggctgaggattgcttgtgcctgggaggttgatgctaccgtgagtcgtgattgcaccgttgtactccagcctgggtgacagagcgagaccctgtcttgaaaaaaataaataaaatttcaaatatagccatatataactttaactctaagaggcaatcattgttagtattacttggcaattcaaaatattattaagacttgagccttgaagttctttcttctcttgttataaagaaactttgatcatcctctctagcccatttgattatttcagcatggtatcggttttctacttcaagataattttactgagtacacattttatacatatctctgttaaattattactctactg

SEQ ID NO: 399262 - DNA, 366 bp, Homo sapiens
ccctgtggtcactccatccatcatgattatcaccagtatttctcctataaccagatggtggcgtctttcagttattctcccattcggcttcttgaagtatgtgttccactccccaaaatattcattaagcgtcaggccccattaaaagtgtcccttcttcaggatctgaaggacttctttcaaaaagtttcacaggtatatgttgccattgatgaaagacttgcatctttgaaaactgatacatttagtaaaacacgagaggaaaaaaatggaagatatttttgcacagaaagagatggaagaaggtgagttcaagaactggattgagaagatgcaagcaaggctcatgtcttcctctgtagatac

SEQ ID NO: 399263 - DNA, 735 bp, Homo sapiens
gccaaatatgccagattttactttctaactggagtctgattttatacttctgtcctctttcttaccacatggcttccagcatcacttacaaactaacccttaaaaaggagaaggctaagttaccaacatttggaaggcttatgaaagtgaagcatacttacaagccagcaatgtttttatttatggaatgtgtgagaaccatacacttaagcaaactttggggaatgagagttggggagaatcaactcttttatttgctaattggtatttcctttaaaagatagatttcctgcagattttaactgtgttaacagttactctagaaaaattggagatttgtgtgcatatattttatgttgtaaacagacacacacccagagacactgagagagacaaatagacagtaaacagaggagcactaaccacaaacggtttacaaatgacctccgtactcattcacccgtctgttccccaccttgccttttatagcaactatagcaacagccatgagagtcattgtggaaaaaaataaaataaaataaaaaaatcctggaagcttgtaaagaacctgagcaaaggggaggaagttgtgaaaaaaacgaataaagggcaccgatccagagtattgaagaaggcagagtggacagcctagcaatgagtatctggtactccagtatcctctcccacagaatctgtacagctttccatttatgacagtttaaacttaatttaaat

SEQ ID NO: 399264 - DNA, 435 bp, Homo sapiens
gccacaacacgccactagagaacaaacccttgccccggtcacagaccccgggcggaatacgcccccagctccggagggacacaagcaggtccgggggccaagacctggttcttgcgccccggctggcggggatctccgagctcccggcccccgggcgcgcgcccctcccccgcccggcgcctcacaaaggccctttgtcccgccgagcccccgggactccagttcctgaaaagttccaggagaaaaatcaaagagagagcaaaatcggcgagctccgccgagcgggcggggcaaggccgaggtggcagctcctgagagaccccaaggaagaggggagcatcgagggctactctggaaattgcaaaaatccgaaactgcaattcgaacaggaggtggatttttttttttttttaagtcgagacttgggacgccaag

SEQ ID NO: 399265 - DNA, 365 bp, Homo sapiens
gcacgaggctaactgaattcttattttccggtggagttaagttttcaaacattaaagaaaaagttgtcaagccttaggcacatatatgtgaaaatgcctgtgacatgtcttagatcccagcagatatttctaaatatcatgcccacacttttgtgatataaagcaaaatgatgaccagtaccaggagatactttaccaatgttttctttatcagttctacctccctccgaatatgaaataaactcttccccttttctctatacccagcccttctgtttccagctctgcaagcctcagggagacaatttcttaagccacacttctttcctttgcctaggaagcaaataaactacgttttgttttta

SEQ ID NO: 399266 - DNA, 595 bp, Homo sapiens
ggattaatattttggaatatttgcattgcacttaccagttgaacatcccaaatccaaaaatctgaaatgctccaataagcgtttcctttgagcaccatgttggccatcaaaaagttctggatttcagagcatttcagatttaagatgttcacctagactcggtatcatgtatttatcagattggaatacgacgagtcagtaataacatcctcccagataaactccatgtaatcaccaaatttaaatgtacagtagtccctccttacctgcaagtttgctttcccaggtttcagttacccactgaggttcacaatattaagatattttgagagagatatcacattcacataactgtcattacagtatatggttataattgttccattttgttatagttacatatgtatagcaaaaaacagcactgtatatatagggttcagtactatctgcagtttcaggcatgctttggtggtcttgaaatgtatcccttgtgaataagtgggatctactgtacttcaccctatccttttgtagtacagcttgaaaaatacaaaattggcaattttaacctgtatacataatttcatataccact

SEQ ID NO: 399267 - DNA, 439 bp, Homo sapiens
acagtacaagcattcctgaatctctagaccccggctaaataggactcagttcctttttctaaaaaagtcattgacaatataagtaaaaccaatatataaatagaaagctattttattaacattttcacacatttaaattattagtgaagtttttttcataaatttcttttctttatgacactcctattcatttcttttgctcatattccagttggaattttctctatattactaatcttaacaggaatttaagctattagacctttacctaatgtttaagtatatgccaccggtttgctgctgtctcttaccatcatacctgatagcttttgctgtagggaaatttaaaacacttacataaaaactgtgcttgagcatctacgttcatggaatgactaagagacaaaactagagaagagacagtaattgagatggaaac

SEQ ID NO: 399268 - DNA, 396 bp, Homo sapiens
cagcccgcttgtctctgcccccctacgggcccggggcgcctcgggcgcctcggtgctgcctgcagcccccgcgcgctgcccccagcccagcttgcgctgtacggagcgcgcccgccggagtcacagccccctcctgccgcgacctcgcctgacctggctgtccgggcacccggaggcaactaaggccgccccctgcccagatgccggcctgcctctcagcttgacttccctccccggactttggagtgtcttctgcgttaggatttggatcccagtggccctggagcggcagaagggccgcggcgataggaaagcagcgaaggaggccagtggccggagtctgccccagcccccacccgcgggtaaccttggaggcgccctcggagtgagtgtgtg

SEQ ID NO: 399269 - DNA, 271 bp, Homo sapiens
gcatgatcatagctcactatagctagcctctggtcctagcctcaagtgatctcctgctttggcctcccaaagcactgggattaaaggtatggtccactgcatccagcccaaaatagatttcttaggtgaaatcttttttactaatcttggattttttttttttttttgagatagatggagtttcgctcttgttgcccaggctggagtgcaatggcgcaatcttggctcactacactccagccaggaggacacagagagactctgtctcaaa

SEQ ID NO: 399270 - DNA, 624 bp, Homo sapiens
ctgcgtttcttgccgcggcacgctcctgaccgacctggaggagcgctgaccagctggctgaaccctgccagcgactctggaagggccgctcctccctcggtgccgactctgggcggtggccgcgccaaaccccgcccggcgtgggacttttcgcatctccgctactgtgagggcggaaggcggcgcccttgacctacgcaggatccttcccgggctgcggtgctccatcggaggggaggcgcccggcggtgtcctcgctgctgcgcctccatgcatcggcccttcgtggccaacacagaggtgatctcagtttactttaaccagggatgtttgtaccatattgcacctcggaataaagaaaaatggaatttcaatcccgaaatcacttcaaccccaaaaacggccacgtctccaagaagaaccagtaaactagtcttgctgccccaaggaggctggagcctggaggtcttgctgaaatccctaaccttgtttttactctaactcgttactttgaattttatcctgcttgtctctttaatcacctagccttgcttctcatgtaaataagactctctctagctgggaaagccggacaaactccagttgaccccttaatttacaaga

SEQ ID NO: 399271 - DNA, 381 bp, Homo sapiens
atagacattttagaacagtcttgtggttctgataaagaacgtttggaggttgtagacacgaactgtgtgtttgtgtgtgtgtatgcgtaggtgtttgtatgtgtgttttcttcatacttatgccccatctgaatatgtgggaattagatccttggatcatttacaaaagaaagaaagagaattttcctagcagcttggactgcatgtgtgcaccaccatgcccagctaatttttgtatttttagtagggatgggttttcaccatgttggccaggatggtcttgcagtagaatcacttgaacccgggaggcggaggttgcagtgagctgagatcccaccactgcactccagcccggcaacagagggagactccgtctcaaaa

SEQ ID NO: 399272 - DNA, 521 bp, Homo sapiens
ctgcaaaatactgttagggaatcaggggtctaatgaaatcgtctcttgaaatggaattagaaaatctgaatgttagtccccatatgggcagtaagtgtgatgttgggtgaatcatttaactagccgtaccttgctttcttcatctgtaaaataagagaactaaatataggttacttcttaaggtcatattcactgcaggtcctgtacacttctatgattctaaaaagtggctgtctttaacttgaaatgtatggggataatggggagaaaaagaatatcggaaacgtgtatggaatagagaaataattatggcattattctttaagacatagaataaaagaggtcatttgccattttagcacttgtgctaacattatgaaatgagaagataaaattccaacttgtacattaacacaagactagctatataaagtaaccatataatatttacacacttggatgtgtcataggcacctcaaacttaatatgtgccaaattaaacatgactcttcccacaaacc

SEQ ID NO: 399273 - DNA, 508 bp, Homo sapiens
ctatagattagcttcatttaaatgttcaaaataaaatatagcagtgtattattagtaacatactgtgactaagattttaagggggcagttcagtattatatgctttattaatacagttattatgttagtagatcaaaggagaaaaaactatctggttagttgtcaagacactgataagagtcaacattgaatcttgattaaaacaaaacgaacaaaagcacttagtttacttagtataattagggaggtgaagaacttccaaaaaccagcatcatacttgatttgtcattagagtgaagaacaggttgaagatgtattatcccacttgacagaattcatcatctgttccaggtaaaacatgtaacaacataggaattgataggtccttaaaagagtacacatgcatgtacacacacacacacacacacaaactttcttcagcccatgcacacatacacacacacacacttcagcccccgcccccgacacacacacatacacacacaca

SEQ ID NO: 399274 - DNA, 460 bp, Homo sapiens
tgtaggaggtaatggagaagtcagaaagacatgaatgtctcatttcttctggcaagaagtagaataagttgtataaagaaaggtcatggcctatttcaaaagcagaacgatgatgacagggtaaatctagttggagacactagtagaaggaagtgaaggcaagaggactgtgagtgagtggcagaaagaaggggtgcctatggaatggtgcaaaggttagggccagaagagccctaaagaaaagaaaaagtcaaatggctacgaagccaagaagttgaatacctgggcctttctgtcccttctcagggaacctgatgtatcttggtatgataaggacatccaagcagacattcaggcctgaacctgtcctggaactcaatggcagaagtcttcaggaagtttagacaagtgggttctcaaaggttaatctcatcctccttgcaccacccactctcagatc

SEQ ID NO: 399275 - DNA, 368 bp, Homo sapiens
acctgcagagaactccatgcagagcgactttgtagttgcacaaaatgggaaattaactggctagacagtaagtctggggaagtaaagataggagctggaagcatttaaacctggataactgcccagttcaggaggcggggggaaaaaccctagcatggcgcttttgtctatagagcaactttccagtacaaaagcgattccaagtatttgcagactatacccagaagcttggtttttcatgccaaagacacacatattaaaactggacttttaaaccacagcaaggaaaacaccaattccaactgcattcggtttgggctttccggctgtgttgaatccttctaaaggaagatttctgccccctagcc

SEQ ID NO: 399276 - DNA, 983 bp, Homo sapiens
gcgtcagactatcaccaaagtttatttgctggcaaagctggttttcccagaaatttgtatgtaggaatggtttaaataaaagttgatggaattcttagttagcagttgctctgccaagaataacacttttgtgtgctttctgtatataacagttttggtcagctatactgacagagctgggctaagatattttcctgcctgttaatcaaggccacacagacaaagctcaaggaaggatgatccctgcctcaggaagttttgaatcaactgctatttttaacaagtatacagtagaacttgagatcaggtcttcactcagttggtaggaacctctgtgtgaaaggaaggaatgtgacagtggctgtaagtatttgtattgatttgggtcaagggtgtggtagcatagatgtggggaagtccagtcgtcaaataggttattacattttaaggcaactgatagttcatgggcaccttgagttgtctttagtgtatatggaatcctgtgctgctaatagtaaagttgaaataggctatgtgatgggctgatattattaatcaacgtaggacaggaggagaaagttggctattggtgtgtttccatgctaactggctcttgctgtggacatatataaattttgggggggttttgagatgtaattctgtgtatatatatgctccttgtttcattaagagaaggtttcataaagaattaatttatgcctgggtgcggtacctcatgcctgtaatcccagcacttttggaggccaagggggtggattgcttgaactcaggaagttcaagaccagcctgggcaacatggagaaactccgtctctacgaaaaatacaaaaacttagttgggtgtggtggcatgtacctgtagtcacagctactcaggaggctgagggggaagatcacttgaacccaggaggcagaggttgcagtgagccaagatcaccaccactgcactccagacttagtgac

SEQ ID NO: 399277 - DNA, 757 bp, Homo sapiens
gcgtcagactatcaccaaagtttatttgctggcaaagctggttttcccagaaatttgtatgtaggaatggtttaaataaaagttgatggaattcttagttagcagttgctctgccaagaataacacttttgtgtgctttctgtatataacagttttggtcagctatactgacagagctgggctaagatattttcctgcctgttaatcaaggccacacagacaaagctcaaggaaggatgatccctgcctcaggaagttttgaatcaactgctatttttaacaagtatacagtagaacttgagatcaggtcttcactcagttggtaggaaaagttttccgctgaagcttacatataaggaaacggtttatgggcctgaatgaagcctctgtgtgaaaggaaggaatgtgacagtggctgtaagtatttgtattgatttgggtcaagggtgtggtagcatagatgtggggaagtccagtcgtcaaataggttattacattttaaggcaactgatagttcatgggcaccttgagttgtctttagtgtatatggaatcctgtgctgctaatagtaaagttgaaataggctatgtgatgggctgatattattaatcaacgtaggacaggaggagaaagttggctattggtgtgtttccatgctaactggctcttgctgtggacatatataaattttgggggggttttgagatgtaattctgtgtatatatatgctccttgtttcattaagagaaggtttcat

SEQ ID NO: 399278 - DNA, 279 bp, Homo sapiens
gttccagcccactgctgaacacatatttaaaagctacaatagctctgctcactgccattgcagagtctggaggaaagagtagcaggcttgataggagcaattggctgaataatcttttgcaatgccaataaataatgaaaaagtatataaatataacgctgtatagaaagctctcaagttcagtgtttggttaaaatacatactcagtaaatggtagctattattgtcttagtttaagttattgcaagcattaaaattaaatgtttagctacagactca

SEQ ID NO: 399279 - DNA, 485 bp, Homo sapiens
agaaactaagttcaggtgttttattttttaagttctagatacttctaaattaacgatataaattaatgttttacataaaaagatctaaatgaaaagttttcattatagttgagaaaatgagtacttagagtgtgctctgataatttgacacattgacataaaaccttaaattgaataataaaacaaacggctaaaatattcccccttggaaaaataactttaataataaagctagaaaagttttaactgtgttgaaccatcacttttttctctggaaggcagattatcctaaagagtattattttccagaaattctgtcaaggcactttgaaataatatatgtttgtattatttaatattctgacacttccgttctttgaaaatgctcagactggaatggatacgtagccatgcatatatttaatataaatggtatcttgtcgttaacataaaatattaaagagaaaataaaactttgggctttg

SEQ ID NO: 399280 - DNA, 524 bp, Homo sapiens
acattacttggtctcagatatttctttatagcaacacaaacggactaaaacaacttgaaactgggcaatgtaataaactatcactggcctatatcttggccatatgaaaaatatataaacacttatttttataaactatgttttatcaaacaaaaataatcatcattattatcactgacacatggatctaacataaacattggtaattaaataagaattgcagaaaatgaggtttaaaagcttccttatttttattcttttattaaattcctctgaaaatgatatgcaaaagctattgtattctccatgcttggtatgagaatcaagcagaaagatcttctatatgccatatattgcattgggaaagccaaaaagccagcagctcagggaaatgagagtaggaaaatggtaagagacttgcaattaccctcttttcagtgttgagcacatcatttaaatgagatgcttcactggagagataaaataagctaagactagtcttttattctgtgaatttaactaga

SEQ ID NO: 399281 - DNA, 760 bp, Homo sapiens
  misc_feature (619)..(619): n is a, c, g, or t
  misc_feature (621)..(621): n is a, c, g, or t
  misc_feature (633)..(633): n is a, c, g, or t
gctgagcggggaagcgcaaaggggcaagttacccgtcctggcgtttctggggttcgcctcggaggctagcctcggtgctctcgcaggctcgctcgcttctgcatccccgttgccgcccggagccaactcttaagttctggacgccaggcctgaggcagttccgccatggacttctccaagttcctggcagacgacttcgacgtgaaggagtggatcaatgcggccttcagggccggctccaaggaggcggcgtccgggaaggcggatggccacgcagccaccctggtgatgaagctgcagctgttcatccaagaggtgaaccacgccgtggagggaaacaagtcaccaagctctccagaacatgcccaaagtgctccgtgatgttgaagccctaaaacaggaggcatctttcctgaaagaacagatgattcttgtcaaggaggacattaaaaaatttgaacaggacacatctcaatccatgcaggtgttggtagaaattgaccaagtgaagtccagaatgcaacttgctgccgaatctcttcaggaagcagataagtggagcacgttgagcgccgatattgaggagacatttaagactcaacatagctgtgatttctgncnagctaacaggtntgcgaacagcttatgatgctgttgatccccgactactccgaaagtgttgccttgggggccggaaacggtgggggcccaccgtcccgatgtgcgggtccccccggggggtcccccgttgtggggtctc

SEQ ID NO: 399282 - DNA, 887 bp, Homo sapiens
  misc_feature (598)..(598): n is a, c, g, or t
  misc_feature (600)..(600): n is a, c, g, or t
  misc_feature (612)..(612): n is a, c, g, or t
gctgagcggggaagcgcaaaggggcaagttacccgtcctggcgtttctggggttcgcctcggaggctagcctcggtgctctcgcaggctcgctcgcttctgcatccccgttgccgcccggagccaactcttaagttctggacgccaggcctgaggcagttccgccatggacttctccaagttcctggcagacgacttcgacgtgaaggagtggatcaatgcggccttcagggccggctccaaggaggcggcgtccgggaaggcggatggccacgcagccaccctggtgatgaagctgcagctgttcatccaaggaaacaagtcaccaagctctccagaacatgcccaaagtgctccgtgatgttgaagccctaaaacaggaggcatctttcctgaaagaacagatgattcttgtcaaggaggacattaaaaaatttgaacaggacacatctcaatccatgcaggtgttggtagaaattgaccaagtgaagtccagaatgcaacttgctgccgaatctcttcaggaagcagataagtggagcacgttgagcgccgatattgaggagacatttaagactcaacatagctgtgatttctgncnagctaacaggtntgcgaacagcttaatgatgcttgttgatacaccagactactcaggaaaagtgtgtgcacttggaggcactgaagaacaggctggaggcctagccagtccacagatcgtagcggattcacctctcaggctgtagatcagccaaagtggttgtgaaggtgttactggaattgacgcatgcccatcctgtctaatactacaagtgtccaagtgccgtctacgcgggagactggtccaggcatccggaccgggtcacggccatagcgctgggtggcaca

SEQ ID NO: 399283 - DNA, 419 bp, Homo sapiens
ttcctctgagtactgctttagctatataacatttgttctgctattgagtgatttcattaattgttttccagaaaatctgcaatttcagtttttcttttcctctttcagccatgcattgagtattttttgttttgtttggattttactttcagttaaatgggcttttggttttatgatttagtattaatttccagtttaattgcactgtaatcagagaatattgtattttttctaccttttgggatttattgaggttatctatgttccctaatagatggtcaatatttgtgaatgtttcatagacccttgaaagatatattttcttcatttaatctacagggtttgctatttatcaaccagatctactttattacctatgttaattagagcttccatattgatttttattctttgtctag

SEQ ID NO: 399284 - DNA, 365 bp, Homo sapiens
atccatctcacgttagacttgtttttatattggctttccctcttccctctttctctctcacacaataaaatgcctttgaaatgctgacacataaataatttcctacctaaacatctcagagcctgattccatcaaaaagaaaggagtaaaaagcaagttacagcccagcagcacatctgctttccctgggtccgggggctgccaggagggagcgggaggtctgtccacctcacaaggcaggctctgtcagcttttgtcactccctgatttcttattctttgttaccttttttcgcctgactgatttttacttggcatttaagttccccttagcactgccagattctaaaaggttatattcttttt

SEQ ID NO: 399285 - DNA, 248 bp, Homo sapiens
agcatctaaatgtaggagtgaataaagttaatttctaagttttaatgaagagtgagaagtctgttttaagggaaagcctagctccttttatggcctggaatgaggaatctggcaataaattttactgataattacagacaacgagcattgggatggagctgtccgctccactgggggtatgcagtgtaaagtattggttgagcatgcaaacaaagtcagtctagaaagtgtggacttttatttattta

SEQ ID NO: 399286 - DNA, 460 bp, Homo sapiens
agaaactgtcaaactctcttccacagtacatggtgctatactgtaaatggtattttttttatttcagtttctgattgtttgctgttattatatggaaatacgactggtttttgtatagcatcttcaccttgctaaattcgattgttctagaagcgttttgtagattctattgaattttctacataggtcatattttctatgaatagacagttttactcttttccagtcttgatgcatttttcttgctttattgtgctggcaagaaccttcagtataatgttgaatagaaatggtaagagtggatgtcactgcctcattcctaatttttgagggaaaacattgattctttcacgtctcagtaaagtgtttcctgtaaattttcatagctgtctattatcgatttgaagatgtttacttctattcctggtttctggagagtgtttattaggaatggttgttg

SEQ ID NO: 399287 - DNA, 470 bp, Homo sapiens
gctctggtttccacatttggcatggtttttttttttgatactctagaaggaggggaaaggagtggtttggcctttgttggggactactattgaagggggtaaacttgcagctattccaaaaagatgggttttactctggccatcttgaacttggaagggactatgtccagaataagtgggctcatggaactaactggttctaaagcctcaagatagggggcaatcagatttgaggctgagagaggtaaaccaagattttctttgaagatacgggctttaagaaagcaaaagtggctgagcgtgttggctcacacctgtaatgccaaggcaggaggatcacttgagcctaggatttcgagggcagcctgggcaaccgcgagaccttgtctctgcaaaaaattaaatattagttgggcacggtggcatgtgcctgtagtcccagctacttgggaagctggggttgggaggat

SEQ ID NO: 399288 - DNA, 310 bp, Homo sapiens
acaaagaatatttcccatgaatctgtactctttagcagctaatgaacatctgtttgtttgtataagcaatcaaacaaacaaatggagcccagcgctcagactcaagaactagtttcacatgtaagtaaaatgtaattctctgcttctattgtatcattattatttttattataactttggggtatcagcaccaaacaggtacatataattaaatataaaaaccatgaaatatgtatacaattaatttacatgtaattaaaatgaatatttgtataattaaaaataaattttgcattattcttattagtaa

SEQ ID NO: 399289 - DNA, 473 bp, Homo sapiens
agctaaggtggtcagagagcctctcaggtttgaaccgacagctgagtaacaaataggaagaagtcaaatggttacgtggtgattggaggaatggcattacaggcagagggaagagcaaatgcagaaagcctctacttgagccagcagtcagcctggaggactgttagactgggagactgtcagaagaaactcttaaacttcgtgaagtgctggcctactggacaaaggggagagtgggaggtagtaatgagatcagtgtagcgcctttgcagaacatggtagtgactttgtagtgagctctgcatcatccatacttttacatcccaagaagaggataagcagccattttaaatgaataagatcgaagaaccaggtgctgtggtgtgggcctgtagtcccagctacttaggagactaagtcaggaggatcatttaagcccaggagtttaaggccaacataactagatcctggct

SEQ ID NO: 399290 - DNA, 611 bp, Homo sapiens
gggactcctactaacatagctatgtgtgacaagtagaagtccctgtgtgtatccaaggttactcttacaacctctctctgccaatgcacaactttgcaccaaaatttcatcatgaggactccttttcagagcaccccagaattgagcaagacatgctaaactggcttcttcaccccctcaccccatgtcagcttcccaaccaagaggagtaaggacaaagttgcaaggctgcaagtataatttgtctcggttcctattattcctttcaggattatgatgccagagcagcttcagctgttctgctgtctgattcatggccaataccagttctaacaggtctaacccaaagagtcagccagataggacagggagagcaacggccactgtgagatgtctggaaggcgagcacagctctagaaaaggcattagctacatttccatggggttttgctcctggataaagcaggtcacaagggaaacctagatgtggaatctgcaaaagggcaattactggggctagttatataggaaatacttattgaagctggcaatgtgaaagagtctccattaagtccggcctttttgtatatacagtagaagctttgaagtca

SEQ ID NO: 399291 - DNA, 1347 bp, Homo sapiens
acatttattaggcatctgtagaccatataattgagacagagaaacattttggagaattagaagctcacactatttatggcataggttatataattatgataatttatgatttactttcttgacaaaaacagctacaaccatgtatacctactatttctcctacaaagtaggtgagattttttgattttacattagttagggaggtttttgatttggttttgctttaagataggcattgactatagcttctgattagcaacacacagtattttgtgcttgggtatctgtgagggtgtgtaattctagttgtcagaagctgtgctttttctccttgattttaatactagctgacctcaggcaaagccactcacctctcagccttttaaattgtgaagtgaatggactaaatggcattttaggcaattgttcccatattctaggccaacagtaaatattcagctctcctcaaaggaaaaatataaataatgctgatagaaagctcaaatttgatttttttattatgattatttcagctcttatggtatttaagtgtcttttatgaaatgttgattgtagtagcttggcaaaatagtaaggtggcagcccaatgttgatccctacttttttttttcactgctccatggaatttaaaagtctgggaaccactaagccaacatcctatctaaagttctgagacttattaaggtattaaagtaacagttttattttgagatttagcttgtgttatatggaatttttcattagcacaatgtgttgaggtgagacttcatggaaagttactgtaaaaaacaaaaaaaagtccttacttccattcagtttaccatcatggatccaaactaagggtaaagccaatacatcctaatatgtgcccaacccataactttaaatgattaaatgaaacacacaacagggagatctattgttaatgtgttaaccaaaattgccaggaattgccctaaaggggaaaaattgtttaatcagtaaatcagtgaggaaatacaagattataaattagaagtgttgctatggtgttagctcttacatccctgaacaacaaaaaagacagttcaaccccaagcatggaacagaaaaatgctgagcttagaatgttgtcagctagatattgtgtaaaatagatgttctctttaatacctgtgtctctgtggataatgtatttctagttcttccatcctgtcccttacagataaccagaagtcaattcatgttaatattttgttctttaattgtgacatcgttttcatttgtaaatatgcagcattatgtagattcccagctttttcatttaaaataatttcgagcattgcc

SEQ ID NO: 399292 - DNA, 508 bp, Homo sapiens
ggatataccagaaccagaattctcatagtaattacaacgtttcccaagtttcacatgagggattcaaagttggagctggattgctgtcatcgtaagtgattaagtataagtatctgtgtatactgtgatcttacttcgacagtgtttctacattccagaaagcagtttacttaatgacagcaatttgttctttctgattttctttggttatatacctttagatcttattgtccccttgtgaacaagcatatttatttcccttggataatgcttttattttataaattagccttcatcttgtactcagctaacgtatattaaacatttgtggggtttaagacaccttgtagaatgtagaataaatacatttaggggagtagtgggaagactggaagagcaggttaaacacggaaggtcttcagactagctgaacagcctgggttctgtaaacacaagggaagcatcaaaggttttggagcagatgaatgactaacatgagctaggcttt

SEQ ID NO: 399293 - DNA, 951 bp, Homo sapiens
ttttacagctggtttattcaagtcaagatccaaaaaagatacgcacacatgtttaactagcatatttcttaaatgtctttaaatctatacctagatcagtgccattttttcatgtcatttagctgttgaacgaaccaggtactgtgtcctgcggcatatcctaccttctgggtttgactgattgaatctttgtggatgtccctctgcctctgtctttcctgaactctggtagttgagatcaggactggagatttcttaggcaggaagaatccataggtgggtacttcctatcgcgcctcgaaggagacacaaagtgtccagctgtcccacttttactggtgttaaacttcatccaccagatagtgcacccattataaaattctgtccactaatgatttgtgctgagatccacttctcattaggggctgccaagtagtgcttttctatcattctttctgcacttgttagccgaaggttctctgtcgtgaagatatttcccttgtcaactatttggcttggatggaaaggctggatcaatgtttgattctttatttttcatcttcataataatgagctagctcctcggcaccccgggggaagttgtcttcaaatgctgccttgaagcatagaatatttaattctaatggatatgggagggaaggcccttccaagccgagggaagagcttgagcaaaggctcagaggcaggagaatgcagggtgtttagagaacagcagagctctgtagcacgtgcaacaagaggctttttgagtgaggaccctgagcacgatatggtgggaaagcaggggagaggtcaggattgctggtttgactcccagccatgggcaaaaggttctccccttgtctatacaatgaggacatctctctagatcagtggctttccaacgtttctggccccagttcactttaataaatacattttatactctga

SEQ ID NO: 399294 - DNA, 552 bp, Homo sapiens
tttcatgccagcagtagggtggtattgagggtggttttcctcctttagctgaaccattcccagtgtcacagcagcaaccacagcattcagatgagaaagctgtctctttgacggattcttttaggagcacacttgctgctatcccagaagcccctgacaagtgtgtccccatgtctctcggcttcatgaaccaatcactacagaagggatgggattaagttttccccaggagtaagggggaaagtcacagcacatatgggaacaattaggaaagggtgaagaagaatggatgctgagacaagcaaacacggttccacaccacagaccttaacctgaaaacaagtcctctcctggccctaggcagattcctacacttaatctctcctcctccactgacattctcagctgtgagtatcttcaatgtatcatgttctcctgtaacaccctatgacagctaaaacattctaatgaagtcatattttaggtgttttggagcagtggttctcaaagtttaaaggaaagaatcacctaaagatttattacaatttaggt

SEQ ID NO: 399295 - DNA, 514 bp, Homo sapiens
gtcggacgttagtagaaagatgggagcggagagacgttgggacgccaaaagtggaaggcaacgacacacggcccgtggcgccttcagctagggagaaagagagagaggacgggggctggcgggcgggattagctgccggagggctgagtttccgcaggcctggtaagagttccagctctcgcatccctttgccgtgagtttgaggaggtggttggagcggggaaatgcaccagaggggcggggccttccagttattatattacgtcatgcaaatgaggtggctagacagaccaatccaaaggccccgggaagcgtttcgtccgcaccacgcagcgtaggcattcttcgggcagttctacctatttgcataatgtatgcaaatcatttgaacaaagataggctaggaatgactcgttcatcaaaatatgggcaaccatcgactaagacggacatttaattttataacctataattttcatgaataaatttttatatttgaaattattgggaattt

SEQ ID NO: 399296 - DNA, 310 bp, Homo sapiens
gagcgggggaacttgagaaaaatcaggccgagacacatggatgtggagggagcactggaaagccactgaaggcctgggcaatggtgacacacctggcctgggccaacttgcagactcaggggtaccccacagcccaacctgggaaacctcacagccggcacagaaatcataaagcacacagcaatggcaccccaccagtacgcagggttccacatagagagcctggctgcatgatcttgaggtcacctaactcccgggcctcccttgtgtgtctggacagggagagaggggaggattggcttcaggagag

SEQ ID NO: 399297 - DNA, 556 bp, Homo sapiens
aggttgcagtgagatacgatcgtgccagtgcactccagtatgagtgacagagagggagaccctgtctaaacttttttttaaaaagtagaaacagagaacaaaaagcagattagtcatttcaaaattacttttcttgtaaaggtttaagcagaatggacttccttatgtggggtaaaactgaccagtttggggatttgatgatttctcagaaggtcagataaacaatttcgtttaggcgtggttgggtagaaattcaccttgagtaactctgttttggtttggtctactgtgctgaagctcagtgcaaaacaatgggctcctataaattgtatttaacagctgttaacattatcacatttaatcttctcaataactaaattttagactaagtgtgcctgtagtcccagctactcaggaggctgaggagggatgatcacttgagcccaagagtatgaatccagcctgggtaacacaacaagactctgtccctaaataaataaaatttaaagatgagtaaatggactccaaaagtccagataatttgcctattatcaca

SEQ ID NO: 399298 - DNA, 515 bp, Homo sapiens
gggaagccctcctgtacttactttatccctcctcctgtatcagttaggctgccttgtgctgcaagtagcagaaacctgactcagacaataccagccatcccttacatgtgtttactatgtgcaggctctgctctaagtgcttgatgtatgtatgtatatgtgtgtgtgtaaatgtgtgtctatatttaatcctcataataaccatgtgaggttggaactattatctttgttttacagactgaggctagagatgtcaagtgacttgtatgaagtaagatggccagtaagtggcagcaccagattcaaacatgggctgattagctttagaatctgagcggttggcagtgacactgcccttcctctcactaaggaactgcattatctcatagccaagtgggcagtatttccatagctcttattcttttggctctacctttctctgtatgtccactttttttttttcaagtttggattcctcatgactgtcaacatcatctaggatcagcgtactaatt

SEQ ID NO: 399299 - DNA, 470 bp, Homo sapiens
agggattttttttgtcttgattctgaagctcttaaagaaatgctcctttttctccataacttgaggatttcacaattgtattggaattattggtgttaaggagttaggtccatctcttggcagcttgtgaagggtgggcaggcacctgtgaattcttcactggcttcttgtaagaatgactttactggagggtgctgagtttgtgattatctcctctgctgctagaaaactccgtgaaccctggtacatatagcgtgataaatcaagtcctgtttttgctcctaacttgcattatggtgtttgatactatatcttcatttctcccatggtagtaataacactgttggaaagagctctcagttggaagttgaagatccaggttctagttgaggcaccagagtttccttgggcaagttgccatacctttttgggccttggtttcctcatctcaataaaatgagtttctgttc

SEQ ID NO: 399300 - DNA, 390 bp, Homo sapiens
gctgagccgtggggctacttccagttcaatgtgaccagcagaaggcacagtactttacaggtcctgcagaatggagggcgtgtaaccagcctggagcaaggaaagagggcgtcctgcagacaggggtgcctgcgctaggttttgaaggataacaggttggccagagcagacaggaacagaagaaccccttctagactatttgaagacaattctccatgggtcgcttgcatttctgcatgtatagtgaaaagtctttgacagcttttattccagactgtctttttaagagtacttgagtatctcagatgatccagatagtttctccctcctggaaagagagcagatttttcctcctgaccaggataataaaatcatacctctcactttgga

SEQ ID NO: 399301 - DNA, 354 bp, Homo sapiens
catttttctgctctgaaacataaataatttttaaaatatattagcctttgaaatgatgtaggaaagaatgtggaattaaaaccaaagttaaaataatgctagccacactttgggaggccgaggcgggtggatcacggggtcaggagatcaagaccatcctggctaacacagtgaaaccccgtctctactaaaaatacaaaaaattagctgggcatggtggcaggcacctgtagtcccagctattcaggaggttgaggcaggagaattggtgtgaacccgggaggcagagcttgtagtgagccgagatcgcgccactgcactccagcctgggagatggagcaagactccgtctca

SEQ ID NO: 399302 - DNA, 395 bp, Homo sapiens
ctggagtaactgggactacagatgcatgccactgcacccagttaaaggctctttacccttctgaggctcagtttcctcatctgtaaaatggatggatgtcctcatgagttattgaggggctcgaatgaaacatacaggccttagatgcttggaatggcatctagacatggcgggtgttcagaaaatgatggcagtggtggtggagatagcaataacttctctgctgtgtggctcttctcttctattacaaaagatcaggaccttttgtaacaggtcaaggtgaatgctttctggagtagactgttgtgttaatgctctgaattggatataaagtaaaatttgggattccctttattttgtaggcacatgtaagtcaataaattgccttgtaattt

SEQ ID NO: 399303 - DNA, 308 bp, Homo sapiens
ttgcaaaaaccttaaaaggaatcttgaaaggatcaaactgatccacaagtaaattagcttctaccagaacaaagcccaatactctgtaaaggacagcacaatgcagacacctacagtgtaatattgatagtgtccagcattcgcttaaaaattactagacatgcaaagaagcaggaacatgtgtctcataaccaaggaaacaatcaatcaataaaatagaaccagaagagtcagaggtgatagaattcacagagaagtaccttaaaatagctattataaatatgttcagggacttaaaagaagaactc

SEQ ID NO: 399304 - DNA, 471 bp, Homo sapiens
  misc_feature (45)..(45): n is a, c, g, or t
  misc_feature (66)..(66): n is a, c, g, or t
  misc_feature (151)..(151): n is a, c, g, or t
aatgtcccctgggtccacagtgggtccccttttcacccttggcgntaggctgcgcactccctttcnccgcagctttaataactcctggcctggcaccctacgcccaccctgacttctccatcccccagcgcttgtcctgcttcaccctacnccgcctaagactgtaaaggcctcgggatcctcattttaaatacaaggtttaagcccttcgtttcaggatggatttctgcagccactacttcccagctactgtccttcgtcctgcccgggttttcagagcctgatgctgccactggcgacccacaccccctcagctgcttttcagaaccacacgataaaatctgcccctgcccgcccccctccagtccaggcagtcgagctccacctgccctctcctgctgcttcctctcggtgatattttttctacgccaaaacagacgggaaagggaacaaaataaagtgaaatccaat

SEQ ID NO: 399305 - DNA, 482 bp, Homo sapiens
ttaagcagtccgcccaccttaccacccaaattgctgggattacaggtgtgagccacttcacccagcacccagcccctttgtgccattctatttggtaaaagtccctcagtgattccttattgcttttagaatagattccataatttagtatattgttactctccctctccagcagtctgttgccacaccccacacatgcttttccttttgcttcatatgacctttcacccccaccccatatcctgcgattcttgcatatttttgcaaagaacttcgaaacttgctctgaacttcttcaatctggttttaggctcctcacctttttttcctcataacacttgtataaatcaattattagagcactctgttaaaccactgttctgtgattatcaccttacttgtctgcccccaatgttagactgtagcttcttgaaatagtctttcctcgtttgtattgttgcactctttgcttgacttaactc

SEQ ID NO: 399306 - DNA, 286 bp, Homo sapiens
ggaattaattatctcacatggatatcatttcacctgatcttgatgaacaaggaaatgggtgatttacccaggaataaatataaagttctgtatggtttggaaagcacaaatggtcacctaattttgaaacactttaggtaaattcccattcagaaaaacatttatcacttatataactaatgaaatgcttaggggaaagtgttttggctgtcaaagaaccatactttgcttttagagactatgtttgtatttgaatatttcataaaaactatttctaagccaagga

SEQ ID NO: 399307 - DNA, 135 bp, Homo sapiens
aaacaaaaatgcttgaaactttgtgagatttaccaaaatatgccacagtgacacattgttagcatgtgttagctattggaaagatagcattggtagacttgcttaatgtagggttgccacaagggttcagcttgt

SEQ ID NO: 399308 - DNA, 447 bp, Homo sapiens
atttagaaattgttaaatattagcaatttgtttaagcaagggaggaaaaggaaccattagaagaaattcagaggcattaaaagggtcacaaggattgacttatgagatcaaacaaacaaaaaaaaacacacaatgctagatctgttgctggacaaaaccatggtaagccaaagctctaatagtgatatatacagtctggggaaagcaacttcacattttggtgtaattgagggaggaaaatgacccagttctacttgctaataataagtatcattaggtaaaggatatagtaattgaaaggcaactcctcagatttaaatattatttaaagtatctttaagcaagtagataagtatagcaacaatcaaaaatgcttattcaactcaattcctactttcccttcccaaatcttaaaattgataaaaaacaaacacacaaacaaaaaca

SEQ ID NO: 399309 - DNA, 486 bp, Homo sapiens
ggcttgtgggatccaggatctgatcctgggtcaggaaaaaggacatcagttgaaagactggtgaaatccaagtaaagtccaaagctttaattggtgctgtattatttttattagtttcgacaactgcattgtatttccttgtgatgttaacaatgtggaaagctgagtgagatgtgagggagctctctttgtaaatgctgtctaaaattatttcagaataaaaagtttaaaatatatacatacatacataacaaagaaatacaccccaaaagggagccaagaaaaaatggcatttaggatggtcccatagctcacctttcaggtactggatatgcaatacttgctactgtctttcagaaataaactctacaaaatgtcatgtagggtacagaaatgtttacaagaattgttagtaaactgccaatttagagacaaactccatttaagcattttagcaattgcttaataaagttatgtctgattgtt

SEQ ID NO: 399310 - DNA, 608 bp, Homo sapiens
agctctgtgtcactgacagtctgaaaatctccagatgtctatagatgtgttttgggggcgatgtctatgggccacctgagattgtccacacacggttgtggggatgtttgctggaggcaggaagacccatagaaatcctcaaaaatcggaaagggacccacagttcctaagaaggtgtgagaggcctggttgtcgcaaaggcaggctgtgtcccctcacggccctagtgcagggctactttctgctccaaccgaactaaagacttgttccagggcagcagggccccagggcacaggcttttggggccacccctgttcccagctccggccctgcctttgctatctgcagtactcaggccagtgtccccaaaagccccagaggctgtcagggagggaaatggggggatcgtgggggaggtgacttgcccgagggcccccaccaggaggtggtggagctccccattggtctggctctagaccccagctctgaccctagaccccagctctgacctctgggccgcacattgtgtctgaagccaaggaatgacgcaggcagacgcccctgctcgccctcctgctgtgccagctcctctgaccccactgcctctg

SEQ ID NO: 399311 - DNA, 669 bp, Homo sapiens
agtggctggacaaaaaccctggcttttgaatccaaatgccagcatgaatcacaccatagtaaggtgatggaaaattttgcaaagccatctcagagtcagacaagttccttctacaacacgtctttgaaagttttttccttctttcttaagcaaggtaactagagtcatcctctagataagcagagaaaatattacttacaatttagatggcactttatattgaatgtgggccagaaatccttctaacacacacaactcatgcacactcatacccaaactcccacctgttacatgctcggctgcttattaatggaatgggacatttacctgcacaacctaaaatcttatctgggggctgcagacttcatattggaattatcaaacatttccagcttattagcccctgcattcctgaactcaaaggtcctacagagcctgaggaagagccagaagtttaaagagcgcattttttagtatgttttcctgctcttaatgagggagcttaaggtctctttatgctctgaaatcccatgttgttttgacaagggccactctttctttcccttaacaaacactgggaacccaccagtctcctctcagggcacctctgaactctggagagcaaagcaatgctctcctgagcacctctgagagctcacccagatccaa

SEQ ID NO: 399312 - DNA, 150 bp, Homo sapiens
tggcatttccaacccaaagattctcattttataattttatgatttgaatatagatgtttgccttcagttaagaatgagaatcaggtaagaagtaacgggactaagctccctaagaaaaagaggcgaaaataggtttctttacaatcaaca

SEQ ID NO: 399313 - DNA, 443 bp, Homo sapiens
aacaaagttgatcatagtgtctgtctcagggttggcaaactatggcccatgggctgaatttggctgggcacttgtttttgcatgatctgtggattttacactgaaaaaaatggattttgcgttaataaaaaatatatcgtggcatgtgaaaattatgtgaaattaaatgtcagtatcgtaaataaattggaacatagctatatgtgttcgcttgtgtattgtgtgtgtctgttcttgtgctataatggcagaggtgagtagttgtgatagaaactgcgtggcctgcaaagcctaaaatatttgttatctggctttttacttaatagtttgatgatctctgatctataccagtcctactcaaaatgccttgataaagtgacataaggagcttgggccagaatgtaaatcaaggcattacttccttcatcaagaaaagcttacta

SEQ ID NO: 399314 - DNA, 218 bp, Homo sapiens
gggttttatctctttcctcttatcagaaaaatgcaataggtccagaaagcatgataacattttatggtctctgtactagagttgtttttcagcataatgtggccttgacagagagacctgaacttgaaagctgcttcttttcaaccaagaaacagagctgctttatttgtatgtattttatttgttcaatctagaaacataaaggtaaagtgcacatt

SEQ ID NO: 399315 - DNA, 446 bp, Homo sapiens
tgccactttaaatattgggtatgggaagagctgggaggtgggagtttgacagaagaatgaagagaacgtaatgtttcctttgataacttttccttggagttacatgaagaattgggtgacagtaagaaaggatataaacaattcattgtaagctgcaaaatttagttgtatttaaataatttaatatgatttaagagtcactaggatgcagtgggatggtcctattatcgacccttaatttatttttattcactgtagaggatgaatctatccggacctgcttgcagacactggctttaaatgagttcgttcccaaattccatgcatgctaagcgtggatgaaagaagacgtaatgtaacatgattgtacttttcttttagagagtcccatctattaatactttttgtcccatttgtagttgtcatgtttgttctgataaaggatg

SEQ ID NO: 399316 - DNA, 560 bp, Homo sapiens
ggattacagacgcccgccaccatacctggctaagtttttctatttttatttttagtagagacagggttttgccacattggccaggctggtctcagatgatgcgcctgccatggcctcccaaagtcctgggattacaggcgtgagccaccctgccaggccacatatgatatattttatcaatgccttatctacatgttacataggaataatctagcgtcctacctgtgtaaaaaccaactctggaatactgaaactgagctacttaatattctgaaaatcaggacgggtgtggtggcttttttttgcctgtaatccgagcactttgagaagctgaggcaagaagatcgcttgaggccagttcagaacagccccatctgcacgagaaattaaaaaattagctaggcgtgcatgcctgtcccgctactcagaaggctgaggcgagaggaacacttgaactcaggagttcgaggccaacctgggcaacatggcaaaaccccatctctaccaaaaaaaaaaaaatttaattagcgggacatggtggcatgtgcctgtggtcccag

SEQ ID NO: 399317 - DNA, 544 bp, Homo sapiens
ctgtgaggcagaggttgcagtgagccaagatcgcaccactgcactccagcctggtccagagtgagattccgtctcgaacaaaacaaaacaaaaatattgagctaatctaaatggtaaaaatctagatttgaagaaatttattttaaaatagttgttcatttgtcaaatagaaaagtatgatcttagcaggtttggttagatccctatctgaaacaaagtaaactaaagatgtttttcttgatcaatgcatagcaataactgctgttcaaacatgtgaggaatcaccagtaaattgggggatagaaagcaggaaaaggagcttttttctcttattttttttcatttatcagtttttcccatttgtccatcctttcctataatcatggaaatttttattttttacactcctctccccatttttttatcctagattgccaccacaccaaggttttctagagttaggcagaaagagaacctgggcctagatgctaatggaaactatcccatgctttctcagactctctttcctccccagagacaagag

SEQ ID NO: 399318 - DNA, 467 bp, Homo sapiens
ctcagaaaagcacgggactgttttgtgcttcagaggctttggctccaccaagtttcagatacttagcgtaattcttgttctggctgttgcctttgtgtgtgaattagaagattatgatgaggttgctttttgacatttttcctggatataatacccacttgtacttaattcttagtccacagtagggatgatgagtaaaaagatgggacattatttttgggccattaatgtatgactaaaatatcatctttcatgctataaaattttataccctttaaaagcctgcagaactgactcctagaagtaccccaccccacccctgctccttggaggacaacgtgatcactgtattcagctctgtcaagaatggtccaggttcttctagatgatctgcacaaatggctcctctcctccttcctgatgtctgccattagcactggaataaagttcctgctgaaaataaacaa

SEQ ID NO: 399319 - DNA, 465 bp, Homo sapiens
cgcaggaggcttctccctctccctcttccccggagagtcctcctgtgagctgtttctcctgcagcagtgccatgctgccccagagacctgctcccatcctcctctttggtttatcttgattccaagggcatccttcccgagctcgctggtggatgcagggatggtgtgggatagggcggtgctgatcgcccctccctggggttgagtgtggctcggtggtcccaggagcatctcctccaacgaagcgtcttagctggcaccctgtgtgcggggagctggctgggcttccacgtactgggagggcaagagcaggcctccggcagacaaagcaagggagggagtctagctttgaggaacaactaacacggaagagaaggtgtccaaagcgaccctgacagaaccagcaggtggcgctagacgtggcatggtgggtggatgggcagtgcctggaggggtctctctagc

SEQ ID NO: 399320 - DNA, 436 bp, Homo sapiens
aaggactctgaagaacttgccagtaagtgtgataggaagaataatgcccccacacccccatcacccaaagatgcctacatcctaatccaaaagggagtgatgatgtagaagaggaagtcagagatacgatgtgaaaaagactcaatccaatgatgttggcttggaaaatgaagaaagagaaatatgagccaaggggcatgcgtgatttctagaagctagaaaaagcatggaaatggactttcccctagaacctcaagaaaggaacacagtcctactgacaccttaattttaggccagggagacgtctgacaaatttctaacatacagaactgtaagatagtaaatttgtattgttttaagacaccatatttgtgacaatttgttacagcagtaataagaaactaatataggaagaaaacaaaaaagctaattgaaa

SEQ ID NO: 399321 - DNA, 135 bp, Homo sapiens
tcctggggccccactcctttaacgggtcatagcaactcccaagtttgcagcagctctcatggctggaataattcttatgactgctgcacttctcagggtcagagcactcctaggagacccagtgtctctgagatt

SEQ ID NO: 399322 - DNA, 252 bp, Homo sapiens
ttttattctggggtcatttctgcgatatacatattcatgggcctagcttagtgtttcttttctgggggctgggagatggagaccagagtagaattgaatatttctcctttttcttcctggaagaatcgatcttcgaggattaagttggtagttaaaaagccgctttatctttctgaaggccttgcccttttatgtgttgatctgatacccaaatgtagaaaacagttctatacacagcttgaggatatattt

SEQ ID NO: 399323 - DNA, 488 bp, Homo sapiens
caacatatgtgttaattgattgttattggtaaggcttctggtcaacagtaggctattagtagctaaggttttggggaagtcaaaacttagatgtgtattttcatgggggattggagcccctagccccttcagtgttcaagggttaactgtacactctatgatgaacacaacaatgaaatcacgtaacaatgcatttctcagaacatttctcccttgttaagagacacttgactgtgttcagttatatatatacgtgagtagatatacatatatatgtgtgtatacatatttatatgtatgtggagagaaatataatgtatgtttatgtatgtgtatatatatttatgtgtgtatttacttattttgcttttatatgcaaataggatcacacaacacatactgttttgtgatatgctctgtgcctttaaaacaacttgataatatggcaaacaactttccatatcaataaatgtatttcttatccattg

SEQ ID NO: 399324 - DNA, 193 bp, Homo sapiens
gcaggacaatcgcttgaaactgggaggcagaggttgatgagccgaaatcatgctattgcactcaagcccaggagacagagactctgtctccaaaacacaaagcagttcaatggaaacatcactaacatcattttttttttttgagatggagtttcgctcttgttgcccaggctggagtacaatggcgcaatct

SEQ ID NO: 399325 - DNA, 558 bp, Homo sapiens
gaaggaagctgatgtcagcttcacatccagacttgtgtgagtaattagaaacttcagagggagggtaaagaaaatctgcctactagttgacagcccccttctcagcccatatggaccaactcatgaaggggaagaagcagagggcatgaggatccattcccaggttagcctgggctctgcttactgcccccaggcagggctccagcacctgcaggccagggactccacaagggtctttggaagccactattgcaaagcagaaatacttctgtacattatctgctaattgtccatgggcaggctggaggcagcaaagtggcttctggacccctacagataaatttcagcaaagagattttaatcaattgatggatcgatctcactgtctcctgctacttgcatattcccttgcagcctttagcccagcaagaattgtagtaaaccaagatcagcatcatactgaatcaaaaggggtttaagaaactaaatacgctaagtcaaatgttttaatagcttatcttaaaccaatatgtagcagtttgaggtgtgattgaatgc

SEQ ID NO: 399326 - DNA, 794 bp, Homo sapiens
tagtaagccaccatctagacctctttacagacacaaagctgaagatgctcagaatctcaggcacagccccgaaggcagccagctgggtccacttcattccaagccacaaatgcaacacagaatgctctgtgctgcctctgcataaccacccctttcactaaatgcaggaagtcacccccacaaccaacaagctctatacccgcaccccatttcaccctgtgtctagtttgaaagatacatcttgaatttagctattctagaaagagataccaatacaaatgaaccctgaatcactttccaaacacctgcaggtgtttccaggcagttcatgaactgtaacacagtgaatttttctgaagggtggtctgttttgaggggctgcacagcagttttactgattgcggaccagaccacctgagatctacaggttgggatgcatgtgagggaagctgtacaaattccccagaatcgtgactccagcccagaacactgtcactacttgactagagtggtggtaattctggaatcatccgggtgacctgcctaccagcaaaagcttttccttcttaatctactgagtaacctaatacctgaagccagctcagaaaattcccattatctctgaaataaaatgttttcatctgagttctctctctgtatttctttatgctgatattttcatatttcatattcttttcataataatgctgataatttcagtcatcttcaggaggagggtcattcctttcaaaagtctccccttcaggtgagcacgttcccctatttgtattcta

SEQ ID NO: 399327 - DNA, 846 bp, Homo sapiens
ataagttttttcctggttattgctgagtagcatttcattatgtgaatatactacagcatgtttatttgtgcttccagaaatcctcctagtctcaactatctctagccatttggccacttgttctggcctagcaaccacctcaaaaaacaattcagcctgggctctgcccatctgctactccagcaagcagaataatagcacttgccacctggggcatctctgttgccactgaagcatgagatgcaatgagacctagttggttctcgtgtgtgtgtaacctgtcagtgatgtggtattaatgctctatggggaaaaccttggaccatgaggagatgggcctcagaagataaattattctcctttcatccttcagtggtctgtagctcataatgcataaggttggaacataatcgttcatgggggcctttcaaaagattgtacttgatactaattaaaggcctactcagaaatccatgtcctgatacttgttctgtctccctaactcccttttttacccacccctgtgcttcctaataaagtagtatcaggtaaacttttgcctcagttctatttcttggggaaccccaggtaatgcatcctatatgcagacatttaggttagtttttgtcttttttcttttacttacctgaagtgtttctctagagtcttgctagtttttaaagtatgttgaagtatgattttctcctttatcaatcctcaaaatttgtcttacatactgagcatcttctatgtgtcaggcactcttctaagttataggaacacattggttaaacataatattcatgattcctgcttgatgggcagaagttatataggaatgttata

SEQ ID NO: 399328 - DNA, 130 bp, Homo sapiens
cctcccaagcagccggtgttacaggcgagtgccaccacacctgactaacccagtagctcttggacattgacatggtcacaagttttgtagatctttgagatgatacatttgtttttctgagtaacatgaa

SEQ ID NO: 399329 - DNA, 368 bp, Homo sapiens
acttaagtttcagaaaactaatctagacttgtcctctgaagactcaagagtttgagatttccaatttcacaatcaaaattagaatctagtatactgctgtctctgcatttatgttttgattaatctgatagttctgaaagatctttctctgttgattttcttcttttatgccattgtaggcataaaattaaaaatggtttcttagccttggcaatacaaaccttttcagtcaggtgatttgttgtgggggcctgtcttgtgcagtataggatatttagcaccatctttgccctctaccttttagatgccagtagcatgctcctcagttgtgacaagggaaaatgtctccagacattgccaaatatctt

SEQ ID NO: 399330 - DNA, 383 bp, Homo sapiens
tatagtgtagttgagggaaaaacacgtttggatgagcagtgatagttacgtggtaggggactgagtgtgagtaatcggttcagggttgtcgcaagccaacacaaaaaagctcatagaaggaatgaggcctaaaagcttagtgtagggtatggagtgtgcaggctggacctggcttttgcctgcagaaatgtgctacaagcatttcagacaaagggactcagtggtagacctcttctacatatgccacttcagtagtgtggttttagattttatatttagccatttatatttagcctgaggcgttctgagtcagtccaaatccactgtcactaaataaatgggttatgtatcttaataacagaggattagccatccttatatgt

SEQ ID NO: 399331 - DNA, 480 bp, Homo sapiens
cataactcgaaattattcatttgtcgtctctaaaataccttctgtttagcttaccttctcagaatcaccagtgaatttgtgagcattcagacgtcaaaaatacgtgctcaaaagtagtttttaaaaagagacaaaagaggccaggcgcagtggctcacgcctgtaatcccagcactttgggaggccaaggcgggcggatcacgaggtcaggagatcgagaccatcctggctaatgtggtgaaaccccatctctactaaaaaaaaatacaaaaaaattagccgggcgtggtggcaggcgcctgtagtctcagctactcaggaggctgaggcaggagaatggcgtgaagccaggaggtggagcttgcagtgagccaagatcacgccactgcactccagcctgtgcgacagagcgagactccatctcggggggaaacaaaagatgaaagaactgaagtaaataaaagtcatatttttaatatg

SEQ ID NO: 399332 - DNA, 363 bp, Homo sapiens
agctattcagttaactttcaaacaggtatccaagaacttcagtgaagtattccagaagttagtacctggtggcaaagctactttggtgatgaagaaaggagatgtggagggcagtcagtctcaagatgaaggagaagggagtggtgagagtgagaggggttctagctcacaaagcagtgtcccatcagttgagcagtttactggagttggaattagggtgtcatttacaggggtagcccttgctctgatttttgccattcagaaatgtgacccggctccattttacttgtttgatgagattgaccaggctctggatgctcagcacagaaaggctgtgtcagatatgattatggaacttgctgt

SEQ ID NO: 399333 - DNA, 458 bp, Homo sapiens
gagctataaggttcttttccagtttttaaagtaattttgctggtttgtgaaatttataattcctgaaacctatggattagaagactgacccttagagataaactatcctgtgctgtctcttgggaggacagattcagcagaaagttactggctcttctcagtttttccttttcccttctctctcatcagcaacaagagtaggaaataagctccattactgtcttttcctggtgtgtttgctgttaacttgcaggttaccttgggccacaattatctttctgaggaagttctcaatggcatgctcatgttggctaaagtgggatattcatgggtttcaaattaagaaataatatgtctattaagtccaacaactatttctagtcacctgacactatttaaatcaactgtgataaatgatgtaatagtgtgcattttgagtaaaactcagtgattaatga

SEQ ID NO: 399334 - DNA, 524 bp, Homo sapiens
taacatgggctcagcaacccctttcatgttctcaaattgtgatgccttcaggtgtggaacttcccaggggttaagggttaccaggtggtttttgaaagcagccactgctgtggaggtaacagcaagctcaggatacaagatctcttaggcttaggcgccagataaaggttttctgcttttggaggactcttgttcccatggctggcatccactgagaagagccagtgggtaacagaatagttaatacagtggttcaaatatttaattactatctgttttatcttataccatttggccttatattgggctgtacaaactcttagaagtgcccctttgcccagctgccctcaagggcccatcaggaggaaaataactggctaattccagctctggtcatataggctatcttctgtggacatggaagggtgacatggaagagccccatttgaagattgggggtacacttggagctagagagccacccatcatatggaggagaagtggtcactctatcacttacaata

SEQ ID NO: 399335 - DNA, 254 bp, Homo sapiens
cctaggggcagggggctggggtcagttctcagtgtggggaggtggctagtggcccaggtcagcggccagagattagaaagctacacagacagggtgcagagggacgggtgcatggacttggcatccgagagaaggggaaggggctgaaatgatggtcttattgctgctgctactgactctgtgtaggtgtctacaggtagctctaagttaacctgtcaaaactgaactctcaattctcccctaaaacctactca

SEQ ID NO: 399336 - DNA, 540 bp, Homo sapiens
ggatacaattaagaaggaaagataagccagaaatagactaaggcagtttcatagagactgaagcctggattcaaattatcttaacctctaattggattaaggtgatttaggatagccagtggctagaaacaaatttaaatcctctctagaggaagatactgtggaagatactatcatcctagacctaatatatctctcatcatttttcatcatgatgtttggcactcagttataaataattaggcctatgaggaaataagaactgtgaccaaaagctaagagaaacagctagacccacaggagatcctagtaatggtgttaacagatgcaaactttaaattaactatgtttaatatgtttatgaaattaaattataaaaacaaacctggaaataataaaaaaaattaactcaaaatggatcaaaggcataaatgcaagagccaaaactataaaactcttagaagaaaatataggtgtaagtcttcgtgatcttggattaggcaatgatttcttacatatgacaccaaagcacaagcgaca

SEQ ID NO: 399337 - DNA, 632 bp, Homo sapiens
ccatttaatatgtatcgtatatttgcatgcattatgtaatcctcacaaagtgtagatgtcttcattttacaaatgagaaaactaaggcaaagtttcagatggtatagacagaaccaggattcaaagccaggtcttttctctacagcatcctacccaggcaaggccccaggtccgtagagttgctgaccacagaggaggaggaagttgggccacagctctcaggtctatgagagggcgttgtcactgaagtggaggaaaccaggattctctgcttcctagagagacactgagattgttcctttaaaccacatatgatttttaaaataagatatgtagagcagaaaccaatcaactagcattggctttggtcagaattatttttatgataaagtagagcatatttttaaatttttaattatctaagtaatattcaaaaacacatttgcacagtaaaagcattaagaatgtattaggttgatgcaaaagtaattgtgttttttgccattacttttttttttttttttttttttgagacagtcttatctctgtcacccagtctggagtgcagtggcatgatctcggctcactccaacttctgtctcccaggttcaagtgattctcatgcctcagcc

SEQ ID NO: 399338 - DNA, 200 bp, Homo sapiens
tgccactgcagatacttggggctgcaacgagataagggatgcagcttgagaatgcatttgagaatgaaattaagtagtcaagcatttcatatgggttttattgccatttaagggcattattcattcaatggagatgttgttaattgttttgaattcacatcaacatctccctaaaaaaatgcagagatttaaaaaatcta

SEQ ID NO: 399339 - DNA, 340 bp, Homo sapiens
gtgataatgacatcttatcaagatggatgtccctggtttcccagtgctggaatatagaaaatggatggacaagtaaatcccactcagcacccatagtccaggcatggggacctcaacacacctgagccccagacatcacctttcattctggacctaccatgaaagacttctgaatccaggaagagaaactgactgggcaacatgttattcaggtacaaaaagacttggactgtaactcaaaaatgatcaaataatagtgcatgcatcaagtgcaatcggaagctcttctggagagggagagaagcttccagttaaggtgacattgaagccaagtcctgta

SEQ ID NO: 399340 - DNA, 576 bp, Homo sapiens
ccatgttggccgggccagtctcaaactcctgacgtcaagtgatcttcccgcctcgactcctgatatcaagtgatcttcccgcctcggctcccagagtgctgagattacagacgtgaacccatgcctggccaggaattttgttttttaggaaggctttctactaatggaattcctggccttgagaggatgttactttagagggaaaggatttttttgttattaaaagagccacctaagctgaagattcccttgagaacaagtactgtccctggtttcccagtgctggaatatagaaaatggatggacaagtaaatcccactcagcacccatagtccaggcatggggacctcaacacacctgagccccagacatcacctttcattctggacctaccatgaaagacttctgaatccaggaagagaaactgactgggcaacatgttattcaggtacaaaaagacttggactgtaactcaaaaatgatcaaataatagtgcatgcatcaagtgcaatcggaagctcttctggagagggagagaagcttccagttaaggtgacattgaagccaagtcctgta

SEQ ID NO: 399341 - DNA, 693 bp, Homo sapiens
catccccaaacagtgtcctcagggatgaatgagtaggagagagggacaggctttccaggcaagaaggagcctgagcaggaaataggaggagctggaaggagtgatggaggtgaaagagaaaaacgcgtgtctcaggaagtgaaagcaggccagtctggttggtgctatggtgcaggggaagagcactgagaggagcagaagagcagccaaagccagtctgctgtgggtgaagcttcagctgcccatctgagtggcgatgctgatcctggtcagcagggatggaagagcagggactgttcacaagtgtgagggtgcaggtcccacggttgccttagacatgatcaaaaccactgtcacccgaaactggccttctggagaagatgctaggcaagggtggtgatgataggaagagacagtcaagcaccacatacagatgctgtgtaagaaaaggaggatattttggggtagtgtggggcagagtgcctgggtgaagtggggaactgggctcagatggagaggacaggcaggggagacacagagcctccacctaagctgaagggccacgccccagctcagttgtcagactcaggcgacccatctgggtgagctgggtcataaagtcccatcaggagacaagatgctctgtcaaattcaggctcattactaacaatttagaaagtgcaagaactatat

SEQ ID NO: 399342 - DNA, 848 bp, Homo sapiens
gacagggtctcactttgtcacccagcctggagtctagtagtgtgatgatagctcactgcagcctagacctgtccaggctcaagcagtcctcccacctcagccccatggagtagatgggattacaggaacctgaactctcagcaagaatgaacgtatagaaccatctcaaatttagcggctaaggactaggtccttggccagaacctactgaaggctctcaaaataggaggtccatagacacagagtcccatataacattacatcagaccaaggtcatgggattagccaatcaatcacatactgtaacccagaaactgtctgcctgtaagaataatgaaatagtctcctgcaggtacagatgaagaccagtctggtgataataatgtaaagaatggggcaccatactatattcgaaactaattatcattgtatggtgtgaattctccaatatatttaatgcatgggtccaagaaccagataaacataggagttatttcacttgtcattatatctcgtaacccattggaggaatctgtgtgcactatccctgtaactctgagatttgtgagtttagagaacctgtttctcagaataagaatgctactattaggggacaaagaaagagtcccattaaactttaatctatgactgtcatccagttactttgagctccacttgccaacagaccagtgatgaagaaaggaatcaccattctggcaagagtcatcgactctgatcatcaggaggtgatagagctgtattgctcagaggagtcaaggaaatatatgtgttttacttagtgatctgctgagtcatttgttccaacaataaaaggatgagtgcagcaa

SEQ ID NO: 399343 - DNA, 496 bp, Homo sapiens
gtaaatatgtgaaaggaggcccctctgagtgcttcacaggatgtgggcaacacttattttgccgtcctgtgtatattgccgtgctttccacccatgcttgcccaagcttaagtgatgggaacaatgagagatacaatattcttggcaatatggccatactccaggttttgttcattcagacgtgacctcaagaacatgtcatgcctcagctccaccagtaaggatatatgtggtaactgttgtagataacagagcccccagtgatagaatctggcgtaaatcagcttctatttcactaagagcaggaaaacacaatctgtaactcatacacaggaacgtcctactctggatttatgatggggttcatcaaccctgcatgttttgaagattttttacatttgtaaacagtaactaacctgaattatttcaatgatactctcgtcacttgttctttctctgcccctctttcttaaatgacagttaaagttcttcctta

SEQ ID NO: 399344 - DNA, 307 bp, Homo sapiens
gaggttgtggtgagccaagatcatgctattgcactccagcctgggcaacaagagtgaatttctgcctcaaaaaaaaaaatagacttttatcttctttggttttcagtggtttgactgccatgtgccctaaatgtgctttcattgtatttattccaatagtgctttttcattctgtggattgatgtctttcattgattttagaaaactcttggcctgaatctattaagataatgcttcttcctcaattcctactctcctattctcctgggactccaattagatggtagtcagccttttccactattat

SEQ ID NO: 399345 - DNA, 871 bp, Homo sapiens
tgttctctgactataaaagggtgtcaccttgtcaccatcttctatcacacaggacccctatgggcttggtttggttttgttctttcatcattattatttggaaagttatatttcctttactgtccttgaggtgtgaggcttcacctcatcttgtctccatatccctgagtcactaaggagtcctatgtcaatgacacctctccatatgctttacctaagctgccccttctctcagcaagttcgcgccaggcttccccatgaaggccacctaagggtgtctatcgtccccctcctaaatctccccaggacttttgaacaagggccatgtccagtttaatgtcacacaaagaagactcatcaaagcccaggagttgggagttcttgctcctcactgccatggaaagcatgaaacatctgagataaaaataatctgtgccatcccctggctccggatggacagcagttggggcatgagcgcctccagaatgtctcagcattgctgagggtaaccggatcgccgctcagatccagcaggcagcctcagaacctcccagctgctgttgtttttagcaccgggattattggtaggggtgtaaatagacatctgtgttctgggtggctcgctcaccccacattcctaggcacacttgttttattaaagctctcagctgtcgggtgatccaggcgtggagaaatgaaaggccgccctcaccagctggtggtggactgcaaactgcaaccagttttcccccataaggacatgttactcctattagaaactgtgtccctcacatgtccttaagaagcgggccatctgccaatcataaatcgagatctcagccgttccaaataaagaaagagtctaccctcc

SEQ ID NO: 399346 - DNA, 400 bp, Homo sapiens
ttcttataaaatacacttaaaaaagaatccagtcctagtgacgaatctggaaataagactaggaaacacttcaccatgtgccaggcactgtttgcagcactttacatatattagctcatttacttctgacaacagccccattttgtagcagaggaaaccaaggctggcttctctagtctggctgctcctcccaatcaccatgagcagccaaggtcattacaggaagtggcagaactgtgatttgaacccaagctgccatggcttcaggatctgtgctttttaggactccttcattgccccttgaactctctcacaacaacgacgaacataaatttgctttagaaacttcttttgccttccacattacctcagtcttaaagtcagcatcagagtttggttg

SEQ ID NO: 399347 - DNA, 354 bp, Homo sapiens
agaatctaaaagacttgagctttgaaaatcactcaggagatttcacatgaagagatttcactttgcagtgttttctttccttaaatggaaaactccctgagaaagaaggaagattaaatctggaaaccatgttataatgaccttagaatgtatcagtagacacagagcatattaaaaaatgggaaaatgacttgaaatgctttatagtgatctcatagtgtgaattccatgttaacctcaagtgaaacaaccttgtaacatgatttattcagaagaatgcacatgaaatgactgtgtagagattaccaaggaataaatcacttgttcagaatcaggaatcagtttatactctct

SEQ ID NO: 399348 - DNA, 427 bp, Homo sapiens
aggcgaaaatcccattagtaatcacttgttggtcttgtctcattacaaaaataataaatgtggatgtattggtttttctcatacattttacactcatgcttgcatttgataaatatttatcttgaatgcctgctatgtgcctgacatgttttagatgctggaaatacagcagtgaacaaacataaaacttcctgacctcgtgaaatttgtatttaaaggggaaattataaaaataaataagtaggccgggcacagtggctcacgcctgtaatcccagcagtttgggagggcaaggcagatggatcacctgagattaggagttcaagaccagcctggccaatatggtgaaaccccgtctctactaaaaatacaaaaattagctgggcatggtggcgtgtgcctgtagtcccagctactcgggaggctg

SEQ ID NO: 399349 - DNA, 347 bp, Homo sapiens
agagtacctatatcaggtttttctgccagagaaacctctccaacactacattacatattgatatctcacatgtctttggattcagtttttctaagctgggttgctggatggctctggtgatatgagatgggccaagttctgcatcttggaattagttagagtttggacaatgtaggctggatcaggcagggacaaactgactccattattttctcattctccttctgggaacagagtagtagccaggcaatgttctcataataaacagaaaaggaaaagaaactcaagtgtggaaaccatctcaaacctctgtgtgaagtctaccaattttctgttaatcaaagcaa

SEQ ID NO: 399350 - DNA, 667 bp, Homo sapiens
aactacattgaagttgttactttgtacaatataaaaacaatgaaatactagcttacttttaaagaataaccctaaaagacaaagaataactacagtacaaatgtcattcagaaatattacaagaaaatgcaatattaatatacctaagaaaatcacttaatcaactaaaatttattaaacattaaaagcaaggggctaagaagcccagaacaccaacaagggagtagattatggtattcaaattattcttgtagcagttctcaaagtgtggtctccaagaccctctcaaggagtctgggaggtcaacactattttcataatgctaaatcgttttttgccttttagactcttattctcttcacaagtatccaggggagttttccaggggctatatgatgtgtgacaggaaagctgactgaatgcagaagcagatatgagaaggaaaggacactataaggctcgtaaacagagaagcctgggcaacatagtaagaccctgtccccacacaaaaataaaacattagccgagtgtggtggcacacgcctgtagtctcagctactcgtgaggctgaggctggaggatcacttgagcccaggagtttgaggttgcagtaagccataactgtgcctctgcactgcagcatgggtgacagaacaaaaccctgtct

SEQ ID NO: 399351 - DNA, 531 bp, Homo sapiens
  misc_feature (378)..(378): n is a, c, g, or t
  misc_feature (491)..(491): n is a, c, g, or t
tgtctagaggtccctgcatttactccatggcctttctgtcaccgggctgggacacgaggaggaattgcaggtgaaatcagatccagtttcaacttgaggaaaattcagccccgggagctgctggtagagcccagaccttgatgctgagtcatctgcacagagaattccgtgacagaaaggccgtgggtagagacgtgaatggaggaagtggagtagatgaaatggttaaatgttggagaaaagaggctatttatgaatatgaccactgtcattcagataaaatttctggactgttatcattgaaaaaagtctcattatgtttctatttgaaagcaaaccattatgcttttttgaggaaaaaaaaaaacggtgagtcangttatgctggcaagtgtttaattcagaccatttcatctttaagaaggccccgggtcacattatacggatgattggcttattaaagggaactccggtttctggcaccaggtggnggggtcaatatgagaagcctaattaacagaataaaaagct

SEQ ID NO: 399352 - DNA, 292 bp, Homo sapiens
acctggcaccttaatcttggacttaccagcgtccacaactgtgagaaataagtgtttcttgtttataaaccattcagtttatgatatttttataatagctcaagcagattaagacatcgtgtaaatatatgccttattatttcaaaggttagctgatgaccttggtggagaaaattttctctggatttagtctcaggcttacatattactttctgtccttaaattagttgccactaatatagtagttgttgtcactattaaataactatgtatgcaacaaatagatcagagc

SEQ ID NO: 399353 - DNA, 503 bp, Homo sapiens
aaaaaaataataaattaatttaaaagcagttttctttaataatgttcttgatgaagcaataaaaatgattaatttcattaaatcctgatccttgagtacacagttttaaaatattgtttgaaataggatgtatgcacaaagcactttggcataatgaagtactatgattaccttaaggaaaagcacttgtgtgattgttagagtagcgagctgaagtaggcagcttttttcatggaacattctttttacttgaaaaatcgctgacagactatcagtttacactttgacagttggcattttcttgaaaatgtgagcttgttacttcaatacaactgagagtgtttgttatcagtgattttaaaaaagaggtttggccggacgtggtgactcacacctgtaatccgaacactttgggattactttcggaggctgaggcgggaggattgtttgagcctgggagttccacaccagcctgggctacatagggagacccccatctctac

SEQ ID NO: 399354 - DNA, 555 bp, Homo sapiens
ttgcttgagcttgggcatttgagaccagcctgggcaacatggtgagaccccgtctccacaaaaaaatacacaaattggctgggtgtggtgctgtgtgcctatagttccagctactggggaggctgaggctggagaattgcttgagtctgggaggcagagattgcggtgagctgtgatagagccactgcattgaggtctccattattgtaaaattgtttcttccttcaattttattagtttgctttgtgcattttggagccctttttttttttggttcatatgtgtttataattgttacatcttcttgtgatttgactctcttacgaacataaaatgtttttctgtaacagtttttggcttaaaatctattttgtgtggtattattagtatagccaccctggctctcttttggttactatttgcatggattatctctttccatcttttcagtttcaacaaatttgtgtctttgggtctacagtgagtattttgtgagttgcatatttggattatgtattacattattaaaaaaattgattctgccgatctttccat

SEQ ID NO: 399355 - DNA, 2211 bp, Homo sapiens
cagaattctcaattaaaaaaaactttgttttacaaactatatccaatgtataagtattttaaaatataaatacatttcaatattttatttaaactttaaacaagcctatacatattataagttaatttaggaatgttttgtaacttttacgataagagtaaaatgttagcatgtaatttcaactgtcaagctgaaaataaatatatgaataacctgcattctattacttttcatcttaaaatatatcgttaatgggcttttttttaagtcataccaaaggtgatattaccaactccctaaggacaacgaattctgctaaactagaattcatatttcagagaggagatggataacatctcacaattcaacttcagcaggagtcattaagtcagacacctatgtgagggctgtatttctcattgaattacaaatccaataagagctttgcctttgaattactagcactacaaagattaaatcaatatactgtgaaaaaaggaaaaacccttggatgcttgaagattagaataaaacgcatgaattttttagctcaaatggacaaccatagaagtcattaatcctactttttcattatacaaacccgctacacggcttttgcagaggtccccctttcattcttcacccctccaatcctatagcgactgcactcagtttaatgtcccaaaatgttcatatgagctgtatggcccagcatgacccctaccttgcctacctgcctcccagtctcatctaacactatatgccccctcaatctctgaactgaagccactcagttctttccagaattcacgggcactgagctcttttccccaggaggatgtctgcataaactgttatcttttaggaatgtgttttttcatcttcacctcctacttctcctggataacatctaccttatccttttggcctctaacatagagaggttttctacatcacctctttccctttaaattcaaattgtttcttttttttagcaccctgtatatttctttcatttctactccattcgtaattacgtattaatttagaggactactgtttatgtctatgttaccagtaggctgttggcttcccaaatacagaggtatatacttcggttttttaagctactgataacgagacatttaaatcaagctatggaaaggctttgtctaaagggtgatattattactaaaggctcacacagaaatctttgcatgctacacacaaaggaaacatttacacttctagtccacaaaagcctatcctaggattgtgccaggggcacacaaggatttcaaagtacagaaaaaactgggcatacacatgccctacaaagcagccaaaagacattccccagtctctctcaggaaatgtttcaagatgaaaagcaaaagtctgaagtcccttggaatcttgggttgatttcttcattattctcaaggctaggttgttttcccccagcatactttgttgggcaaaaataaaacgtttccaaataaaagcaactcctcagccccaattttcaatgcaatatgcttattaaaagttcaacatttctcaaggtctagacttatagtgtgatcatattacagtactcgggaagagcattttctttgttgttgaccctgctagggaaacaggtcttgactcagccaaagtggcgttcttgtgggtgattaatgacaggcctagatctcgccctagtgacatccatcccccaccccccacccccactatactaaaatcagccgtgtctgaactgaaggaggggctgtagcctcgcctcaaaccacccagtcccagagttaatagctgcaaccaatcgattacggcaagcacacatccagattggggtgaaatgtgaccctttcgcctaaatttacgaataatatcgtcctctctgatcatttccgctggggctccagcgactacggaaacaattccaatcattcggcccaaagaaaaagatgtccctgttctacccaatacgggcaaggcaaagcccctacccacctccaaacactatccccttgacatcagcccatttctattgtgtcttattaggtcctcgggctacgaggacctagtgaaaaacgtggctgccctactactttgctaagaacaagaaccacacagtccggcacccccaccccaggggccgcatcccacaccccaggacccctgttcccagttctctccactaccccg

SEQ ID NO: 399356 - DNA, 226 bp, Homo sapiens
tgggactacaggtgcacaccactgtactcggatatcttaaaattgtttgtatagacaaggtctcattatattggccaagctagtctcaaacacctggggactcaagtaatcctcccacctcggcctcccaaagtgctaggattacaggcatgagccaccgtgcccggccagttgtgtgtgttctgactgtgtcatccaccatccattcccaactcactcctcctca

SEQ ID NO: 399357 - DNA, 309 bp, Homo sapiens
tgcctcagcctcccaaagtgctgggattacaggcgtgagccaccacacctggctgcaggtctgcttttaagacaaagcaaacatataaaagaaagatacggccaaaagacagtggagagcataatccctatcccagatccttcagtattcacagcattcatatttctcagaaaaaaaatgcagctttctaaatgaccaactcttttgatgagctactccttcttaaatatgcaacaggcaacatctcaaggttaaactatgaattcctaccaaaaaaggaaaaaaaactctttaaaaattttgattact

SEQ ID NO: 399358 - DNA, 424 bp, Homo sapiens
ttaaaatggccctcataatagttgaagatgttagaaagtataaaaatcatatactttttttgtctctatgtgtgtctatactgagtaaaccaatgacatagagatggaatccaatgtatacagactggagtattagaaaactgactctcaaaaactggctcccattgttgcaatagggcacaattatttttgtcttgatatataggctcaaaacttggaagtaattttttagtagagttttgcctgtggaggttttggtttgtatatttgactttttaaatgtttaaaacatttaaaaacacacaagacagcgctgttttgatcacaaaagagtatgctatcttttgccatatgtatgatctttcttttcctgtgagatcattactagtcaagctctagtttaagtgaaaaatgtggagatgct

SEQ ID NO: 399359 - DNA, 460 bp, Homo sapiens
cagagcaatcctctctcacattttgaacccatgttcctgttcatacaaatctcgggcaccgcaagctccgcaatgccaaaactaaactcattttcctcccaaccctgcaccttctcacctgcggtcttgatggctgaatggcaccaatgtccaccctaggcaggagtctgggagtcgtccttaactctggcctctccccgacctcacatccagcaaatgaccacctgtcagttcaacctcccaagcaccataagcacctgtccctcctttccatcttcactaccactgccttaattcaaggcccatcatgtctccagcttcaatgctccaacctattaaccattctcctgcctccaaatttgttcccctcaacccccaatccattccattcctactgcttaattcatatctgctagcaacacacggaccaaatgtatgggtgcattcccaccttgtaatg

SEQ ID NO: 399360 - DNA, 540 bp, Homo sapiens
cagagcaatcctctctcacattttgaacccatgttcctgttcatacaaatctcgggcaccgcaagctccgcaatgccaaaactaaactcattttcctcccaaccctgcaccttctcacctgcggtcttgatggctgaatggcaccaatgtccaccctaggcaggagtctgggagtcgtccttaactctggcctctccccgacctcacatccagcaaatgaccacctgtcagttcaacctcccaagcaccataagcacctgtccctcctttccatcttcactaccactgccttaattcaaggcccatcatgtctccagcttcaatgctccaacctattaaccattctcctgcctccaaatttgttcccctcaacccccaatccattccattcctactgcttaaagggtcacctttctaaaattcaaatcctaccttgagaatcaccagcattaatatcttccagaagctcaaaagattatgatcacaatcctgaacatcgaagaaacagacttcagtgatctgccttgcacaactaaattc

SEQ ID NO: 399361 - DNA, 587 bp, Homo sapiens
agaaatgcaaatctggatatggcattgagtctttctctaacaaaacgaaagggttgcagatatttgtgaagaagaagtgatatggttggctgtgtcctcacccaagtctcatcttgaattacagctcccataatctccatgtgttgtgggaaggacctggggggaggtattcagagaacgactaccttcagattatcacagatatacagagttgtccatggaaacggcaagcagaagaatatgcaaattttaggagaagaaaaataaagtcaaatgagaaatcctgcatctgaaatactcatgctgctactgacagaaagatttcaaagagaaattggattgagaagataaaagcatcttggacaggatgtgtttgagctgactttaagacaactggatacagaagaccttttgcttggtctggggaaaatataaatgctaagagaaaatgaattctctcaaaaaagtctatcttctcagcaattttattttaactttcttgttgtgctacgagggggtttgtcctctttttatagattcctaagcttttactcattcagcacttaattgtgggtctgagaacttgg

SEQ ID NO: 399362 - DNA, 480 bp, Homo sapiens
atgttctaagtgactaaatgcaggactgaaatcagatggattatcctggggtttcacaaaccagtagcttactgttggaggacctcagaggggctaagtgatttgtctgcacttgacaccaaagaggatggcttgttagcgcttttcttactcccgcaaggcaaggtttggcagagctctgtaaagtcgggagtcaggaatgttaggggttttctctgaagccctgtccatactccgggtaagtcgtttctttgctagggctgggatggcagcaaaatagcaaaacccataccaaatactaaattcagagaaatcatttgggaaggctggatctcaagcactacaacctgcaaaacgtagaaccccaagagatgaagcacagtgttaaagaaagaacaggggaagtttccaaaaagttcaaagaacaaactgaaagcagagaaaaaggagaagagccgtgagagtgagcaataggctctt

SEQ ID NO: 399363 - DNA, 240 bp, Homo sapiens
gccctgacagatctttaaggcatggaaatgagccttatgcaagctcctggcaatcagtatgtgagttctgtctccttggcaagatacagcctcttagaccctcagtctggggaaataatgctgatttctcctacgagttacgagaattacgctagaaaactctgtggcgcatacaggtgccctgtagcctgttggttagaagcactgaccctgaagtcaggtcgcccaggttggaattcc

SEQ ID NO: 399364 - DNA, 511 bp, Homo sapiens
gttactgtatgaggatactctgtgcaacaaacaatcagtaaagtgcttgttgagttaatattttagaaatcaagcataatacattcttgtgtacacatggaacagcccacacgtttaggaaatttagctactagtttcagtatctttcaccaccattcacaactgatcagctaataatcagcaacaacattgtacaccataatatgttaaaggtgttacacacagaatttatgtgtgaaattgaaagcatcggtcctatatcatatggaaaaaaattaattgtagccaaatgttgggtattggatacatcagtgtgctttttcttctaaaaaatactggagaaaggcaggaaatacacaagtactaagataataacacatcaagtcggaaactggttaaaatccaaagaaaaatgttggtgggcgtatttgttcatacacagccccctttatgagaaaaaataatttcttgtacacagctcctttttaaaaaaaagagaaaataatttgtt

SEQ ID NO: 399365 - DNA, 147 bp, Homo sapiens
agacaagggacagcagtcacttttcatacattgacatgatctccttggagggcaatttggaaatattcattaaaattcaaatgcacatagcctttgacctacaaagaaatttaacctgcagacattactgacacatttgcaaggata

SEQ ID NO: 399366 - DNA, 426 bp, Homo sapiens
cccccaccaccctctgctcagtacatggggcagtcctctccccaagcctcagtttcctcatttgttcagtgggaatcatgacggcctcacaaggctgttgtgagaatgaaataagagaagtgttaatgcctttagaacactgctaggcagatacgggctcagaagaagttggaattcctaaccgttcacagggcagggccacctggctggggggcgcctttgtcactgtgcgttgtgtgactacagacatttaggaagcacaaacttctgcccggagcagcccatgctgggcagtcggggcctggctctcaggggtggtggcccagcacacagctgttcaacttgatcataactgtccttgacacagccctgacctgttggttatcagcttccctgtgatataattcacatagcacaaaaatcaaa

SEQ ID NO: 399367 - DNA, 480 bp, Homo sapiens
attttggatgggcgtggtgactcatgcctgtaatcctagcactttgggaggccaaggtgagagatcacttgaggccaggagtttgaaaccaccctgggcaacacagtcaggccccagtctctacaaaaaatttaaaaagttagtggggcatggtggtacattcctgtagtcccagctactcaggagactgagataggaggatggattgagctcaagtgttctaacttatagtgagctctgatcacaccactgcgctccagcccaggcaagagggagagaccctatctcaaacagcgacaacaacaaaaccaaacaaacaaaaaagcacattctatcagctttgatttatgttttcttcatttgtaatgacatgtagttaaatgtgtcatacttcaaaaagaagaaacagatagtaggtggattttcaatataatatatattagatatagataatatatattttcaatatataatatatgt

SEQ ID NO: 399368 - DNA, 730 bp, Homo sapiens
gatcccccgggctgcaggattcggcacgaggcctgcagcccagccacttgggagtctgtggtgggaggattgcttgagctcaggaggtggatgctacagtgagccatgatcatgccactgcacaccagcctggtcgacagagcaagacactcaaaaaacagaaaaggatatttcaaaggaggaaggaagagccttctcaataaatagtgccgggaaaactgaatatccacatgcaaaacaatacagtggcactcataccatagacaaaatgatctcaaactggaccaaagactttaatagctaaaactataaaattcttagaagaaaacaggagtacatctcttcagctttgtattaggcaatggtgtcttagatattacactaaaagcacacttaacacacacacacaattagataaattggaccttatcaaaattaaaaacttttgtgcttcaaaagatatcatcaagaaagtgaaaagaggccgggcatggtagctcatgcctgtaatcccagcatttggggaggcatcagtttgagctcaggatttcaagaccagcctgagcatcatggcgagaccccatctctacaaaaattaccctatgtgggggctcacgcctgtggtctcagctactcaggaggctgaggctggagaatcacttgaagccaggaggcggcagggctgcagtgagccaagatcaagccagtgaactccagcctgagtgacaga

SEQ ID NO: 399369 - DNA, 296 bp, Homo sapiens
caaagagctgggagtgagtgtccatgaccatcctgccttaggatctgcttttcaaaatgattatttctcatttgattactgatggcacaacacttgcctagggggatctgggcctgagcacaaaaccacagttacaattcaagttagcccagcagctgaaacttcccacaaaggagaaggaccccttccaagagccgctttgacatcgtgtgggcaacacccagagggtgttcgccgtgaagagagatgcccacacagggaacccacacactcaattgtttccactccctggacgg

SEQ ID NO: 399370 - DNA, 370 bp, Homo sapiens
tctctctcatttaaaataccttcttagtaggtttaaattaacataaaaaatcaaattcagcatttaaataaggtcaatgggactgctggatttaaacacagaatttgattcagtataattggatcaccgtattggttttgacttggaaggattaaatggaggaaattggaaaagcgtgaatttgggcagaaagagaaattttctcttctttttctttctttcttctttcaccttccaagggagagaagtttccccaccttggagaggaaactactaccctgattaggtcagaaacatctcagattcattaattgtctccgttttatcactacttgaataagaaatagtaataaaacaaaaatattgtgta

SEQ ID NO: 399371 - DNA, 166 bp, Homo sapiens
gaaataatttttaacacatttattaatggagaataatcaatattttgtgattaaatatatatgtattaatcagatatgtgttcttgcacattctttaaagttaagcgaatatgagtaacttgaagaagttagaaacaaaccaaataaaactaatagtaaaatgtta

SEQ ID NO: 399372 - DNA, 403 bp, Homo sapiens
cagtgtggcctgggtcttcaggaatgcttgtttgaggaaaaccactgtcatgtaagaagtatggctaccctgagactgtcatggtgtgaggactcctaaatgagtcacatgtggatggccacctattcaggcctcagttcttccagccattgcgactgtggcccacgcatgtgggggaagaggccatttttcacgcccatcccagttgagtctttagatgatcccttcctgggcctccagctgactgtaaccagactccaggcaggaaccacataggaactgaacccagtcaacccacaggctggggaggatgatagtccattgttgtataaagccactgcatttggaatggtctgttgtatactacctaatcagaacaagactcaatcctttcttcatagct

SEQ ID NO: 399373 - DNA, 490 bp, Homo sapiens
ctgtatgaatatatgaagtactgaaatagaataaaaacatacaaagtagtataaacacacttttatttctgtaccacattattgatattgtattgatacattgttatatttttgaagaatcacaataaactctagattggagaaatactcactcatagactcaggccctggaaactaggagagtccagtgcaatcgtttttgttatgactcgttctcttttatttttctcctttctttttaaatcttctttgtctttctatctgacagaagaataaaatttagcaaaataattattcactaaagaaatatctaaatgaatattggttacataccaaagatcgaataattgcattctataatagggaagtctgttgtctttgtggttggttggtcttgtgttatacagttcatgaatacataaataaaattcgtgtgtcttttgcaaattactcttttattgtgttccttggaaataaatcactataacta

SEQ ID NO: 399374 - DNA, 550 bp, Homo sapiens
  misc_feature (6)..(6): n is a, c, g, or t
  misc_feature (18)..(18): n is a, c, g, or t
  misc_feature (42)..(42): n is a, c, g, or t
  misc_feature (66)..(66): n is a, c, g, or t
caaggntggttcagcatncccaaatgattaccatatccatcncccaaccagacccaatgccaaaanccccatgattatttacctgtatacctttttaagtacaaataaatctgggctgtcattatttatgctaacactggttttgtgtccctggaatctatctatctaagtttttttttctttttttctttttccattttccagtacctattagacagaatggctttcaattttttctcttacttccaaacttagtcattataagaagatgtaggccaggcgcagtggctcattactgtaatcccagcactatgggaggctgaggcaagtggattacttgagtccaggagttcgagaccagcctggccaacatggtgaaaccccatctctactaaaaatacagagattagcagggcatggtggtgcatgcctgtaatcccagctactcaggaggttgagtcaggagaatcacttgaacccggaggcagaggttgcaggcagattgtgccactgcactcctgcctgggaaacagagcaagactctgtctcc

SEQ ID NO: 399375 - DNA, 189 bp, Homo sapiens
ggctcccaatcccggagagtggccatactgaagtcacattacaacaattaacttttcaactattagatgattaatttttaccaagtagcaagaacagctgtttggcacgtagcagtgtggcatgagtatcttgtaaatgaattaaacaaaatatctctccaacacacacacagtcattcttgctgcatg

SEQ ID NO: 399376 - DNA, 647 bp, Homo sapiens
cttgtacacctaactgtaagtagaaaattattttttaatcttttcaggctcatactgtgactttggaggttttcgtttgtattggttaacagtgtaaaaaggcaccagagtaaagtcaaaaagattactagtaagaccttttccaagttgcttctctttgaactaaagttttcttatgtgctcataacaaggatgatactttagttaataataaagtttcatactggttcattaattgggacaaatgtaccatactaatgtaagatgttatttacagtggaaactgggcatggggtacataggaactgttatgggtccagttgtgacccatctacccatccaaatcatatatgggaagtcctaacccctagtacctcagaatgtaacctcatttgaagttaagggtctttagtgaggtatacgatgcttataaaaaggggaaatttggaacctgatatgcggagacacagggaagccaaggagaggggcctggaacagatccttctgtcatggctctctagaagaaccaatcctgccgacaccttgattttgaatttctagcctccagagctgtgagacaatagaactgctgttgttgaagcctccatttgtggtactttattatagcagccctagcaaatataaac

SEQ ID NO: 399377 - DNA, 624 bp, Homo sapiens
catgggtattaacttacagacttacttgttaaacttgtgaacttgttagaaattcaaatgactgggctccaacacagaccccaggaactctgggggtggggccaagccatctatgtttaacaatccctctagatggctctgaaataccctaaagtttgagaaccactggtttaacctgaatttaataaggaaacagtgagacaaatccagactttcatatatattctactgacctgaactcttcaaaaaagtcaagttcacaaagaacaaaaaaagcagagccaggaagaaatggtggaaggaaactttagattaaactaaaaagacataacaacctaatacaatgagtagattttaattggatcctgaattaaaaagaaaattaaaactaagagaattttcaaggcaactgagaaaactgaaatacggactttatattagatcacagtgtgcatttatcattacctatcttagatgtaataatgtattttgattataaaacagaatatccttacttttaagtgatgcatgctgaagtactaaggaataaaatgtcttaatatctacaacttagcaactttctttcaaatgattcaggaaaaataaaacaaatgagcaaaaatt

SEQ ID NO: 399378 - DNA, 393 bp, Homo sapiens
aaaatccctgttctttattgtcttttattgagagagttttcttcctgtttcaggctaagtaatatagacataagattttctattttcagtaacaatgattggctttcaagacaaaggacagatagttgatatccacagatatccctaaactcactttgtctccattctcttgcttttcctacaatcgatcctgttactcaaaacataatacaaaacataaatactcccactacttgaatgtctcttgaacgctttgggaaaacattttctgaatttgtgtctcaccagaagcagaccctgatttaaagattcaagtgcaagcaatgtattttggaaataatttcaggaagcacagtaggacatgggaagtgaggcagggaagggaaggaaagc

SEQ ID NO: 399379 - DNA, 364 bp, Homo sapiens
ttgatcccaaagagccaataaagtgagaaaattaagatttgtgagaatcagtattacagtaatacttctcttacttgcattgctagttatttatcaaacagctccagctatgtagaagacagatgagaaccaaaagaaggaaagaaggatttctaaacagccaaataaactgtcccttgcccaagcattaaatctcaggtactttacttaaaagactcaacttaaaaatttagaccttggccgggtgtggtggctcacgcctataatcccagcactttgggaagctgaggcgggtggatcacgaggtcaggagatcaagatcatcctggctaacttggtgaaacctcgtctccactaaaaatcc

SEQ ID NO: 399380 - DNA, 2214 bp, Homo sapiens
  misc_feature (876)..(876): n is a, c, g, or t
attcttatgtattcattaaactaggaccctgtaggatttattttaggtgttattgccttgacctagagttaatctgtatttttgaaggaaaatacgttgccttttttcacaagcactttataactcacttctccctaattcagattgcttttcttaatcatttgaagttaatgatacaattatcacatagtagccttacaaatagccataatattaaatcataatttatgtaaagtaaacatccaaattccaaaacatctgaacatgggaacaggctgattgaagtttttgtgggtcataagaccttggcaattgtttgtgagcctgatgccgacatttctcaacagtaatcaaagcacagaacaacaaccatccacatgaaaaataactcaaattgtcattgtacttcccatgctattgtcatttagcaagttatggcatgactgattcagccagtaagaaaaatgtgatgagaatattggctaggagtacagtctgcttagatcttttagttttttttccttcaaaagccaatagacttttactctttaaaataggagctatgcaaaaacgtaatatttggaatgccaagctgcctccatgattgagatacctgttttgaagttctcctctactgtaaattctaacagaataaaaaaagaatcaatgattcttgttacctccaatgtacctaccacactactcatgaaaaaagctttaaaaattaatgaaaattgatggactgaagttctgtctgtttcttctggtgcagatttataaaatggattctattttaggaacgatcaaattctaaaattgagaagctcaagggtagggcactggagataatatagaaagacatgtaatatataaacnattctctagatcttatatctggagttaagtaaagcagacaacaaagagggagacagcttggttgtcaggatggtggcttggacatgtgttaatatgtatcccatctcatcatgatgctatcagaagcacgggtctttaaccatctcctttttctgaattttaatatgtgaatgagtcattaaatattggcttccagttagtttctgcttgatatgtacaatcatgacagtagcatagtggtttgcacattaaaggtcaacaaatgtttgttggttgaatatacctttcctagatttagcaaaatttcaaaccataaaagtcccttatgtgcttttatattttaaatcaagtctttcatgttataaactttaaaactcaggctcatcgaagtgaagtgatttgcccaagcataccttcccacacaaggcttaacaccgactcccactttagtacaataaaaaaaaaaaagtcatgtaacattaagagcacatacctggaagtcccctaaaacataggttgttgaactctgactctgccacttcctcgctattgatgtgtgctatggtctggatatttgattcctccaaatctcatgttgaaattcgatccccaattggagatggggcttaatgggaggtgtttgagtcttgggaccagatacttcatgaatagattagtgtcctccctggcagagggagagtgagtgagttcttgctctattcattcctgggggagctcccttgagagctgattgttgaaaagagcctggcaccttcctgctctctcttgcttctgctctcgccatgggatctctgcacgccggctccctttaaccttctcccctccaccaggagtggaagcatcatgaggcctctccaaaacccaagcaaatgtcagtgccatgcgtcccgtgcaggctgcagaaccgagagccaaataaccctcttttctgtatagattacccagcctcaggtattcctttatagcaacacattgacttagacaaggtatgtagatatatacttctaaagtggcttctcccacaaaagagaaatttgcggcccagcacagtggctcacacctgtaatcctagcactttgggaggccgaggtgggtggatcaggaggtcaggagatctagaccatcctggccaacatggtgaaaccccgtctctactaaaatacaaaaaattagctgggcgtgctggcacgtgcctgtagtcccagctactcgggaggctgaggcaggggaatcacttgaacctgggagacagaggttgcagtgagctgagatcacgccacttgcactccagcctggcaacagagcaagactccgtct

SEQ ID NO: 399381 - DNA, 380 bp, Homo sapiens
gagacagaatctcactttgtcacccagactggaatgcaacagcaccaccatagtatgatcacagcttgaactcttcagctcaaatgatcctcccacctcagcctcccaagagctgggactacatgcatataccacaacacccagctaatttgaaaaaaactttttttagagatgagggtcttgctatgtttcccaggctggtctcgaactcctggcctcaagcgattctcccacctcagccaccccaagtgctgggattaaaggtgtgagccaccatgcctggctgccttgggctttaagtatgtccaggtgttggtgtaatttggattcttaactctttcttcttttatgcaaagcttcctattgaaaaacatctaaat

SEQ ID NO: 399382 - DNA, 365 bp, Homo sapiens
caagagggtttagagagaatttattgccctatatcttactgcctgtgccactttttttctagcacaacaacataatgtggttcttaaacaaaaaaataactaaataaattatcaagtgttatatttatgtgctcagaacatttctttaaaatgtggattttcaaatagccatttttgcttgtcattgatagtaacaagtttgactcttgcagaaatgttcattttcattaagtgactgcacatatcaatttctacctctcaaatgggtattttttagtttagataaaaagatgaatataatgtataatttttgatgtctttgttaacaactgtattttgattcaaaaattgtatccattgaaatg

SEQ ID NO: 399383 - DNA, 215 bp, Homo sapiens
gaagaagcacctaactcaaagtttaacaccgcagcatccctcagccatttcctaatcttagttccctgggccagctgtatatctggcccttgctcttccctccacgtgttgagacatggactaatttccatttatatagaaaactcccctgttccttctccctttcacccacatttttcttctattcttccatttgaataaagccccctgatatg

SEQ ID NO: 399384 - DNA, 184 bp, Homo sapiens
aagaatttcatggattctgattgactaagaccttctcttgcttggctcctctccatttgtcccctgccaatttctgtcccctatgaaagcttgcctccctatttgagaactccttcaaaccttggttggtctgtcccacctggctcccacctcctgcagcctcttcctgatgaagccagaattc

SEQ ID NO: 399385 - DNA, 271 bp, Homo sapiens
aaccctccaggattgcctagaaaagtgagagaatgataaatttaaacaaacagaatgttaacccacctaagtgaaactattagaggaaacagcttcaacaacaacaaaaaatgggcacttaagaaaattcaagtacagcataaaaatacttttctgagcttaaaactcagttgatgaagtgggggatagtcactgtggagacttaaattattcaactggagacttcaattattagactggaaaaataagataaatctccaaaacatagagc

SEQ ID NO: 399386 - DNA, 439 bp, Homo sapiens
ttcccggtccacttggcaggattgccgtctaaagtggtgagcccttggagtcggtgaaccctttggtcggtgaacatttggtcggtggcatttcatccggaaaggctggatcggttctgtcggacttagagggaaatgttttccttcctgggctctgtaggtgaaagatgagagtgtggtttaggtgaggatcaagctcctttttaatgacacgccactgcttccaccgcgggagaatttcagtgcttagatttaactttgggaggttatcagttcagaaaaagtaaaaaagagagagctgaattacggttgcgacatacaggtatgtatgtcacatacatgcaatttttatttgctggacaagtgaaagagaaaaggctacttcccaagcgttcttgccagtcattgaatatttcgtattaaatcttgacatactact

SEQ ID NO: 399387 - DNA, 459 bp, Homo sapiens
taaattaattcacttttgcatttttttctctgatcttgtcatcatacactattttaattaatatagtcctgacatacatggagattgaggaaatcatcaaaatcttaatgtaaaaaaatgtaaatgcctaaaagctaacgatgacacaattcaggaaggtgctgatgacaatagcacatactcaactgaacactttgacattatgtttcttctttgctggtgaagactgaaattaagaaaaacagcaaagagagaacctgagaaaaaatgtatacgatttcattatttctacttttacatgacctatgaagtatattattgttttccatgggggatatcagagctatctacatgctgatattctctactttcctttggatctcttaatgtagattgtcctaattgttatatagtatcagaaataaactgtaaaaaataacctgtatatataagaagcag

SEQ ID NO: 399388 - DNA, 410 bp, Homo sapiens
tacctgtttgtttgtttgtttgtttatttatttatttattgagacagggtcttgctgtatcacccaggctggagtgcagtagcatgagcatggctcactgcagcctcaactttcccaggcacaggtgatcctcctgcctgcacctcctgagtagctgggactacaggtgcacaccaccacgttcagctaattttctgcagagatgaggtcttgccatgttgcccaggctggtcttgaactcttggactcaagagatctgcagcctcccaaagtgctgggattacaggcgtgagacaccacacctggcctcccattgcctgtttaaatagaaatgatgcaactagcaatatggaaggacttccagatctttaccacattaagattagggtcagcatccatggctctgggag

SEQ ID NO: 399389 - DNA, 316 bp, Homo sapiens
aagaactcagaaataagtctttgtacttagagccaactcattttcaacaaaggcactaagaacacatactgggggggaaaagagtctccttaataaatggtgctgggaaaactgtatatctgtttgcagaaaaataaaaccggatccccatctttcatcatatacaagtatcaactcaaaatgaattcaagacttaaatgtaagacctaaaactatgaatctgctagaacaaaacactgaagaaatgctacaggacattggtttgggcaaagattttttagggtaggaccgcaaaagaataggaagtcaaagcaaa

SEQ ID NO: 399390 - DNA, 971 bp, Homo sapiens
aaaatgtgatcagaggaccctaaccttgtatttgccttaggacccagtgggtcggtactgactaattcagtgttcacggctgcctcaaatcaggagaatggattataatctggcttcataggaccccgggagggaagggagggaaggcagggccgtgagcacagagctgtccgaggtgctaccaccgtaagcctggctcagctttcggggccacatctgcttccgtaagtctccactctgcttgagggtggggaaaacctgcagccctgactggcaagacggtagggagaagggacagagaggagtctggagacgacgaggctctgtgctggactagcagctcccggggcttgtgacccaggggatttcttgctcggcagcccctgggaaagggtgaagggagaaggggtttgcttgtgggagaaagagtcagcagtgacttcacaggccagctgtgcctcgtgtgtttattcacagccagttgctgcaccgtgaggccaaaggatactggaaggtttgggatccactgacgtcatccaagcaggccacactgccgtgctcggtgtcagtgtttctgacatgcagggcagcagagcagagggtctccagcagcccacattgcagcagttctcatcaccctgggatagctgaattcccttcccgtggtaaatcttcaagttacagcaaacaatttactagtagcacgagttacaacagaggagactccacatttgaaagcaagagctattaaaatggcagatgaggccggaagtgaagccgatcatgaaggaacacatagcaccaaagagaggcctgctaaaatctcgccctgtcagaggtatccaacttctcctttggggaaagccttccctggtccccttagacttaagttcaaagtatttctgcacagtggttccccatggccccttgcatttcccttcttagtctctgttacaccgtcattgaaactc

SEQ ID NO: 399391 - DNA, 613 bp, Homo sapiens
agagatgactttagagaagcggcattacgtcctgaaaagaaaagtgctaagagagaagcagaagtactaaagaaaatgggaaaacaggagaaggaggttagagaggaggggactaggcattagttttgagtatttaaggtacttgtttagaatttgaaatggagatattaagcaggcagatggaaacctaggcttggattttgtactggagctgggcttgtagacacagataagcgatcagttagaagtagtgatcaaaactgttgaactacatgaacttgtcaggctagagcagagaagtccaaagacagtcattgagaccagcatcagttaatggatgggggaagaaaaaatgtgagtccaagagataaaagatgaggaagaaaaaaatcagcttactaaaagatgaatgtgatgccagggggtggggagaggggagatgggaatcactactaatgggtatgtggtttctttttgaagtgataaaaaatattctggggctgggcgcagtggctcatgcctgtaatcccagcactttgggaggccgagggggatggatcatgaggtcaggagattgagaccatcctggccaacatggtgaaaccccatctcc

SEQ ID NO: 399392 - DNA, 359 bp, Homo sapiens
ctctagcctggcgacagagcgagacaccatctcaaaaaaaataaataaataaagaggggggtcactatgtcacccaggctggagtgcagtgactcttcataggcgcaatcatagcacactacagcctccaattcctgagcccaagtgatcctcctgtctcagcctcccaagtagctgggactacagatgtgtgccaccttgcctggctcaacttttattttgaagagtttcaaacccacaagaaaaactgtgagattttgcacttgctttttgctttctctccctgctgcttgcattgactgccttcaggtgccactgcctctgcctccatgtgtccctagctgtcctttgggctgttc

SEQ ID NO: 399393 - DNA, 412 bp, Homo sapiens
atcactagaatactgtaccctcaatggagaattttgaagaaaatgcttgctcattagggccctaaattgggaagagacaaccagactgtagtacccctactgtaatatatctttggctgcaggctttctggaaagaacatagcatttaggttatgagatatatccattttatactctgatagtcaccttgcttgtgtgacattttatcctataagtctataaaccgtatgtttgattatcattaaataatcatgtacattcttctgaaaccattccacagataacagctatcaaatgctattttatcatgaggtccagttatgatattttatatggagattagatcatttgcatgccttcttttattcccaggagagtcacatttctttttcactaaataaggaggggaaga

SEQ ID NO: 399394 - DNA, 379 bp, Homo sapiens
agattcagtaagccattctcaggaactataataaatgcttcttccaacttcactttttcaaaaatgtgttttgctgtggtatttataaatgtggaaattgtgctgaatctctttagaaataaaaattctttgagttattgttacaaatgttaactttaatgctgtggatttaggagagatgcaggaagtatagatcgggaatcagaacactcaaattctagtcaaaacttacactggggcagcctcctaatttatctctgtttattttctcatttatgtgttgaggcaaatggcctttgtaacttattgttttcaccctcctgattctttgattcctgtggatcatctgtgcttgaaaattactaattattatctgatg

SEQ ID NO: 399395 - DNA, 201 bp, Homo sapiens
tggggatgagctagacaagatggagagctcactggtagccagcgagttacccctgctcattgaggacctgttggagcatgagaagaaggagctgcagaagaagcagcagctttcagcacagttgcagcctgcccagcagcagcagcaacagcagcagcagcattccctactgtctgcaccaggccctgcccaggccatgtc

SEQ ID NO: 399396 - DNA, 632 bp, Homo sapiens
caaaggtgagagtttgattaaaagaaaggagaccttggccgggcacggtggctcacgcctgtaatcccaacactttgggaggctgaggtgggtggatcacctgaggtcaggagttcgagaccagcctggccaacatggtgaaaccccatctctactaaaaatacaaaaaaattagctgggcgtggtggtggatgcctgtaatcccagctacttgggaggctgaggctggagaatcccttgaacttgggaggcggaggtttcagtgagccaagatcatgccattgcactgcagcctgggcaacaagagcaaaactgtctcaaataaataaataataaaagaaaggagaccggatttattagatgtggtccgttttgtctttctgttcccaaacttaaactggattatacctgctaatatcaggaatataatgataattgcattcattcaacaaaaatttattgagcatatactgtgtgccaggtactgtcctaggcattatggatataaaacagtttttatgtagagacagtcctatatttcctgtgatcttaaggaacatttgtctagtattagagataggactaattaaacaaaaacaagacaagaataattaaacagcaaactcaatgaa

SEQ ID NO: 399397 - DNA, 684 bp, Homo sapiens
ccctgccggagaatttagtatttctagcctctagagtggagatgaacaaagaatagaatgggcatttgcttaggaaccaactgtgccttacaacatttttgcacttttttctgtaacattttgtgttaaatcatataaaaatgctgatcctaacaaatatggtcaatgagtcacaccataattctccaagaactccagtccaaaagggttaatcttgcttttaaactccaggcgcggtgtttcacagctgtaatcccagctacttgggaggctgaggctggagaatcccttgaacttgggaggcggaggtttcagtgagccaagatcatgccattgcactgcagcctgggcaacaagagcaaaactgtctcaaataaataaataataaaagaaaggagaccggatttattagatgtggtccgttttgtctttctgttcccaaacttaaactggattatacctgctaatatcaggaatataatgataattgcattcattcaacaaaaatttattgagcatatactgtgtgccaggtactgtcctaggcattatggatataaaacagtttttatgtagagacagtcctatatttcctgtgatcttaaggaacatttgtctagtattagagataggactaattaaacaaaaacaagacaagaataattaaacagcaaactcaatgaa

SEQ ID NO: 399398 - DNA, 482 bp, Homo sapiens
caaccctcaatggaaccaccagctcccagtggacagagtactcagcctccctgttagttgtgacaacttaagacaaaaatgagagcagtaatacaatgctcaattcactcatcactagctacgtactttctcctttggtgtcttgtctccttaagggacaggaagcaccatccctgttttggtgggggtgcgggtggggttgtatgtttcagacaggtcaggtctcactaggttggccaggctggccttggaactcctgtgctcaatctttgcacctcagcctctgtagtagctgagactacgacacagtccgccacgctcgactaatttttgtatttttagtagagacggggtttcaccgtgttagccaggatggtctcgatctcctgaccttgtgatccgcccgcctcggccccccaaagtgctgggattacaggcgtgagccaccatgccccgccaacaggaggatttttttagtccgt

SEQ ID NO: 399399 - DNA, 454 bp, Homo sapiens
aacaggattaggaggcttaaagaatggtttcataagccacattttggaggttggtgtgcttgtgtgtgtggaagtattttagaaacgaaagttgatatttaagttgattgggtcacccttgagcttgcttggtgggaagaggtgggcaggatgtggctattctaagtggccaggggacacctctttcttattcacccccaggacattatttccaattttccttgaagaggaaataccatttaccatcagtaaatggttttgggacttcattctttggggactcaacacatctggagatgccaaattctggagctgtctcagtggcaggtgtcccagggactcctggatgatgttgtaattgggattcatgtgcagtcagaataggccccacaaatgaagaggatgccaacgtgtgtgtgtgtgtgtgtgtgtgagtgtttgttttacaaactta

SEQ ID NO: 399400 - DNA, 404 bp, Homo sapiens
aaaatgctacatatttatgtagtatataatttcatgtgggtctagttgtcaaaataaccttttttgcttaggaaaattatctaatatattaaagtatatgctttttgagaacccatatcattttcttcatttacaaagcaattctcacatcattcatatgtatgagaaataataatgagaaataataattgtacctatttgtggtttacaatgtgatgtttccatacatgtatacaatgtgtgataatgaaatcatggtaattagcacatccgtcacctcaaacatttatcattgcttttcactggacacattcaaaatcctccctactagctatttgaaaatatacaataaattgtttgctaaagtcacccaacagtgttacagaacagtagaatttagaaca

SEQ ID NO: 399401 - DNA, 513 bp, Homo sapiens
ggctacatactatatgactccaactataaggcattcgagaaaaggtgaaactatgaagacattaaaaaactaccatgggttagggtaaagggagggataaataggcagagaacaggatttttagggaagagaaactgttctgtgtgatgaaacaatgatggaaacatgttaatatacatttgtcaaaatgaatagaatgtacaaaactaagagtgactcctaatacaaactataaactgtatgtaaaaataatgtgccaacattgatttcttgattgtgataaatttactatggtggtatagcatgttgatagtcatgtaggttgtgtatctgtggggacaaggtgcatatgggaaccctctgtactcaattttgctgtgaacctgaaagcgcttcaagaaaataaaatttattaattaaaattcatttcacttttccccctgaatgatatatgtttacatgtattaacatgttttactcaaaatatatatatacataatatgtaccattatt

SEQ ID NO: 399402 - DNA, 407 bp, Homo sapiens
agccatctgaaaggcaggaagagagcccttaccagaaaccgagctctgctggaccttgtccttggactttccagcctccagaacagtgagaaaatcaaattctgttatttaagccatatagtctctggtatttttttttaatggcagcctgagaagactaatacagttgactttaagtaagagaggttatcctcagtaatctttgggctcaattcaatcagttcaaagatcttaagagcagaactgaggcttccctaaggaagagaaaatttttcctacagacggcaactctgaaggagaattctatcctgtccttcctaacagcctgccctatgagttttggatgtgcctacccagctaccacaattacataggccaactctctgaaataaatctcttaataggta

SEQ ID NO: 399403 - DNA, 523 bp, Homo sapiens
tgaaagatcctttttaggaagagagaaactaacacattttcataggctgggactttaatgaaaatacagagacctgtgttatacaatcagaaagagacccaaatatgcagttagtgattctatagtaacagaaacctgatcagtagtatcctgtggccagggtaaactgaaggatgactgcaaaggagaacaagagcacctttttggatgatggacccttgctatattttgtttgtagtcatagttatatgagtatatacatttatcaaaaccactggatggtatttttaatgttggtgcattttattgtatgtaaattatatctcaatgaagttgatttttaaaaaaattttaaacatcaacacaagaaactaacacaactaacagcctaacacagagaatgaacagaaatctacatcaaagtaagtcattataatatttttagactatcagctacaaagaagatcctatttttaaaaaagaagaagaaaaacaagaaaaaaagattacaggcaaaagatcc

SEQ ID NO: 399404 - DNA, 523 bp, Homo sapiens
cagtggtctagtaattgcactgttttcaacggtgaccagagctgtcaagactaacactcaaggaggccgttcttctggacctctctggaacaacggggagaggacagggcctgagaagagagtcggagcacagacgggatattctgccagcgctgccccaactgtaacgtgcatatggtcacctggggatcctgtgcaaatgcaggctctgatggggagggatggaactggaactcaatggaaaagaacccagttgggacatgacccactgtgtggacagagagcctttgcagggaggtaaagggaggttcaaccgcaggggcctgtgatggggcagtgggcagatgcctggtttcaagagaaatttctccttaaatgactggttcagaatcataaaaatacttgagagttatttttaagagtttgaggtagtctgtatttcctttattactttgctgctccatttggtatgctatttatttagaaattgttcagctcctgtttataaattttaggtattccg

SEQ ID NO: 399405 - DNA, 458 bp, Homo sapiens
ggggtttgattgatgatctgggtgttgatttctcctcctgccctttcctcttccagtcctcaggtgacacccacccaagcccatctccacattcttcatctacttgcacaatcttgactgacatctctgatagcccaaagcaaattgaatagtgaagtttatcttgctttaatgcttatgctagtggaacttatttaaatgtatttaacatgtacagaaaaattaacaggaaaataaatcgaggaagaagtgtcaacaaagagtgcaaggtacagaaacaggtgctatttttgtatttggtgatgagacctgggggtaagtgatggttgttgagctgatgatgatcgtattttctttaataccacggaccacctcttcatccagcctcactagctgtgaagcagctctgaggaccattcttacagttctttccacatctctgtctccactccccagac

SEQ ID NO: 399406 - DNA, 404 bp, Homo sapiens
ggggtttgattgatgatctgggtgttgatttctcctcctgccctttcctcttccagtcctcaggtgacacccacccaagcccatctccacattcttcatctacttgcacaatcttgactgacatctctgatagcccaaagcaaattgaatagtgaagtttatcttgctttaatgcttatgctagtggaacttatttaaatgtatttaacatgtacagaaaaattaacaggaaaataatgtatttggtgatgagacctgggggtaagtgatggttgttgagctgatgatgatcgtattttctttaataccacggaccacctcttcatccagcctcactagctgtgaagcagctctgaggaccattcttacagttctttccacatctctgtctccactccccagac

SEQ ID NO: 399407 - DNA, 543 bp, Homo sapiens
gctgcacagaaagaaaattctggaaatatgctgagaaccactcttgagtatttagcagagtactgattggcatctgtgtgcatgaagaaactacaagaggccagagaaagaaccattttgaaggatgagtaggatcaatacttggcatttgtaaagggctgagatcagtgctggttctcaccagctaaactagaaaacttcacaattcatggggcattaagtagtatgctcagaaaaatcttgcttcagtagtaaaacataattacccctaaatgctgccctcccatctaaaaaaatttaaaagcaaaacttgaagagatcagcaaaacttgaaaagatcagttccatgatacatttcaatatttacagaaatgcaaaaatatctggccccaataaagtaaaattcaccatgtctggcatttagtcaaatattaccaggcataaaaagaagtagaacaatatgactgacaatgggagaaaaaaataaccaatcaaaacgaacccataactgacacaaatgttagaagtggcagaaaagaacat

SEQ ID NO: 399408 - DNA, 645 bp, Homo sapiens
aataggcatacaagggacataccttaatgtaataaaagccatctatgacaaacccacagccgacataatactgaatggcaaaaagctgaaagcattccctctgagaactggaacaagacaaggatgcccactctcaccactcctcttcaacatagtactggaagtcctagccagagtaatatggcaagagaaagaaaggcatcgaaactggtaaagaggaagtcaaacggtcactatttgcagatgatgattgtttacctcaaaaaccctaaggactcctcctgaaggttcctagaactgataaaagaatcagcaaagcttccagatacaagattactgtacacaaatcagtagttcttctatacaccaacagtgaccaagtggagaaccaaatcaagaactcaaccccttttacaatagctgcaaaaaaaacaaaaacaaaaacaaaaaaatcttaggaatatactgaaccaaggagtcaaaagacctacttgtagttttttaaggaatctccatgttgttttccatagtggttttattagtttacactcccaccagtagcgtaaaagtgttcccttttcaccacatccatgccgacatcaatttaattatggccattcttgtaggagtaaggtggtatctcac

SEQ ID NO: 399409 - DNA, 667 bp, Homo sapiens
ttctacagctcttcatccccttcccagccctaatgcacagccttccttccccagcacctgggggtacgaacgtctggctgttcagccccacaggttcaccattcacttcttgcccacagacagacccaaaccttagcctaacagcatccccgccccccgaatggctctgtgagatcacgcagcattgatggttctgctgcaaaaacaaaacactgatgaagccgccatgctcaaaaggccacatgaggctgagcacggtggctcacgcctgtaatcccagtactttgggaggccgaggcaagtggatcacctgagttcaggagttcgagaccagcctggccaacatgatgaaaccccatctcgactaagaatacaaaaattagccgggtgtgctgggcacagtggctcacacctgtaatcccagcattttgggaggttgaggcaggcagatcacaaggtcaggagtttgagaccagcctgaccaacatggtgaaacgctgtctctactaaaaatacaaaaattagccgggcgtggtggtatgtgcctgtaatcccagctattcaggagggtgaggcaggagaatcgcttgaaccttggaggcggaggtcacagtgagccaagatcatgccactgcactccagcctaggcaacagagtgagactctgt

SEQ ID NO: 399410 - DNA, 374 bp, Homo sapiens
agccccaggaaattaccacctacgcccagaaatctccttctcagagtcctgtcttttagagcagcgcccaatctcttaggttgtctgtcgatggtcactgattactttttgacctactcattttatcctggagaatcaaagattcacagcagctacaagtgctccttgctaataaggtatcaatagcttggattcaaaagatgacttctgagtctagggaatggcattttgggatggaaggccatgtaacactaatctttaaactcaatatcccaagaataaatatggtttattaaccatatgtctaaatttccttcatgcttctgatctgcaaagaccagtgataaatatgcagcaatgagaaataaatgaag

SEQ ID NO: 399411 - DNA, 551 bp, Homo sapiens
gaggctggggagggtggagaagggcgattgtgtttgcttccttgctcaaaatggcatgtcgctggaagccttccagctcctaatggtggaggcatagcaaggactgcatttaccgacttatttccctcttttttttcacgtattctttcttcccctcacattttcaggactgaaaattagaaacacttttctcctacacacaaaattactccctcacacacactttattttccccctgctttgaagtgacagttgctgcaagaaaaggtttctctcagaagagcacaggctgtcctggccagaacgaaggggttaatttaaaatacagccagctaggtagtcctaggggcatgctttcccttggggttgggggtggtatctgaaaggttggagggggtgctcctggggctctgctaatattttatttcttcatctgggtgtgagatgtacagatgtgttcactttgtgaaaatccagtgggctggatacaggatatgtggtcttttttttttttttgtctttaataaagttttaaaaatgtaaaaagctac

SEQ ID NO: 399412 - DNA, 322 bp, Homo sapiens
ccactttactacttactgctgcttgttgatcctagtttgagacgacagagcaagtctgatccctttcaaatgtgacagccttcaagatagctattaatttcccatcaattccaagcccaagtcttctacatattaagtatccccatattcttacctcttattcatgtagcatgcttttgagatccttaaagattttgtagatcgactgggtgtggtggctcacgcctgtaatcccagcacttcgggaggctgaggcaggcggatcacaggtcaggagatcgagaccatcctggctaacacggtgaaaccccgtctgtactaa

SEQ ID NO: 399413 - DNA, 118 bp, Homo sapiens
ttcttttttggtaactagttggttttttagaatcataacttgctttggttatgtgttggaagcaacgaagcatattcctctcatcttaatcatttttgtgtaaatgtcatgtaaaaaa

SEQ ID NO: 399414 - DNA, 444 bp, Homo sapiens
tgttgcctagcctgaagtgcagtggtgtgatcagggctcactgcagccttaaactcctgggcccaagtaatcttcccgcctcaccctcccaagcagattacaggcatgtaccagcaagcctggctaattctgtttatttatttagttatttattttgttgagatggtatcttgctgtgttgcccaggctggtgttgaactcctgggttcaagcaatccccccgccttggcctcccaaggctggaattataggcatgaaccaccacagctggtcaaaaatggttatctcattaaagttttaatttgcattctttagggatggaatgaatattgtatgtttaagaagcatttgaatttttttctgtgaactgtatattcatatattttgcccatttttctattgcagtgctccttttcataataaatctgtaggaactctttgtat

SEQ ID NO: 399415 - DNA, 217 bp, Homo sapiens
ctcttaacacccagcctagctttctttccagtagaccagactgcatgtgcgtttggaaataaatggagcccatgaatcatttagaaattattagggctgggtgtggtggctcaggcctataatcccagcactttgggaggccgaggcaggaggatcccttgaggccaggagtttgagaccagtctgggtaatgtagcaagaccctgtctctgtgaaa

SEQ ID NO: 399416 - DNA, 300 bp, Homo sapiens
ggaggggtggcaccagctcagggctgaaggggcattggggcctgacagctggagccctggacctttcctgcagagtctggggcctggaaattaaaaccccagggacactgtatatcactgtgtgtctgtgagcaagccttggtttgttcccctgtgaaatgggataatagcacctgccttccggagctgcagtttatgaagactcaggctggagcccgaggcctctgagatgagactgatcggcatgtgtgcaggctgcctccgcgtgtccacaaaacttgtgctggggttatttttagt

SEQ ID NO: 399417 - DNA, 469 bp, Homo sapiens
taagtattcaataggatcatgatatttccatttaaaatttaaccagccaataaatacaaacatgtctggttatttaaatttataatacatatgttatgtattaaatttgtaatacatatttaaatttataatacatatgttatgagttagaaattaacagtctataatcagtgaaaatagatggcgtcatcagtgtaatatgatgtgccctcagtacataagttgtttagaaccttttaaatgagtctctgcagtaaatagggagaaatccatgtttccctaagtgatttaaggtttcattttatttactatcaagaaaaaaatagtgtggcaattcacacctgtaatcccagctacacaggaggatcttttgagcccgggagttcaaagctgcagtgagctgtcatcacaccactgcactccagcctgggtgacagagcaagaccccctttctcttaaaagcaaaaaa

SEQ ID NO: 399418 - DNA, 531 bp, Homo sapiens
tgaggagtttccctctgtcacacaagctggagggcaatggcgccatctcagctcactgcaacgtccacctcctgggttcaagcgattctcctgcctcagcatcctaattaggtgggtacctgtagtcccagctactccggaggctgaggcaggagaatggcgtgaacccgggaggcggatcttgcagtgagcggagattgcaccactgcactccagcctgggtgacagagcaagactccctctcaaaagaaaaagaaaaaagatgtaaaaaccattcttagtttgtgggccttacaaatcaggccactggcccattgcttgtagttagttgatccatgtcatgcaccctaaaaatggctctgtcactgtgagtggcttcagtaggattttgagaataagtttatattcttgctaggtaaaacaaaacaaaaacgacagtaataccaaggaatttccccccccttttaccctccatttgtgtttattgcatatccactataacaacattaaaggacctttaaaaggaagtaa

SEQ ID NO: 399419 - DNA, 340 bp, Homo sapiens
tggggctgcccgcgccgagccgccgcccgagccgcaggggcgctctgaaaggggcctgggggcatctcgggcacagacagccccacctggggcgctcagcctggcccccgggaaagaggaaaacccgctgcctccagggagggctggacggcgagctgggagccagccccaggctccagggccacggcggagtcatggttctcaggactgagcgcttgtttaggtccggtacttggcgctttgtttcctggctgaggtttgggaaggaatagaaaggggcccccaatttttttttaagcggccagataataaataatgtaacctttgcggtttaagagga

SEQ ID NO: 399420 - DNA, 439 bp, Homo sapiens
gctaagagttcagccctgcattgagaagaagaaaaagtcccatgagagcagggcagggtggggtgacaaggaccacgatggccagcctggccctgggtgtaccctgagatgtggattccttgtccccagtgggaatcaggttcaggttggcagattggcagtcgctgtaacccattcacaaaggtgttctaggagcccattgaacatttgtttgaatggaaggaaatgtccaatttattttaatgaattactgataaacagtgctttgaccaggggcctccaggcctgagactgaaggcacagtttaaccagtacacgggccagtgttaaatcttatgcagactgagacgaacttttgtttatttccacattattaatggttctactaattttatctaagggggcgcagagaagaaaaagtggggaaaaaagaaaagat

SEQ ID NO: 399421 - DNA, 441 bp, Homo sapiens
tactgaatcagtccacaaacattttttaacatgtgctgtatggcagattaatttcttacatattgaaatcagcttacatctaaaagaggaaacagatttcgaacaagtaaacctatcatgtcagaggatgatcagtgctctgaagaaaaataaaatagagtaacagactagcaatgactgtgatggacatggctatattaggaaacagggtgcatttaggagtctatgaggatgtgacatttgaacagagacctgaaagaaaggaggggaaaagcaaatgcgaagactctgaggtgagcccacttagatcctaaggtcaccagtaatgatttcccatctctgtgtatttacgattttgtattatctcctcctgttgagtgtaggtggaacttacaacttatttctaactaatgaatatggcaaatataatagagtgccatt

SEQ ID NO: 399422 - DNA, 613 bp, Homo sapiens
tgtgtgtgtaaatgaaagaggaaatctcacatgaaagactcaatcaatgcagcaaactttattttattttattttattttaaataaatgaccacagccacctcacccgttagtaaccaccaccctggtcagtcaggaggcatcgacatcatatctaaaacctccactatcaacaagattatgacctgctgaaggttcagatgactattggcatttctcagaaataaaatatttttaacaaatgcatgcatatttttttctttagctgtaatgctattgcacactaaatatatgacagtatagtgtaaacataactttatatgtactgggaaatctaaatatttgtgtgactcattttattgtcatatttgctgcattgcagtagtctagaattgaacttgcaatatctctgagatatgcttgtatataatatgttgtctatatcttatcacagtttttgactaaattttatttttcctggtcctagtatagccaccacagctcttttttgtcactgtttttatagaatatctgtttctgtctttcactttcatactagtcacatctatagatgcaaactgagtttctagtgctgagtatatagttggatcttg

SEQ ID NO: 399423 - DNA, 469 bp, Homo sapiens
aatctcacagatctttttttcttatcgttgcgttccccttatgttgtcttcagatagtaagcgctttataaatgcttattttaaaaagtcttttttccccataaatgggtaaagattgaaaacactcaaaagatattttgtattccctcatgtgatgctttataagagggatgtaaagaagaactgacactacaaaagcagttggtggaaaaattacttttgaagtagtttaatttatcttccctagaggtatatctgagagctacagttggaaacctgacagatatacagaataactgctgaaaggggtgcacacggggagtggaaattaggtttctgaagcaggaaactataagacaattgatttttggtatggaagagcgtgggatggattctgtgttatgtattgacacttgcattcgctattgtgttacttaacgcaattgtattaaacagttagttgactatt

SEQ ID NO: 399424 - DNA, 133 bp, Homo sapiens
tacaagggggtcgcaagtcccagcagccgcgcgagcattggcgacccctccccaccgcagagatttcctgcgccgaccacgtgctcgcagctccacgcacgccgtggatttgagggtcgggcccccgcggccg

SEQ ID NO: 399425 - DNA, 319 bp, Homo sapiens
tcaggtctctccctaaagttccatctaatatattcattctgaaataagcaatggtaaggagaaaaagttaagagaccaatcttggtggcagagaagagtctacttctttaattcaagatcaagtttctcttcataatgaccttgtagccctcgctcctcagacttgctggctgactggacccacaagaaatacaggtaccaaattgtgggctttcatacattaaaaggttttctcatcttgccttgtattcttacaaattattggatttaaataagaaaaaacaagactcttgtttcagcctctcttattctagacttg

SEQ ID NO: 399426 - DNA, 549 bp, Homo sapiens
aaaagacgtaaccggccgggcgcagtggctcacgcctgtaatcccagcactttgggaggcagaggtgggtggatcatgaggtcaagattggaaccatcctggtcaacatggtgaaaccccgtctctactaaaaatacaaaaatcagctgggcatggtggcgcgcgcctgtagtcccagctacttgggaggctgaggcagaagaatcgcttgaaccagggaggcagaggttgctgtgagctgagattgtgccattgcattccagcctaggcaacaagagtgaaactccatctcaaaaaaaaaagagaaaaagaaaaagacataatgtagtatcaggatcaagtatgcggtactactgtaagagacctgaatggaggcttctaatttgtatcaaaggaaaacagaagcttttcgtttgcatcatttaactgaactgtgaacgcttgtgcctcccatctttatcatcggagttgacagtgaaataaatttatatcagaagtttgcatctcaattttatggagtataaaagatttttttgacattcaacgcag

SEQ ID NO: 399427 - DNA, 313 bp, Homo sapiens
ggaggagcgttgctaatgtttttgtttgtttgcttttccatgcatgcataatgagggggcaccgcggcaccacgcgggggctcccggcccacttttgtatttaaagcctcgctgctaacgagtctgcagccgggctcagcggatccgctccccgggctcttggtcacccgagaagctgccgccgagtgaagccagggagccgctctccggcagcgccgactttcttgttctccccgcgcttcccggaaagagctccccggagctctgcggaggccggggttgccgcgggcggagggggaggggacgcggggcg

SEQ ID NO: 399428 - DNA, 271 bp, Homo sapiens
gggaaagggtggcgttcggaatctcctcacggttactctgtgactgctgcagacaggctccttgcagatgctctcatacacctacatatatatatattttctctatttggagagtaatagactgtaggattgggtggtttcctgcattgagatccttctattaatatatcaatgactctgccaatttcatacctgaaaaagtggtaggttagttatagaagatctttaatattcctttgaggtctaagattctgttaaatatttttgttta

SEQ ID NO: 399429 - DNA, 494 bp, Homo sapiens
cactacacattaaatggaattgacagacatatacagaactttttacccaacagcagaatacacactcttattgagtgcacatggaacattctccatgacaggttacatgttaggttacaagacaaattttaacaaatttaaggaggttgatatatcagatatcttttttgactgcaagggaatgaaactagaaatcagaaattgcaagaaaatttgagaattcacaaataagtggacattaaaaaaattcttgaaaaatcattgagtcaaagaggaaatcaaaagtccacttaaaattaagatgcttatagtaattaagttagaaattaaatttcatagtaataaacacctacatgtaaaaagaagaaagatcttaattaaacaacctaactttacactctgaggaactagaaaagaacaaactaagcccaaagttagcagaagaaaaaaagaacaaaacagaaattaatcaaacagggaatggacaaactata

SEQ ID NO: 399430 - DNA, 495 bp, Homo sapiens
cctagtccagattagcagaaattcccagatgatctataagttcatgagatgtaacacatggttgttattaaagccagaacattatgaagtgatttgatgaacagcaatgtgtaactaataagaaagcgtatacagtatctatttagtactagtaaatgattaatgcaagaagagaatttaaactcttgtgggattattagatgcttttcttccctgtacaaatggtcatggtccagaagcctagaaatgaaaaccatgttcaacttagcaattgcttcctttgttataaataccaactcagtccatagagatggttaactaataaataaagcaatggttagtcaattaaaactgaggatctattctgagtatttcccactgattacagaaatgaagtctcctggaaaggagcacacctaattcaggctaaaaatagtacaactaaatatctggaaaacaggacatgtgtttgaaggaaaatattcaaccaaaaaa

SEQ ID NO: 399431 - DNA, 324 bp, Homo sapiens
tgtacagattgcaaagatattctcacactctgtgggttctctgtttactctactgattgtttcttttgctgtgcagaagctttttagtttaattaagtttcatctatttatctttgtttttgtcacatttgcttttaggttcttggttatgaagtctttgcctaagccaatgtccagaatggtttttcacttttagaatttttatagtttcaggtcttagatttaagtctctgatccatcttggattgatttttttttaaaggtgaaaaaatgaggatctagcttcattctttctttcattcttctatatgtggcttgccaatt

SEQ ID NO: 399432 - DNA, 406 bp, Homo sapiens
aatttctagtggagaatagatgaaatggagtctcctcacatcaaagttaggtagatttatatacttatccaggcaacctggacattcatttaaacatttaagggtttatgtccaaagctttgctgggccaataaagatacagtcttgctttcagtaagctcactttagaaactacaatgtatgatgcaaggtcataatactgtacaaaggtacatgcaaagtgctgtgattgcgcagagagaagggaggactcatggccaggccaggcaatcagaaatacgtcaccttggagattttaggaggaggtaagatctacatggtgaagggcatttcatatcaagggaacagcacacataaaagcttgaaaactgtaaaataatcatagttgtttagaatataagaaatt

SEQ ID NO: 399433 - DNA, 2454 bp, Homo sapiens
  misc_feature (1709)..(1709): n is a, c, g, or t
ttctgttatgtaaggcaatttagcatcctgctccctaggaaatttcttttggagaaaacaggccatgcaaatgaaaaagtctaattgggtgattggctgcatttggtaacatgtgcttggagggcagggagattggctagttgtaaataaacatgctttctctgggcggttgacccttctgcgtggactgactctgaggtttgtccccgacagggagcaggtggggtgaatttcttgatttctccttagacaccagttactatgaaatcactgattcttttcagctggagaaggatatgctaggggttcttggaggacataccagggtgcaggatgttgggatgaagtttaataagggtggtcttggcagggtttcctggaattttctgtctgggggtgcatttttccttttttctgcccccatagcagctttctgctcattgccaaatagcccccttgtcagtgacgggagaaatttggtcttacaggccaaccttggtctctttgcacagcaaacccccacgcattacacaccactaggtacccatagaccctaactgggtggcgatactggtccgcagaagttttgcatcttgattgttaagcttttgagaacccaaggagggttagaaaggaatgaaaataaacctagacagccaccggcagctctcaaggctgtgggccacagagcagcctgaaaaaaatgtttgctgatcgatttaaaaagcaatcctaaaacagaaggaactgccgtgttgtcttttctaccaaatattgtttggaaatgtatgacaaaggtgcatttgattactttttcctgtagaaggtgttagcaggtagagctggtgactttagcataaaagtagagaaagggaaccaagtaaaaggagattgtgccagatttttcaggaaagccggtaacattgcctttgctgctggatgggtgtgtgtctctgtgtgtgtaagcgtgtgtgcaaaagcttgttctcctttgccttggagaaggtggcctgttggtgtgtcatgcacacaaagggagaggaaagccgtggaaaatagtgattgtcctttgctggcttcaaccaaggtgacctggaggacacgttccccttcatggcatcccagataacgtcctggagcacataaccttctctggaacattcagatcccactgcaggagcctaggactgtggcatgctcctgcctctgggcctttccatctctggaaccgcctgaccctgctgcaggctctgagagtgtggtgtcaagtcaagggttgacaacatcaacttcagggccgggaaaatccgcgtttccaccgggctcatgggtggatgacataagcactgcaggctgtttcttcacatgtaaaggaggtagcagaatttgccttgtggtgggtcatgccctcagtgcagtgtctggcaccctgcatattctcaaaaaaggctggtggcagctgtgaaggtgctgaggagggagtttgaggaagctttgcctctcctgtcttcccatgtcacccctttgttagggaggagccacatcagctacaggccagggccctagagagctgtagcccctcacagtggcacttgccacgaggctcagcatccccacttcccacatctaccctgtcgtctttcccactcaaaaactggacatcatgaactcttatctgcagactttgaacatccttattagaaagggcngcaaaagtgtagagagatatttccctgagaagcttctcaacaacatgaatgaaaaaatagacgagctctcttggtttgcaaatgctcttaaagttgagggcaaaaatgtgaaaaagaagagtctttttttcctcctcacccacggtgaggtcagaggtggagttgctttaatagtaaacaccaaacacaggctttagggctggaaaaagaactgctgctgcttcttagtgacatcacccttcccagaagcttgaactgagttaattttagttcagttcagtttctaccagcccttttaaaaaacattttaataactatttattaagctttctgtaagcatctggctttatgccagaggctgtggacttgaagatacataaaatagtcaaattcattcctatcagatggattatattctagtacaacgaaggcaagatttaaaccaaaagaatggccactgccaagcgttttggctcacatctatagtcccagcattttgggaagcagagacaggagggttgcttgaggcaggagttcaagaccagcctggataacataacgagaccccatctctacaagaaatctttttttaaaaaatagctgggcatggtgatgcacacctgtagtcccagctactcaggaggctgaggtgggaggatcacttgagcccaggagctcgaggttgcagtgagatatgatgacaccactgcaccccagcctgggtgatagcacaagaccctacctc

SEQ ID NO: 399434 - DNA, 264 bp, Homo sapiens
agtgtaatagttacaactgtgtctagaaaactgtataggatgtttgattggtagcttcatttagatacccaaacatcaacacctaaatacaaagctctggttttaccatggctttcgtttctagcatatggcactataaacctcaaaattaagggccaggcacatggtggctcaagcctgtaatcctagcactttgggaggctgaggcaggattccttgaggccaggaatttgagaccagcttgtgcaatatctctacaaaaaa

SEQ ID NO: 399435 - DNA, 628 bp, Homo sapiens
gacctgttatttccctacagcttgagtagcccctgacttaagaagagcaactgaatcatgggatgctggtgtgagttactcaagtcatcaaattctatcattcaaagggatctcaaggtcgtcttgtccagtgcttcccatgtggtataccagtatgccaccacatacggctgggccactgcagagtggcgggtgagcctcaagtcactgactcccttcagctcagatgtaccttgtgtacaacttacaagaataatcatgatgatgtgtgatttttgctttacatgctaatgttagatcctaatgtgagtaagagagatctcccctgaactacatggtactagacttcatgtgttaatattctggtgtattatttgttgttgtttggccagggatggaaaaactcattccaaatgtgcttattattaatatatttgttatttgcaagaagttacacaggcattttggaattattttcctaatagggtaggcaactaccttcgtattcttttattttgtagagacaaggtctttgctctgttgcctaggagatcaagactgcagtgagccatgattgcagcactacactccagcctgagtgacagagcaacactctgtctcaaaaaaa

SEQ ID NO: 399436 - DNA, 341 bp, Homo sapiens
acctgcaaagcatcacactttgcaataactctccaaacagtggttgatttgttgtggttgtgcttcagaataagcagcaaagacaggataaaacagggaatgaaaaaaagacacttattagtttggtgacatgcataggactaggggttgctttagaagataagaaccccctttattagaagtttcgtgtagctgagggggaatctggaagaagcaaatttagccaataattgcatgatagaaaagatcggtatctctctcctcttccctcaccatctagtatttcttcctttttatggtttttttctttctctgaatatcccctttcctttcttgtacct

SEQ ID NO: 399437 - DNA, 138 bp, Homo sapiens
acattttgtcaaagctgaagtacattgacaaagttgtgtacttcacggcttatctacaccttgagttaagtagcatcttttaatctctactagcattcaaaaaataaaagaaagaaagaagaaagtaccatatgctga

SEQ ID NO: 399438 - DNA, 620 bp, Homo sapiens
aaacgtgtttattccaaaaagatgcaagatttctctcctggaaagcaattcaccactctctatgcttctttttctttctgagaagtcttatacacataacagttttcaatgcacagatggatcttctgtggttcacaaccttttacatttgagggctaattaaaatgaatcctttgtgccacctctaagatacaactcactccttcatgttgttcattgactaagatctaataaaccagttccaattcataactagggattattgaacttcttgtggccattggctatcatagaggcattgtgaaaatctctaaggagacaagtgcacagcagcctggcccggagggtcctcttatttgaagtagaactcaagttgcacccaattatgtaaggctgatccaacccagaaaagagttttctgcaagagattaagccaattctccagaactctaaggaggaaatcaagatccttgtggctgtttgatcacttctgtgatttgaatgtctccacggtttaatcatttgcttacataatgaggacattacagagagaagagatgagggtaggggaagagaaggaagggaaagtgaaaaataagaaggaaaaggaaaagaaagaa

SEQ ID NO: 399439 - DNA, 269 bp, Homo sapiens
ttgtatcacctgtcaaggcatgacttccccagaactaagcgtgtttatggggtcaagcccacatacacagtcgctcaagtatcctgtcacctggttatttcctgcaactggttacttcccaaatggtacttttttgtaactgcagattactaaggaagttatttccctaagttgtcaatatatatttattgcatactaggtgagctggggttttgggggagaaagaaaggaattgctggtggagggttcttatttgtcagacacttaca

SEQ ID NO: 399440 - DNA, 654 bp, Homo sapiens
cttttggtcaaaaaatgaagtttcggtaatgcatagtaacaactgtagtgtaattactggccacaaaataccaggtgccagaccaacccttttcgaaccatttaagagaaccaagccaagcaaaaatgcccagcctagccttacccagaagttcaaaagctcagcctttgtcaccaggaaaaaattaattcaaagagcaaagccattattcggcacaaccaggtattctgttgtaaacatcttttgttaatacatgttgaaagctgaactttctcacgtttgagtgaaagagggctgcttaaagagagtttaaaccaagccaggttcaaggtttttttcttttctttctttttagatttctgacttcatatctgtgggatccacacaatggggaggtactggccttggaatccatggttccccagctatcattttactttagaattacagtgttctctgttagtgtcaagggaatgaacctgacgagaaaagaccaaacataggactgttacagggaagaaaaatatgaaaagacctaaagatgcacgtcctcattatatgtaaggaatctatttcctagaatcctataaaaagctcaagtgaatttgcttcagttaataaatgtgatttaattataatgataatgccacagca

SEQ ID NO: 399441 - DNA, 504 bp, Homo sapiens
ctggatccaagagcatctcctgggttcttcctgttagaatactgaatgtccatggagagtttaacataaggaagaagaggcctgtctcccagctgaaactggtgcagcagatcatgcaaagtaaaacctcagcagctgtgatgaagtagagcagagggcctgggtgtctgtcagctccaagcggaagatttccccagctttctagatttctgacttcatatctgtgggatccacacaatggggaggtactggccttggaatccatggttccccagctatcattttactttagaattacagtgttctctgttagtgtcaagggaatgaacctgacgagaaaagaccaaacataggactgttacagggaagaaaaatatgaaaagacctaaagatgcacgtcctcattatatgtaaggaatctatttcctagaatcctataaaaagctcaagtgaatttgcttcagttaataaatgtgatttaattataatgataatgccacagca

SEQ ID NO: 399442 - DNA, 221 bp, Homo sapiens
acttgttttgagatttaggtattggggtaggaggaaggcggaaaagttggttttcttttagtaccattttattcattcattggcttagcaaacacctttgccctccaccttttttattttctttcaaatccacagaaaactctaaacagtgttaaggtgaacagtctttatctagtttaccaattaatattttccacactgctttttctgtttgtctccct

SEQ ID NO: 399443 - DNA, 505 bp, Homo sapiens
acaaataagatgataaaagtagaagaatttttatgactactcacctacacaggattaaacaaccattcacaaccaaactacacaataaatacacaagttataggaaaatagaaataatatttatacaggcaagcaaacataaacacattagcaatagacatatggctgattcatatttgattttgcttcacactgtcataaattgcagagttaaatattttcatacacaattataatataaactaaaacatccaaacacaattaactaatgtgagctggaatacccttaaatataaaacgcaaaaatataaaagtgcaaaacaaaattaaaacatgaaatgtaaaacttattggacaccatcaagtagaacaatatattcatgaaaaaaaatcatagaataatatagcaaaaaagtaatacagaggttacttgaagatttaaaaaagctgagaactttccaaattatgatgtaataaaaaattcttaaccaatactacttgaaaa

SEQ ID NO: 399444 - DNA, 759 bp, Homo sapiens
agatgccctacggaactagcgagatatggagggtcaactgtgaaaccatcaatatcaggacattagctttgatatgttactgacatcaaatggagttagactccattcacagtttgcctgttgtccctaatatgtcctttatagcaaaagtatccagtccagaatcatgtgttgtgcttagcttctgccctacctcttcagtctcctttaatctgaaacagttccttctgctttccttcatttttatgaccttggtacatttaaagatgataaaccagacatttgtaaaatgtcccttaatttgggtttacctgacatttccttgaactcaattcagattgcacatctttggcaaaaatatgacagaaaagatgccttgttcttcttgcaacctatcaggtggttcatgattttgttttatcccattactgatgatgttcactctgatcatttgactagggtggtgagtgccaggattctccactctaacttagcctttttttcctttgtaattattaagtgtttgtggtagggtactttgaagttatgtaatacatactttggcattaaaaattcagttgataaattggttcttttggttacatcaccatgtactaataggtttctataataatcaatagtcataatccattcctatcattgtttgtcttgatgttcgaactgtcccagatttgtttggtgggagctccttcaagctggctcctgcacagcttttgacttatcgctatcattctgtca

SEQ ID NO: 399445 - DNA, 736 bp, Homo sapiens
cgtttaaatacaagctcctgtatgtactaggtctttaactattggcaagatatttaacttctgtgcctcaactcatctttaaatggagacaatagtagtacctagatcaagggtttgtttttgagtgttggtgagttagtggaaaagttatgagctaagaatgttatacccagtatgtagattacttggctctgtaaccagaatttagcgttcagcaaatgcagccactattattgatattaccactattattattaccagcattaccaatatctactctgaagtagatattattatacacattttatatgcaatgaaacaaagatttagaatggtttttcaaaaggtgtttaatttcaaataattaatgattgatgggtttgagcattgaatctagatctgactcaaagctagtatttggttcctattgctcctataacaagcaccacaaacttggtgcttgaaacaacacaaatatattttcttgcagttctgatgatcagaagtcctaaatgagtctcactgagctaaaaatcaaggtattggcagggctttgttccttctggaggctctagggaagaactcatttgcttgtcttttccagttttgaaggctgtcacatgcattccttggcttgcagccccttccctcttcaaagccagtaatggctgatcaaatccatctcctgctgcatcaccctgacactgactcatctttcgccttcttcttttacatt

SEQ ID NO: 399446 - DNA, 297 bp, Homo sapiens
gaattatttgtgtataggtaatgagtgtgaatacatgcgcacacacaaagcactagtagagcttttaaatgtcaaaatttaaatattctaaaggagcaaagaacaaaatcaaatttgtggagagattctaactccaaagtcaaatctacagttgtttatattttgtggtctgtagcatgtcatttaaaaggcaagagttaagcgaacaggtgatggtgaggtgggaaaggacaggcatggtgttaggagtgtacgtatatgagctgttggccattaaaatatagtcacgcgcaagtc

SEQ ID NO: 399447 - DNA, 438 bp, Homo sapiens
tcatccctgggcaaggcaaaccaaagtcccacaggttcataaggaggaaatggaggtctgcctgtgccacacccatgctagcaggcatatcacacctgggctcattacagcaggtgagatactggccactgtttaacacaatggccctagagggctcattgcaagtagggaagagcagaaaaaggcacttgctgaggcttgtgtagctctctggccactcccaccactgcacaatgacctggaaggtggattggccactgcgagagctcctgactcgctcattccccacatatgttagtaatcagataaataggccttaacttacacaaggagcgatttgggctgcaggtgagagagatcttctcacaggaagccattgctcaagactgagacaagctatcaagggacactaacaccagttccttgacagatactgag

SEQ ID NO: 399448 - DNA, 593 bp, Homo sapiens
tttggagaaaaggtcacatattgctggaatcataaaccggtgtcatggctttactatttgcacccggtctgaaatgtttctgaggtgttatctgagtggttctggataagtagcttagacttgcaaccccaaataggtgggaatcatcctccttttactgaattctgggtggatgataaccccatcgtggccaaatggctgaagtcctacccatatcttagaataaagtgatctgggaacccgagccctttttattggattttaatgttttcaatcagtgtttaatgtgaaaatcagtatttgaaaatatgctttgtgtttcgtcttgcaaatcattaaaaagatgccatatgcatagaattaccttgtatggcaggaatcctaggaaaactttaaaagtcaatgttaacacttggtaaacactcctgggtagagtccagcaatccttctattagagaaaatgttttctctctgggatttgaaatgttttagatttacatcttcctcttgagaaaaactttctaactaccagaaagaagataatggtcctgaatgaatacatttactaaactgtaaaatccagaatagataag

SEQ ID NO: 399449 - DNA, 568 bp, Homo sapiens
ccgtgtctagaggatcccgtccacggtaatttaacaagttagatgaaaatggacaaatttcttgaaagatataaattatgataatgaatataagaaagaacagaaaaactgaagagccccgtatcagttaaataatctaaataataattaaatatctccctttttctctttctttctcacacacacacatacacacacacacaaattccaggcccaggtggtttctctgatgaatcctattaaatacagttatgtgcctcataacaatgtattggtcaatgatggaccacatttataatggtggttggagcagcaggctatactgtacggcaggggtccccaacctctgggctgcagacgagtaccggttcatggactgttaggaactggggactgctgcattatagtaaaactgtgattgtaagtataaccctttcctgagtttgagttgttctagaaaattactgaacccgagtgggttgtggaaactcttgaatttatcaccagttggtcaaagtgtggatagcctggggacttccaaacttgtggctggcctctgaagtgaagg

SEQ ID NO: 399450 - DNA, 560 bp, Homo sapiens
aaataattttgtgccaatagatttaacaagttagatgaaaatggacaaatttcttgaaagatataaattatgataatgaatataagaaagaacagaaaaactgaagagccccgtatcagttaaataatctaaataataattaaatatctccctttttctctttctttctcacacacacacatacacacacacacaaattccaggcccaggtggtttctctgatgaatcctattaaatacagttatgtgcctcataacaatgtattggtcaatgatggaccacatttataatggtggttggagcagcaggctatactgtacggcaggggtccccaacctctgggctgcagacgagtaccggttcatggactgttaggaactggggactgctgcattatagtaaaactgtgattgtaagtataaccctttcctgagtttgagttgttctagaaaattactgaacccgagtgggttgtggaaactcttgaatttatcaccagttggtcaaagtgtggatagcctggggacttccaaacttgtggctggcctctgaagtgaagg

SEQ ID NO: 399451 - DNA, 422 bp, Homo sapiens
tactgtttaatcctcattccataaactccaggttttgcttttatttagatatctataattttactgctcttttaaattttaaaaaacttatttgtgaagggttatcaaaattctcatctccttgatacctttctaaccttatatctttatcataactttatcatatctttgtgcgttctcatagtattgggcattgaatgtataaatttttacctttccatagtttttcacattttgtttttaaaatacactttgcttaaattgtcaatgtaacatggatctctaaaaccctgcttatttctactattgacagattgtatttattataaattgttttcatctctgagcacttattccatgtttgatggtacctgtaatagcatcagcaattctaatatgctattaaacaaaaatttccattg

SEQ ID NO: 399452 - DNA, 485 bp, Homo sapiens
caaagactgcagtttccctggatctgttccttggccattgattaccatggcaacaacaccagaggtagcacttctgagccagatctgatcctaatctctgtgtgacttagtctcaagcatccaggaattacaagcaataatgagagtaattttggacactttctcagaataatttctatattcaagccaccccacctcaactccacccctgtgatacaagtcccatgagtactgacatttgcacagtagcataaatgccttaaggaactttgggactgggagtttttggctgaaatcctctgtcatgggacgagggtacagtaaagaagctctattcctcagaagaaaatttgggcaccgcaaagtctaaataaatcccctttcaggatttgatatagtgtgtacttccaacaaccatcctggcgtagttggggattgttttacaataagtaaacattgctaataactgtgttacaagatcatta

SEQ ID NO: 399453 - DNA, 284 bp, Homo sapiens
tgcgatggatcatgcctgatattgcagctttttgggaggtcgaggcaggtggaggtctcaggagtttgagaccagcctggccaacatggtgaaactccatttctactaaaaatacaaaaaattacctgggcatggtgacaggcacctgtagtcccagcaacttgggaggcagaggcaggagaatagcttgaacccgggaggaggaggttgtggtgagctgagatctcaccattgcactccagtctgggcaacaagagcaaaactccatcttaaaaaaaaaaaaa

SEQ ID NO: 399454 - DNA, 513 bp, Homo sapiens
agtatcagtacaaaaatagtggtcttttcaggaaaaattaaaagtgcatgtttggggatgggctgccaattcctaacaataaaatcagatttctgggcaaatgagttctgtgtaacatgtagcttacaatgcccttttatttacagattgaagggttccagttgatctgcttactgttgtattatgttcctctcaaacaataaggaaaatacatccacaaaggtgaagtataggggagattattattttctccaaattggcaactacaagatgccaattgccaatggaatgcacagctcttagattactttggattctcagtaggggctaagaaggaaggtcaggtaagatactttacatcaaagactgacagttaatggagttagatcaaccttatggggaagggaaaggcagggcttgtgacaattttattcctaaaagaatttctgccttgtttttagccatgatgttaattatatggagcaagaaataataaagtcaatggctaaaata

SEQ ID NO: 399455 - DNA, 328 bp, Homo sapiens
attcgcctacctcgacctccccaagtacagggattacaggcatgagccaccacacccagctaatttttttaactttttgtagagatggtgccactatgttccccaggctggtctcaaactcctgcctcgagcgatcctcccacctcgaccttttaaagtgctgggattgcaggtgctcactaccgcacccggcccagctccaatttttcacaattccctggatctcgttttttttttttttttttaagtgtttatgtcccggccaaaacacagtggtcctgcccctgactgaccccccccacccccgcacccaggcctccagcccttc

SEQ ID NO: 399456 - DNA, 210 bp, Homo sapiens
cgtgatgacagggcccatgtctgtcttgttcgttgttgtgtccctagtacagcactgggctgtacagagtactctcatgggttgaaataattaaatgtactttctggtgacaaagcttcagagtggatcacttgagcccaggagatcaaggctgtagtgagctgtgattgcaccactccactctagcctgggtgaaccaagagaaagaaa

SEQ ID NO: 399457 - DNA, 509 bp, Homo sapiens
actccagcctgggtgacagagtgagactctgtctcaaaaaaaaaaaaaaaaaaaaaaaaaaaaaaatcaaagaatcttcaaagtgatgattgaaaggaaatattctgagaaatagtcagggatttctgtgtaattacagccgtaaggtacatgtaatagcaagaggaaaataaaagagaccaaagcatgagcaggcattgaccaggggaagggaagggagaggggagtggcaagaggagcttccaagacagaaggaacggttcgagtgatggctccgaggctaggagaagctggttactagaagaagcttccagaagctctcttgccagggtacaaggaagtagaaggtgacatttgggaatgggctagggaagaaagaaggtgatagaaaggtagatagaagataggaaaatagaaagatagaaagaaggtagacccagggtctaccttcagaagttgggattttatttgaaagtcactgggattccttggtagggatttgtgccagg

SEQ ID NO: 399458 - DNA, 381 bp, Homo sapiens
ccaagaattcggcacgagggttggagcgacacagggatatagctaaattatttaattctttcatttttttggtgggtttcttgattgtcacatacatttcctcttctcaaactgcaatctactgtcaaatgtgacttacgagaccttgattcctttcccctctatgagttctttctggaaggtatggaaaaactgaccacagatggactccttatgctcagagggtattagccaggacttggtgttgccacttgttctattcttttatcttttatgagctgaggggtcacttgttcccctaaggtcatgatgatccattccactaccaaagggaagttttcttttctctgggttttgttcaacgttatacatttgcggccg

SEQ ID NO: 399459 - DNA, 734 bp, Homo sapiens
agcctgttggagtgcttgtgcaggagttccaggttgcagtgactgataatcatgtcactgcactacagcctgggtggcaaagcgagactccgtctttaaaacaaaaataaacaaataaatgatatacaagtatgtagcgcatgcattctcaacaggggtggtggtgtcccaaagaggtgaaaagtgtttcttgtggtggtttctaccaatggtgaaaaaaatcttaagacaatacaaaaacttgggaccctccaaagctcaactctacccaacaaaatcttattcctttgtactaaatctagcaagggataggaggtaactaggaacaatgtctaaaacaactcttggagaaggtgatcatgaaaacaaggttaagaaacgctgagataacactaaaatgtacaagtctctccccccacaaatcacactccattcccagagggaagggcctatccttcagccaattattcttccagcccacaggcacacatatcacatatcactattaatcatatatccaagagctctggactaagaccaccttcagaaacacaaccccgagggcctatgtgtcctaacagtgaaggcagacactagagcagatacaagcctaccagctgactgggaaacagccatgcccctccctggctctgaaatttgagaagcttccccctaagaaccctcagaaagggagaaagagtaaagggagacctagcttcacaagcactccaaca

SEQ ID NO: 399460 - DNA, 1080 bp, Homo sapiens
aaagtagattcttaggctcagcttctgcttaaggctaggcagggattgggggtggtgttgggagagccctctatgctgagttatggttttggctttgatgttgctggttttaggaggcaccaacaaagctatggacaggaggatttgggagagatttacttacccacggtatgtaagagaagattggggatgaggagtgaggagaaggctggagaccagttagaggctaccgtagcagcgtagagaggctgaaaatctaactagggtggaagcagccaggcaggctggtcctaatgttgggagttgttcagatctggtggagaggtcattacttatagagttattaatttataccccaccttaattgcaaagagattcaaagcagtaagccatcactttagaatttaatgttctgttttcctttttatttactcattcagcagctatttcaatgcctgctgtgtgccaggtgctattcttagtgctttacttgttgtatgtgttatctaatgctgtgtaacaaattactcctgaacttaccaactcacaacaacatttattagctcacagtttctgtggagcagggatctagatgtggcttagttggggttgctggcctggggtctctcctaaggctgcagtgaaggtggtggccggggctgcagtcatctgaaggctctagtggggcaggatccacttccaggctcactcaatggctgttggctaggtttagttccttgcagtctattggattggggccctagttcctggtatatggcctctctatagggcaggtcaccttgtggcagtagacaccatcaaagtcagagagagagagagagaaagaaagaaagaaagaaagaaagaaagaaaagaggggccagcaagatggaaatcacagccttttataagccagtcttgaaagtggtagctcatcacatttgtcctactctctgtgttacatgttaatttctaggtcgagcccacactccaggggagaggagtataccaaaagtagatacttaaggctcagcttcctgctaaagggctaggcagggaattggtggggtggtggttggg

SEQ ID NO: 399461 - DNA, 1010 bp, Homo sapiens
aaagtagattcttaggctcagcttctgcttaaggctaggcagggattgggggtggtgttgggagagccctctatgctgagttatggttttggctttgatgttgctggttttaggaggcaccaacaaagctatggacaggaggatttgggagagatttacttacccacggtatgtaagagaagattggggatgaggagtgaggagaaggctggagaccagttagaggctaccgtagcagcgtagagaggctgaaaatctaactagggtggaagcagccaggcaggctggtcctaatgttgggagttgttcagatctggtggagaggtcattacttatagagttattaatttataccccacctttcattcagcagctatttcaatgcctgctgtgtgccaggtgctattcttagtgctttacttgttgtatgtgttatctaatgctgtgtaacaaattactcctgaacttaccaactcacaacaacatttattagctcacagtttctgtggagcagggatctagatgtggcttagttggggttgctggcctggggtctctcctaaggctgcagtgaaggtggtggccggggctgcagtcatctgaaggctctagtggggcaggatccacttccaggctcactcaatggctgttggctaggtttagttccttgcagtctattggattggggccctagttcctggtatatggcctctctatagggcaggtcaccttgtggcagtagacaccatcaaagtcagagagagagagagagaaagaaagaaagaaagaaagaaagaaagaaaagaggggccagcaagatggaaatcacagccttttataagccagtcttgaaagtggtagctcatcacatttgtcctactctctgtgttacatgttaatttctaggtcgagcccacactccaggggagaggagtataccaaaagtagatacttaaggctcagcttcctgctaaagggctaggcagggaattggtggggtggtggttggg

SEQ ID NO: 399462 - DNA, 507 bp, Homo sapiens
acttagccagacatgatggcaggtgcctgtaatcccagctactggtgagctgaggtgggagaatcgcttgaacctgggaggcggaggttgcagtgagccaagatcacaccattgcactccagtgtgggcagcagagcgaggctccatctcaaaaagaaagaagagagtcagtttataggtatgattttgactaagaaagtaagttaaataggttttatgtcaggattggtcagagaccgataaaacagatggacattgggaggcggagatgggtggatcatgcggtcaagagtttcaggccagcctggccaagatggcgaaaccccatctctactaaaaatacaaaaattagccgggcatggtggcgggtgcctgtaatcccagctacttgggaggctgaggcaggagaatcgcttgaacccgggaggcagaggttgcagtgagccggatctcgccactgcactgtagcctgggtgacagagcaagactccatctccccccacccaa

SEQ ID NO: 399463 - DNA, 615 bp, Homo sapiens
gctctgggagtgtctgtcttttgcagttgaagataaggcataaaatacgccctggtctccttcagtgccctcaggcttgctaggattaggaaattccagcctggcgaattctagtcagaccggttttctgctctagaaaacactgtttcttgttaagatgtttatcagtgacaatgggtgtacagtgggacatgaaacctcatcagcagttctaatctcaccctggccttgtgatcttgctctgcccccattttccttgtgatattttattgccttttgaagcatgtgatctctgtgacccacaccctattcgtacactccctcccctttgaaaatcgctaataaaatattgctggttttgtggcttgggagcatcacggaacctgccgacatgtgatgtcacccccggagactcaggtgtaaaatttctctcttttgtactctttctctttatttcttagactggccaacacttagagaaaatagaaaagaacctacattgaaatattgggggctggttcccccaataggctacacggggttcagggacccacttgaggaggtagtctgtccattctcagagctcaaacaccatgctgggagaaccactgctct

SEQ ID NO: 399464 - DNA, 457 bp, Homo sapiens
tgagacagtctcgcttggttgcccaggctggagtgcagtggtgcaatctcagctcactgcaacctctgcctcccgggttcaagcaattctcctgtcttagcctcccgagtagctgggattacaggcgcatgctgccacacccggctaatttttgtatttttagtagagacggggtttcaccttgttggtcaggccggtctcctgacctcaggtgatccacccgcctcggcctcccagagtgctgagattacaggcgtgagccaccgtgtccagcccgctaccttgtttctttattctcaaaatctacctttgtcatcacttccttcagaaagcctcctggggctgagtgcagtgccacatgcttgaaatcccaactgttaggtaggctgaagcaggagaattgcttgagtccagggctttgaggctagcctggggaacacagttataccttgtctcc

SEQ ID NO: 399465 - DNA, 487 bp, Homo sapiens
gagtcctgccaacagaaaccaaatgagattagctggacgtggtggcaggaggctgaggcaggtgaatttcttgaacccgggaggcagagattgcagtgagccaagatggtgccactgcattccaccctgggtgacagagcaagactgtctcaaacaaacaaacaaattaagatggctcatttgtagacattttctcatttttaaggattttcttctccctctaaactttttgtaatctttgttcccacttggattatctgctagtgagagctaatagtcaacaaaacaattgcacaaatagcaagttaatattaatggaaccatttaaacagctatctcaatggcttgtcatctgggtgcctggactcatgcttctgactttatgttataatctcatggtatagtcctattttgtctgataaagctgttttatttacatggaataattaagtaaatcaaaacatcacagcattcattaaaaacttgg

SEQ ID NO: 399466 - DNA, 486 bp, Homo sapiens
ggatctcatctgtgttgagaacactagctcttgggctgcctgccatgggacccctcactttgcctagttttgccctatttcaaactgaagcctgtaccagtgcacctgttgaaggctccctatttcctctctgcttcgctagggagaaggcactttttctaaacttcagccttgggcagaaactctttcccctaactccccacggcatctctcccctacctacctataggtaacaattttgctcatgttgggggcatttcaggacagccaccacatccagtagccagcttcgtgtttctatccacagagaaatctagcttctcatcccagcttcttcctgggtcacctgcaggccaacacccctcagtccactggtccatggcaaaatagtctttctgatagaaataggcagagcatcctggtccatgtgctatttagtcagtcctttgcttttcgatcaataaacatatatgggcctctgtctca

SEQ ID NO: 399467 - DNA, 324 bp, Homo sapiens
gcccggctatcacattatcacacacaaaaatctattagagagcaactgaagacctacatgctaaaggcaaaaaacaaaaacaaacaaacaaaaaagtttcagaggacatataagaatatctgcacatcttatcatggtagaaaaggttttcttaagaattccttaaacagctttggttcaagtcctggctctaccatttactacctgagtgaccttgaaaaaagtcacttaacattctgtgcctcagtttccttacctataaaatggaaatagcaacagtacttgcctctaatgttataaggattaatggagataatgtgatag

SEQ ID NO: 399468 - DNA, 931 bp, Homo sapiens
cttccaccctttgaaaactttgttctttggttctttgcaataaatgttgctgctgctcactcttcgggtctgcactggctttatgagctgtaacactcactgcgaaggtctgcagcttcactcctggagccagtgagaccccgagcccaccgggaggaccgaagaacttcagatgcgccgcgttaagagctgtaacactcaccgcgaaggtctgcagcttcactcctgagccagcgagaccacgaacccaccagaaggaagaaactcggaacacatccgaatatcagtaggaacaaactccggacacgccgcttttaagaactgtaacactcacctcgagggtccgcggcttcattcttgaagtcagggagaccaagaaccccccaattccggacacagggggacttggctgcttcctgtttctatcatagacgcagctggcctcagaatattccacttatggatgaaagaatgatagtgttattttatggaagaatttaagaagatgttgcggtatcatcgactttattttttgttcattctgaaaatcacatcgccagatccaacacctttttatcccaatcaccagtacaagccacccgtatcagtgtacactgtggctgaccgatccatagtgatgctttgagcacaaggaaggactttctggaatctacttatctgaccaagaaagcttctttccaaaagaaatgcaattgtcttgagacttcttccctagggatctgatcaactaaccagaaaagagcaaccaccagagaagagactgtagtcgtacagtgtccagaagggcaaaggacaaggtattgcacctgccttcttacctactttcccccctgctgcacaggaaaatctgcccgaggacaattaccaacatttcaccaggtctgcgttcttttggatctaatcgagagaa

SEQ ID NO: 399469 - DNA, 438 bp, Homo sapiens
tgacatttcagcaatttctctaaagaggaatgactggggggtatgtacagcaggcatcatgtaagaaaaactcacacctcacgacatatttgtttgatttattcagcagacttcagcaaaggaaagatgtgaaagcaacccttgattgttgattttttgttcattctgaaaatcacatcgccagatccaacacctttttatcccaatcaccagtacaagccacccgtatcagtgtacactgtggctgaccgatccatagtgatgctttgagctctggtagatgtgattatgcccattttacagatgacaaactgaagttcagtctttaagtgatttttcttgatgcagtaatgagtatgaaaactatgaagctctgtagaacttgaagaactactatattgtcagaataaattaaaatgctcatgcttcattccatct

SEQ ID NO: 399470 - DNA, 768 bp, Homo sapiens
cttccaccctttgaaaactttgttctttggttctttgcaataaatgttgctgctgctcactcttcgggtctgcactggctttatgagctgtaacactcactgcgaaggtctgcagcttcactcctggagccagtgagaccccgagcccaccgggaggaccgaagaacttcagatgcgccgcgttaagagctgtaacactcaccgcgaaggtctgcagcttcactcctgagccagcgagaccacgaacccaccagaaggaagaaactcggaacacatccgaatatcagtaggaacaaactccggacacgccgcttttaagaactgtaacactcacctcgagggtccgcggcttcattcttgaagtcagggagaccaagaaccccccaattccggacacagggggacttggctgcttcctgtttctatcatagacgcagctggcctcagaatattccacttatggatgaaagaatgatagtgttattttatggaagaatttaagaagatgttgcggtatcatcgactttgtaagtgtgaagtgtttttactattccactcacaattcagttcaggaaatatttgatttagaaagagatttactacaatttgctgggttttcccaaataaccctcttgacaattattaatatcttaggcttagcaactcactcaaatagactaaaatagactgaatatttgcttaggccttcttaacatatttcagacatatttttctcttcttggtcttcctcagtaacatctggtgatc

SEQ ID NO: 399471 - DNA, 1163 bp, Homo sapiens
cttccaccctttgaaaactttgttctttggttctttgcaataaatgttgctgctgctcactcttcgggtctgcactggctttatgagctgtaacactcactgcgaaggtctgcagcttcactcctggagccagtgagaccccgagcccaccgggaggaccgaagaacttcagatgcgccgcgttaagagctgtaacactcaccgcgaaggtctgcagcttcactcctgagccagcgagaccacgaacccaccagaaggaagaaactcggaacacatccgaatatcagtaggaacaaactccggacacgccgcttttaagaactgtaacactcacctcgagggtccgcggcttcattcttgaagtcagggagaccaagaaccccccaattccggacacagggggacttggctgcttcctgtttctatcatagacgcagctggcctcagaatattccacttatggatgaaagaatgatagtgttattttatggaagaatttaagaagatgttgcggtatcatcgactttattttttgttcattctgaaaatcacatcgccagatccaacacctttttatcccaatcaccagtacaagccacccgtatcagtgtacactgtggctgaccgatccatagtgatgctttgagcacaaggaaggactttctggaatctacttatctgaccaagaaagcttctttccaaaagaaatgcaattgtcttgagacttcttccctagggatctgatcaactaaccagaaaagagcaaccaccagagaagagactattgtggtctactctatagaagggatcatgctttgaacctcatcttgaaaggagattcaatctttccttcttgctcctaatatcaacagagggtggaatatatgtgcaggaacaaataatatctctgtactgggaagtgcaagattgtcttctagtcaccggcacttgacacactaaattgatgcacatccattttaaacccggcatttgtgctccatatcttgccctttgacctatttggattcatgtgggaatgtgacctctgcttgaataggatgatgacattttcaaagaagctaaatcttaccaaaaatcagattctggtacgattgtgatcaagtagtataataaagctaatcgtggcttgcagaaatcgaaac

SEQ ID NO: 399472 - DNA, 1032 bp, Homo sapiens
cttccaccctttgaaaactttgttctttggttctttgcaataaatgttgctgctgctcactcttcgggtctgcactggctttatgagctgtaacactcactgcgaaggtctgcagcttcactcctggagccagtgagaccccgagcccaccgggaggaccgaagaacttcagatgcgccgcgttaagagctgtaacactcaccgcgaaggtctgcagcttcactcctgagccagcgagaccacgaacccaccagaaggaagaaactcggaacacatccgaatatcagtaggaacaaactccggacacgccgcttttaagaactgtaacactcacctcgagggtccgcggcttcattcttgaagtcagggagaccaagaaccccccaattccggacacagggggacttggctgcttcctgtttctatcatagacgcagctggcctcagaatattccacttatggatgaaagaatgatagtgttattttatggaagaatttaagaagatgttgcggtatcatcgactttattttttgttcattctgaaaatcacatcgccagatccaacacctttttatcccaatcaccagtacaagccacccgtatcagtgtacactgtggctgaccgatccatagtgatgctttgagcacaaggaaggactttctggaatctacttatctgaccaagaaagcttctttccaaaagaaatgcaattgtcttgagacttcttccctagggatctgatcaactaaccagaaaagagcaaccaccagagaagagactattgtggtctactctatagaagggatcatgctttgaacctcatcttgaaaggagattcaatctttccttcttgctcctaatatcaacagagggtggaatatatggccctgctgctgaagtttgagatataaaatatgtacctagagctaatataatggagatccctgaaaaagttttcctaaaaaaataaaaattaaaaaaaacacacacacaatgaaataaaaatgagaggtaaaatctgctcaattc

SEQ ID NO: 399473 - DNA, 311 bp, Homo sapiens
tgctccaagaacaccctagatttacaggggaaataagcatgggactaaaagcagctggccatcttactgctgaaacattaagagaaggatcaatcctgtttcacccaaacagggatgagtcactgcctcacctacgggtggcagacatactacaggtggtagatatactacctgtactacctgtctacaggtgttagacacactaccacctgtaggtttcaaagtattgagtagagaccatatttcacatgtctccactgaactgaccccatcaccgtatctctagcaaagccagaacctcctcccagatg

SEQ ID NO: 399474 - DNA, 298 bp, Homo sapiens
gtagaatgggagaacgcatttcttagagctatgtcaatctcagagtgtgtgcggtcaaactccctaaggaaactcgcctccccttccccctttttttatttctctggggatgttgtggctcttaacccctctttggttctggaaggtaggaaagagtgatacagaggttatcttttagtcttctcgagtagtagcaggtagttttgaatatcttcttcaggatcgcatggaattgaacagagccctggggacagcacagctgctctgagacctgcagggctatttggtctgtgactgg

SEQ ID NO: 399475 - DNA, 921 bp, Homo sapiens
ttcaaccttatattaagagcattggcagaagctagcggttttggtatcctgtaattattagttgtataaccttggccaagtaactcaacctttctgtgcctcagttactcatctgtaaaacagggtaataagtctcaacctcgtacttatgttgttataaagatttaacactaggctgggcatggtggctcacacctgtaatcccagcactttgggaggccgaggagggaggattacttgaacccaggagttccagaccagcctggacaacaaagcaagactttgtttctactttaaaaaaaaaaaaaccaaagtcaggtgtggtggtacacacctgtgatcccagctacttgggaggctgagatgggaggatcccttgagccttggaggttgaggctgcaatgagccatgatcataccactgcactccagcctaggcgacagagtgaggcccatgtcaaaaaaaaaaattatccccaacatttagcagcttaaaacaaaaaacatttattatatcacactttctgtgggtcaggaatctgggagggacttagctgggtggttctgctcagttctcttgggatgtttcagtcaagcagtggcctggggctgcactcttatctgaagactcaatcgggagaaaatatgcattcaaggtcactcattggttgttggcaggctgtagttcctcactgaatattggttgaagacttcattggcttactacctggacttctccacacactgcctgaatgtcctccccacatagctagagtgaatgaactaaaaaagagagagaacacacacagcccaggtaagagttcagtctttctaagtcattatatgaaaacgatttttttttttttgagatggagtctcgctctgtcgccaggctggagtgcagcagcacgatcccagctca

SEQ ID NO: 399476 - DNA, 1046 bp, Homo sapiens
ccttcctcggcctcccaatgtgcttggattacaagcatgagccaccttgcccagccgaagctggccatttaaagttcctcatgctgctgaatcaataaggatggaaggcggctactattatgggctaagtgtttgcctcctccccaaattctttttttttttttttgagatggagttttgactctagcccaggcaacagagttagactctatctcaaaaaaaaaaaaaaaaaaaaaaaaattaacactttgaacaaaaaagaaaaaaataataaaatttaaaaaagatttaacaattgggccaggcatggtggctcatgcctgtaataccagcactttgggagcctgaagacggaggattacttgaacccaggagttccagaccagcctggacaacaaagcaagactttgtttctactttaaaaaaaaaaaaaccaaagtcaggtgtggtggtacacacctgtgatcccagctacttgggaggctgagatgggaggatcccttgagccttggaggttgaggctgcaatgagccatgatcataccactgcactccagcctaggcgacagagtgaggcccatgtcaaaaaaaaaaattatccccaacatttagcagcttaaaacaaaaaacatttattatatcacactttctgtgggtcaggaatctgggagggacttagctgggtggttctgctcagttctcttgggatgtttcagtcaagcagtggcctggggctgcactcttatctgaagactcaatcgggagaaaatatgcattcaaggtcactcattggttgttggcaggctgtagttcctcactgaatattggttgaagacttcattggcttactacctggacttctccacacactgcctgaatgtcctccccacatagctagagtgaatgaactaaaaaagagagagaacacacacagcccaggtaagagttcagtctttctaagtcattatatgaaaacgatttttttttttttgagatggagtctcgctctgtcgccaggctggagtgcagcagcacgatcccagctca

SEQ ID NO: 399477 - DNA, 362 bp, Homo sapiens
ctgccatgctgctgggtgacaagtaaaggagcaggtgctaggcaagacctcagcctcaaacatgtgtacactctgcttggagatctgagattcccagagagcagcatagtataataatccaggctccagagctggacattctgggttaaaccctactctccgctgccaactctgatcttgggcaagtcatttaacctctctgcttcctaatgcttatttataaagtggagataattgtttctactgatataagatataagtgagttaatatatctaaagtgtttagaatggtatgtaacatattctgaacactattgtattattatcatcaacactgggatcacttctttttacatgcacca

SEQ ID NO: 399478 - DNA, 409 bp, Homo sapiens
atctcattcaacaattcagagtatgggagtgtcctcttgagacttcttgcaggtgtttcctggaaacctctggctccccagcacctggccccgggctgcctgctacaaacattaatacctgtctgtgcaatgcatgcttgaaactttgtccgtgcagagtagcctggtagctcttcgttcatagctaagcttgtgtctgcctgtgtttcatctgttatccattttgatttctactctgccaagtttcactgtctgataaaatgatggccatactttctgcaaatgggcggtataaggtgcttgctggttacccagccagctgtgaaaaaaaatcagatattccaaacacaattgaattctagttcatttgtaatggttgcattttaaagtaaggaaagtttactattta

SEQ ID NO: 399479 - DNA, 652 bp, Homo sapiens
aaagcatgattctacctgaagccatcaaaagcctctttttaaatttttttctttttttaatctaagaggagaacagatgctaacagatgagatttcactggctgattcgtttgtttcagatgcttgaacggatgctttagaattttctgcctgagctacggcaccaagctggttagtcggaaggcgtttgtggctaaggccttgaaagggaaaagtctcaagtgggcttatttctactgaaacagcatttcagaagaaatgcaggaaaaagcagacccaaggccccagggagaccccttccaagcaaagcactcctccggaaggtggaagcggggccgtggctcatctgcggagccagggctgcctgtcgcggacgttgctcacggtggttctttttcgtgaaagggaacgtacaaagcttaacagttttcccttccaagcagagactcagagaaagggaaagagtgagagagagcaaaggaggggggcagctgccccacagagaaatgaaatgaacacaacttcctgatgctggccagtaaaacaaaaaattaaaaataaaaataaaaagattaagcagacctgcctaaggtgggtatctgactccattccaaagtcctgcatccctagtttgcccgaactcccaaagact

SEQ ID NO: 399480 - DNA, 338 bp, Homo sapiens
ctgcaagttagtgtggtcgttaatggtccagaatctcactgctcttaagtttccaagccattcttatgattttaaactggaaggcagatcatcccctcatcatgactttctcccccatgtactcgggaaaaatgagggagagagacaagagaactttggggtgaaaactcacattgggaacaattacaagtgtgtctgatttggtagcttggatgttacaaccactcatcaattttcatgtggcttcaaagaccctcatttgaagctcctaagagcagctcacttcagaagagacccaggtaccaatttattctggagagttccagtgtttcgtccta

SEQ ID NO: 399481 - DNA, 621 bp, Homo sapiens
gggagtagagtcggaaggggcacggtaaatgaaggtgtgcccagttgctcctaaattcattctttgtcactcttgggaaaatagttcacctctgtatctttggagtgggagtgacacactacttcatttacttattgatttcatcatttattttgaagggcattatcctatcagtatggaaactgataatagcatatatttcatatgaatcacttgattaaaaatacacattgcttttgttagaatttgggtgaagttacaaaaaaagagaattaggggagctgaaaactggggcagaggaaatcgtaagcattggtaataagatcacccacctccatttatccagttacatgtcttaatatttaaagtgtatataccattcttgtctaaacataaattgataccattccgtaatcctagtttttgaaagcttaacaaccaaaaacatacatcctagctggcattcagttagtgctgtgcattctggagtattaattgaaactggtacttttgtactggaaataaaagtaatagattaggtttaaatagataatttgcttagttcatagtgatttcttctggtttttggaaattttcacagagaaagagttaaaggaaatt

SEQ ID NO: 399482 - DNA, 407 bp, Homo sapiens
tctggattccaattttctattttttttcaatgagttacatgactataatccaacatttttgtaatttcaacaaaaaacatttgaacatgcagtaaatcactggaggttaccagggaagaaaggacctgcagccttgaacaaagacggatttagaaatatgttcagcaataccagtgaatagtacaggagaatctaggataaaggaaacagactggaaaataaaccatcctagaaagaaaagttcagagaatgagaacccctggactgtctcaaaaaaaagaaaaaagaaaaaaacagaaacgcgacatgctctaaaaaggaatatttaacctggattaattcataaaataataggagaaaatttttgcagccagaatactatgaatttgagttggttgaaggtaaga

SEQ ID NO: 399483 - DNA, 627 bp, Homo sapiens
agtatttggataaagcaaaagtgctcaggagtgtgtttgcttcctgtaaatctaatttacctttgtaaattgttgggtttttccacatagacttttgttttgtatatttccacgtttgactttttagtgtagagtggtagtttttattatttatttatttatttatttatttatttatttattttgagatggagtctcgctcttgttgcccagactggcgtgcaatggcgtgatcttggcccactgcaacctaccctcccaggttcaagcgattctcctgcctcagcctcccgagtagctgagattacaggcatgcgcccccacacctggctaattttgtatttttagtagagacggggtttctccatgttggtcaggctggtctcaaactcccaacctcaggtgatccgcccaccccagcatcccaaagtgctgggattacaggagtgagtcaccatgcccagcaagtggtagcttttagtgttctagaaatcctaattgagaataatactagttattgttttgttttgttttgatttttgagacggaatcctgctgtcgaaactgaggcatagagagattaacttgctccaggatcacagcaggtagctagattctagatacact

SEQ ID NO: 399484 - DNA, 525 bp, Homo sapiens
acatgagcaatagaaaactaatatgaccatggattattaggggagagataaaatagatttcaagaaagaaaactctgctgtgatggatatgggaacactgaggaaagagaagaaagattgggtctaagaagagaaaaatgccatgccaatcaaacagaagagaatgtaagaagcaacaagttatcatccaagagaaatgaattatgcagtactaaagtaaacactgcactccacagggacacctctcattctgttccttttttcttggaagttcctgcatgatgaaccttttagaaaaccatcaataagtcccagggactgactcttgagaggatcttcatataccttctaaaacctacatttagtcatagaaaactaatgatatttatcaacaacattgtgtattaaagagcttgaccactgggcacagtaagtgtgcctgagaagaggagaactactaattgtgcttatggttttgttcttagatatacctcatgtatgaataaataaaatgtattaacagtt

SEQ ID NO: 399485 - DNA, 181 bp, Homo sapiens
acaattacggtggttattgaagtccttgtcatggatgagattacccaagggagactcagactgagacgttgtggagattaaggagccctgaggagcaccgacatttagagtaggggtaaggagaggagccagcaaagccttgaatagggaaggtcagaaggcagacagacacctggcagta

SEQ ID NO: 399486 - DNA, 425 bp, Homo sapiens
acggagtctcgctctgtcgcccaggccggactgcggactgcagtggcgcaatctcggctcactgcaagctccgcttcccgggttcacgccattctcctgcctcagcctcccgagtagctgggactacaggcgcccgccaccgcgcccggctaattttttgtatttttagtagagacggggtttcaccttgttagccaggatggtctcgatctcctgacctcatgatccacccgcctcggcctcccaaagtgctgggattacaggcgtgagccaccgcgcccggccatgatgagcattcttaattttcccttctgccatgcttaatcaatggctccctggaaaccactgcattcaggaaatgatagccaagtatcatggcaattgacaatcaaggaagaattttaaagaagctattaggttggtgc

SEQ ID NO: 399487 - DNA, 564 bp, Homo sapiens
ccaaagtgggagcccgggcagaggaggagcagagagcgagcgagggctgtgaggactgacagcacgctgtcacctctcacttggactttaagtccttggactatgaacattcctattttctgtctcttagacaattaactcaacctgcacttactattcttaatatataaaccccaggctctatattaacaatcatgagattacagagccttcaagcagcattgatttacccagatatattaatatttgggccaattctcaaagaaaaacaaacatattttccagaatcaagacaactcaccagaaaaaggactgagaactccttctggatgaagatacttcctaggtgcaagagagttgagttgtacgtttgaccttccccaccagctacactgccctgaacctaccaggcctgatgagtcatgtagcccagccaagaagtgagtcaaggggagacatgagtcatagacattcaatacacatggcactcccaagacacaaagacttttctacgtaaacctcactctcactgcatatccatgttctaagacttggagaatctgt

SEQ ID NO: 399488 - DNA, 296 bp, Homo sapiens
tccaacaatcaagggctctgcgttttcatattggatttttaaatacttccaatcacagcatcattacaaccacttgatttggttaaatatacatgttgaagtgtgcaatgttatgtatttgaggggcctttctaaagatcagttggagccaggcatggtggtatgtgcctgtagtcctaattactgggaaggctgaagtgggtagattgcttgaccccaggagttaaaggctgcggtgagctatgactgtaccactgtactccactgtggacaacacagcaagaccccatctctta

SEQ ID NO: 399489 - DNA, 1037 bp, Homo sapiens
  misc_feature (783)..(784): n is a, c, g, or t
tgactcacatgattacaaggtgaagtcccatgatatgctgtctgcaagctgaggaagaaggaagccaatagtggctcagtcagagttcagaagcctcaaaagcagggaagctgatagtatagccttcagtctgtggctgaaggcctgagagcccctggaaaaccactggtgtaagtccaagagtccagaagctgaagaacctggagtctgatgaccaagggcaggaagcatccagcacgggacaaagaagaaagccagaagactcagcaagccagctcatctcactttcttctgcctactttgttgtagctgagctggcagccagttggatggtgcacactcacattgaggattgggaggctgctgtgtatggataagatacctgctacagccagcttgacaccatgagaaggacaagagaattgcagagacacatatccaggattctgatccagttgaggcactgaaataatctagaaccaccttcaaatttcttataaagagagctatgctattaggatttaattaaatggatgccaacagcaagtaaaccatctccaaagatgccatgaagctctcctaattgcaggaaaatatcagaggcacttgatttgagtctttcaagtacggaaataacaaattcagtctcaacagacctatagtgaatgaggacattgagatctgctggttggagatcttagtgcccaaggaagaatgcttgcaaaaggagatggaacagtgtttctgttgcattggccactgagaatatctggttattttgannttgtcacagtctgcagctaaaaggggaacaggaacacagaagagagaaccggtaatttgaactgatagcagatttcacatcaggaaccaatgaagctagataagaatgaacatctttgatgtctaaaagaaaaaaacaggcaactttggaatactttatttagtgaagttacccttcagaaatggcggcaacataagatgttctgcataaacgaaatatgaagaatcttcaccagagtctatggtatcgaacg

SEQ ID NO: 399490 - DNA, 1141 bp, Homo sapiens
  misc_feature (887)..(888): n is a, c, g, or t
tgactcacatgattacaaggtgaagtcccatgatatgctgtctgcaagctgaggaagaaggaagccaatagtggctcagtcagagttcagaagcctcaaaagcagggaagctgatagtatagccttcagtctgtggctgaaggcctgagagcccctggaaaaccactggtgtaagtccaagagtccagaagctgaagaacctggagtctgatgaccaagggcaggaagcatccagcacgggacaaagaagaaagccagaagactcagcaagccagctcatctcactttcttctgcctactttgttgtagctgagctggcagccagttggatggtgcacactcacattgaggattgggaggctgctgtgtatggataagatacctgctacagccagcttgacaccatgagaaggacaagagaattgcagagacacatatccaggattctgatccagttgaggcactgaaataatctagaaccaccttcaaatttcttataaagagagctatgctattaggatttaattaaatggatgccaacagcaagtaaaccatctccaaagatgccatgaagctctcctaattgcaggaaaatatcagaggcacttgatttgagtctttcaagtacggaaataacaaattcagtctcaacagacctatagtgaatgagggaagatttaccacaagttactttatcatagctttgagtggcatcttaatatcatattttaaaagaaagaaaacaatagaaatgtattaaaatatcttctcaaggacattgagatctgctggttggagatcttagtgcccaaggaagaatgcttgcaaaaggagatggaacagtgtttctgttgcattggccactgagaatatctggttattttgannttgtcacagtctgcagctaaaaggggaacaggaacacagaagagagaaccggtaatttgaactgatagcagatttcacatcaggaaccaatgaagctagataagaatgaacatctttgatgtctaaaagaaaaaaacaggcaactttggaatactttatttagtgaagttacccttcagaaatggcggcaacataagatgttctgcataaacgaaatatgaagaatcttcaccagagtctatggtatcgaacg

SEQ ID NO: 399491 - DNA, 1077 bp, Homo sapiens
  misc_feature (823)..(824): n is a, c, g, or t
gctcattttgtcactctcatctcctacttgcttccagattgggaggctgctgtgtatggataagatacctgctacagccagcttgacaccatgagaaggacaagagaattgcagagacacatatccaggattctgatccagttgaggcactgaaataatctagaaccaccttcaaatttcttataaagagaggtttggttaagggtcagcaccatggatccaggaatccctggagaaaagcacaaggttgcaacctatatgatctgctaatgaggagatcatgttaaaggtgtgaagagccaatcattatatttcccacaagtccagttatatttgagagcatagagggggttcctatttctttgcagtgaaccctgatggataaagctcaatgtgtaagtgaagactttgaaaattaaaatctaattggtactgggctaatggactaaaggctggagatgtctagatgagcagagcagtgcttgttcacctgctcttcaggtggtgggtggataaacagatggctcccacttgctaggataagagctatgctattaggatttaattaaatggatgccaacagcaagtaaaccatctccaaagatgccatgaagctctcctaattgcaggaaaatatcagaggcacttgatttgagtctttcaagtacggaaataacaaattcagtctcaacagacctatagtgaatgaggacattgagatctgctggttggagatcttagtgcccaaggaagaatgcttgcaaaaggagatggaacagtgtttctgttgcattggccactgagaatatctggttattttgannttgtcacagtctgcagctaaaaggggaacaggaacacagaagagagaaccggtaatttgaactgatagcagatttcacatcaggaaccaatgaagctagataagaatgaacatctttgatgtctaaaagaaaaaaacaggcaactttggaatactttatttagtgaagttacccttcagaaatggcggcaacataagatgttctgcataaacgaaatatgaagaatcttcaccagagtctatggtatcgaacg

SEQ ID NO: 399492 - DNA, 406 bp, Homo sapiens
ttaaagtaactaataatttcctttttgatataaatgtttaattttttgaggttttaaaaaattaagcactcactttgttttgatataaaacaaaacatgcctaatttgtttttttataaaatgatattctttcaacttctaaattcacatgttagttttttgagatgatttaacaaagaataaatattgggtcactctaatatccttaacagataataaaaataatttctaagcaacactagtaaaaaccatttaggatacaaatcagcttctaagaaaacaagtttaaacaagtttctttccattccctcctcaaaacagtacgaagggtaaaagaaatttattttttgctaggcgtggtggctcacgcctgtaatcccagcactttgggaggccgaggcaggtg

SEQ ID NO: 399493 - DNA, 148 bp, Homo sapiens
tgatcttgttcttttttagcatactatttttatagtttaaataaaaactgcaaatacaagtgatgacttgcaaatgagtatgaatggaggaaaggcctgaatccagatgtatctaaaaggggtctgtagtcaggagcggtggctcaca

SEQ ID NO: 399494 - DNA, 439 bp, Homo sapiens
cagtgtagtacatcctggcattgctcttatttcacatcattcatatgataagactttttaaaaatttaaattagctctaatacaaacttagtctcttttggaaagataatacgtgatcaattatccgtgtagagtggatatgaaacagatatttaaatgttataaagaaatgttgaagggaaaacctcattgcaggtaaccacagtcatcccacaggccttgtggttctgatacccagcttgatagagcctaatgcctgttgcccactgacaatactaaatcaggctttagaactagggggttatgcctggcacagtggctcacacctgcctcggcctcccaaagtactgggattacaggcgtgagccaccacgcctggcctataaaatacatttttgacacaaaacaaatttaaattagttgtactgaaaaaaaaaaa

SEQ ID NO: 399495 - DNA, 548 bp, Homo sapiens
gactagagctcagcagcctaaaacctgaggaggaacagggcaggagctatccaggttgacagggtattggccaagggcctttcagctcattccttcctgagaatcaagaaaggcagggctagaatgcctgccccttcactcccacccctcctggttctccactgagctccctgcctgcagaatggatctgatttcttcctttcctgcgagcactatttattcctttcctgctaaggagagatatgttgaaaaagctgtctctggccaggtgtggtggctcatacctgtaatcccagcactttgggaagccgagatgggaggatcgcttgagcccaggagttcaagaccagtctgggcaacatagcaagactctctctctacaaaaaaatacaaaaaaattagcagggcttggtggtgcgtacctgttgtcccagctactctggaggctgaggtgggaggatcacttgagcccaggaatttgaggctgcattcagctatgattgcaccattgcactcctgcctgggagacagagtaagactctgtctca

SEQ ID NO: 399496 - DNA, 259 bp, Homo sapiens
gcaacaagacagaaactccatctcaaaaaaaaaaaaaagaaaagaaatcatggactccaaaaggcctgaagtggagagtcctgaagccatctcagaccatgaggccaccctaagggtagaaggaagcacactaagatgacaggaacagaagacaggagcctgggtccatcatgccagggagcctccacacctgccctggacgtttcatctcagacctcgtggataaagcagagaaataaatatctaccttgtttaagcc

SEQ ID NO: 399497 - DNA, 479 bp, Homo sapiens
ttttttttttaaggagctctacagtcagaagtcagcttaattaaaagctagttttcaatatatgtatttaatggactttctgcttcttctctttttggatcctgttttggggatttttttatttttttaggtgcccaaataacatttttaaaattacgtgtttggtccctctgtttgcttccttgttttatgaattgttttcccattaattctatttatctctactctttcttcctctttgccttttaaagtacacatgaaaggatctacagaggacgtctaatgactcaaaccccttaaggaacacacaaaaaaggcaccactcacctctcttctgccttttctgtcttcctgaggagtctaaagtcatggacagattcatctcaggtctaaaactctgctctcttttgtattacattacccgatcgctttggcttttgtgggtaccagagattactttgtactatgagagaacactt

SEQ ID NO: 399498 - DNA, 963 bp, Homo sapiens
cggttctgttgggcacttaattttccttcaaaaacttattttggcctctttcaaaaaagtagaacattgaaaagatcatcagatttatagcactaatcccaataaacttttttgggattttcattttgaagaacagcttttaaaacctactgcttaactcttaggaaatatttaatcttatttgaaactgtaacatgccctatactttgagatttgtggagagttaagctaggctttctcttttttttgcctttacaagggtaactttataacctccatttcttggcttttttctttttagtaatccctgtataattggaagaagttaggcaaattttgacattctcaaggtttaaagaaagtttagtacaatatttatttactaaccaaagtgtctcctgttctctttgtgcgaatatctgataagctgagtgattaacatactgttctactgggagtggataatggttgatatttaggtgactaaatagtccctgtaacccaaagtctggctcttccccagggaaatttaagtatacacacaatcgccatgtcttcataacattgtaacattttgtaagctatcaaaaatcagattggatttttgctaataagagcaagttgtattttgtgtgaaacttgagccattaaaatgacatttgcaggtttaatataatcatagctaacatctctcaagcactttttatgtatcagtgggcagtgtgatttagtgatttacatatactgtcagccctttctattcatgggttctgcatcagtggactctaccaaccatgggtcgaaaaaatacaataaaaagatacagtataacaactatgtacatagcattcacattgtattaggtattacaagtaatctagagatgatttacggcatacaggggggcatgcatagattttatgcagatactatgtcattttctatacgggacttgagcatctt

SEQ ID NO: 399499 - DNA, 432 bp, Homo sapiens
atacatgtgcatgaatgatactggtcatgtcctagaggatcacacatctgtagttgactttaaagctgagaaaaatgtgttcattttggaagagttaatgttttcaaatatgttatccctgggattttatacccacattaatcagtaaaagctcccaaagtgtcaggatttccatttgttaataaacaaagcaacaatgaaactttctcattttgctctagtattttttattacatattgtgtaatttttatgtcttgtttctgataagcttgtactgtcctttatgttaagatgtcctccattaatttacatggaagtaaacagtaacaacagagtcaaaggctgaaaacagttgtttcttgaagaaccagctactgccatgtgttaaaagaaactattcaaatatatgcagatacttggccaaagatgga

SEQ ID NO: 399500 - DNA, 461 bp, Homo sapiens
aactcttctgaaggcaagcattaagttgtttctctgtctttccctcacttgtgacagttttcatatatctgttggataaataaatcgcacaaagccatagcgtcaggtaggggaaatttcagattgactgcaactgactgatcttctagactaagggtatgcaaactttatgtgaagggccagataattttgttaggcttttgtggccatatggtttctgtacaactatctaactcagccatggcagtgcaaaaactagtcacagataacacatgaatgaatgaatgtgtctgtgttccaatgaaactttgcttcattttgttatgttaatttgttctacaaaaactgggttgactgaatttggcccaccagctgcagtgtgtcaatccttttctaaactcaccaggtagattaatatccagtggcatttcccaatgaaaagaaaatttaagtacttgttg

SEQ ID NO: 399501 - DNA, 406 bp, Homo sapiens
cctaatcagtaagaataaaaattcaacatctgagtcttgtgtaacaaactaaatattcaagtatgtattacataataaatgccagtttgcaaaaatatgaactcattcaaacttaaagacttaaatctggattgcactgacctgctttatgctgtgattcttactgtgctatctgcatttctcataagactaaacagatttttactttctcctcagaataattcttttgccaaaagggtcctagaatgcttgtgctgctataacagtggccaagccgaactcagaggtggaggtgggtgacaggaggaggtgagaaatttatggccttgagggtgcttaaaatggtcctaagcaatttcagagccccagggatccatgcccttgactctagaatctcaatactgat

SEQ ID NO: 399502 - DNA, 461 bp, Homo sapiens
ttcatgtatttaaagttttcagaaaagcacaaaatacaggaaaacacagcggtgaggcattatagagcatttctttatctggagactatcatttgacacctggaaaccctttatagggcccaacaaaggggttctaaactgtgatttgatcattcctggagttcatcatctatgtaaggaagccaaggtaccaaatgatactttggccatttcttctttccaatgtcattctctgaaaagcatacactggagtttttcagctatggcagtgtatacagctatactcggggtatctgaaatacttctatttaatttctttatagtacaaatcaataaaggcaaccacataagcaaatctatgttggtatgtcatcatatttatgttcattttgtatcagcatgaagagattttaattaattgtggtgcagtcataaaacaaatcaaatatgtggtgcagtca

SEQ ID NO: 399503 - DNA, 460 bp, Homo sapiens
aaagtgctggaattacaggcatgagccaccgcgcccggcctatacctacacttagataaattttcaggtatgtaacaaatgcatacaaaaagaactggaaggaaatgcgttacatgctttggggtcttggaagcatagattttactttcataattggggggaatcaaaccaaggttttcaggctgttgaccatcctaatcctcccctcaagaacttgtgggttaatgggggctttacaccagctaggaaaggacagagggtagggacgtagggtcttgagttctctctgtaatccaaggagtttatggggaattgctaagagaaaaactttagacaaattaaatttagcagagtttaattgaggaaagaacgattctagaatcagggagcccttagaaccagaataggcatggagaactctgacctgaccgtggtcaggcaacatttatggacagaaaac

SEQ ID NO: 399504 - DNA, 410 bp, Homo sapiens
aaaattaccaagcatatgatgtatggatgatcaacttttgaagaatttgaaacaattagaaattagaaaacagaagcccacatcctttgaaacccatagtgcaggtgagcccagtgtaaagacaaggattcttaaatgaggaagagggaggcagacaatctgaaccagagagatggcatctgaaaaagactccgtcagcctttgctggctttgaagatgaaaaggagccatgagccaaggaattcaggcagcctctagaagccagcaaatgcgaggaaatggattctcccctagagcctccagaaaggaattctgttcagccaacaccttgattttagcccagtgagacccattttggacttctgccctcctctggaactgtaaaataataaatttgtgttgttttaaac

SEQ ID NO: 399505 - DNA, 428 bp, Homo sapiens
gagtggttcatctcccactgggcagaacgcagggtccagggatggcccctgaccagggcgggacagtgctttgggaaaacctttggtatgtgaccacatgcacccctgtgtgtgctcagcccgagatgtcctggagtcaaagtccactggagaggctccaatccaccttcatgtccccccaggacctcaaaggtcccctgaggtcaagaagagcttgtggtgggaggagcagagggagtgaccagccccagggagaatggggcaagcagcggggctctccccagcctcctgtcccctgcctcgttttctcaggagtctcgagacattgtctgggattgcgtgatggtcatgcggcctttggatgggggctcagggtggaggagggcaggttggttgggacgggttctaaatccttctcctgcccctgt

SEQ ID NO: 399506 - DNA, 378 bp, Homo sapiens
gttttcttagggtctgatcaagggagaaaaggcaagaagacataatttccttttaacggcttctactgtgtcctgccccattttcatccttggtgatacatgagtaaaaaccctgcaaagccttgcagaggtgcattattactccacaactgactgttcagcaggaggacagtgtgtattgttgtctggaggagacatgctggaagctgatctcctcccttggaatggtcacacctgagaggtgctgtataccaactacttacacatccagtagcctccaatactggggcctcagagaggacaagcactttcagaaaagggtacacatacagtgtgaacgcgaaaaaatgtgacacagtttagggttaaagtagaaag

SEQ ID NO: 399507 - DNA, 434 bp, Homo sapiens
gggattctaagcacttcttcctcggggttgtgctctttttttccttcgttagagtagcaaagggacatggagtgtggtctttgctgctcgtgtggaagagtgctctgcctatgggtgaattcactttaggtggtgttagaactgagcactgtgcgatggagttttactcacgattcaaatgactctgttgaatgagtttttccgttatttacctgaagaatttggctgaaaataagcattttactagatgcaaagcaaaccttttccagtcatttttagattaccgtagggtatttcttcttttcctttctcttttgtgttattattaagatataacatacataccagaaaatataatacagacaggagaatgtgtctttcatgagcacacacctgatgaaaacgtgtgtcacactcagcacacctgggatact

SEQ ID NO: 399508 - DNA, 540 bp, Homo sapiens
ggctaatcttacacatttcctgcctctgacctgcaatataccatttctccaaggagccctggtttcagtaggtgggaaatggtattttcatctattggattttaagtttctgcactcatatttttaacatggagaagtacctttttcctcctgtaaatacgaattttttcctagcattccgttcatttttgtggatatcttttcttttctctctgaatatattattttcttaaaatgttttctccccttagatagttactgtttctaccaacttgagtttttcatcccatttgttttcatcatgaagatatctttcatatctttactcagctgtcaggtagtccttggttgtctgttcgtggtgcatgtctaaaagctgtgtggacactctaagccgttgagggtcacagtacactgtcgatgtcacatttcattaagggatgatctgggtggatgtttgttgggaaatctccattcttgggtatctttttatgaaatcatgtttccagaaagagccttccaatttcctgaatggggaga

SEQ ID NO: 399509 - DNA, 360 bp, Homo sapiens
gtgcgagctactgtgcctggcccgagtctctttttaactttatactgaccaaaggtgatatataaaagtattccatgataggctgggcatggtggctcacgcccgtaatcccaacactttgggaggccaaggtgggcggatcacttaggtcaggagttcgagaccagcctgaccaacatggagaaaccccatctctactaaaaatacaaaaattagtgggcatggtgctgtatgcctgtaatcccagctacttgggaaggctgaggcaggagaattgcttgaacctgggaggcggaggttgtggtgagccgagattgtgccattgtactccagcctgggcaacaagagcaaaactccgtc

SEQ ID NO: 399510 - DNA, 187 bp, Homo sapiens
cttggcctcccaaaatgctaggattacaggcatgagccaccacgcctggccaagacttggaaattttaagatagtaaacttaagagttaaaacgtacatttccaatgaatagttaattagaaaagtttattataaagcagtcatttttttctaattgttaaaagtgatatattctgaccacaaaaaa

SEQ ID NO: 399511 - DNA, 296 bp, Homo sapiens
aagtacaagatccaagtgttctcaaagaggctttcccctcctactcacccaagatttcctgatataagaatattactctctctaatgccagacctatttttttctgtgcttcttagagtacacggcaccttgtgattgccagcttccaaaataggcccaatgatcctccgccttcgtgtatttacagctttgggctactcactcccattgtaacaacattgttttaagtgtggaagaaatttgtggcatccaaatctagattataaaatattaaaagatgtgatgtccgccttact

SEQ ID NO: 399512 - DNA, 622 bp, Homo sapiens
aaccatatcatttaggcaatctcagttatatgaatctgagatacttatttgagatactcagcttctaaaaatgagcctcagagatgaaactcacacaaattcttcagtagataagctgtgattttcattttaaaatctggatgacctatatttacctagtgtaatcacctgtaattagaaatgctcgttaagtgcagtaaaccaccatggcacatgtatacctgtgtaacaaacctgtacattctgcacatgtatcccagaatttaaagtataatacaaaaaaaaaatacacattaaaaaaaagaaattcttgttaaaatgataccgtccctctcttcccactgttccactagtcagattacttttcttcacaggcatcactgcatgatcatgttgaccatttttccaccttctcatgtgcaaagctcatcccatgtgctctgttttcttgcaaatttatctcagctctcttttttgtagagttgctttctagattttttttaatgtattaaatcacagaattattgcttatatattttcagaaatatttaggcttctgttatttgtattgtgaaccctattttccatgttaattaacattctcattagcctaaatgaattt

SEQ ID NO: 399513 - DNA, 400 bp, Homo sapiens
tccactaatacttagataggttataggaaccctcctccttcccaataacatttatttgcttttttactcattcaaaaagtagaattcctgggcactgtcctagatgtcgaggatgtcagggtaaacaaaattcagatggtctctgcctttcatggttcttgtatcttatcattgtaccatattctatcaggttccttcattcactcttattcatctgtcaaatacttattgtacacttactatgtgccagaaattgttttgaaagctttgggatatgtcagtcaacaaaagaaagatttctgcttttctgggctctaacgaaggaagacggacaataagaaacatgaaaaatgagacaaattatatagtattttgaaaggtgatgagagctatacagaac

SEQ ID NO: 399514 - DNA, 287 bp, Homo sapiens
acatcttgcctggatttttgtcatctcatcctgcctgccctctaaatcacctgttctggacagtgtccctcaaatccaacactgtgatttttgtttgtttgtttgttttgttttgagacagagtatcgttcttgtcaaccagactggagtgcagtagcgcgatctcggctcactgcaacctctgcctcctgggttcaactatttgggaggcggaggttgcagtgaaccgagatggagatcgtacactgcactccagcctggtggacagagcgagactctgtctacca

SEQ ID NO: 399515 - DNA, 429 bp, Homo sapiens
gcacgagacttattaaaagggtgaggtcactctaaacatactgataaagatgtccatgttttcaattgaaaaacagccaagctgtagtagaggagtatggtgtaattgttacttgtagagaaacattattttaatctttgcataagatctggctttccaatgtggatcttagttaatactgggttatttcttgggcgtggtgttggaagggagggtgggagttttcagtttctactttgtatacttctgtatatgaattttctcattacaatcgttttacagtaaatttaaaactgcaacgtggacttgagaatgtaggcaagatttatcatcttttctttactaatgataaataccttctttggacctcagtttctttatggaatgtgctctactacttgacatttcacgttcccttttatgtaatta

SEQ ID NO: 399516 - DNA, 385 bp, Homo sapiens
aaagaagaaagaagaaagaaagagaaagaaagaaaggaaagaaggagagaaagaaggaaagaatgaaagaaaaagcaagaaagaaagaagaaagaaagaaagagagagagagaggaaggaaggaaggaaggaagaaagaagccacactttgaccatggaagatcaccaaagtaggggatgtataaggagcttttgctttttttgcacttctgattctggtgaactttatttttaacaggtatgttatagattgatgtttagcataatttatgtagccatttccctattctaagatacctagacttaatccttttcctcccgtttttataaatcacactacaaagaagaccttgtatataaaagttggctttttccctgctttggg

SEQ ID NO: 399517 - DNA, 473 bp, Homo sapiens
gcagttcagcaagccccatcctcattttcctagccctcactcaaaatggagtcgctctggttcgatggcctctgacaaatccactgagatattgtttgttatagcacctggcattattaatcctgattgacacacatttaaaaatgtgcagtggtaggactctattgtctaatttttgttttgtatactgaatttcctctttctgcttattaatttttaatttttattacctccttataatgtgctattcatgtatgctttttcaaaattttctaagtattatatgtataatttatatataggtagaatattaattgatagcaagtaagctaaaaatctcaccatatttcgattttgtttaaagaaatgtaaccagagtacacaattgcttcataatcattactgtcccaacattaaaatttaagtgtaaagggaagaaaaataaatactaaatgaattaaaataatttctgt

SEQ ID NO: 399518 - DNA, 400 bp, Homo sapiens
agaggctgctctgtgctccctggggatgaactataaggtgctttgtcatcccccacagatgcccactgaggtggttttcagcttttctccgcaaaaaccatactgtgaacagtttgtgccatatcttgagtgatttattactgggccaaggagtatacatattttataagcttgtggtattatcagcctgttttttggaaacttgtgttgttctatccagagcccagaactgtctgggaatgtccttgggccattattttcagtgtcataaagcttttgggtttttaggggtcttggttagtagatttgcttagtgttcagacaccaagctttacttctattaaaaataggcctgttgttagtcaaagatttcttagatacgacaccaaatgcatgatcc

SEQ ID NO: 399519 - DNA, 437 bp, Homo sapiens
taaatctcttatgagacttttactcatagatggctatgagtaaaactatgagtaaaaaagtctctttctttttgagatggtgtctcgctctgtcaccaggctggagtgcagtggcacgatctcggctcactgcaaccttcgcctcctgggttcaagcaattctcctgcctcagcctcccgagtagctgggactacaggcacatgccgccatgcctggctaattttttttttttttttttttttggattttagtagagatgatggggttttaccatgttgcccaggctggtctcgaactcctgagctcaggcaatctgcctgcctcagcctcccaaagtgcgaggattacaagtgtgagccactgtgcctggcctaaagtcttatttttagtaggtgttgtttttcaagctttcagaagtaatctttgttctacattc

SEQ ID NO: 399520 - DNA, 693 bp, Homo sapiens
cagtgcctgaaacagtacatgcagctggcaatccgagaaggatgtgggcctcccatcacttgccctgacatggtgtgcctaaaccacgggaccctgcaggaagctgagattgcctgtttggtacctgtggaccagtttcaactttatcagaggttaaaatttgaaagagaagttcatctggacccctaccgaacatggtgtcctgttgcagactgtcagacagtgtgccctgttgcctcgagtgacccaggacagcctgtgctggtggaatgcccttcttgccacctgaaattctgctcgtgttgcaaggatgcttggcatgcagaggtctcctgtagagacagtcagcctattgtcctgccaacagagcaccgagccctctttgggacagatgcagaagcccccattaagcagtgcccagtttgccgggtttatatcgaacgcaatgaaggctgcgctcagatgatgtgcaaaaactgcaagcatacattttgctggtactgcctccagaacttggataatgacattttcctcagacattatgacaaagggccatgcaggaataaacttggccactcaagagcatcagtgatgtggaaccgaacacaggtggtggggattctcgtaggcttgggcatcattgccttggttacttcacccttgttactcctggcctccccatgtataatctgt

SEQ ID NO: 399521 - DNA, 531 bp, Homo sapiens
tttgaatcagattcacctgaaatactcctctaactttcttttggttagagatttatttcttgtttttaaaaaaatgacttaaaatgtgtctaatacttcccagactttaatttgcatctgtattcagtatcaaatgttttgtattttcgaggctgaaaagaaatttgtaactttttcatatgccacatactactgacttctacttttaaacagaattggatgacatctcccaattgcttgtgcctaccatatatttaaaatggttttactgagaaccacccccctgccccagggagtatccacatgtaatgatcttcctgctagatttgatgttatgccggtatatactggtatatgtaatgtatatattttttcttttcatgttagatggataatgtgcttatggtgtaaccaggtttgagggaggcatatctcatgtgactgggagaagccaatcatcatgcttatgaactacaagaggatctatactggtatattttcttggatttaataaagctttaacaatattca

SEQ ID NO: 399522 - DNA, 463 bp, Homo sapiens
ggaaagacggagagaatggaagagctcctgtccggtgtgccagcagcccggactggcggtgagcgcgagggaggctactgagaagcccggcgacggaggaacgcaggtctgctgccagggattgaggagactgaagaatgctgaagacaggctgatgggctcagctggtaggctccactatctcgccatgactgctgaaaatcccactcctggagacctggctccggcccccctcatcacttgcaaactctgcctgtgtgagcagtctctggacaagatgaccacactccaggaatgccagtgcatcttttgcacagctatggataatgtgcttatggtgtaaccaggtttgagggaggcatatctcatgtgactgggagaagccaatcatcatgcttatgaactacaagaggatctatactggtatattttcttggatttaataaagctttaacaatattca

SEQ ID NO: 399523 - DNA, 904 bp, Homo sapiens
ggaaagacggagagaatggaagagctcctgtccggtgtgccagcagcccggactggcggtgagcgcgagggaggctactgagaagcccggcgacggaggaacgcaggtctgctgccagggattgaggagactgaagaatgctgaagacaggctgatgggctcagctggtaggctccactatctcgccatgactgctgaaaatcccactcctggagacctggctccggcccccctcatcacttgcaaactctgcctgtgtgagcagtctctggacaagatgaccacactccaggaatgccagtgcatcttttgcacagctattgcctgtttggtacctgtggaccagtttcaactttatcagaggttaaaatttgaaagagaagttcatctggacccctaccgaacatggtgtcctgttgcagactgtcagacagtgtgccctgttgcctcgagtgacccaggacagcctgtgctggtggaatgcccttcttgccacctgaaattctgctcgtgttgcaaggatgcttggcatgcagaggtctcctgtagagacagtcagcctattgtcctgccaacagagcaccgagccctctttgggacagatgcagaagcccccattaagcagtgcccagtttgccgggtttatatcgaacgcaatgaaggctgcgctcagatgatgtgcaaaaactgcaagcatacattttgctggtactgcctccagaacttggataatgacattttcctcagacattatgacaaagggccatgcaggaataaacttggccactcaagagcatcagtgatgtggaaccgaacacaggtggtggggattctcgtaggcttgggcatcattgccttggttacttcacccttgttactcctggcctccccatgtataatctgt

SEQ ID NO: 399524 - DNA, 554 bp, Homo sapiens
ttagaaattgctccctttctcaccacaccacgcagttcaaagaaatcacttctcctaacaaagagcagcctgatctttcaggctgtaaaacacagataagcaactcgggcacagacttgggaggttcctgggtaatcaccaagccacatacatagatgggccccagtgaaaacagtgggcctaaagcacattcctttccctttctttaggcacactaagggaagctggaagcgcgtgggggagatgcctgcagctgcacgaaggtgcctgggaatgggcacagaaacactccctccccttttagcacacacagataagcagcagcgcagagcagcacaaacgaagggcctgcctgcagatcaaagaatgggtgggggcccggcgcggtggctcacgcctgcaatcccactactttgggagggtctgacaagtgaggggcccaggagctatgaccctgtggggagaccaagattggcaagagggaggctcggctcgcctcccctttccatgtgatcccacccagagctgccgccttcagctggctctctgtgccc

SEQ ID NO: 399525 - DNA, 1125 bp, Homo sapiens
tttttgaactgtggaaatcagtaaattgttgcagtactctgtactgcttcctattaagtagaagcagaatgtaacagaaaagtttttgtaaaatctctagccctctgtagaatgtgagtatactcttttggtggatctagatatgactcctttttcctgttggagagagacttcttccccttccccatttaatttttaatttaatatgtcaggttttcatgatagtacttttttgttagaagagaaatacttttcttataaccctctgtaatatagtgttccttgcctactgctctctgaaaagcaccctgtttatgatattttcattaatctgtctcctcctcaacagaatgtaagcccctatttgtcttggtttaagggtttatccttacagcatctagaacaaaagtagtcatataataaatgtttcttggttcaactaattatccctttctagctcttcccattgtttcagtgattttgatttaatttctgtttaaacaataaatgtatttgtgtggcatatttgcatgggtcaactccttacccacccctgattttttttgttgttgttattttgttttgtttttggtgcctcagctggcacctagtatttacttagcactgtgcttggtgctaaatatatagcaagagattacaatgggctttgtccctgcctttatagaacttaatatctctggaattacaaaggtccaggatatcattaacctcatgaataatctctcctcttttctatatcctggaagagatgcatatcattgccttgtgccttacattgttagtggtgtccttatcatagttaatgacatttttaaagcatacctaaaatgataagaatcttaccgatttggttttcagtcgtttttgcatatattgaattgttaaatattcagtagaatatagttatttagttttagaaatttctaactcatgtaaaaatgttttcaagaataatagttttgtattcatatttctattcagataatttcaacaaagtccaagtctttttgctgatctgtaggaattaaaaggagatttttcctctcgtttgatagaatttttcttcaatatgtaaggctctgacactgatctcagaaatgcctg

SEQ ID NO: 399526 - DNA, 438 bp, Homo sapiens
aacccagaaaccacaaataaaagatttataaattcaactacttaaaaaagctaaaatagcctgtaatcccagcactttgggaggccgaggcgggcggatcacgaggtcaggagatcgagaccacggtgaaaccccgtctctactaaaaatacaaaaaattagccgggcgcagtggcgggcgcctgtagtcccagctactcgggaggctgaggcaggagaatggcgtgaacccggaaggcggagcttgcagtgaacggagatcgcgccacagcactcccgcctgggcgacagaacgagactccgtctcaaaaaaaaaaaaaaaaaaagctaaaatatctgcacattaaaaccatcataaacagaaacactttgggaaaaatattgcaactcatggcactgaaaagtgactgatatttctgtatttatacctatctttca

SEQ ID NO: 399527 - DNA, 1122 bp, Homo sapiens
agctgtgtgtctatttctcgctgactgtccacagggcagcagcacctgcttgagaccaagcccggcgacctggcaaggtggggccccctaccgcgcaatctttgcggctggcccccggctctgagctccgagtgcagaggctgaagaggtacccgggggacacactgcctctaaccccacctatgagccgctctcctctcggaggacgaaggcaccatcagaaggtcgagattcgccctcctctcccgccacgtctacccactacctagaccgggagtctggacttgggagcgtgaactctcacccgagccggtccccttacaactggagcccgcccagcccctcagtccctccctgaagcccatgggtccccactgctccgtgcctcgtcgacccaggatggggagtgggaaggtcagcatgtgcccacagggccaggtgtccggcccagattcccaccctcagggcggcggcgcgcaaagggcgcagtccccgccgctgggcggacccgcggctccggctttcccggtgtctccagcctcggtgcccggaatcctggatctcggcctggcgctccggaagcgaggcagctccgtgccccagcagggacggggaacgcttggcttgagagatcacatttctgggtgtggagagaatgtcaatcacatatccagaatatcacctccttgggcacagccagggcatggtccattgaaaatgttcctgattgctggaagctgacggctcaccataaaagccaaaatggggacctgtcaaaaatgttttagccaaactatggcttggctcaggaagatgccaagaccaaaggctgctgaactttaagtataaacttgcatgaaaagcacattgcaggtctgagacagtggaggcttagtggtgagaacatgagctctggatagacctggcttcaagtcttggctctgtcattcaccagctgtgtgaatttgggcaaaccacttttcttctctgatgctcagttccctcacctagcaaagtgggttataatgatggcatcaactcataaggttcatgaggactgagctagataatgcaaacaacatgtttcatatacaataataaataaaaatgttggctgttata

SEQ ID NO: 399528 - DNA, 1507 bp, Homo sapiens
cgctgccgcagcctccgccgctccagccccggctcggcagcgcgtcccctccccgcctcgccgctccgctcgcgggctcgcgggctccctcgctctctcccttcccccgccgctgccggcgccgcgccgagcggagcccggccggccacgggctgcctctcccgaggtccctttcccgagggggggaggtggtgggggcgcggcgcaggcggggcggggaggagaggagagtccgggggaggcggcaaggctgcgccctcggctcccctccgatccccgcgggcccagcggccccaggccgggccggagagcgccgagccgccaggcagtggaggaagagaggaggaggacccggagtctcgccgcgggagggtgcccagggcgagggcgtgcgagggggagtgactccgcgcgcgaggggcagcagcacctgcttgagaccaagcccggcgacctggcaaggtggggccccctaccgcgcaatctttgcggctggcccccggctctgagctccgagtgcagaggctgaagaggtacccgggggacacactgcctctaaccccacctatgagccgctctcctctcggaggacgaaggcaccatcagaaggtcgagattcgccctcctctcccgccacgtctacccactacctagaccgggagtctggacttgggagcgtgaactctcacccgagccggtccccttacaactggagcccgcccagcccctcagtccctccctgaagcccatgggtccccactgctccgtgcctcgtcgacccaggatggggagtgggaaggtcagcatgtgcccacagggccaggtgtccggcccagattcccaccctcagggcggcggcgcgcaaagggcgcagtccccgccgctgggcggacccgcggctccggctttcccggtgtctccagcctcggtgcccggaatcctggatctcggcctggcgctccggaagcgaggcagctccgtgccccagcagggacggggaacgcttggcttgagagatcacatttctgggtgtggagagaatgtcaatcacatatccagaatatcacctccttgggcacagccagggcatggtccattgaaaatgttcctgattgctggaagctgacggctcaccataaaagccaaaatggggacctgtcaaaaatgttttagccaaactatggcttggctcaggaagatgccaagaccaaaggctgctgaactttaagtataaacttgcatgaaaagcacattgcaggtctgagacagtggaggcttagtggtgagaacatgagctctggatagacctggcttcaagtcttggctctgtcattcaccagctgtgtgaatttgggcaaaccacttttcttctctgatgctcagttccctcacctagcaaagtgggttataatgatggcatcaactcataaggttcatgaggactgagctagataatgcaaacaacatgtttcatatacaataataaataaaaatgttggctgttata

SEQ ID NO: 399529 - DNA, 498 bp, Homo sapiens
tgacctagcagagatctgaaggtgagcttccctagtactggcatctcacagtgaaagagcactgttcagtgggtcaagagacccagagcctactctcagttacgacacacatagtccttgtgtggcctttctgggcttgtgtcctgaactataaaatgagagggtggcactaaatgtttttttcagatctctatagaggctggaatggccacagagaatctaaatttgaaaacaaacatgtcctgagggtgtgctccaataccaccctttaatactctcctgagatgtgaaggctggaaatgagaatgccatattattgttacttgcaaacgattagtgtatctgggacatccaaaagaagtaactgaaaatttatttctttaaaaacaaaaaaaaccattacagtgcttttgtaaaaacattaatatttagaagtacgtagtggtaataaaaggaaaatagttgtaagaccttcattaaaaagaaaaacctaaaaaa

SEQ ID NO: 399530 - DNA, 2011 bp, Homo sapiens
  misc_feature (389)..(389): n is a, c, g, or t
  misc_feature (572)..(572): n is a, c, g, or t
  misc_feature (617)..(617): n is a, c, g, or t
  misc_feature (729)..(729): n is a, c, g, or t
  misc_feature (951)..(951): n is a, c, g, or t
  misc_feature (1109)..(1109): n is a, c, g, or t
  misc_feature (1400)..(1400): n is a, c, g, or t
  misc_feature (1576)..(1576): n is a, c, g, or t
  misc_feature (1902)..(1902): n is a, c, g, or t
  misc_feature (1972)..(1972): n is a, c, g, or t
tcagtaatgcagaggaggagaactaaaaatgaaggagtggctacctgggctatgtacataattgtttttcatttttatagcaacccggtaagtaggtattgttatccttatttagtgtggaaaaattgaacctaaaggatttacggtcagctacatagccaatgtgtgagggccaaaattgcacttaacttcaaaataggtctttacaccatttaaaaatcaaactaaattggatcaagtgtagataacagtagctacagggaagcatgaggtgggtgagaattagccactctccaacgtagtccctgccaggatataatgaaagcaagtttcagactaaattctccgcacacatacttttaaactgtatttattagcaaggaggcccnaagcaattcatcagtccgttctgtaaacattcatgaagtctcaagtctttattcttttaggttcttctaccaccactctgcagaaaatatattgcagtcagcttaactatattccccaataggattctactacccttaaattcagcatcaggcaccagaaatcatataatccaccagcagganacaggaccaatccagcctcaggcagcacaccaaaggcttcactcnatgactattccctgttcatacagggtcagggaagcctatttataccttgaatctcataagtagtgtctgtttttagaatttatttttctgatcaataagccattaatttcancaatgaaaactcatttctgccattcattaattcatatcttaatcaatggacagtggagttgcatttattaaccagtactatgtctgaccttcctgattagatactagctgttcactcctaaagtgtatatttctgactaccccaagggtttaataaacaaaaatctacatttgtatcatactgtttatgatgtagtaaattatacatgtcaaagcaaagganacaagcaaatccttagcccagacactagatgtagcgggagctcagctgaagactgaattactatcgcactagaattcagcaccatcttgttttgtgctttagttatctaattgcttcgtgtgttggatttggcttcttaatcagattatgaaattctnggaaagagagagttatatactgtttattcttctacaatagctagcacagtgctagatacatataggtctagaatcaatcatttttaattattaaaattcatagtaataccttacaaacacttggcccgtaggattctatagttgctttgagattctaaagtacctcagtggactacaaaccttaagaaattgcctgactgacttgagtgatggaaatggtatattttgtgtagattttctcatatcaattcacagctttgttctaacaattattaaacttcattgggatangcataaagtatgaaccataataaacaatcatgcacctcataacgatgttttggtcagctatggactgtatatgtgacagggatctcataaaattatactggagctgagaaattactactgcctagtgacatcatagcacaccaccttactcacgtgtttgtgatgatgctgttgtnaacatacctgccgcacttctggtcttataagagtatagcacatacaatcatgtatagtacatacttgacaatgatcataaatgtctgtgttacaagtttatgtatttactatgctatactttttattatttgagagagtacatcttccacttatttaaaaaaaaagttgattgtaaaacagcctcaggcaggtccttcaggaggtattccagaagaagacattgttatcatacaagatgatagctccatgcatgttattgaacctgaaaaccttccaataggacaagatgtggaggtgggacagtgatactgacaatcctggccgngcgtaggcctaagctaatgtgtgagtttatgtcttaccttttaacaaaaaggtttttttaattaaaaaanattaattaaaaaaggaaaaagtatatataataagactat

SEQ ID NO: 399531 - DNA, 443 bp, Homo sapiens
gttggattaacctccatttcagaaatgagggaagtgaggcttgcagaggtggcacgcccgagataaaggagtgactgagtggcaaagctgagacttgaaccctaaactgtcggctcccgtgttcctgtgtgccacggtgctgtgtgagaagtgggaacggtgagttccctgctgggctcagtatggaggcaaaccgctttctgcaacacattcctatgctctcggacagcttaattgacttctgtgccttaattttctcatccgtgaaagagtataataataacaacaataataataatagactagaaattggccaggcccttggtgaggactcggtgcgtgctacctctgatagatactaatatgtaggtatagtaggaacatcaatcatcaatattgttttgactcttttgacctctgataaaaaattttgaccatggact

SEQ ID NO: 399532 - DNA, 452 bp, Homo sapiens
tgctctattcctttccttggaattattatttatcttttatattattattctctcctcactttattctttctttaagccaaagggagagatgctggtatactctcacaaaaagtagaaaaagcagtaggcgcgaagtaacctgtcttcctccgcgtcccgaccctgacccagaatcttgatggcatccacttcacctccttgtgctcaggctctcgtgaagtttcacttaaagggtatcgtctttgaattcagcttagaattttacggaagtattagtgctctttctatgagtataacgctttttggtaagagttaaagataagtctgattaaagatattttttgagcgctagtatattccacgtgttcaagaaaaagccgtgaacagagcatacccccatttctaatgtaatttccattcagtgggaataaataggtaacaataaataagca

SEQ ID NO: 399533 - DNA, 638 bp, Homo sapiens
aagacacaacatttatcctaatagtcacaaataatgtgataaattctatgacatttacttaaagttgtaatcatagagatagacaaatagacggatggaacagaagataaaatatagcactgagtgcacacagacatggaatcatgatatatgatatatgtggcttgtcaggtctgacaaggaaacaatgtattgttcaacacatttctgtgggacaagtacttagccatatggaaaaaaatgaaatagaattcctacctcacgccatgtccaaagtcagtttcagagggataaagtacataaatgtgaaaaggaaaatttaaaaacttttggaagaaaacgtcttttttaaaaggttctatgattttttttaaaaaatagctaaccataaaaaaagtgtcagtaattcaacctcagcaaaatgaaaactgcattaccagagaaacttttaagaattctgtggtttagcagaaccacaaagggaattttaaagtaaggtttggtgagaaatgttatctagcatcttggtttagttgggagattccaaggtctttctctactggaatgcagactccaggagggggacgcctgttgtctgctatgtgcacagctgattcttgcttccgagaatattgcag

SEQ ID NO: 399534 - DNA, 127 bp, Homo sapiens
cctgtttacccatttgcgctcctagaatgtggcaagaagtcaatccttattcatcatttggcaccattttctggtgaggaacatcgtattctaccaatgaattagtaaaatgttggtgtttcttctc

SEQ ID NO: 399535 - DNA, 651 bp, Homo sapiens
gaaacactcactgaggtcaggagttacagactggcctcaagtgattgttagcctcccgaagttctgggattacagacgtgagccactgcgcccagcctcttggaccatttaatcaatatgtatttctttagcatgtatggggaacaactttccccttgtgagtaataaaatcgttacttataatacctactatggaagagttacagtctaatcaggcaagctgtggctagaaaccagaatgatgatttctagcttgtataatacaggaattgtagagaaggggaacaagggattgtgtgctgcagttgtcggggaaaacttgaatagtaggtgagacattaattgggggataagatttggatgttgggagagtgaggttctttggatatgttaccaaaagcacagatatgggattaaatatatgagatgtaagaatggaaagtctgggttagaaaaaatggagctgtattctgcaaaaggctttattagacttagattctaaacgctgtgttctttatttagctctttcctacatcaggcacattaacacccccacccgtctggattccggttttgtttttttgttatttaatcttggaagtgaggcgaagaaaagaaattaaacatttaattgaattcatattatatgcc

SEQ ID NO: 399536 - DNA, 267 bp, Homo sapiens
atgaagatgtatttctaattagtgctccaggcttgaaggctttgtgggttaattctatcaacctttcaaagaatagattaattcttacgttatttaaattgttctaaatctctagaaagggtagaaaacttgccagctcattctcctggggtagggttaccataatagcaacattggatgaagaaagtgtgggcttgtatatacgtgtatgtgtacaaacacatataacattttagtttcattgaaaaagatttattaatgctaaaa

SEQ ID NO: 399537 - DNA, 443 bp, Homo sapiens
agccagccaatgccagtgggttggagtccgcctaagacgggtgtgaattcctggagaaagggatggctgccatctctgcggttcagttaactcagctacttcagcctgccagctttggagaatacaggcaatccaagatgaggaatggtaccccacaatgcagcacacttcctctgccaaaaaacaggcagactgattttttgggcaggttcctgacactgttcttcctgactcggtgagacctcccaatgggggtctccaaccagcttctacaggtgtgtgcagggcagcaacaagtcagtacaccctgaggcggagcttcaagaggaacaagctggcccccatgtttgctgtttcacaggattcactggtgataacgccaggtatggaagaaactgaggccactagggtctggagtggaccccagcaaacagcaggatccc

SEQ ID NO: 399538 - DNA, 353 bp, Homo sapiens
gaagactctcactagttgcagcccttcggccttggacttcccagcctccagaactgtaagaaataaatttttttataaattgcccagtctcaggtatccagttacagcaacagaaaattgactaagacataggatcaatgctatgattaaagagttaatatatgcaagacacttaggacaagctgtacaaagtgggtgctacagaagcattagctattgcatggtggtggctgtgcgattgtactattggatagagtcaaggggtctggttctcaaccttgatctgcattaagcagctatggacaagttgcccccactgccccccaccaccaagggacagattcctcactgaa

SEQ ID NO: 399539 - DNA, 1196 bp, Homo sapiens
ggcacgaggtgacgatgaccaccttttcatatgcctgtttgccatttatgtcctctgtagcaagaggcaggacaaacagtgaggactgcaccaacactcaccgggtgacccctttgctttggaaacttactcagggtgaaaggaattccgattttaaacagcatctctttgtgtggcctgtttgaggcaccacacagagcttgctggagcagctctgttgaccgctgacccttggcctgctaactgaaacaagattcacaagtgaggctgctgccccagtttcatggatgctggcagaagacttaagatttctgaatcagagacagaagacttcatttatttgtcacagctaaagcaatggccagtgtcagtgtatttgcactggtgcctcaagccctgatgcccacggggtgatgcagagaccctatgactcccgcacatgcattgggtcaagtcacagtagaggaccactgagctgggcaccatgtggacctatagcaggcagcaggcaagccctctcctttgaggttcctccctgcaactacgaccccgaaaaatggatccagtaaagaagagtcaaggctttatagtcttggtgcacccagtaagacctgtaggagaacaggaagcctgtggaggactgtttcttccaaaagtttccaagtgttagctcttacacatgtataaacaacactgcaatttgtctccttgcaccgtacatccacgaagcagatttgcttcttgccaaattatttccctcagtgatttcaggaactgacaattcccagtcgcatataggaattttcttgcgtcttcttttcctgactaactcttgcgttgtcagacactttcatttgtgctaagctgataagtatcaaacgatgatgcaggctattcattatgtgtgtccttgattactgatgagtttgagcaattgtcatttgttggactgatcgttcaatttcctcttcggtccttggccttttcatatattttgccttttcttgtaggtgtgtccttttcaaattgatttttttggtgtttttggtatatcctgtgtactaattctttgtcatttatatgcattaataatatctcctttcactgtgtggcttgtcttctcaatttgtttttgggtttttgtttcagagaacattttataagctttaaataataaagtttatttatttttaatt

SEQ ID NO: 399540 - DNA, 484 bp, Homo sapiens
ataaaaaagtgaggagctatctgattggtcccccaagacatcttctggtgccaaaaccaatttggttgctcccagaagtgatgatgaaagtgatggtgataaaaataacaacagccaacatttattaagtacacaggggtcaggcgtggagagcctaagaaatctgcccaactgaactcagatctgtttgacttcatagtctaaggtagcacatcacatctcacagcattcttagtgatacctagaaaaatcccttgcaaaaagtagatagagatcattgggatcatgctattttttcacttaatataccacaaatatttgtcaatcaaccatttcttcacggctgcttaacatcccatcatttggaaaatccagcggtcatttcattaagggggttttctcacatgtggccatattttttttcctccctaccttctttcttcccttccgccttccttctttccaactcaagtccagctaatta

SEQ ID NO: 399541 - DNA, 409 bp, Homo sapiens
agacataagattacacaaatatctattgcatggaatggggtacacctgtatgtttttcttgacagaggttgtttagtcattccaataagggaaaaaattggtatcctataaacttacatagtttttaacatataataaaatattcaatttcattattatcaatcaagactaggaagttttgtttcgtgtttttaaatgtcttcttagggaatgttagagacatatactctgccttactcgatgctttatgaattgaagaatgaattctcctaagaataagcatccatgagaagaagaggtttctggtctttgtcccagagcatggctcgtatgtggaatctctgctctcaaaatcctccctggctgtgggttcagctggagcaggtctggggcttctacatgtgctatc

SEQ ID NO: 399542 - DNA, 374 bp, Homo sapiens
gctgtgggaaggaaagatttccacccccattttatagctgtgccaactgaggcgctcagaagcaaagggatttccttgaccaaggtcactagggagtcttctctcctagtctggtggtccggccctcagcggcctccaggcaccacacgttgggaagctctgcttgcgctgggcagagcctgcttgtttcgggtggggtgtggggaagtaggaaggggggcttctcttcctggctgagtctgctcatgcccccagggtctgactttgtttttatctgcaaaagggagtgtctcttcctgcaaacagatccctggggctcttagaccaaggtcaggggttgtgagtcccggcccagcccctccacccccctgcga

SEQ ID NO: 399543 - DNA, 293 bp, Homo sapiens
tttattgcttctcctcagcatcctccttggtttcctcctccaccaaaagagcttctagcttttccgccactttttttggcatgatcgtttttgcccgatcctttcttttctctccgatctctttcttgcattcttcaaactttgttttgaatttctgtgcattctcaatattcaggaagtggatggccagcagctctggcttggggcactcgttggcgaagtcggcgtgggtgttccagacccaggcatggtcactacccatgttgggcttcagctccattatcagcgtgaag

SEQ ID NO: 399544 - DNA, 710 bp, Homo sapiens
tcattgtaactacaacctagtttgcagggcagtttgggcagccccatatctaggcagccttccccagtactgtacgtacccacaacaaactcatcttgttgcctgtgagttacagcttattttctcctttttatctcaaagcatcgtgccaaaattatatatttgtccaattgccaagaagctacgtatatagattgtattacctaacccttgccctttcttccgaagtcttttttcaaggctcaatattaaaaatggggacaagaacacactgcacccaaggacatgcttgtggtattcagcatacctcccataaggagccacgggccacatccttcccagagctaggaaaaggcttctctccctgaggcatcctgtgccttctttggcttggtttgttaactggggggccttgttctatctactttggctgccaggaagctaatagccagggggtttaagtctgatttttggtttctttgctttctggcataaatcttttttttatcctctaagcctcttctttcttccttccttctctgcgctacctggcgctaatctttttactctagatcactgctactcaatcaaagcataatatgaggcacagataggaccttcatgtgtaattttaatttatctagtatccatatttgaaaaaattttaggtgaagttaaatattatatttgatttaaatcaatataccaaa

SEQ ID NO: 399545 - DNA, 466 bp, Homo sapiens
gagaatggagattctactcagaaagaaacaaaccctgcattcagggtccagcaccaccaagctcttcatttttcatacagtgacacagcttggtttacaggtgctggccttcccgggccagcctgctcccttcactgtcagcagtatgatgagctgtcatcctactgcctactctctaaggggccagctgaaacccatgtgggcagcagagaagcggcagccttaggagagaaccccatgctgcacctctacaggcatgtggtgatcaccagtgccaatgcccctggcctgcagaccactgtttgcctcctggatgcattgcatcaaagacattgattgaagccaggcaccgtggctcatgcctgtaaacccagcactgtgggagcgtgaggcaggaggatcacttgatgccaggcgcttgagaccagcctgggcaacatagtgagacctcatctctacaaacaac

SEQ ID NO: 399546 - DNA, 269 bp, Homo sapiens
gcatgtgtgcatgtgtttctgcatgtgcacgtgcgtttctgtgtcatgtgtgcacacgtctgttgccgtgtcacgcattgtctgttttctcctggatgaatgctgggaagcacactgaggcaccctcacacgccccggcacatttcacctcatgtcccgacaccccaccatgatcgcacccgagaaaagcagcggttctccctgagccccgtcctgtccgcctgtgtggcaatggctttatttcggtggtttgcacctgcgtcctcctg

SEQ ID NO: 399547 - DNA, 590 bp, Homo sapiens
tcctataagtacacaaagcaaaaggtccccctccaagcctcctataaaataagatccctccagatcaaactaggttccagataggctggagtgcagtggaacaatcttggctcactgcaacctctgcttcccgggttcaagcgattgtcctgactcagactcctgagtagcagagattacaggcgtgggccaccacaccggactaatttttgtatttttagtagagagaggggttcaccatattggccaagctggtctcaaccacctgacctcaagtgatctgcctgcctcagcttcccaaagtgctgggattacaggcgtgagccaccacgcccagctaaacagagttctttttgatgccgatattttactcggactccacatctaggtaggaattcatgttttcaagtacggacattgctctacacaatcctctcctttcctgatcactaaattagagtaaatcactgtcctgaagaaggtaccttgggagagtgggttggctgtcttccaccctttttgactctgcctcccttcaagcctcttctggctgtgtcaggtccagagctgcttaagactcttggtggtct

SEQ ID NO: 399548 - DNA, 1387 bp, Homo sapiens
  misc_feature (1)..(1): n is a, c, g, or t
nggctcagatgtcacagggtttctattgcctgggctggagtgtagtggcatgatcatggctcactatagccttgacttcctgggctcaagcgatccttccgcctcagcctcctgagtagctgggactacagagacggggtttcgctcttgtgaccaggctggaatgcaatggcgtgatctcggctcaccgcaacctccgacctctgggttcaagtgattctcctgcctccgcccatttcatcttattgtctcctttactgtgcaggagcttggatgtagtcccatttatttattttgagcttttgatatgatatccaaaaaaatcattgccaaggccagtgtccaggagcttttcccctgggctgtaagagttttatagtttctatttttatatttaggtcttttatccattttgagttgattttttgtgtgtaatagaagatatgggtccagtttcattcttttgcatgtggaaatctagtttattagcaccatttattgaagggattatcttttctccattgtgtcttcttggtaccctcatcaaaaattagttgacccatatgtgtttggatttgtttctggggtctctattctgtttcactggtctatgtgtctgtttgtatgccagtatcatactgttttgattactatagctttgtaatataatttcaaatcaggaagtgtgatgcccccaactttcttttcttcttcagcattgttttggttactcagggtcttttatggttactcagggtcttttatggttccacatgaattttaggattgtttcttcttttgctgtgaagaatgacattggggttttgataaggattgttgagtttctcatctttactttttttcttaaataaaactaagttagataaggtgctttgtggatagtgagtccgcttcattgctgtgctggtgaacacccttggtcagttggtgaggaggcccccaccagggtgggccaggaagagactggtgagggtgagcactgtgctttagcaagagcaaaggtccatggggtgactcgggatgagaaatgaggagcagggggcattgctgcttccttcccctctcccctccctgcatgtcccctccccctgccacatcccccaccccagcttgtcacaccccattactgcagactctagtctgctggtcttgccagagaatcctccgcaatagaggcatggggcaggggctgtattgcggaaagagagcaaacctctgcccttctctgagcctcagtgtcatctgtaaaatgatgacagggaaccaaatgatctcagagtatctggttggtgtcttgtctccctcagaaatgttgcatttagagcagtgcacacagtagacacttaataaatgccattgaccatct

SEQ ID NO: 399549 - DNA, 404 bp, Homo sapiens
caggcagcccacattggcttcattggagcagcaagtgagtgggcaagaaagagttcaagaaagatggttccaaatatatgcaagtcttagtcacctgtaacctaatatcagtagtgtcatcccatcacctttactgtgttctagtcattagaaccaaactactagttccagcccacactcaagggtatggaattacacaagggaaagaataccaggacgtaaagatcattcatgacaattttagcagtctgtctgctacaaatccttagctttccagaagtatacaaaagaattttagcccctcttcggtcatggagttatctatcaagattgagttactcaaataacctggtatattctatgatttctcatattaaacattcaatttaatgtcaataatcaaa

SEQ ID NO: 399550 - DNA, 464 bp, Homo sapiens
ctcagcctcgcaaataggtgggactgcaggcatgtgtcaccacaccaggcaaatttttgtatttttagtggaaacagggtttcaccatgttggccaagctgttgtcgaactccagacctcaagccatctgcccacctcagcttcccaaaatgctaggatttacaggcatgaggcacagcgcccagcctcttccaatggtgtgttaatgttatgtttgaattactgttgaattactatgttaatgtaatgttatgtttgaattactgttaagatattctagacactattctgtgtcacccagaatagtgtctagaatatcttgacaataattcatcaatttttaaaatgttatttgtcattgatattttgtaccatttccacctctaaggagaattcgttgtctaaatttttatgagaggaaaaatgctgcatgataatacaaattaaaagtatttatagacata

SEQ ID NO: 399551 - DNA, 803 bp, Homo sapiens
aaaagaaactaagtcaataaaagcatttacatttatttgcacactaaacacattgatttactacttattcccagttttcttatttacttatataggatccattcattcattttacaaatacagattttcagagtaagaagagagaataattcttctaaaaataaaggcattacaatagaatttgcaaatctaggtaccacgtggaaagtctcatccgttcccatatcattaactgctcattttcacactagtgacttccaagtccttattgtcagcatcctctatcttcccatctccactggagcatttccaacctcctgccaccaactcaacacattcagggagaagagggctggtctgggaccacagaaatccttgttttaatcttggaggcagtgctcagtatgaacttaatgaattgttaagtgaatttgttttttttgaaagtcaacaagtaatgtatccccaggcaattttatctgatttttgacatttagattggttttctattacttggcaaagagaatggcgtacagtcactcctctgggggttctgcatgaggaagtatccattatacatgccgttaagcagtgatcaggtagggagggaaaggcttggccacatcaactctcctttgtgaagccaacagctctcaacaaggagaatatagtgctctgtagagcagaaacatgaatagggctgagatccttcctggatgatcccaggcagaacccttaaccctcattctccaggcccacctgccctccatgggggctctgcattgctggggagagggcagcct

SEQ ID NO: 399552 - DNA, 749 bp, Homo sapiens
aaaagaaactaagtcaataaaagcatttacatttatttgcacactaaacacattgatttactacttattcccagttttcttatttacttatataggatccattcattcattttacaaatacagattttcagagtaagaagagagaataattcttctaaaaataaaggcattacaatagaatttgcaaatctaggtaccacgtggaaagtctcatccgttcccatatcattaactgctcattttcacactagtgacttccaagtccttattgtcagcatcctctatcttcccatctccactggagcatttccaacctcctgccaccaataatcttggaggcagtgctcagtatgaacttaatgaattgttaagtgaatttgttttttttgaaagtcaacaagtaatgtatccccaggcaattttatctgatttttgacatttagattggttttctattacttggcaaagagaatggcgtacagtcactcctctgggggttctgcatgaggaagtatccattatacatgccgttaagcagtgatcaggtagggagggaaaggcttggccacatcaactctcctttgtgaagccaacagctctcaacaaggagaatatagtgctctgtagagcagaaacatgaatagggctgagatccttcctggatgatcccaggcagaacccttaaccctcattctccaggcccacctgccctccatgggggctctgcattgctggggagagggcagcct

SEQ ID NO: 399553 - DNA, 391 bp, Homo sapiens
ttgaccggtgttatcgatgcactgtatcattcttatgctttgcgtcctcatagctaagatcccatatctgggtgagaacatatgatgtttggttttccattccagtgttacttaactttgagtaatcgtctccaattccatccaggttgctgtgtatccattatacatgccgttaagcagtgatcaggtagggagggaaaggcttggccacatcaactctcctttgtgaagccaacagctctcaacaaggagaatatagtgctctgtagagcagaaacatgaatagggctgagatccttcctggatgatcccaggcagaacccttaaccctcattctccaggcccacctgccctccatgggggctctgcattgctggggagagggcagcct

SEQ ID NO: 399554 - DNA, 466 bp, Homo sapiens
tatactattaatcacctgaatttttactttgtcttgtgttaatattgctaccttagatttctgtgtgttagcctttgcttagtatttttttattacttaattttcaacttttcaatttggttttacttcaaatgtatatcttgtaagcagcatataattagattttattttgttattcaatgtaatcattgtagtcttttgtgtgcttattctatttaaagatattatgattattgatgtacctgcatatatttttaccatgttacattttgatttttatttcacaactttttctcttaaagtatttttccctcctatttctcattggtgtgagaaaccattctattttcccttttatttacacaaaagaatatattttgttgctttgcaacttatagattacttatatcctttttgtaattatctataaaattttagcatacttagtaaactatgaatttcctac

SEQ ID NO: 399555 - DNA, 459 bp, Homo sapiens
ctcattttactcttaattttgaattttaagcagggtcagttttaactcataaggggtatatgataaaccagatggtaaatgagaagagagttctaagctcattgaattgactctttaagagatgaaaatgagtaggccagcaaagtggtcagatttattttaattgatggaaaccatcatggagctcaaaattaagttttccctgtattttctactttttgcgtgtgaattaataaagcagtcatgaggataattctgaatggaataaagattgccatattctaaatcagcagaaatgtgcaggtgatatatccaggagaaccaacctcatgaaagtgtgttaatatttttaatacaattttatagctaaatatcttaaatatcaggcatgaaaactaatatggcctgacagctccaaagcagtatctctcgagcacaaatgatagtttaaaaaaaaaa

SEQ ID NO: 399556 - DNA, 430 bp, Homo sapiens
cctgcctttccaatacctattcaggagcaaaaaccatgataaactccctttgcatcttttgtaagagagctagacaaacgccggagagtttctctgcagttgtgtgaccttgggtagtttcttcaactacagaaagagagttgagcagatgctccggctgccactccatcatatattggaaacagcattactttatagtaaatcatgaccacggtgtatggcaatgaagttgcatctgaagcagccggcaccctatgtgctagctggcttttagaccaggagactgtgaatctgtggtcaggatctctttagggctgctaaatatatactacccactatcactcgctggagctgcagaccctagttttagagtttcacttcttaaagaccttcatccttattaaaatggtaatatccttactgtcatcaa

SEQ ID NO: 399557 - DNA, 326 bp, Homo sapiens
gctcagaaggtcaaggctacaatgagctatgattataccactgtactagagcatctgtgacagacaaagaccttgtctcttaaaaaaacaaaaacagactaaagatgtgatgaattgctgtaatctcatgataaaacatgaataaatgaggaattgcttcttacagataggcaaacaagtggtttcttgagacagaatctacagttacatttaaaagagaaaagtataatatgtaagcaatattttaattactagctcctctaaagaggaatctagtataaatactgtaccctaaactttctagctaaaagagggtataaaacctc

SEQ ID NO: 399558 - DNA, 455 bp, Homo sapiens
attttcccccagcctgcctggcccaccctttctccagggacggtgcccagtgggccttatcttccccatgccaggtgtgatggttaatactgtcaatttaattggattgaaggatacaaagtattgatgctgggtgtgtctgagagggtgttgccaaaagagattaacactagagtcagtgggctgcggaaggcagaccccacccttcatctggtgggcaccatctaatcagctgccagcgaatgtcaaccagaaaaacgtgaaaaggagacgacaggcctcgcctcccagcctacatctttttcctgtgctggacgcttcctgccctcgaacatcggactccaagttcagctttgagactcgggctggctctccatgctcctcagcttgcagacggcctattgtgggaccttgtgatcgtgtgagttaatacttaataaactccccttcatata

SEQ ID NO: 399559 - DNA, 264 bp, Homo sapiens
ttccctgtggctaatggcttagagtgaaggatggtgggcgtgggcgtgccacgtgggctcagcgtccaccctgccccaggcacgcaggcacccatcacaccagggcccacacacaggctcccatcacaccctgccctcgaacatcggactccaagttcagctttgagactcgggctggctctccatgctcctcagcttgcagacggcctattgtgggaccttgtgatcgtgtgagttaatacttaataaactccccttcatata

SEQ ID NO: 399560 - DNA, 557 bp, Homo sapiens
ccaaaaaagcataaataatacttacttctcttaaccagaaaaataaattgcatttctccatgctatttaaaaacacttggtatgtggatttactttttcaacagagtttctctttaaacttccaaagttagtgaaaataggatgaacataactttatagaattgttaaaattagtgaaacctgaagaactacatcgttataaaattgctgaaaaggagtcattacggcttccacttggtttattaaacaaggtcttagacctaaataagcaagatcttcaccaagacacattaggttgggggcgagagacttctttttcttatctccatccctgctatggcatgtaggtttctctaaatatcagtgagctacgcaaaagtgctgatattctactgcttttaagatttccccaaacagaaattgcatgtggttccacctacagttaccaagcactagtgaaggataaataagatgcaggcacatccctacctcccacaatatggcaggtatgttaatgaaatctttgtgattcactgactatttaaatataccaggtg

SEQ ID NO: 399561 - DNA, 453 bp, Homo sapiens
aagaggagcagaagactaccaggtatcaggtgctttgggttgactatgaagagctagaaaagaaactcaatattcacccatccaaattttcaaggaaaaaaggaagaaaaacctgcatatgcacaacgtctaagacataacaaaacatgaatcactcatctgtcacgattgcctacagtacagtataaacttcatactcaccatcttgaccaaatagttgctatcctcttacttcacttggtttagcttcagagacattttctctgaggtgcagcagaaaatgtgaaagggagaactgaagcattcattgagaaactttgagctggtaacatgcaattgtgattccctaaatccttagtaaaatttacacagcactccaagtaaataagatttctaatttctccaatatctcttaaacttttcacatcatttgaataaatactttgacatgaa

SEQ ID NO: 399562 - DNA, 582 bp, Homo sapiens
ggatgctcactgaagtctgtgcctgaatgggtagaaatgtagtgacttagtcaaaagtgatgtattacaaaccaccggacactcacaaatagaggagggtcttgcttttcaaaggctacaggaatgagggattttctaatgcgatgttgaggtcctataaaaggtcactgtcttttcttttctttcctccgtttatttttatttttatttttcaatatttttttttcttttttctttttgaggtagggctctgtcgtctgggctggagtgcagtggtgtgaccatgtctcactgcaacctctgccttctgggctcaagtgatcctcccacctcagcctcctgagtagctgggactacaggcgcgcatcactacacctggctaatattttcatttttttaactttttgtagaggtgaggtcttgctatgttgtccaggctggtcttgaactcctgagctctggctttggcctcccaaagtgctgggattacaggcaagagccaatacacctgtccaaaaatgtcacttatgatggccaaaattcacagggtactggacattggaaccaggaatatagccccag

SEQ ID NO: 399563 - DNA, 622 bp, Homo sapiens
tattgtagttatgtttgttgtttgcttaagggtccttatcttatagaaatatactctggattccagcccaggcacattactagttctgtctgtggcaggaattttaacagctgtcctgcctaatcactggatataaagccaccacaaataggtatgaaaactttttaaaagctaatgcataatgcattgtacaaattcaacatgtgactaaatatcatgtactctgttagaatatatgtgaaattaaagcatcaaaactagctttggagttgaaacatacaggaagaaatcattttaatttatatatttccaagctctgctgcacctgaatattttgaaacacacaggtcacatttagcctcatgggataaatgttaacattgtcactagaattttccaacattgtcactagaatttttctggcttactagagcattccagacagaattttaaatattttcaaatattaaaatattttaaatcttctgaaatgctgttttaaatagttggaactgaaggtaatctaggaagggtgttctagcacaagaaaaatccattcccagtaaatccacgttgcggggatccctaagtgactgagctgaactgcgcgcctataaaaaaa

SEQ ID NO: 399564 - DNA, 171 bp, Homo sapiens
tgacacttgtctctaccacatttggcaatgtctgggttaatgtcttgttaatggtggaaagacgtagggtgatgcaacaaagagtaaggagagtgtgtggagaggagagaggtggcctggccctttagacagagtgttcaacaaagagttctctgaggtggtggcataaga

SEQ ID NO: 399565 - DNA, 450 bp, Homo sapiens
acaagattcttgcacaccatggagtctgtacactagtgtgtgatgactagttttatatgtcagctgggatggtgtttttggatgaaattaacatttaaatcacttaactctgagtaagcagattgccctccattatgtgtgtgagcctcatccagtcagctaaaggcctgaatagaaagaaaagaacagcttccccgagtaagagtgatttcccaacagactgcctttggactggaactgcaccatcatgccaaaaagcagaaggtaacacaagcaggagaaaaaaaaatcaatcaacagaaacagacccagaaatgacagagttgatggaatccacagatacaactttaaatatgtcaacaaggaaaaatggttatgctagactggtgcaattatgatttttttcttatttttctaaatatatgaaaattaaacaaaaagaacattaaa

SEQ ID NO: 399566 - DNA, 435 bp, Homo sapiens
gtatttctaattcacacttatatgtggtggtgttttttgaggtcatacctattaggttcccctcttggaacactcagagatttgacttctctctcccttacattacagtcacctaaactacagctgagtttcaacagagcatcaaacaagattgcctgcttctctgggttcttgctgtctcttagcctgtcagctcttctgtgcttttatgtttgaaaaacccatgttttttcccagcagaattgctccttccatttaacagcaagcatttttctctgtttagcaaatgaaaaacctaattataaatattgtattagttacctctactttgttacacattctacaatgttaagatttacgttgatcacatctatttcattggcttaaggtttaatttaaatgcacaactaccttgtagaataaattacatactta

SEQ ID NO: 399567 - DNA, 1218 bp, Homo sapiens
ctttctcataacatttttttaattaattaattttcagcgtttgttatatcagaatggacattatagcaatttccatggctgtgtcgctcctggcagattttaaagttcttccagcctgattcctctctctgtttgggtctctggcatggtgcctgctggagagtagatacttgataattatctattgggttctcaggggatctctcaaaggtggtattcaggcacccacaaggcaactcccatcacaagaaagaatggtggcctgggagtgagctgtaaggttccttcaaacatcagttcctgaagcctcttttattcattattgttgggacttgtttttatttctgtttcgttctacgtgaccccaaaatctgtatgtgaacactaggaactttatcatgggctgaggtgtatttgaagtaaactcttaactatgtctctgggatatgaaaggtgcttacattctctgttgggaatgtagagagaaggatttgcagtgtgtggcccctgggaatgtagaggcatgaatttctgtctgttttcctgctgttgaaatctgagtgctaggaacggacctcttgctctcagattggccttgaagctgaagggaacctgtccaccctctgcacagggcaagagccacgccaacaggaggaagttggagtgcatcctggcacctgccaatcggaagactgacaaacaaaaaattagtttttaattaatttaaaaaatgatcttcctacttatcagacacaatcacttttaaatatgagcagaaaaacgaactccatagccaaatgcaacattttgtgtcatactgctttacatcatctattctacctccattcactggtcaaagaagcgcagagttaagttggccagtgtggcgtggacacagccaggcgcagaccctcctgccagcgaagccagcgtgaggtctgttggctcaggggtccagtccctgggtccccgaagaggtaagccaaagacatagtgatacttggttcaattcggctccagagagtatcagatgggaaatagatgacttgttttacctggtcaaataagacatcactaaaatctaccatgactggaaattacttaatgcaaccagaggagacttcgcagtcaaattttgcttttcctaaaagacacgaaattaaatttacatgtcactgaatgctatttgaaactgtcatttccttgtatattaggggg

SEQ ID NO: 399568 - DNA, 510 bp, Homo sapiens
tcatcacaagggtcctcggaagaggaaggcacgagaggagagcaaaagatgctacattgttctctttgcaggtagaggagagggccatgagccaaggaatgtgggcattctctagagctggaaaaggtaaggaaacagtcttccaagtgcctccagaagtattgcagccctgcagacccattttagacatctgaccttcaaaaatataagataataaaactgtgttgttttaagccactaagtctgtggtaatgtattaatactgaagcaagaagaaatgaacatacccagcctctcatccatgtaaatcatcgcaaggtagaaacagcaggatgggcagagctaagcagtccagaggggtgctagttatatggccaatggggacaagtaacccgcatacttttgggacttgcagagggagaagcccctgctgccctatgcctctgctggtgcagggttgatctggccccctctgcagaagcaagccagtcccgatatctgaggatatgg

SEQ ID NO: 399569 - DNA, 527 bp, Homo sapiens
cagagttgaagtatacctgttaacaaatactcagaattcattgtagaatttttgtttttgttctcgtttttatcttgcctaaataattgttctcttccccattccctttataattttgccagtgacacacttattatgtttatttaaacttgaaaaaaacctcaagagttgtagggtaatacctcaatgtgttgtacatcctgaaaagctgttatattttcaacataagggacaatgcaggatgctgaaatcattgtatttaaactgtaaaaatgtctgccttatataattatgattttaaaatctaccctgaacttctcaaaagaaggatttgtttataatacaccgtacagtaataattttatcatttccaacagataaatggcagtgtaatcgatgagatcttgtacattcctttgtaatttgtgagcacttcatacggagagtcaagggggagggctcatctggagaattttgaatcccagtattctcccccaccccgcagagtaggttctttccccatggag

SEQ ID NO: 399570 - DNA, 565 bp, Homo sapiens
cctttacaaattataccctcctggccctttggtagtgtttttccaagaatgacttttcatgaatgcagtttgttggggctagagttctttaggtctctcatgttctagttccacacaagattcaggtgtttttcttttcttttttttttttttttttggtgaggcaaagtctcactctgttgcccaggctggagttgcaacctccacctcccaggttcaagcaattcttccgcctcagcctcccaagcagctgggactacaggtgcatgccaccatgcccagctaatttttgtattttcagtcgagacaggtttcaccatattggccaggctagtctcgaactcctgacgtcgtgatctgcctgcctcagcctcccaaagtgctgggattacaggcgtgagtcaccatgcccagccgattcagggatttttcaaaaagaaaattattaattattgtcaacatagtggaatcctaattattaaaggtggagagacttttgaagccatttaaatatttggtccctctcatgttattatttatgtaacttttaatatatttgtaaact

SEQ ID NO: 399571 - DNA, 588 bp, Homo sapiens
cgttggggtacatggcccatcatcaggcacagagtgaactgggtgaacgtggccctggtgtgtggtgctttctagcagcacgtgagccaaggaagcccagggaagccttcgcttgtgccacgtagcatagctcgtccttccagaaaatgtgagtagactcccctgagcctgataatgaaaggagagaagtcagaaagactgaccccagcactgggcagagccgagtgtgtctgatggacagcgagaggctggggcaaggaggaaagaaagaggggtcaggcctcgggaaggcagtgctgctgtgtgtgaagctgtgcggctctttattttcttctctttgcttatctgtagttttgaaattcaatagaattaaaacataatttgctttcataattatgaacaaaacatgcaagtgttactttgaaaggagaaaatagctgtgggtagagccgtctggactccagggttagaggcggagagtggaacttagtatgctccactcagcaaaacaacaggaaaggcagatggcaaaggtgcagcccagaaagcacagctgcacacactcctaacgcaaacaacaccctgcgc

SEQ ID NO: 399572 - DNA, 399 bp, Homo sapiens
aaggtggccatctacaagagggaagagagacttcaccagcaactgaccatgctggttccttgatgagacttctagcctccagaacagtgataacataaatttatgttgtttaagccacccagtctatggtattttgttaaggcagcctaagctaaagcacagttcaataataaagacacagtaatccaaatttttaagtagacaaacaagctgaatatacatttctccagagaagatatacaaacacccaataagtacaggaagcaatgctcaataatattagccattaggtaaatgcaaatcaaaaccagaacagataccacttcacacccagaggatgggtaaaatcaaaaggatagataataacacgtgttggtgaggatgtaaagaaattagagc

SEQ ID NO: 399573 - DNA, 473 bp, Homo sapiens
cattaataacttttcgaatatcctcccaatcctggctttggctaacgatttctaattgccagtggggtaaaataatatattacatgttcctctttttacatcttgtctcaatcctagattcctagaagacactgtagttttgactatacagcttaaatcatcggagcctttcttcatagtttaaacactgaaaacagtggagctttaaacaggtacaagatggcaggtgacagcattttccttcctccatgtttttcaaggctgcatgattattagggtgaagcttgtggaagtccaaggcagaaaccaagtaaaggaaaacgtagtcaagttaaaagctagtaagatgagtaagaagagtgataacagaagaccaagaagaatgcaatggatgggagtgatctagaagattcttatatcagggagaaagaccattcagttgtagagaggaaaaagagaagggtgtagttaga

SEQ ID NO: 399574 - DNA, 650 bp, Homo sapiens
ggggtacatgactgggggttgcatgtaccggtaattagaacagaacagaacaggacgggattttcacagtgcttttctatacaatgtctggaatctatagataacataactggttaggtcagggctcgatctttaaccaggtccagggtgcggcagcgctgggctgtccacctctgccttttagtttttacttcttctttctttggaggcagaaattgggcataagacaatatgaggggtggtctcctcccttaatcccagcactttgggaggccaaggaaggcggattacgaagtcaggagtttgagactagcctgaccaaaatggtgaaaccccgtctctgctaaaaatacaaaaattagtcggacatagtggcgttgtgcctgtaaccccagctactcaggaggctgagcaggagaatcgcttgaacctgggaagcagagttgcagtgagcctgagaatggaccactgcactgcaggcttgggtgacagagcaagaccctgtctccaaaaaaaaaagttatacacatgtaattattgcatgttccttcattattagttttaacaactagacttgttaatctcaatagcttaattagcatttgagtttattgctaaaattctttatgagttttaataatgaggcttgg

SEQ ID NO: 399575 - DNA, 519 bp, Homo sapiens
cagctggggagctgatgacaggtgtcctggaggaggaggtttcctgtggagagctgagggctttgaaggaggccacccatggtggtggattggggacgtggcagtttcaaagcatacaccatgtgaaggaaggaccctgcagaagtcccaaatcaatgttttcttgcttatccctggtggacgatggaggctggtggcaggggcattaatgtgtggccatggtggtctgtgtgatatggtgaaaatgcaaaggagatgaactcccaagacttttgggagacatttataggaagatgggtgctaagtaaatccaaggcagtcttttcagacagagggcttgataccactaattaggcagcttggatgagtggcaccatggaactggctggtggttttcttgtcaaaatagacacaaactcccttctctccatgtccttagaagatgtgaatttagaggtctccacattgcctgacaaagtctgttttaactgggtaaaataaaaaaaaaattaccattga

SEQ ID NO: 399576 - DNA, 385 bp, Homo sapiens
taaaaatcttgctgagtctctgaagtggaaatgaaggctctggggcctgcagctagtgtggaccgggaagttgttctcccgatttagccaggcctttgggtggtggcaaaggcacaggcattggggcattttactccaggggaaacctgtcccagaacttgtccttccccggggctggtgtgacctaaggacctgtcagccccatcatgccaggctttggccaagatggctgttgcctgacctgtggcttcccggaacctctacctgctgaagaccacatgatggaagacaggtaatgctcccttctatccctctaggcctttggccacagacgtgcacacacacacacccagaccctcagccacacacacacacacccccctcc

SEQ ID NO: 399577 - DNA, 350 bp, Homo sapiens
gcccctctggtgggcgaggacctccacgtgtgtcaccaggccaggtaactctcagcaagcccctttggtgggcgaggacctccacacgtgtcaccaggccaggtgacttttcagcaagcccctccacacgtgtcaccaggccaggtgactctcagcaagcccctccggtgggcgaggacctctgcacgtgtctccagaggccaaagcagaagaaaacgttagcacaggagtcacttgacttcaccaaacgcagccaggattgcggtttctccggctcggctgtctcagttgtttaagagagttcatgcttttgagatcaaagttaaaagaaggcctgtgcctcgcaggga

SEQ ID NO: 399578 - DNA, 414 bp, Homo sapiens
aaaagttaacctaagaacattcaaggcaacaagatagaatgatttttagagaaaatctcctggtcagatcatccaaaaatgctagataatatattcaaaatatttattgaaagcatggttgagctggcagtaaagtaagggaaacaggctgaaatgataaggatgcttgattccacaagagtaagcaaactcaacgttctcctggagggcatcctctggctcacagtaagataggtgcttggtttacaaaggttgtgtactcagaggataggagacataactgagagctcatgcagaatgggaggttgtatcagacatccatatataaatctagaacccttgaatgggacagcatacttcctgagagaactggaatgaaggaagtcatgagatgcagaaaggaatggtagacaa

SEQ ID NO: 399579 - DNA, 459 bp, Homo sapiens
catgatctacatacttctggagtactcataatgcaatgtcccttaatttgcatttgtctggtattttttcattattagtctagaattgtgggttaaggggaagaacatcagattggcaaagtgtcctccttgtatcatcatagtaggtgttacgtgatgtcaagatgactaaaatggaccaggcacggtggctcacgccctgtaatcccaggactctgggaggccgaggcgggtggatcacaaggtcaagagatccagaccatcctggccaacatggcgaaaccccgtctccaccaaaaacacaaaaattagccgggcgtggtggcgtgcaaccgcagccccagccgctcaagaggctcaggcaggagaatggcttgaacccgggaggcggaggttgcagtgagccgagattgcgccactgcactccagcctgggagacagagcaagactccatctcaa

SEQ ID NO: 399580 - DNA, 512 bp, Homo sapiens
cagtcttaagcatgcatatggccttctagattccccagaatatgtcagaactttgcaaagcccctcagacatttcattccccagccattcctactaagctttttggtgagtttattgtgtatcccttgtatcaggcagcagcagctaaaacatttgcccgtatacgttttcaacaaacatccctcaacatcaactttagcactgggcaggtttgaatcaggtgaaataaagttagcctttcaagtggggtcttctagggaaccaccagacagatgatctgtctgtgaaataataactattccttgggaatagggctttcaaagagttcaacccattcttcctcctcaagtcctggaactgttatttttcaaggttactgctgagctaggagcaacaggatgatattagggtaagttaaaataccacaatgcttactgttcttaccaagattcagccacctttcttaaataaatgctcccaattccctttagtgaatttctgaaaatctggga

SEQ ID NO: 399581 - DNA, 507 bp, Homo sapiens
cccaggctggagtgcagtggcgtgatctcggctcactggaacctccgcctcccgggttcaagtgattctcctgcctcagcctcctgagtagctgggactacaggcgtgtaccaccacgcccggctgattttttgtattttagtagagacagggtttcaccatgttggccaggatggtctcgatctcctgacctcgtgatccacccgccttggcctcccaaagtgctgggattacaggcatgagccaccgtgcccggcctgcatccattatttcttatcagatattctgcgttctcttctttttgctcgctgccattgccttactctccaggctgcttcatctcatagactattgtcacagccatgtcaacttccccagcccacatatgcttacttcttttttttttttttttttttgagccggagtctggctctgtctcccatgctggagtgcagtgctacaatctcggctcactgcagcctccacctcctgggttttacgccattc

SEQ ID NO: 399582 - DNA, 211 bp, Homo sapiens
agcaaggctcagaaagatcaagtggcgtgcccagctggacacagactattaaatggggcggcgacgacgaccccagggcttcctcactctctcaggcagtacaggacagtgattaaacgcgtcgaccacattgcctgggtttgaatcctgccgctgcttttgagtagctccttgagcttggacaagtttcttagcttttctgtacctgttt

SEQ ID NO: 399583 - DNA, 335 bp, Homo sapiens
gtaatattctttgagttatcttgcaaggctagcctccataggagaaaatttctttagtgaagcctcatgggaaagctcatttaggcagatgtttctatgcttctgctatgtttgatttgaatactgctttagattataagcagtttgaaatcagaagatctcaaaccacaggttaaaaatatttggagaaattgaaaaattattataataaattacaaagactccattacaaaaaaaaaaccatttcttgggttggatgggctctgttccctggttttgttaaaatcacaccatgtacacataatttacagataaaactgttattaatttacaga

SEQ ID NO: 399584 - DNA, 213 bp, Homo sapiens
taattcattggctggaactcagtcactaggggaagggaacccaagaagagagcagcatgaattctggtgaacacctagtaagctctgtcacagcagggcaagtgcagagcattgtagcaacatatataggggcacccaagactctaagggacagacagccttgaaaaacttttgaaggaagcgatgcctaaaccagggctcagcaaacaatgg

SEQ ID NO: 399585 - DNA, 662 bp, Homo sapiens
  misc_feature (34)..(34): n is a, c, g, or t
  misc_feature (64)..(64): n is a, c, g, or t
aagcaatcctcttacctcagcctccaagtgctgngactacaggcacatgcccaacatgcctggntattttatttcattttttttgagacagagtctcactgtgttgcccaggctggtgtgcaatggcatgatctcggctcactgcaacctctgcctcccaggttcaagtgattctcgtgcctcagactcccgagtagctgagattacaggcatgcgacactacacccagcgaattttttggatttttagtagaaatggggtttcaccatgttgaccaggctggtctcgaactgctgaccttaggtgatcctcccagctcggcctcccaaagtgctgggattacaggcatgagccaccgtgccggccttttctttctttttaaaacagaagcactgtataacttttattttgcatatgtccacaaatgcttacacaacatacagtggctacatctaaaactttgagcattttttcatagtgcaaagagacagaaaggtagtgacacacttcactgtgttacactgactttgggtagagccctaaaggcagcacgcacttcagaggtagggctgagtattgctcacactcaggtctggaagatttaattttagaaatttttaaacttagtgaaaatataagttccgagagcagagatcttgtct

SEQ ID NO: 399586 - DNA, 472 bp, Homo sapiens
catgaaactagactcagagtagtttctgagtcactctgagtgtctacttatctgtaagttcaaggatattccaaaatatgctttccaagagacagtctccctaaaaatgtccctctggctttacaccacaaaaatcaccctagcagtaaagaacaatagaaaccatttccacccacagtgataacctccacgtaggtgcagtttcagcaccagccaaatggcagcaacactcttcactacagcttcccttgccatcagttgtctcaccagggcgtgcatgtggtgcttttatatccccgcagtgtttaacccaatatccacgtggtagagactcagtagttgcctctcaagtgggaattagacttcaaagactctgattaaatcctagagcaggggtcagcagactatagcctgtggagccaactccggtctgtttttatgaatatctgactctttttgtaaataaagtttt

SEQ ID NO: 399587 - DNA, 280 bp, Homo sapiens
ttaaacagtgggagatcaggcagtggtgcttccagaaaggtggactattgccatagtgtggaagaatgacagggtccacgtggcaacacagagctaggagaacacccgtctctcctcctggctctgtgttatgttgggcatgagatgacgaacaggactcccagagcaggaggatgcagggagttaacttccagaacacactgtggaagagagagggagtaggaggttgggagtaggataggccagagtgaaattggaaatcttattattttcacctcca

SEQ ID NO: 399588 - DNA, 372 bp, Homo sapiens
cggcctcccaaagtgctggggttgcaggtgtgcgccaccgcgcccggccaccaccttaaccctttttaagtgcacaggtcagtggttcaagcacattcgccttgttgtgcagccatcaccagcatccatctccagagctgttttctgtcttcccaaactgaaaccctgtcccctttaaacactcccgattcccctctcccagcccctggctattgtactttctgtctctatgaatttaattaccctaggaaccccgtatgagtggaatcatacaatatctgtcctttagtctggcttattcactcagcataatgtcctcagggtttgtccatatcacagcggctggcagaatttccttcctcttcggggctg

SEQ ID NO: 399589 - DNA, 264 bp, Homo sapiens
aactcctgaccttgtgattcacctgcctcggcctcccaaagtgctgggattacaggtgtgagccatcgtgcccagccttttccctttctttcttggagagaaatgatagcatctgaggaggcaggagcgaggggtgtcttgtggaggtgggtagtgatggcagcctgctctgtaactgaacatgcagggcaacgtggggagaggggtgctgcatggatgggggcagtggtgtttctagtgtgtgaggaagcagagcagaggatg

SEQ ID NO: 399590 - DNA, 522 bp, Homo sapiens
atgtccaaggcgggaacgtggcttcgcgcgcaactctctgagacgcgggccggctcacgtgtccgggccgcaccacgaaaacaacagccacaggggagaacaacctcttgttttcctcatacagccgagctttgctgcaaacgatccctttccttttgtttccacattgcgttattcagaagtggttatgcggcgccaaacacgcgctttctgccccacaggtttcagccttccccaccctcatcttccccgcgctcccctcccgtcgttgtagcttcctgctcgcccctctcatctcagccaaccctgctgagctttcgcgtgggcgtcacgagtttctaggcagatcaggaaaatccgctctccggccgcaccctcgcgcgcccccgcctggcggtgtagaacaaacggtctgagcgcttggcgggcgactgagagcggagcgggcgaggccgaggagcggaggctgaagccgtgaggagcggcccggcgagggcgaggggcgtgcgagcgggcggccgc

SEQ ID NO: 399591 - DNA, 462 bp, Homo sapiens
gggaagaggagccagtgtaaaagcctgctcgacttgggtggtcagggctgaggctgcccccaatttgcctcattgctgatgcatgcgagtgcgacattcccagcgataatgttgttcctaatcaatctgcccttatttacatttgtaagcattgtcggctttaatatgcatgccctgtgcaggggactgctgtgccacaccgggtttgttaacttcaactaaccacaaggattccacagatctgagatgcagactggggcagccagacctgctaaggtgtcctccgggaagacagtccctttaaatggcccttctgcctctggcaccccttgtgacagttaccaaataaaaataagtgagaacttggggccttatcagccagcaggagttgccagcctttatgaagcaacagctgagtgttccatttcccctttccaagtaaagttcatctcaatgcataaa

SEQ ID NO: 399592 - DNA, 424 bp, Homo sapiens
taatccccgacccaccaacattacaaaataacagggatttggaactgtattgctgtccagaaaacagatttagagaaaaatttccctgaaattagccctagcagaggtggcagagttgactaattcatctctcctttcttcgagtgtcctttgtttgcctgtttgcttgggaagggtagttgatgtttactgctaaccactatctgccttaaagaaatcctgcaaaataattaacttcacaatttactgatgacagaaactatttcatgtgacttggataaaagtgattatgtttctgtttttctaaaaacacaggagagatgttaaattataataaccttggacagcagtattacttttaacaggaatatattatacataagctgcagtgaaagaataattacctcatatgttcatatgaata

SEQ ID NO: 399593 - DNA, 389 bp, Homo sapiens
ttatcatgactcagcccatcatcttagttttgaaagtggaactcgcaacactgctgtccccagttgtgtacttgtctttgtcttcaccctggaagtggactacttacctgtgagctgtactggccatctccagatgtgggactcggacacagcacggacaggcttttgtgtaggggtgtggcttctcttccgttgtttgggattagccctgcatttaattagggtctttgtaagtgttctagaggcttttcttagaaatccttctcacacctagctttgctttgctttttcttttcttttcttttttcttggtaactcacagaacaacaccattgcactccagcctgggtgacagagcgagactccgtctcataaataaataaataaat

SEQ ID NO: 399594 - DNA, 507 bp, Homo sapiens
gccaattaataatatgttttggtctgggggatgcttgggaaggccccattgttcaaaatatctctttcaggaacctggaacaccaccatttgagactcacttctttaggtcttgagggctttttggtctttgagatgcttttgtgtaaagttaatgcacctccagtgccctctgaacaaaggccggtgaacgtggactaagcttccctggccatccttgtctcctgcagcttaccctcctccccgccccaacctgaaggagtagctccctccccgttgagagctccatggctacgcctaatttacatcaccctccccaagctggaggagtagttccctccccatcccagagctccatggctttgcctaatttacatgaccctccccacgctggaggagtagttccttccccgtcccagagctccatggctatgcctcacttgcctcactgggcccaagctgtcctggaagggaggaagctgcggatgtgtctgttcccttccttggg

SEQ ID NO: 399595 - DNA, 123 bp, Homo sapiens
cagattcttgaattataatagctatatgtggatataagttaaaatgttacaaccaacttcctttaccagaatttcactcatttctcagtttttatttacataaatattaactctagaaggtga

SEQ ID NO: 399596 - DNA, 531 bp, Homo sapiens
ttctactcccttggggctccccagttgggcagaggtgcctggaaggttgctcctgcccagtttgaatcctggccagctaccacagggagtggtcaggggtccactagggactggagctcatgcattccttagcacaacttcccaatcaacccctgcgtgcccaggtcacagacggagtcagacctggccctcagagaggagataaggagaggtggaggtgcttagagctcccctggcccatctcaggggttggggaggggcttgtgtagagggagggcattcgggcaggatagaggaggcagccctccctgggggtctggggtcgcctccaggagaggcactgctccattccccactgcaccctccaggcccactccctgccctgtggcgaggacagctgtagggggaggggaggggcagcgccgtgtcaggacccccaccccctcctccaaagcaggaaaatccctctccgttagtatcacattgttgagaattaactttgttgaaataaaaattggtcgtggtattaac

SEQ ID NO: 399597 - DNA, 463 bp, Homo sapiens
agtgtgaagaatttaaatgaaaatatgcccgtgatgacttaagggtcagcctgcttgagggaaacatgttatgctttgttttaaattgattttaaatccatctgaatgttggtactcattataatggtacagatcacaaaggaccatttaataggcttcctgcttgatagatttaattaaatttgagacacatgtgatatagacaataccaagattcagttttagttactgtagcatgtcagtttatctcattcatacaacaaacattgaatacctagtacgtgccagataaagagctaaattctgggaatgaagatgaggccagtttcacacagtataggaaaaaggtcagacctgggaattagcagttaacaaattcgttaagtgctaaagtagaaatataaagagtcctgcaggaatactgaagacagaaaaactaattccactagaaaagtaaaaaaaa

SEQ ID NO: 399598 - DNA, 476 bp, Homo sapiens
aaaatgttttctctctggggctttcatatgtctgttctatgtgaatgtcgctttgccatggctccctctttgctaactcttcctaacccctgcagagaaggaagtgtagtgatggtattttgagtccatcttcaggtttattgggaatgcaagggaaatgagttgttaccaatgggagtaaagggctagttgctatgccagtagctgctacttttgacactgcttgagcaatctgaatggctaggtttgaatctggcttctcagtcagaattttaccttcactctaatgctgctttttttcaaatcacctatatttacataaatatgaaccaacttcagtgatcttaattctttcccgaagatccaagtttctttccatctgcctgaagaactttctttagcacttctggtatagcagacctactgatgataatttttcttttagtatatggtgattagtttactttttattcaac

SEQ ID NO: 399599 - DNA, 332 bp, Homo sapiens
attacaggggtgagccaccatgcccggcctcatacaatatttttgaatgagctggattcaaacattttctctgtaggaatggtgaaaatgtcattatcaggaaaatgatctagcagtattatctataatacagccaccacgcccacccctgaagtattttctttaatgaacagctctgtcatgactatagcttttctgtataatttaaaaaattactacaaaaattaacattgttttcttcttggcttttcctcccacatctctgaagttcctgtctggtcctctgccctagcagccttaaatttcctacccagctttctgaccgtagtttc

SEQ ID NO: 399600 - DNA, 756 bp, Homo sapiens
atgcacaaaataagcctggctgtggaaatgcttatttgttgggagggtgcttgtttggatcgatgatgagaataattgtctgaggatgctgagggactcattccagatgtcaatctgaggtccagatgtgtggccctccaataggacaaataagactctcagagcctggctctatttggggatccctcagtgacaacatagtacctctgtgagcgtgccttttctatctctccgaagagggcattagcatcctgtcttatgagtcagtatgcactttagtatggttagtgacccaagactcactttattttgttcattttgagcagagaattgtagatagatacatatatgggaaatatgttcttgattaacaaatgaaaaaatgaaaaagtttcagtcaagaaaggtcaaggaactgtgatgtatagtgaaggcagggaacactgcatgcctgtattaaatattgacaaaggaaccaattttagtgctttgttatttttactgttgagtattttctgagaccatttctttttcttctattttgttttgctgaggtagaggagggctggaatgaggtcctccacttcagaaaataggggtgagtagttaaaccaacatcctttggaattcatatacgtcatgcgttccatgccacatcctgagatctttttgttgatttttttagtggcttactggataatatctaaatactgtatattttactttggtgagtctctccaccttcatttctgaatc

SEQ ID NO: 399601 - DNA, 352 bp, Homo sapiens
aagtgaacagaactgtgtctggcatgtgctaatctagcctagactgtgagtgaggtcgggaagctggagccctcttgtactttactgtttcattgctcaccagctcccttccaacccttaactgagtctcatgttaaagagaaaagcttcagagttgtgtgatctatattagaatcttcatcgagattctctgtgctgtgtaatttcacctgctgagattctggctatgtgcatagtcagggaaatctttgtcttccttttctttccatcctcttcctcctcatcagccatctcttctacctttttgccctttcgttaggttataacttggagcacatacagccagaggaca

SEQ ID NO: 399602 - DNA, 227 bp, Homo sapiens
agaagagtctggcatacgtgagcgcgctacaaacattagctaccgtggtccaagtgatccacagcacctctgacagtgtccactgaaccatgtgcttctgatccagccagggctcccaatttcataggtcgcattctcaaaaccgacgttggctgaagcgtcaaagttgacttagtgagtccaccaagaggagcaactgggccaccggggttcagttaaaggaagca

SEQ ID NO: 399603 - DNA, 683 bp, Homo sapiens
gtgagagtggggacgtccggcttcggagcgggagtgttcgttgtgccagcgactaaaaagagaattaaatatgggtgatgttgagaaaggcaagaagatttttattatgaagtgttcccagtgccacaccgttgaaaagggaggcaagcacaagactgggccaaatctccatggtctctttgggcggaagacaggtcaggcccctggatactcttacacagccgccaataagaacaaaggcatcatctggggagaggatacactgatggagtatttggagaatcccaagaagtacatccctggaacaaaaatgatctttgtcggcattaagaagaaggaagaaagggcagacttaatagcttatctcaaaaaagctactaatgagtaataattggccactgccttatttattacaaaacagaaatgtctcatgacttttttatgtgtaccatcctttaatagatctcatacaccagaattcagatcatgaatgactgacagaatattttgttgggcagtcctgatttaaaactaagactggcttgtggttaaatgaatatgttcagtttcttgaattttaatagtaactccaattcagtaaatgctatcactgtttaccccttctaaagatatgattagacttcgttagtaatgttcaacttttcacaaagatggtgagtgcc

SEQ ID NO: 399604 - DNA, 604 bp, Homo sapiens
agagtataagaataaaacctttgatgattgaacggattatcctcaggataacatctgtgattcttcatgagagttatgtcttcttaaacccttggaagctgtcaacactacagatttcccaaagcaccaagctgcaaacagcagattgctctcaagcaatgatgctgaagcatgaagcaagaatcatgttaccatatcagtgttttcactgctctgaacccagcacctagcacagctcctgatagagctgtgtcaaacatgacagaactcctgatagagctgagagtcaacatgtccgttcaatgagtgaataggagtgggctatcccaatgcaaatttcaaagctctcagcaagacaaggtggagatgaattaccatgtgcatggagagaagccatggcccaaggatgggaattgcagatctggaggctgaagccccgcattggcatcctggctctactcccactggttctgtcaccctgggcaaggcacttctcccaagctgcagttccgccaactgagaagcagagacaatgacacttgttccgctcaccttgcagggttgttgtgagaaggaaataaagtatttggaagcactttataaa

SEQ ID NO: 399605 - DNA, 476 bp, Homo sapiens
aagttagataatccagagctatgctttgaacatatgcttattaaatatccaggtgaatattgagtaggtagttgaatatatgaatcttgagttcaggtgagaactctaggttgattattaatttggaatgaatcagcatatagatgtttgtatttaaagctaacacccagggtgagtgtagcttataaaaatattaataagaggcaaaatgctgagcattccaatattaagaaaaaggggttatagaaagaaaccaatgaaggagactagaagttatggtttgtgatatagaagtagaatcaacagaaagagcatggaagctaactgaagaaaagattttgatgaggagtaagtgatgaactgggtcatcatatactatggctatgttaagaaagaggagatctgagaaggaggaccttgacaaggttgtttaagtgaagtaattgtgactaaagtccaactggattgcattcaac

SEQ ID NO: 399606 - DNA, 175 bp, Homo sapiens
ttttgtgttaaactgtatgaagatcttagaaatgtaaaaatttaatcacttactgtcccaccatatgattgactccaatccccctgggagttaagtaagaaaaatcttgtaaattaaattatcattaaaagacttgtttcttttctaagttaagtaaactaacacaaagatcact

SEQ ID NO: 399607 - DNA, 357 bp, Homo sapiens
gtgtgccaggcatgtcgttaagcactctccatgtaccttcctactcagccttaccctgaaccttgtacgtgaaagatatgctagggttatctctgtttttagatactgaaatcagctaagagagtttaacttgttaaagggtgccttcttgggaaacttgagaacctaatggtaatgactcatgacttagctatggaaagggctgctcaaaattatctaaactagtgatctctatttttttttaaatttcactatgaaatcccctcccccccttttttaaaaaaaacaatcagaggccaaaatccaatatatgggacatcctggcactgctctgtttggaggagttagaaccccctt

SEQ ID NO: 399608 - DNA, 555 bp, Homo sapiens
ccatttcagagtttcttattggtctgttcagggaatcagtttcttcctggtttagtcttgggagggtgtatgtgtccagtaatttatccatttattctaaattttctagtttgtgtgcatagaggcattgatagtattttctgatggttacctgtatttctgtgggctcagtggtaacattccgtttgtcatttctaattaagtttattggatcctctgtcttttcttcttaataaacctacctagcagtctatctgattaattttctcaaaaaaacagcttctggattcattggtcttttgaatggtttttcataactcctgagctcaagtgatccacccacctcggcctcccaaagtgctaggattacaggtgtgagccaccctgctcagccctagaaaaagttttttattgataatattaaacaatttatagattggtaatattagagggaacctgtaaaaatataaaagatagaaaacattgaagaatgagaaacgcttctttcctcctttacctttttaggtctggaaggatggtgtttaaaaaataaga

SEQ ID NO: 399609 - DNA, 456 bp, Homo sapiens
gtgccattgaaatgtcagatgtcaccgtcttcatcagcactcttggaattttggccaaagtggcttcttcttttgctgagacttgactcactcccggcagagggatgatagcggccttgccccgagcgtttatccggctgcaggcgtcattcttggtcgcctgtgtgtccagagccccagcgcaggaagggagcgcaattcccaccgcgcccgctgggtggcgctagcgccgcaccgtgtcccgggatgaggggaaaccgcgctgcccagtcagtaccccgacgcccccgcgcccccgccgggccccgcgcgctgcagccaccgcctcttctcggcttcctcttgctttacagtaactctcctcctggggaaaaggcttttcacggagcaggctcggagcctacggggctggcctcggactggatgggggtaaggacgggtggcggcgctcgcgcc

SEQ ID NO: 399610 - DNA, 352 bp, Homo sapiens
cccccctttctccacatcctcgtcagtacctgcagttccccgtcttacaaatgctagccatcctggtgggtgtgcagcactgtctcactgcagctttcacttgcacctccctgaagactcacgacattgagtgtctttccatgtgtctgttgcccgtttgtcttctttggagaaatgtctgttcagagcctttgtccatattttaattgggttgtctttttattgaattgtaggagttcttaggcgagtcccttatcagcgatggaacttgcagatattgtctcttgttctttgggctgtcctttcactctcttgatgccatcctttgaaatagaaaaggttttcatcttga

SEQ ID NO: 399611 - DNA, 407 bp, Homo sapiens
tcaccatgttagccaggatggtctagatctcctgacctcatgatccacccaccttggcctcccaaagtgctgggattacaggcgtgagccaccgcgcctggatactctagcgacatttaaggcaacgggagatggtatagaagtccctggggccagcacatacacccaggggctttgaaaatccaccctagtaggtttcttcaagacccaacaggtgctttggctgctagaaactcaacatggcatcatgaacaattggataggatgagagagctatgaaggagagaacttaagcgtcataaaacgttccatgaaaaagctcaggtgaaaaaagaatgagggtcactgcagtggagcgatttcaaaagcaggtggaaagcctaagtgttaatggcaggaggtcaggg

SEQ ID NO: 399612 - DNA, 347 bp, Homo sapiens
cagaagagatgaattcttaagatatttttctgaaggttgcccagggcacaaacaaattggacactttcactgctaaaaagtacactttaatattcttaaagtataatttctttagagcagtatccctattgctggcaagttctgctttcataaaatatgcagataagaagtgttaaatgggattcaagaattatggttttatttgggactgtttgcatactcacaatggttttgttctcattgtttttaacaaaaaagcaatgaagtttggggtggttttttgaaaacgaaactgaaaaaaattatatgtgaaaatgagaactgggtaaataaaattatattttgca

SEQ ID NO: 399613 - DNA, 552 bp, Homo sapiens
ccattctggtggcccaatctcatataatcacttgaaaggaatagcacactgactaatcaaagccatcagctcatcagccactgttccggaatcgaggtccacccatggactcccagaagaaccccttaagtattagtactggaactcctctatgcacttgatccacataaagtacgtgtgtgtgggcagggagggcttgtagaggatcagaaagtgccttacaggagagaaacagagaccaagactagggaaccctttctgctggaggggcatctagacattttgaagaaacacacgaaagaatagagcccctgaggtcacatccagatttcagtttctcttcgggagtctaagagactgttgtgagcccagattttcacattttcttcctctggctgaaatggttggatttagacagtgtggaggcaaacttactgtatggattaataacttttgtgcaagtaacagatatttgtctagccttccttaagtcaaataagaatgtatcataagagtgtagagatatctaataaaaatccaagggcagaaata

SEQ ID NO: 399614 - DNA, 657 bp, Homo sapiens
ctctataactaactctataactctataaatctatgactctataactctataactaactctataactctataaatctatgactctataactctataactaactctataattctataactctataacaactctataactctataactccataactctaactctataactctatgactctataactctatgattctaactctataactaactctataactccatgactctataactctataactaactctataactctataactcggacttcccaccctgcctggagcaggtgggtaaacatttctgagcacacctctgagtggggccctgggcgagtgggccgtgggggtctctgcagttaaccattggtgtaacttgcttctctggattccattttctgaatttaggaaatgaagactcgatgaactcaatggtctcttctgtttacataaactcagtcacgtagaagcagaaccgccagacatgaaacaaaagcccaaagtgacagattttgaaataaaaccaacgaatgagaggatgtggttttccatttgaaaagtgagctccttggagctccttggttgttgatttttcctcccctctcttgttctttccatgcctttctttcattcctgccaacttcctgaatcgaattcgtg

SEQ ID NO: 399615 - DNA, 446 bp, Homo sapiens
ttaatttaatttttatttatttttatttttatttttttgagacagagtctcactctgtcacccaggctggagtgcagtggtgcaatattggctcactgcaacctctgcctcctgggttcaagcgattctcctgcctcagctttccaagtagctgggattacaccacacctggctcatttttgtatttttagtagagatggggtttcgccatgttgaccaggctggtctcaaactcctgacctcacgtgatccacctgcctcggcctcccaaaatgctgggattacaggcgtgagccactgcacctggcctagaatccaagttaaaattaaagagggacacacaaaaccattttaaacacagaagcagaaaaccaaatattttgacgatgttaactacagacagaccctccacacacctacatccactggcagaacttcacgttcta

SEQ ID NO: 399616 - DNA, 448 bp, Homo sapiens
caaatgactattgataaagaatttattttctgtcacctttaaggagagcagagggtggtacagcctttgtattattttttcttttttaaaaaaagtttgtttgaagcctccttcatgaaaacttcagctgtcaaatcttggcaaaaaatgtgtgttcatctatatgatagttcttaggagaatcaatagctatatttttctttcttttttttctaccagagaagaaacttcagaaacagcattaagaaagttttgtgtgcagtcttttagcagcaactttttggagtcacagaacatgtatacattattgtatgtattgcctgaattgaatcgagatttataggcagttttagaaaatagctcctcttgcctttgtactgttactcatatggtatataccctgcgtgccaagttttctcttttccctctacctgcacaccaacccata

SEQ ID NO: 399617 - DNA, 241 bp, Homo sapiens
ctttttttttttgtaaaaaacagggaaagaactctattgggaatgtcatgccctgtccatccatcccatctttttttaatcgggcaactttatattcatcctaccaggaccaactctaatgtccaaactgcgtgacagaattaacagttccttcctctgtattcctaaagtattttgttcacattattattattagagtattaatatattgagtatagaatgttttggtatgcagataatg

SEQ ID NO: 399618 - DNA, 402 bp, Homo sapiens
ttagtctcacaattctctgcatccatcatcacatacctgacgggatgtttcacacactatcaggatttgagtatgtgttgcgctgatttacaaagagttaacactaaaactgaaataaacacttagaaaatatcaatggcctactatagtttatactgaaagacactaatagagggggttaaatgctgttttatgttttcccagtaagtaagattaaagaaaaaaattttaaggaaatgttaagtagggacacaggcgatgctcagtgcttttctcctgtttctaaactagtatggaaagcagaaagccccccgagtttctcccaactaaaacgctaatttgcatttgaagtcatttgattcagacagactggcaccaaatttttagagggaaaaaaactag

SEQ ID NO: 399619 - DNA, 334 bp, Homo sapiens
agagtcaagggcaaggtggcccagcccgggctgggaggcgcgggctgggcgcagccgagcatttcctccgggaggcccagacagcgggcgggtggggcgcggtgggcggggtcctcgcagctggtggcgtttgaagcccccccgaccgcggtgggagaggggcagcctagaagagttggcagcgggcctgcggcgggatggggaggaaggggccccgcgttccctcagcagcggcgccggccgccctggcacgtagttcgcttctggaggcacaggccgcggtgggcgcgccacccgggctgccaggctcaccgccagccgaggccagtcctgc

SEQ ID NO: 399620 - DNA, 505 bp, Homo sapiens
gacaaccactaatgtggaaaaaaacaaaacaaaacaaaaacactccaatatgcaatacaacttcacagctagctcagaactagttctctgcaggtctcataatttataataatttctgcttggaagccagaaggcccgttcctttattgtcaccatagccgaaaagcgtaatcttcaaggcctgattcatccttacctcctccaggaagccttctctgcctgttccagcctatttttctgtccccttattgtacttcctgccagtgcttgcatccctgctttgactcatatccctttggcccttctctcatatcccttgtgcccttctcctttcctttcctgagcctccaccacactccaaattgaatactctaaaaggtttagccctgcatgtggtagaggtgctttgaaagggttttttaggagacagtctaggagatgacccatcctgtgcatgtctactcaccaaaccctgttttataattgcctgcccatttgtatgtct

SEQ ID NO: 399621 - DNA, 412 bp, Homo sapiens
ttgcccaatatgggtcaggagaccctcatccatctttggcatgcacgtactggcatcatgtccaagactgctgtgtaaggggaggagataaatgaggagacacaacaactattaactcccatattctgggaagtgacgtgtatcatttctactcattggccagaaatggtcagctggccctaaggtaatgcagaaagatttggaaaattaggggagtaaatgaaatatttggaacactttcaatccaagcagttcttaatgtttcccccactatcatgctagcccattccaccacctttgcctgaaatactgcaagtatcctaattaatcttccttatcctaatcatgctccaatatgatctattccttcttccattcttgctacctccaactttttgttttccaactatca

SEQ ID NO: 399622 - DNA, 1384 bp, Homo sapiens
caaatatggaaaattctgatgtttaagcagaattagttatatttcaggtagatggatttgaatctttcaaaaccccacatgaggtaagtatatttcttcagccctgcttttcagcaaatagtgggactgcagagcaggctgacatttgtcttagctacccaagaaggaccaaaattgccttcctgttaggttttgcctgcatgtttagttatgagacagcctgagaccctgtttttctttcgtattagctgacctcggtattaacctcaccttccctcctccccttctttttttggtttctggttttccttttcaatttgttacaagtacgcttaaagcacgaaggcgttgcagttgttagagattattttgttctctggcggtttcagttatcttgactttaagctttcttcctcttagacaaataatataggcagctgtcatatctgagggttttaaattcttgttaaccttttaacttattgtgattaagatgaatttgaaaagaaagccatttcctctatttaagaattgccttggcaagaagttggaaatcctagaaccttgttgcaaaggaatgtgtcgctatttgttatgaatgagtctggttgggtccagtgaaaccttcctattgctaatgtgcaattaggtatcttcagtgagggagagactgtcctctaagcaaagcagctaaagctccaggggcaaagggcagagcgaataagcaggggcctgggtcatctattttgttctctggcctgaaagcatttgactgctcatctcacatcccttctttgccctcagtcgttagatattaggtctactgtggttgaatgagactgtctacaaaagggttccagtgctcaccaaaagctgtttgtaaatacgaagtattacatattatctttcctaaggttgtgagaacctagaagaactgcctttgattaatgctagaaaacagctcttatgagacataaagttcatttaataatcccacaaatgcttacgagcaactattctataccaggcagttttctagctttttggaaatagagtggtgaacaaaatagatgaacatctctgccttcatagaacttagattctagctgggcacagtggctcacgcctgtaatcccagcactttggctgaggcaggtggattacttgagctcaggagttcaagaccagcctgggcaacatgttgaaatcacatctctaccaaaaatacaagatattagccaggcgtggtggcggacgcctatagtcacagctactcgggaggctgaggcagggaaatggcatgaacccaggaggcagaggttgcagtgagctgagatcccaccactgcactccagcctgggcgacagagcaagactccgcctca

SEQ ID NO: 399623 - DNA, 495 bp, Homo sapiens
tctgaaagtggtatactcagaaattttcctccagactgcctttgggagttaaataaattaactttcttatgccaagttaacatgaacttagcccttaaaataactttgtgaggaaaactttactgataaaacagtctgatatagtctggttgtttcttctctccaaatctcatgttggcatgtggtccccaatgttgagggtggggcctagtgggctgtgcttggagaatgggggaagatccctcatgaatgatttggggccctctttgccgaaatgagttcatgtaacatctggttgttaaaaaagagtctgggacatctgccctgtctctcttgctcccgctcttggcatgtgatatgcccatacccccttctccttctgccatgagtaaaagctttctgaggcctcaccagaagtcaagtagatgttggtgccatgcttgtacagcctgcagaactgttagtcaaataaacctcttgtctttataaattacc

SEQ ID NO: 399624 - DNA, 136 bp, Homo sapiens
ctttcacaaagtgatgctctaaaaataccaagtctccttagattagaatataagctcaatgtaaacccatccaaaaatctatccaaatatatatggtagaattaatataaagtatatatatatatatacacacaca

SEQ ID NO: 399625 - DNA, 429 bp, Homo sapiens
cttgaccaacatggtgaaaccctgtttctactaagaatacaaaaattagttgggcatgtttgtgtttgtctgtaatttcagctactcaggaggctgaggctgaggcaggagaatcgcttgagcccaggaggtggagtgcagtgaactgagactgtaccactgcactccagcctgggtgacagagtgagactccatctcaagagaaaaaaaaaaaatttgcctattcgtagaataggcaaaattctgttttgcattgctctaagggaatgcctgagactgggtaatttatgaagaggtttatttgacttacggttctggagacaaggtatggtaccaacattttgttggcttctgatgaggccgcaggaagcttttactcatggcagaagatgaggggggaaaaggcacatcacatggcaagagaaagag

SEQ ID NO: 399626 - DNA, 290 bp, Homo sapiens
ggtgccagaagtgggggatggagtggtaaggtggtcttcctctggagtcgggctgcccagcggccagactcttctatggccactcctggctgaactcccctcagcatccacgtcgttctgccatcgctgctctgccagtgtctgctggtatgctcttcttctcctctagacatccagccatttgtatctgtgtctgcttaaggtctctgatttatatgggcacagtatggggtgcgtggctggccagagtgatctcggaaaatgcaacacttgggccacttcgtgggcag

SEQ ID NO: 399627 - DNA, 402 bp, Homo sapiens
catttctaacttctatataattttaccttttcatatattagggtcatcattatgaacctcagccatgtattatgctagtcctgtaatgcctttgtgctaatgatttgtgtagaatgatggcagtcccattgcttagcacctctcacttccaccctaccactctctgcagaaatacagactgttaagaggaaaaagtacatgcacagacaatttctctgtagcatcattggaagctccttaattttcaataatgtgggaagtgaattataattgagtagtttggtgattaatattcagtcattaaaatgatggtcatagagactacatagcaacatagacaaatgcttcgcataatacagggtaaaattgtgataagaattatacaaatagatgatacagaag

SEQ ID NO: 399628 - DNA, 454 bp, Homo sapiens
caagcaattcgtcagacaccgcctgggtgatccgtaatttcagtcaagttgacactgtctacttgaagttagcatcagatcccacaggttgggggctcagttccacaaggctgccgctacttcacgtgctggttgtaagttcctggttgggacctgaacttcaaccaaacatctaaaaattgaagattcccttgaccctttgctcagattttattaatttgttagcctcattcacagaactcaaggaagcattttgcttagttttacccatttgctatgaagaatattgcaaaagatacagatgactagcccgatggaagaaccctcctagcaaattaatcaaaagaaggggctttgggataccctgattttttttttcttttgttttgttttgagacagagtttcactcttgttgcccaggctggagtgcaatggcatgatctcagctcactg

SEQ ID NO: 399629 - DNA, 824 bp, Homo sapiens
ttgattccccttcaggcaaagtgagtggttcccttctctatgttcctgcaacatttttttcctacctcagtcatagtttttgtaacattatgttgtaattttctctctctgtcttcctccatcatactgggaacttctggagggcagcacttcttgtgattcatcactgtgtcctctgtacccggcaacaacacagcatagggccagacacgtagtggttgccttactcatttattgaatgctctgctaattgtcaggtgcgctgctaaaaattttggaggcattaattcaccttctaaggttggtactattatcccttttgtctttttttttttttttttttttgagacaggatctcgctctgtcacccaggtgggattgccgtggacgatgacagctcactgaagcctagaccttctaggctcaagtgatcctcccacctcaccctctcagagtgttgggattactggcatgagccactgtgcccagctgttatcccttttcacagatgaagagactgaggctcagaaagatggaataacttgctcagttacacatagctaggaagtagggagctggaattttgtgtatttttttttgtttgtttgtttgagatggaatcgctctctgttgccaggctggagtgcagtggcgccatcttggctcactgcgatctctgcctcccggattcaagcgattctcctgcctcaacctcctgagtagctgggactacagttgtgcgccaccacacccagctaatttttgtatttttagtagagacgaagtttcaccatgttggccaggatggttttgacctcttaacc

SEQ ID NO: 399630 - DNA, 514 bp, Homo sapiens
tcatctttctcccatgctggatgcttcctgcccttgaacactggactccaagttctttagttttggaactccgactgactctccttgctcctcagcctgcagactgcctattgtgggaccttgcaattgtgtaagttaacacttaataaactcccctttatatacatatcgattccattatctctgtccttctagagaacctggactaacacagtgggagaagaatgcaaaaatagctctggatcttcatgtagttataattaatagtaacaagtgacattttgtgagcactaactatttcaagttactgtgcttttcagatattgtctaatataatacttttggtggtcctatgagaagagccatcattatctctatttttagaagagaaaaaatgatgtttaagcaacttgctatcttagcccgggttccatagaaaacggagcttacatgtgagctttttattggagaggagaggtagtaatcccagggtagtgagagtaaggaaaaaaac

SEQ ID NO: 399631 - DNA, 1794 bp, Homo sapiens
  misc_feature (863)..(863): n is a, c, g, or t
  misc_feature (1119)..(1119): n is a, c, g, or t
atttaaaacatgagcttttcttccatacttgtgatactattctagttacattacaaaaattaatcttaggtctctacctcacatatatataaaaatgaactcagaaattgatcaaagacttaaatataaaaccaaataaggccaggctcaggggctcacgcttgtaatcccagcactttggaaggctgaagcgggtagatcacctgaggccaggagttcgaaaccagcctggccaacatggtgaaaccccgtccctactaaaaatacaaaaattagctgggcgtggtggcatgtgcttgtaatcccagctacttgggagggtgaggcaggagaatcgcttgaaccaggaggtggaggttgcagtgagccaagatcaagccattgcactccagcctggtcaacaagggcgaaactccatctcaaaaaaaaaaaaaaaactaaaaattcttagaggaaaacaggccttaatttgtgtgactccttgattaggctgtggcttcttagataggtcattaaaatcgtaagcaaccaaagaaaaaaacaaatttattggacataatcaaaatttaaaatgttcacaataaaaaatttaagacttataattcaaagcacattatcaaaaaaagtgaaaatacaacccatagaaagataaaaaatattttcaagccatgtatctgataagggtctagtatccagaatatataaagcaccattacaactcaataaaaagacaaataacctgattaaaatatgtgcaaattatttaaattagatatttctctaaagaaaacatacaaatggccaataagctcataaaaagacgctcaacctcattagccattttggaaatagaaatcaaaggnacagtgagagatacaacttcataccactaagtttggagttccttagaaacttaataaaattaccatgtgacccagcaattccacccctaggtagatacccaaaagagattaaaacatatgtccacacaaaaacttgtacataaatgtttatagcagcattattcataatagccaaaaagtagaaacaacctagatttccgtcagctgatgaatggataaataaaatgtgctatatccatataatggaatataaagncataaaaaggaatgaagaggaataaagtcatgaaaagaaatgaagtactgagtcatgctacagcatggatgaaccttgaaaacattatactaagagaaagcaaccagacgaaaaaccacatcttgtattattccattcatgtgaaatgtccaggtgaggcagatctataaacacaatatagattagtggtttccagaattttgaggggaaggataatagggagtgacagctaatgggtatgggatttctttttggagtgatgaaaatattccagaactagataatggtgatgattgtacaattttgtgaatatagcaaaaaacactggattgtgtacttttaaagagtgaatattatggttatgtgaattatagctttaaaaattaaaaactaggccgggcgcagtggcttatgcctgtaatcccagcactttgggaggccgaggcgggcagatcacgaggtcaggagatcgagaccatcctggctaacacggggaagccccgtcactgctaaaaatacaaaaaattagccaggcatggtggtgggcgcctgtagtcccacctactcgggagactgaggcaggagaatggcgtgaacccgggggggcagagcctgcagtgagccgagatcgcgccactgcactccagcctgggtgacagagcgagactccgtctc

SEQ ID NO: 399632 - DNA, 728 bp, Homo sapiens
ggagcaaccacatatacttctggggtaaataagttggtgcaaccggtactgaaaactgtttgctagtatctactaaaaccgagcacatgcacagactacaaccaagcagttccactcccagatacacactcaacagaaatgcacacactcactcaacaaaagacgtgtactagagtgttcatgtacttactattcataatagtccaaaaatgcaaacaaccaactgccaatcaaagtcaaatgtatatctatattagggatatatacaatggcatatacacagcaatgagaatgaaatgaaccagctcggcacagtggttcatgcctgtaatctcagcactttgggcgggtaaggcaggcagatcacttgaggtcagaaatttgagactagcctggccaacacggttaaaacctgtccccactaaaaacacaaaaattagccgggcatagtggttgcaggcctgtaattccagctactcgggaggctgggttgggagaatcgtttgaacccgaaagccggaggtcgcagtgagcggagatcgtgccactgcactccagcctggacgatagagcaagactccgtctcaaaaaaggaaatcaaaaatataaaataagatgacaggaataatccgcaaaagatcagtaatcaaaataaatataaatgggctaaagctacctattaaaagacaaagatttcacacccataaggatagctactatcaaaaaaa

SEQ ID NO: 399633 - DNA, 394 bp, Homo sapiens
attttcagccccaatccctctcctggagaggagagaggagctagggattgagtttataatcaatcatgcctatgtgatgaagtcttcagaaaaatccctaaacaatagagttaagagagctttcaggtggctgaacacgtggaggtactgggagggtggtacacctagagagggcacagagctcctcactcctttccccagatcttaccctttgtacttcttcatctggctgttcatctgtattctttaccaaataataaaccattaagtgtgtttccctgagttttgtgagtcattctagcaaattattgaacacaaggaaggggtcatgggaacctcaaattatagtcagtcactcagaagtacaggtaataacctgggacttgtagttggg

SEQ ID NO: 399634 - DNA, 424 bp, Homo sapiens
agggaactgcccactaagagtttcaggtatctgccttggaatcccctcatgttttcggctaactgttaagcagtgtgtacgctgactgagactttatgattcaagctaagaactactagggggctgtaagctgacaactcccaaaggtttaaaacagctgggagacgttcacattctgacaagtcagaggggaaagactttgtgaacacccagggtattcacttagacctcagagaagctatgccttagcagtggggctgtataccttacccaacaaacctttgaaaacaagtcttgaatggatcaagctgatccgccaatgaattaactgccgcaaaatgttttgcaggcagaccagaaaataaaagaaatccagacaacattcaaaagcccagaatccagttaaaaaataaatagttattaa

SEQ ID NO: 399635 - DNA, 427 bp, Homo sapiens
ggaaacattcagggacccctacaagttactcaaatctacacttgtcccgaaattcaggatatccatttgtgttggtgacatcctattttttttcattcaacacagaagccagagtggtcagctatttttgaggtgaaagttaaagcaggcataactgtgctgttgacaatgttggcgactggccccagtgaagggggttatgcagacaatacccctaagtacagtggcagattgggagggtggaggtctctcctcagtcacatcactccagatgagccatcagcggctgcaaggcaagatttctactaacaacgtagagatgtgccacttccaggaatctacctacaaatgagggcaaaaccagagttaacctaccatagcagaaacacaacaaagaacacaatgagatacagtgaaagggagtcta

SEQ ID NO: 399636 - DNA, 420 bp, Homo sapiens
tggctttcatctgagcaggagggagacagagtgaaccagtgaaggggacctgggcagcagagccaggaagcgactcgccaaggccacctagccaacacgtggtaacatggggctcacaggaggcttttctgactctgcgtcaaggcttttcatcatgaggagctgtcacttagcatctgttcccatacattcagcctagagtgcacagcaagcaattgtccaagaggcaggcttctgacactttggaaccggaggctttgcctgcatgtgtcacctgtgggatctataagggtgcccatttcagatggttattggaagaaattaagtgagataatatgtgcaaagttaggcagatcacaaggtcaggagatcgagaccatcctggctaacacggtgaaaccccgtctctactaaaaatac

SEQ ID NO: 399637 - DNA, 195 bp, Homo sapiens
tcttaaagaaagttcatcgtactccttttcttggggaaagtttattatttacaatcaagaactttcgaattaatcccaaatttataccaaagtattgtgaaaagcatttatatttcagatctttttatctcttttttcctcctctggattgtatgcaaggtacacacacacacacagacacacacacacagacac

SEQ ID NO: 399638 - DNA, 597 bp, Homo sapiens
ggttctagtttcttataatgacagagtaccatggttggaccaactgtcacacatgtaattataaaagctgaactaaacatcaatgaactaaaaacgaaaaaaagaacaggtatactgagccaggcccagtggtttgtgcctgtaatcccaactactaaggaagctgaagtgagaggatcacatgaggtcaggaatttgagatgagactgggcaatacagtgagactcctgtctccaaaaacataaagtaaaaattagccaggtatggggcatgtgcctgcagtcccaggtacttgagaggctgagacaggaggatcgcttgagcccctggagttcaaggttgtagtgagttataatcacaccactgcactccagcctgggcgacagagtgggacactgtcaataaaaataaataaataaataaacaaacaaacaaacgaatgaatgaatgaacaccagagagaaatcaaagaagagtctacctttccctgcctgccaactgtctactgtcaactgtctactaatcagaaagcataactttgaaaaaatacatgtaagatttttatttatgttttgcctaagggcactcccccattca

SEQ ID NO: 399639 - DNA, 503 bp, Homo sapiens
ttggagttttatcacctgccaggagaaacaggtgtaaattaacctagcaaacgtccagttacagcccaaagtgctctgaggagaaggagcagggtgaagtgacagaagatgcaactggggctaggggaaggggccttccaccaattgagcttggtcgctgatagggctccttcgcttaagaataagttcttccgctcccttccagttccctggagaagagtccctgaagctgccacctcttttacaggggcctgcctcaacttcattctggaagaattgcctaacggacaaataggtggcaggaagcactgagaggacaggtacctttctcttcaaggcttatctgccgtgtcgggctctttaaagaagcaattatctgcccagcggtggctcacacctgtaataccaaaactttgggaggccgaggagagaggattgcttgagctcaggaattggagaccatcctgggcaactcaacgaaacttcatctctactaaaaatta

SEQ ID NO: 399640 - DNA, 393 bp, Homo sapiens
aatccttggatatttggttggggaaaccagggtttcgtttggagaacagaagaaaaaaaggagccttacatttgccaagcgcctacattgtaccaggcactggactgggtgctttacatggattttcatttcagcttcaggaaccctcatgaagtagataccattagtcccattttgtagggaaggaaactgaagctcagagaagttaagcaacttgcccaaggtcacacagctagtatggagccacgattcaaaccagatctgtttgtgtccaaagtctgtggtctttctgcttccccaaactgaggctggagaccatgaaagtaatgccaagccttctgcttatgtgattttctcctgtactattcagcagccctggagtatgagcggaaa

SEQ ID NO: 399641 - DNA, 341 bp, Homo sapiens
gagacggagtctcacgcccaggctggagtgcagtggcatgatctcggctcactgcagcctctgcctcccgggttcacaccatgctcctgccacagcctcccaagtagctgggactacaggtgcccaccaccatgcccggctaactttttgtatttttagtagagatggggtttcaccatgttagccagggtggtctcgatctcctgaccttgtgatccacccgcctcggcctcccaaagtgctgggattacaggcatgaaccaccgcgcccggccccattttattcttttatcattttatgaatacatgtttttaactcaaaacccttctgtcgtcttctc

SEQ ID NO: 399642 - DNA, 427 bp, Homo sapiens
ggggaggaaacggctcacggtacctggattcggccaagcctgttacatggcctggaagtaccagggaaaagtctgctaggggttcctcccaagacagagggatatatttcaaggtcctctagcatgcggaccaggtgtcatttttacattatgtgtgggtgcaaatgtgctagcacaatacaggagagagtcagtctgaaccttgatgcagagatgggttaccccagccaatcccttgtccaaaccaactcacacatctaaaaggaaaacaccactgaggatgctggcgatgaatttatgccttcattcttgccagttttaattcttattcttcaaattaaatttcgttgcttgatggcatttgtaactccagtgtgttgttcacttttcataacaccttcctctctctcctctttctctctccctg

SEQ ID NO: 399643 - DNA, 1820 bp, Homo sapiens
aaaggtcagctgattagcaaccttaattcttctttgtaccctaattacgttcacaaattttggagattaagacctagacgtctttgggagccattattctgcctaccacaaagctcaagaaggttaagatgaaaagctgttactgccacttgatgacaggtggttgaggatatcattgcatccctgctgaaaacttcatgctggagtgtgtgtgattagtgggccgaatgcaatatttctctaaggcatagaatgagactcagtactttcccctcacctcgctacaggctaggatgcctagcagctaagtctgtgctgaatgttattaatgagttaactactaattatatgagctgattccatcagaatatacctgaatgtatataagtagtaggcagctaatatattcagataaaaatcattttgaacaaaactgaaaatatagccaaattcaaaatatagtttatgtaaataccatatccatttttttcctttcaacaccttgatatctgcattcaaaaattttacttttggcaatcactatagtagttaagttggaaggtaatttttttacagaataaaatatactgatggaactcctatgaaactgacaaataaacctatttgagtgggcatatgaggtaatactaaatatcttttttttgcttttatagaaagctagtcaattaattgtttcctttacacaggttttcatgacaaatcattgagattagtcatgccaactgttgagcaggtggctctcctccttggcatccctgttccttatgtacttccacccatgtcattctttactcaagagagagaattcttggcagtgaaacaccatgtggcttctcaataattgtgtggattaagcatccacaatgtacacataatgtgaaacacactgttggatggatataaatgcccattttaccttttatcttttcaatttcttcccactcctaaattatccctcacctgccaaacatagccccggattcaaaaataattaggattcagattctgaaaatcatagcttctataatttagccttaccagattttcagctttcactaagtataaatacattctaatttaaatgaacactaaatttcatcaaaattggtggaaaacactctggaaaaactatggaaaacacttagaatgtcgcctgtacagagtaagcattacatagagctagtagtagtagtagtagaaaattaacactttaatattattttgataatataataactcctgaattcctatatgtgtttctatttatttgtacttcctttgaaaaattgtgatttctattcttcccatcaaatattacaaaaagaaagtatgtattttatatttggccatgtctaacatatgtcaaacagctaaaattgattcaacttttagcagaattttattggaaatgttatcctttgttttcataagaaaaaatactaaatttaattaatgattaaattgacctaggacatataggcaagtgataatgctagtaaactttctactttccttgctatctcagttgtaaaaactaaaataacctcgtatctgatgactccatcctatattagacataatgggagagatctattgtgacatataaccctttttgccacttgccttaggactcattatgaaagtgttttgcttaactctttgttaaaattatactgaaataatctactttattcatgtccccaagctcatgtacgtatagcaatctttggtttaataaccgttcagttctcagtaaatagaatatttgttgtagcaatcactttaatgtaatgagaaga

SEQ ID NO: 399644 - DNA, 289 bp, Homo sapiens
gatcagcactgaacaaattacaaaatatctgccctcatggagcttatacttggttaaattcctatcagttattttctaaatacttggacatatcaaataaccattaatttttttttttcttaaaaatcctccttccagagacctctgctttactgccattttttctgtgggctttttcctttatatctgttcccttacagtgtacttatttggttctatttgcttttttactctctagaagattttgggattaaaaaaaaaatacttggttgctaaaatttcacactga

SEQ ID NO: 399645 - DNA, 457 bp, Homo sapiens
ccctcaacaatgcagctgcagtggtcctccagcctctatctccagtgataggaacttgcatctcttcagaagtccattgcatctgtcagatttcaggaagacaggaggatgggaagaagaggcaggggaagaggaaggagaaggagattctgccttcttatagaatccagccacatgtcctatatctggagagtgattataacgtagcggctcctaacacagcggctccaggaccagattgccttgagccaaacctgggtctgcctctttctggtttgaggtctgtggcaattgaatcaacctctgtacaactcagctcctcttcaataagatagagataattataggacttaccttgtaaggttattataaggaataaataagttaatgcaaataaagtgtttgaatactgccttgtacataggaagctctcaataaatattacctaattctacta

SEQ ID NO: 399646 - DNA, 456 bp, Homo sapiens
gccacggtgcccagccggtgatatccttttcttttgaatcaattgttctgttgtaattagttaatacctcgtgttatttctgcataatgtcagctcaggaggtttttcttttctcttttaagcctcttctgttctaggaagcctagaacttttctagagcagcagttcttgaagtgtgatccctggaaatatttgagatcctctcaggagatctgcgaggtcaaagcttcataataatactaagaaattacttgcctttttaactttcaacctcttacaagaatacagtggagttttctgtaggcaacatgacatgtgattttgtaacagattgatgcaaatgcagctcttaggagtcactgtctgctattaaaccatacattacattgaggagacttgcaaaaatgtaaaatataccactcttctcaccaattttgaagggagattggaaaatac

SEQ ID NO: 399647 - DNA, 634 bp, Homo sapiens
cagcgtggtcggctttgacaaaagctggcttcgtgtcttcaaagcactgaggccggtgccgaaactcatagaagtagacaggtgcaccagcatctgacaaaaggtcagggaaggtcaggcatgcatgcagcgcggagcagggggctggctctgtgtccccacctatcaagtcttggatgtatagacccaggggtgggacagctcagagacagctcacttcccccttcctcatttgaggctggaatttcctgctacagcagtgctcatatccctagtgatgaagagctcacgtctgagaaggcagtagttctgcttctcaaaagaagtcctttacccattattggaaaatactttcttttcattactgaactgtaagggttcttctattctggatatgattattttgtcaaataattgtactatgaatattttcttccagtctgtggtctgccttctcattttcttaacaatatttttaaagcaaaatgtacataagtgaaatctgccccttgaaccattttaaagtatataattcagcggtttttagtacatttaggatgttgtgcaactatcaccactatttaggtccagaaccttttcatcaccccaaacagaaacctcagacccatttagc

SEQ ID NO: 399648 - DNA, 546 bp, Homo sapiens
agtgcagggcagagacctaggaatttggataatgggcaactctgagatgtcaggcaatggggaaaggagagctcaggtgggactaggaggggcaggaagcccgagggctgcagtcaccatcttcagaccactccagagcttcctggggagcaggaacagaggacaggccatgaagcccagaaaggcagatggcagcagaatactaggaagacacctccaatagtctgtccaaagagggtgaggggattaggaagtacagacatatcctgagttacaatttttctattttaaaatgctatgaaagctatatgcatttggtaccctcctcaacttatgacgcagttgtgatggggttataaggttacttcggataaaccaactctatattgaaaatatcgcaagtcaaaaatacacgttcgggccaggcgcggtggctcacacctgtcatcccagcagtttgggaggccgaggcgagcagatcaggagttgaggagttcaggagttcaagaccagcctggccaacgtggcaaatacccatctctacta

SEQ ID NO: 399649 - DNA, 651 bp, Homo sapiens
ttccactgtaatcaactcattacagaatgccatccttggagtccagggttgggtgctgagtattggcaaatgatgtattgtatactgttcttatcattgcttccatggacacttaatccatgaacttgttgatgaggaacaagctagcttagttactccactgatttaggtggattatggctgcatgtaggtaatgtgagatgatctccatttaaattgactattacttacagtttcttaagataatagactcactctacattttatcttttttaagtgtgaatggagtagcatctagaaaaatttagtgctgctgccagtatttttatacagctgcaaatagttaataaagcatacccttcagggaaatttaactaatttgacaatttttttattcttatagcaagacatttatgaaaagaattgtagcccagcacttatggatataaaagatcttaacagcttgaggtgcaatgaattgtacatactctaggaaagcaattctacattataaagtattaaagtagaaaaaatgagttataaccatgatctgtcctaaagaaaaagctaaagaattgtttgagaatgatcaaaacttggttttaaaaaatacgtaacttttaaaaacctttgcactatgcatgtttaaag

SEQ ID NO: 399650 - DNA, 164 bp, Homo sapiens
attcttatttggcaaatgcacagtttagtattacctctctgatggcctttactagaaaggcagttttagaagctattgtgatccactaaggaaatgttttaacagctagagaccactgcttgcctgaaagggcgttcttaaatttggtgcatcaaaaaaaaaaa

SEQ ID NO: 399651 - DNA, 635 bp, Homo sapiens
gtagagatgggggtttcaccatattggccatgttgtttgccttttttagtcacctgtgcatggttggatattggccatggtaattgttttacagctgtgactttttctgtctccttctcagaatttatgtctccatttacccatgaatagtatctccagagtatggcattagctcagttctcttctcactttatttagtcttcttaagtgcttcaactatcacatgaatgcacccaattttctgtctttagctctgatttttctcctaagctccagactcataatcacgtaaccactacctgctagtcactgccacccgccagctagatgtctcacagacatcagcaactaacttaatatggcattacctaacccattacttactccctaaacctgcttctcctctgttacttcataccttggttaatagcaccatgtcatcctttcgtgaaaaccagaaatctggagatgcagagtaagacattacatagctttgccctcaagaaatatgctgtcttctaggatacatatctctctctccttaaaaccaacagtattttctccttgtcactcttatgaaacttagaagtttacattttgataagagtagaaattctttgtatttacaaagttat

SEQ ID NO: 399652 - DNA, 456 bp, Homo sapiens
tgagcctggaacatcttgttattgtcacaaggtatggacatgctgaaagaatgatgggagcctgtcacaaggacacagtgctagcttgaaagtgctttgattggccaaaccagggaccatgtggacaccaaaataattatggacagtaaggaattatatgccattggagaaaaaataggaatttacacatccatattgattactaactaataagtggaaagtagggaggctatgcttacagcggcatgctcaggctcaccaatatgcgtggaggggatgggtgctgtgaaatcatcctttcatggccattgtagtagagactggatcaggggagaatcatccatgagtgtcacgtttaggaggaaattgtgataaggaacgggacatttgcgatgtcttaaaagtgtctccccacaaattacaagttcaaaaaatacatacagtggagaaatcaaa

SEQ ID NO: 399653 - DNA, 366 bp, Homo sapiens
gcagtgctgctggcttagcctgcttgcagagaggcatgggctgggacctgctgccagccctgggaaggcacacagtcttcccatctccagagtatgctgtcagcctgcagtaattcagcaaagattgtggaatcctgagctggaaggaccctgggggatcacctggttctgggatgggaaataggtcacaggtgatgggttatgtgtgaagccacttcctcatccagggcccataggagtcatccctctcaaactagctcctcttcgactgaacctggccacagctctgagtccttctctgtgtggctgtgctgttcaggactcttaggtgcaaattttagaaactgaactcaaaccaacttacgc

SEQ ID NO: 399654 - DNA, 600 bp, Homo sapiens
gggggatgaaggaacagaattatgtcatagttcgtatattttttcttcctcttactattggtacctcagtaaacataatttggacaaattatgtcaatctcattgaaggattttgggggtaaaattagttgcatgatttttgatggtcatcgttacatgcatgcatatatttccattgtgtcagataaaaggtctttatgagatgacccctagatattatattgatggggcttaaaatggagaagcacaagaattgtgcttataatgtccttatagccatgtggctaaaccattattgaggtatggcctgtcatttggtacactactttcataaactgtagtatggctattttgataagtgttttattcacatggaaaagaccttgtaggaatcattaaataaattaaaaagccatatctttatttttatttgtcagtcaaggttataattctcagaaaaattctccttaggaaaagttagatatcttctgcttggctcatgttttcatgatcattttatttttaatgtaataatgtaaaacacagcatcctccattcttataaacaatatcatagtaattacagttccagattgtttga

SEQ ID NO: 399655 - DNA, 468 bp, Homo sapiens
tcctatccaagaaaggaggtgctggccaccagcaggtgaagggacagcttacccccataactggagggacagaggagggtttctgtgtgggtacagctggggaagtaggtttggttgtgggaggataaagtagccctgctttatattctcaaatgagaatcaaggtcatcaactgagagtgaggagcgggaattggaaatttgggtgatggggaaggcagataataaaatagctagccctgaatgtgggagcgtgagttgactagagtaatgtgggagaatggtgaaacacacttgagatttatggttacagatgaaatgataactgtatatctttatccagattcattaaatagcctggggataagaacagagaaggcagagagctaggtccaaccagctataaggaatgacaggtgagtttgtttgatgaaagacagcagcaaagggtagagttgtaaaaaaaaaa

SEQ ID NO: 399656 - DNA, 170 bp, Homo sapiens
gctcttggatttggcaagaagatcactggtgaactcaaaagagaaatgttggtagattagtgagaatagaaacagagtgtaggagttaggaacagaatgtgggataggaaataaaggcaactcacacaaatctcagattaggggatttaggaagcaaaaggaggatggca

SEQ ID NO: 399657 - DNA, 387 bp, Homo sapiens
cctcgatgggacagtgtcagtgattgtgaaaggagagtactggtaggtcagatgaggctgggctcctggccatcagctctttctgtctcttaccaattaggtctgtgccaaggcatcttgggctccgccaccaacttgtcccactggctcttgctaaaaggtaggcaaccatgtgagcgtgggcactggtgctggtacttaccatatgcccgcttttcctggaactgacctaggtcccatgaggaacacattgggcagtcaggcacaatctttaccctcaagaacactgtaggctgaggagatatgtgtgctctaagaatatggttgagagttgatgattccatagaggttcagaagagaaggatactctcatgggccctaaggtag

SEQ ID NO: 399658 - DNA, 499 bp, Homo sapiens
gagtaactttgaaaatttgataagcgcaaaggagtgaaaatagtcatagtacaaacaaggtctttgtgtcatatattaaatgtagagctttcttgttagtcaagttaactatatggattgtgtattttaagaatacatattagaatacatattgcaatgtaaatatatccagtaaatgatcaataaatggggttatcttcatgtcatatagtctttctcttcatcaaaatgaagttattcattgactacaatttaatagcaacaactgtacttggattagttttgcaaacaaatgtgttcatattagtgaaaattacattgaaataaagcaacacgattttgtttcttaaaagcaacctttagcatatggcagcctgaggtctatagcaattccatttgttaaactcacagggctctatgtgccaaacccagcattaagtccttatttagtataaactttgccaaaactatcagtaactctgatttaattctgcaggta

SEQ ID NO: 399659 - DNA, 267 bp, Homo sapiens
ggtcgaaagggttctcctatggaggtcgtctgaactctaggaagtacaggagcaggacaagggatgagcatgatcttacctgatctcacccatgtttttctgcctatcaatttggaggaatgggaaagtgtgacaggtggccactaggtggcgttatcaatgtgaagaaatcaggggtgtgttaatacatcacctgtcctgtacagtagagtggaagagcagataaacgcctagctggagaaaataaagcttctcatataaatgctt

SEQ ID NO: 399660 - DNA, 323 bp, Homo sapiens
ttagtaacttttttttaagctgctccttgcagagcagggctaacttccaggcagcgcgcccagagccgccttagtaacttcttaagctatactggtacatattttaatatagaagattatttatcaagtacaagaattatattctgccatgtggtgacaaatgatgccaagtataaacctaaatagtgatttcaaaagtcaaggtcagacatggtggctcatgcctataatcccagcactttgggaggctgaggcgggtggatcacttgaggttaggagttccagagcagcctggccaacgtggtgaaacctcatctctacta

SEQ ID NO: 399661 - DNA, 534 bp, Homo sapiens
tctataaaagcataaatcttactctcttatgttaaaaaggtagattccataaaagatgctctcattcatctttgattctggatgcttacaatccagagatgaacatctgtgtgtgctataaaactagtagtgccagagaatggcaacatccgaaatcagaaacctccaaaaaaatccctgcaccttcttaaaggcaatgggaaattggcaacacttcctttaactttcaaactaatgctgcaactgcacatccagaagtccaagaacacaagggagtaaactggaatgggggatgacaaagagtcctggagcttcactgtcaacagttgggcataagaatgccaagcaaatattcagactgactcacttactgggcctggaggctgggatgtaaagcccaaggaagcctaatggtaggaggaagaactgcagaggacactgctatttctgtggtgatgggaagtcattttaatgctctgcttgtatgaaaaggataaaattgctttggccttttgtctgaagcttagtagacca

SEQ ID NO: 399662 - DNA, 344 bp, Homo sapiens
ttaaaactagtgcaattaagaccaaaataaaaaaaaaagattttgagaggaagtaccattttataattatttgcagtagacatagtagacataattgtatctttgtaaaatcaatttaaaaaccctttaagaattcagtaagatacgtggttactaaattaatattaaaagtcactagtgtttttctctacaaaaaacaaacacctggaaacactacaaaaataaagtaatcaaagtagcatggtactggcatactgacaaacatatagatcaatgaaataaaatagacagcccagaaataaaccctgccaaaggatttttgacaacagtgtcaagaccattca

SEQ ID NO: 399663 - DNA, 367 bp, Homo sapiens
gtcttgctctgtcgcccaggctggagttcagtggcgtgatctcagctcattgcaacctccgcctcccaggttcaagtgattctcctgtctcagcctcctgagtagctgggattacaggtgcctgccatcatgcccagctaatttttgtgtttttagtagagacagggtttcatcatgttggacaggctggtttcgaactcctggcctcaagtgatctgcctgcctcagcttcccaaagtgctgggattacaggcatgggccaccacgcccagccactgggcagattcgtgaataaaggagccatgtagaaaatggggagatgggcattcctggcacagggaacaacagcaagtgcaaaggctatgtt

SEQ ID NO: 399664 - DNA, 219 bp, Homo sapiens
acttcaacacctcattgtcagcactggacagatcatctagacagaaaatcaacaaaaagactttagatttaaactgcactttagaccaaatagacctaaaagacatctaaagaacattttatccaacagccgcaggacatacattcttctcatcagcacatggcacattcttcaggataggctatgtgttaggccacaaaacaagtctcaatacatttt

SEQ ID NO: 399665 - DNA, 242 bp, Homo sapiens
attctctttctcgttttctctgacaaattggcagcctgaacctcggggttgtgtgtgtacccagaagcagcctcttagcccctttacccatctctctcagttctgtaccagaccaggaatcttggctgtcctatattcaagggaaagaagagcctggaataagaggctctcttggctctctgtggtgctggaatcttcaagtctgattgttttgagagggattaagaagctctctcttctct

SEQ ID NO: 399666 - DNA, 412 bp, Homo sapiens
aatataaatgtgcaaaagatttgaacaaaggcttcaccaaataaaatgtaagaatggcaaataagtatatgaaaacatgctcaacaccattaatcattagtggccaggcacagtaactcatgcctgtaatcccagcaccttgggaggtcaaggcaggaggatcgcttgagcccaagagttcaagaccagcctgagcaacgtagcaagatctcatttctactaaaaactaaaaaattagctgggtgtggtggtgcaagcctgtggtccaagcctgtggtcccagctatgcaggaggctgaggtgggaggatcccttgagcccatgaggagcccctttcagtgagctgagatggcaccagtgcactccagcctgaatgacagagcaagaccctgttacaaaaaacaaaaaaaca

SEQ ID NO: 399667 - DNA, 593 bp, Homo sapiens
ctgatccttttgtcatggctgagaggggaaaggggttcccgattaagaataacaaacatctggacgttagcagggcttggaacctagtcacccactacaattttttaagcttgttaacaggaaacgaggagagatgtgtagtttatgtggcaaacataaaggaggtccacaatctcttccttattgttcgaaagaagtctggggaactaagtcattagctgaacagcttgcagcttcttagtcctcaaactgctgtcttgtacattgctgctttccacataaaacctcccagcacagccaccccaaattctgcctttggaagtccttaggtaatcaattaaaggccagtgtctgggcagggaagctgtttgcagaggtttggatagggattatttttctcgagtgcccctcatacctagaacgtttgcctgctgcagatatacagacaagatatctccctacctcatagccaccttcacccctgtcccacaacccaacacccagcccaccttcttggacgatggaggtagtcgttaatttcttggtatcattgctagctcttagccttacccttggtctttcaaggaaaaaaa

SEQ ID NO: 399668 - DNA, 518 bp, Homo sapiens
gaggccattaatacccaaataccaagaccaaaagtaaagtatcataatcacattccaatatctcttatgaatatgtatgccaaaatccttaacaaaatgctagtaaaccaaatcagagatgcataaaaagaattgtatcccatgactaagtgagataatctcaggagtataaggttggtttaacatctgaaaatcaattaatgtaatacatcaacagaatgaaaaacaaattatatcatcatctcaatagaggcagaaaaagcattttatgaaacaacacttttgataaaaacattcaacaaactatgaatcgagtggaacttcctcaatctgataaaaggcttctagctattactttttaactgtgttattttagtggttacttttatctttaacgtatgacagtctgccttcaagtgatactatacaatttcaggatcttctgtttttgtttgtttgtttgtttttttgaaggtggagtcttgctctgttgcccaggctggagtgcagtggcacaa

SEQ ID NO: 399669 - DNA, 479 bp, Homo sapiens
tagggtcagacatcctgcttgttctagctccatcacttgcttaacctgtgagctccaggttccttaatctctaaaatgagaatagtaatagtagtaatctgctttataagattgtcacatatagcccttggtacaacagctggaccacagaaagcattttttgaaatgttagctgtcactagaattactgccttatttctcctaggagaaggaaagtttcccaggatctaggccagtttgactttgccctttttaaatatttatttatttatttatttatttagagacagggtctcactctgttgcccaggctggtgtgcagtggcgtaatcacggttcactgcagcctcagcctccctggactcaggtgatccccctacctcagccttctgagtaactgtgactacgggtgcacaccaccacacctggctaatttatatacacacacgcacacacatacacacacacacaaaatctta

SEQ ID NO: 399670 - DNA, 437 bp, Homo sapiens
ccactaggactaggttctttaaaaataggaagctaatttgattgtgaaaactagtatttcattttaatagcataaaggacaaaatttaacaaggaaacagaaaagtgagtcttccctctagttcttttcccattctcatcttagccatcagtcactaataaaacaaatgtaagtgtctgttcaagtgtcattaactagtgggcagctgagctatggtcctagacatgtaatatgaagaaagtactaggagtaactgaaaaaaagaacaacaaatctataggtatttacttgggcccagctgtgcacaaggcaatgagaaagttgtgatggggaaatgcagacattagttcttgtcctcacacagctcataactgtcttatggtgacttgccccacttcctggaaataatgaggaaaagcaccagtaagtgacaaatg

SEQ ID NO: 399671 - DNA, 405 bp, Homo sapiens
atgatttgatcctgggtttgcctcttctctccttcttcctccaaagtatattccttaaatttaacaacccttgccttccttttctgtctaagggctactggtaggtaggataatgactccaaaagctgtctatgtcctaaacctcagaacctgtaaatatgttaccatacataatagaagataattaagtttgtagatagtttagtgtgctaattagctaaccttgaggcaggaagattatcctgacttatgcaggtgggctcagtgtaaacacataggtactcagaagtgactatggtgagagtgatgtgagaactttacctgctgttgccacctgaagataatgaaaggggccatgagtcaaggaatatgggaggcctctagaagctagaagagaaaaaaaaa

SEQ ID NO: 399672 - DNA, 379 bp, Homo sapiens
atactagctgcatgcttggaaatttcaccttaacattctgagtttcagagttttgtgcaaaacccacgtattttctgcattaaaattcactataatgatgtttttaccctccttgaactgcagtagggctccaggagtatgcaccatttaaagtttggcttcctggacctcctggcatgctgccacatacctttgatcttttcaccacatggtggcacagaaacagcactggaaggcatagccagggtcggaatcattggaaggcctccaaggagatgagatacattttctttttattgttactgattgaatgtaatttccatcctattttgtgcccagcctcactgctatgtgaacatataaacagacctttgaaatc

SEQ ID NO: 399673 - DNA, 433 bp, Homo sapiens
gctccttctttattatttcccttattgagacctataatccattcacctttttacttcgttcctatcaatgcgatccctgccaccctcattccctgacctatttgtcttagaatgcatagtccagatttcagttacttctgtgataaaatcctaccctttcccccgactacctttttaatttgaaggaggatggcttttaaaaaatgttgtaataattcagaattccagaagtgcaaagacaagaaaacaacaaaaatttatgtcccacccacctctgagatgtatttggtacaggtgctttttcttctgaacttacagcattgtatgtacagttaaaggcttaattctccaatctcattattttccatccttattgtaacctctgtaaaaaataagtgcatctttattcactatgcttttctccttttactaa

SEQ ID NO: 399674 - DNA, 540 bp, Homo sapiens
cacaccatggacatctccaggggtaccattcacagtgggacctttgagcccatcaccacctgaaattatataccaagactgattttagggaagttgatgtgcaggtttttttcttagcagcctcagtgctaccagatgcagattaaattctgatgatgaggctggagaggaataccagtgaatgaagaatataatcactcatttgagaaatttacagtttaatatgtgggctgtgggaagcaagaaaagggctttaagcagagcagccagatgatcagatttgcattttaaaaagataactatggtttaaaatgtgaggcatgaagtagaaactggcaagaacagggacagggaagtgggctgtcagcattttccaggtgggagattctgaagcttttgctagaggtggcacatgggagttgggcaagtactgcctgaatccatctagtttctgcatcctcagcgagggacttggtgactgaccaaatggagaagatggagcaagcaaggggatatccaggcttcaggcattagccacca

SEQ ID NO: 399675 - DNA, 306 bp, Homo sapiens
cggtcatgcttactgatccagacctgagtccttcaagtggtgtcctctgtgcacgaaagctacatgcacatactgcaggcagtgcatgagtgtggtatgacattgtgcctctggactcctggagcccctctttcagttgcagccccttcaacctgcccttgaacaatgatcggcagaaagatgagaatgaaagagaagaaagagaatttcttccatacctttcaaaacttcaaagaagttgtccccagtctggttctgatgattcatgtctcagtgcaaagcacatataaatatctgaaatctgca

SEQ ID NO: 399676 - DNA, 361 bp, Homo sapiens
cagaaggggacaccccagccctgccccacagcttggggggcagcaggcagaggacagaagcccacccaggctggcctggcgtggtgagccacgccggtaatcccagcactttgggaggccaaggcgggcgaatcacctgaggttgggagttcaagaccagcctgaccaacatggagaaacactgtctctactaaaaatacaaaagtaaccgggcgtggtggcgctgcctgtaatcccagctactcgggaggctgaggcaggagaagcacttgaacccgggaggcggaggttgccgtgagccaagatcacgccattgcactccagcctgggcagcaagagcaaaactccaactcgaaaaaaa

SEQ ID NO: 399677 - DNA, 621 bp, Homo sapiens
tcaagcgattcccctgcttcagcatcccgagtagctgggatttcaggcacgcaccaccacgcccagctaatttttgtatttttagtagagacggggtttcaccatgttggccaggaaggaagcattacttttaatgcctgcacaatgaccagttgaatcgaaaaggcacaggtgacttatccacttcccagcatgggcatgtgggctgtttccaacctaggttattataaataatgccacaataaatatcttttccatatttagggccaataggacggattcccaggtgtggattgacatctcaccaaatgccagccccaggtcatgcccacagagacgcctgcagcagcgcatggctggcaggaccacctcagcctctctagcagcaggcaggtgggttcctgatcctaaactcacactttaatctgatgtctttgatttctaggacgcacgtagtgggtcaagagcatagctctcaagtcaggggctgtggacttgaccctcactctggaactgtggggcctttgcctcagttttcccaggtgtgaaatggcgatgctgacagtgcttaaccccacagggttgccaagaacaagaaccgtaatacgtgacgtcgtaagc

SEQ ID NO: 399678 - DNA, 491 bp, Homo sapiens
acaagtgcattgagatgggtacttcaaatttgcacatttaaaaatatgtagttatacctggataaattactgttaccatgaaaatgaaaaaagaggatgggatcaggaaatacagtggaaggtctgttagccaatctccacttgaagcacagtcccctcctaatgcttggtgagggctgccatgtccactgtgtgctccagcctggagggtgggctgcttcttcgacccctgcatacacttgctgcctccacctaggagatatgtctaccaagagccagttgtgtttgctatcatgcatgtttatgtgtttgtgcttgttttcaagtttaatttaattatatttaaaactacttacatcaaatacatgtttaaagagaatcagttttgtaaaagccacgtttaatgctctggaatgtctcagtaaaggtgaattactacaaagagttatagtcacttagatgtgggacggaaataaaagtaataaaaatca

SEQ ID NO: 399679 - DNA, 577 bp, Homo sapiens
attttatgtatttttttctataattttaaaaaatgaaaaacaaaaatgaagaatgagagaactaaaaagcaaaatctattcaaatgattagttgactatttctgaatctaaatctactgcagatgacaattcaggccattactcagggccagtctttgttccactgataagcagttggggcagtgaggcaggaaagccacctgctgagaacagggtctaaaagagaccagaggtgggatacatgcaattaacccttaacctcttcccggctcaccatgatggagcagctgatttgcctggctctcctcctctctatattttcatctctatatgcccttaaaatgtagctgccccaaattcacctccttttttggggaaagtaggtatgtatggatcttcatattctgatcgtcttgaaatgagttaggagaagcagtatttttcttttctggttaacagtcaaggagatctctggtttatgagagtaaacttggttacattttcagctataaatgactggctctcttaggaaatacaaatggacagtacttggaggctggaggagtatggaaaatct

SEQ ID NO: 399680 - DNA, 142 bp, Homo sapiens
gatggaagaacaaggagttcaagaaataccccaagtatcctgtgtgtgatgagaaggaacactattacacaaacagattaaatgggcatttgtggaacaacaaatttccccttattaatcaatatttggtgaatctttcttt

SEQ ID NO: 399681 - DNA, 534 bp, Homo sapiens
atttagtcacagctcagtcactgtcatagaaatgtctctgacttcttttaaacattatttgctacttcacgttcataagtttaggtaatcattttcctgaccagttatataaaaataatttttaaaataatacatctcaaagatgtttgacataatagaaaatggggctggatgtgtgtttatatacatagtgtaactgaaagagcttatttccagttggcagacctgcagcaggccacttaacatttctagaactatgattccttacctgcaaaatttaaaaataaaccaaattaggtccaaagccccactctccttctcattaattttttaatttatgtaataatctgatggcgtctcacttacagcattaatcagatctgacttgtgttttaggcatctgagtttgtcatactttacccactctctctacctcccccaagttcaggccctggaagccagggattttgtttcattcatttgtatgttccctgctatacccagaaagtgccttgaatgctcaggtgctcaaga

SEQ ID NO: 399682 - DNA, 537 bp, Homo sapiens
gcacgagagtggcttcacaggcagaaagtcctagcaagaaatggcagtccttgcagaagccctttgtcccttcagccatactgtttgtgagtttttttactgaaggattttcacacagctacgtggcgaaggacttgcgagatttgattatatatcccatgagtcaggtttcgatgggttacagattgcaataaaatcaaccacaggctttggaaaaactttccatgaaaggcattttagactaagaaatattggctttggatttccccatctagaaaggtagagagtaaacatgtactgacaaaaaagcaccacattcgggatcccgaaaataattgtgaaacaacacaagaatgcttttcctcctccctttccttcctttccacgtcacagagtttgtcatttatgacgattttgtggttgttttaacagttctgtgaaaatgagatacagagaaagtatttttaagatttatttaaataatataaggtcacagatattcccccctctcctcttctagaacatcttgattcatta

SEQ ID NO: 399683 - DNA, 274 bp, Homo sapiens
cattccagatacaagaggattcactccaaattgtacaccacactcaggcatgggactaagaacgatctacaatcagaaagtgattcaaaagactctcagctaagtgctacataatgagcaactcgtactcctcaaccaaacggcacagcaagaagacagccattggtgaaacaggaagaagaccttcatcagaacccaatctttgtggcaccctaatcttggacttcccaacctccagagttatgagaaataaatttatgttgtttaagccatt

SEQ ID NO: 399684 - DNA, 584 bp, Homo sapiens
aagccaaatgcacggaaacgcttgctggagaactgtttacacatagccatggatcacaatatcttgggggtcctgaaaataggatgatgcctgtcttgggtttacattctttcctttatatcagagcctttcttcctgagtttttctctgtctgtgttaaatgagaaacacgcagctctcccatcaagacttgtcgttcccatccacagctggggccacctagtcttcatcttcacttaagcatagtgcaggggtaacgacaacctacagctctccccacagcagaggatttgacaagtttcttatcccattattcctttctcatcccctggtatgggaaatccacagagaaatgttaatgtggaaattcaccttggggagcaatagctgatactttagtgttagagtttcagattccatttttataccaattatcagagagaactttgttattcagaatgtgttttttttttcccctcatgcttggtctgaagaaaggaaataaaagaaacagaaaaaataggatctttcaaaaagttgaacagtattttttagaatttattgtgggatggggtgaactcaga

SEQ ID NO: 399685 - DNA, 555 bp, Homo sapiens
tttaaacatgttaaacatccttttacagatctccagaattatagtgacagtggggagaaggagggaatgacccatcccccatcccgagcttgctagcccagctcctggaagatcagcccctgggcagtgccagcctgcatgaccgtcctgatccccgactctgccctttctgccaaagagccagcagagcacatgtctcggagaagaccccctatcaccttctaggttgtcttgccacagaacaggagcacccagcaatacagcagagcttcccacgggtttctacagtgtcttcagagaaccgcaaggagggtcagcccttgtggagtctctgacccaaattctgacattacctctatgacttattcacaaagtgacctcacactgcacttttctgagcctcagattgtgcatctaaaaaccgaggataatgcttacctcactaggtggttgtgaagaaatgtaaataaaccgtgtgtgaaaatgattcctaaaaccagaaaaccccacataagcctcagtgaggaaagcaacacagtgtagtaatcaaagcta

SEQ ID NO: 399686 - DNA, 396 bp, Homo sapiens
gtcagtttactgttgatttaaagatttattatggtgcctaaatttatcttgaccttaacaagtttatccgtctgaaaaagctggctggcaaaaaatgtcccaagttgtcacagtgtcactgacccttatcttgtctctcctgaaaaaactataactttgctttttcatgtaacatttatgtttatagacttatgctaaatagacgagtagagcacacattatttcagtaatagtttattgctacaggcttctgtggtagcataaacagaattgaatgtgtagtaagagttgtaggttccagtcccagcttttttttttacttagacaagtcactctccaagcctcattttcttcagttcagatatagaaatattatgtaacacacaggattcaaaa

SEQ ID NO: 399687 - DNA, 295 bp, Homo sapiens
aattatatcatgaagaagggaactaattttactttttccttctaaagaactggccagtttagtactattgaatagtttcattttttccccactgatctgattaaaagaaaatttcccggtatcttttatgtatctagttctacgttttgaggctctctacagttttgcagcaaatctggctatctggtaatgtgtatttgcatcatgccttcttccaaatttcttgctgttggtcctttatgtcatgtgaacttttggatctgtttctcagctttcattaaaaatactgtaggca

SEQ ID NO: 399688 - DNA, 248 bp, Homo sapiens
ggcacctctgcggccgttggagccacacaaggaaggcctcacacgaaccacacgcactacagagccaactgcgacccaagcacgatcgaggctgtgtgtttctgaaaggatctgaccgaactgagcactaagattgttcagaatctggccaacgcagctccccatccatccccagccaggtggcccatggtgagtgaggcagagtcttggtttcctcagctgtgagatgggggcagcggcacccgaca

SEQ ID NO: 399689 - DNA, 114 bp, Homo sapiens
gcgagatgatgaacattttaagagcaactaataatacaactatttcaaaaataattttagtcatcacacaattctttctagaaagactattcactactgaaaatgttaatacta

SEQ ID NO: 399690 - DNA, 835 bp, Homo sapiens
ggccttgaactcttgggtgcaagcgatcctcctgctttgacctcccagagcactgggattacaggtgagagccacaacacctggccaatatccaacttcttacccctcatttccacttggcagtctcattggtatctgaaagtcatcatgactaaatggcgctcttgcttttcttctcagaacctgcttctcctccactgtttcccatgatggcaatggcaccaccacttacccaggcccactaggcagagctagaaagcctgagatcatccctattttgttcccctctcatgccccgcatcaattctaacagaaagtcactctgttttcaaaatagatcccttcctcccctctttatcctctgccatctttccagctcaaaccaccatcttggtctggatcattccaatagcctaccaactggactccctgcttccagtcttgcctttcactaattctccacagaacagccagagcaaacattttaaaacataaatcaaccaatgtaatggggtgtcctaatctggattctggaacagaagcaaaagtacattattgggaaaactggtgaaatctgaatgaagtctgtagttttggcagtggaatcatggttaggtaaggggaaactgggtagagggtatttgagaaccctgtgcacaatcttcgcaagtttagtatacatttttttttttcctgagatggagttttgctcttgtcaccccggctggagtgcggtggcacaatttcggctcactgcaacctctgtctcccaggttcaagtgattcttctgcctcagcctcctgagtagcagggattacaggcatgcaccaccac

SEQ ID NO: 399691 - DNA, 429 bp, Homo sapiens
gggtgtggggagtccctctctggatcctggtgggtttggcacgcggaccctacatggtggatgtgatggacagtgtcctcctttgggagcggggcctgtcctggtcctcttgtgaagggtgggggacaggcactgacctgtcaggagggttagagggttggcaccagcaggtggcctggagcgctcagagcacgcgcgatcaggaaggcccgagtctccagtgtgccctccctggccttgtgaagtcatcttaaagtctggcttgagcgcctctgacttggattctgggaagctgacacagcgcggccggggtcgccacatcctgttgagtagccgctgggtgctaggcgcctgggtggtagaccaggtgtcagggatagggcccatgcctggcctactggggagaggacagaggctcagaggggtcac

SEQ ID NO: 399692 - DNA, 385 bp, Homo sapiens
gccactttcagacagggcaatatgtgtgcaaggctttactctgccatctcacaatgcaagaagatgactctgtaaaagtccctggagtgaggtgataaggatgaggcaaagacggagaataaaacctgaaacaaagtcgtaatttggggtcagaaagtgtgcccacaccagtccagaaaagcagagaattcttgccctcttttttttatccccaaagttctatttctttatgaagtcattaagaaccacaacctatccaaaatgaagaacagaaaatccagtctcagcatttatttttaaataacacatctagtcatattatggggagtcataaatacatataaattaaaaatccaggcatttaaaaacatgtgtgtagccttct

SEQ ID NO: 399693 - DNA, 305 bp, Homo sapiens
acttactgcagaaaaacataaaagaagcaaaagaagtcaccagtaattctaaccagaggcaggcagccacggtcaccattttgtcattattttgatattttcttgcattttttatacaggtccatataattttgttacatacaaatttgtatctgactttttaaacaatcaagtattatgccagtcatggtggctcacacctgtaatcccagcactttgggaggctgaggtggaaggatcacttgaggccaggagtttgagaccactgtgggcaacatagggaaaccccgtctctacaaaaaaaa

SEQ ID NO: 399694 - DNA, 451 bp, Homo sapiens
aaactaatttgagaacttgatgatgactgctgggatatttatattcttgtcactagaagagtgagataagccaagattagagttgtcataacacaaactgaaacagtgtgagactgagacagaaatatgatgccaccacttctctttgcacaaattatggtaaattcaaatgaacaattacaatggtgaagtattacttttggttaacattggaaggggagtttcttttgagttgttccaagtaataaggagaagcttgggtttagttgttgttaaaagagctttgatgaacctgcagtctctagaaaatgttagtatagaagacatttttatattacacagagaggagtcctattcacagtaaataaattatatacttgcaaatggacattttcctgctgttatatttgcatttatggctcaattgaataaaatccataaagtaggaaac

SEQ ID NO: 399695 - DNA, 464 bp, Homo sapiens
tcctaattagtgtggacacttttagaaattaaagcaatttatgtttctcttctcagttctcatatatttgaatttattttactaaacttagtagttctccaaataaccatattatctaaatattcagaaatgaaatcttcagtcagtttagtgaaatatctaatataaaacagtatattaaaaaaatctgagttgtttaaaaggtttaaaaacacttcttaaagattcttgtcagtggttacagatgagaaatataattggcaaatgtgaaatttaatttagttcacttaacaaaatacaccgtaagcaatttaaaatttggctttcaagtaaaagtcacatttgtcccaaacaatagagaaacagaccttgaagaaagacaggcacactttgaaaatgctgtaaaataatttgtagttgtccatgttggtgggtaacactgggacctatcttttctttttgtt

SEQ ID NO: 399696 - DNA, 507 bp, Homo sapiens
tgacaggttgatgggtgcagccaaccaccatggcatgtgtatacttatgtaacaaatctgcatgttctgcacatgtgtcccagaacttaaaatatataaaaaaaaaaaagaggccaaaagtgaaagaaaagcttcaatcaactagatgctaagtgcttgcctaaattaaggcagttgcaatggggaaaaaagaggagatgcaataatgaagaaatttttttaaaaagcaattgactttgatagttggtggcatgtgtgagctaaggaaggtaagtctaggatgattccttatttctgaattgagggaggagtaaatagcagttccacctatcaagatagggaataaagagaaaaagttggaatttaattcacatcaactttattttaatgggatctcatatttaattttgttctgagttttcccactgaatttccaacaactctattatcactgacttcattggataaagtgtctgtcaaatctgtatgctgagactccacagtaag

SEQ ID NO: 399697 - DNA, 514 bp, Homo sapiens
tgtatctcactgaggaagaaggaatgtttcaggatgtattttatagttttattgagtatagtacaaattatgaatgaatatattttctttaaaaacatgttattgacagaaatctatcaataataatgtgggtattgtcaagggcctgtcaatattaacgtaattatgattaaggggataacatggattttagctataataccatgtaacatctcctacatcgctgctatcaatatacacattattattgacctgttccaagactctcagtattagaggtattaccattaggcatatttgtcaatgcatactgtctacaaaattctgcatttaaatttacagtcctgtaaactttgtcagcagaaacgtgattctcaagtaatctctactgtgtcatacccactcatgcaccccctgccaggctattcttttccatctccacaataataaactaagttttagaatgaaaatgtcactgccacaccatcttaaatgttctggcaatcaaagtgga

SEQ ID NO: 399698 - DNA, 165 bp, Homo sapiens
attccctcctacgtaaaaaactatgatttcaaggtagttttattcacttaagctttctaatttctcttggttccctgaatctacatattccatctaagaaacagttaacaacattttgctaaatgcaggagattattttaactttttgaatatttattccccaaa

SEQ ID NO: 399699 - DNA, 294 bp, Homo sapiens
cacagtgtatcaaggtcaagagaagctgccctcagcagatggaaaactttcaaagtaaaaaagcttcctttacgtttaaaatatattgagttacacatgatttctaaggaatacttggtcgttctagttataaccatggctcacttttgttatcatgtgtcaagtaactgactcgtatattttcctggcagatgttttctgtggaaaggcaggaaaagagaggtgaaggaagaaggcatcccttaatatcgtgcaataaacccactaggggtcactactttcagtaggactgtg

SEQ ID NO: 399700 - DNA, 441 bp, Homo sapiens
tgctcaaaataaatatcttcaaatattttacagagtttgactctttgtcaacaaagaaaacaatcattataattcatacatctcatacatattggaagtagttgctaataaaaattataattgagtaggttttcttcatttacaagaatttctttacaggccttcctgagtgaagtgtatactggagttccatctgtggtcttccatagggttgaggatgctgttgcatcagtgatgggtggaaaaagagttgattggaaagagacaaaactgtaagatgttatcatttcaaagaggctctcctcctactatgatcagaagaaaattaaaataacaggtcagaatacataaaagcagagctgtcagcaaaagggcaagctgagaagctgcagttttggcttcctgagagatttaagaccctgttaatttttaaaccacaaa

SEQ ID NO: 399701 - DNA, 432 bp, Homo sapiens
gacttataagctataactctttattgtgttattttattggttgctttggggtttaacttacaacagtccaccttcaaggtgtgttacactacttcacacagtttaagaactttacaatagtgtacttctgtttatccccttctgttattgttgtcatgcattttgcttttacatagttataaatcccataacacagttattttgtttatatgacatataataagattaatagagacccagccttcaagtaggatttatcctaggagtgcagggttggtttaacatttgaaaatcaataggccgggcatggtggctcacgcctgcaatcctagcactttcggaggctgaggcgggtggatcacaaggtcaggagttcgagaccagcctggccaatatgatgaaaccttgtctctactaaaaacgtaaaaaatt

SEQ ID NO: 399702 - DNA, 405 bp, Homo sapiens
tgcctttttgtcttataaaaagcttctctcttaacctggagtgtgctttcccttcatttgtacagattcttgggctatgaggtttgggagagattttcaatattcatgctttctgattttcaagacccagaacatataatcctgtctctgatttctagttgaaatgacttctttcctctgactttctatgtactgtattcatactcccttaagacagcattgactacattttgtcatatttgtagtagtttatgtacctgtcttattcctctaatagattaaaaattgcttggggtgagggttgacattttattttattttttgaatttcttgtactagcacagcactgggcatacattaacttatcagtaaatgtttaaataaagatgtagtattgagaaatta

SEQ ID NO: 399703 - DNA, 352 bp, Homo sapiens
tcaagcaatcctctggccttggcatcccaaagtgctcggattactggcgtgagccaccacgctcagcctgcagaatgcgctaacgatctttgaggaagagatgccagcaagcttgatatgaaatgctacctgaattttagaaaagattatacagatggtttttaaaaccataaagatgtggcaaacactggacactaacatacatttatacattcataaagaacaatgcaagccaaaccatcttcgtagtgggtagaattgtggcctctaaaaacatatggccatgtcctactcctcttcagaacctgtgaatgtgatcttacttggagagggatctttataattaaacatc

SEQ ID NO: 399704 - DNA, 563 bp, Homo sapiens
ctcattcagaatcctctttatatttatcatagagggcttccaccactggctttgcatagttgatctttttgcagtaggtgctcggtaagtattcctcaagttgaaatggaattggaatttaacacaaaaaatcaccatcttctggagcaagactggggaaattactgtccaccagtggctggtttttgcgaaacctcagctctccctctctatatgtgtgtgtgtgtgtgtgtgtgtgtgtgtgtgtgtatacacatttttaaagggttgttaaaagaaacaaagattatacaacagagactagatatgtagctcacagtgcctaaaatatttactgtttggttcattacagaaaaagtgtgttgacttctagagttttccttagtatccaaaaacagagtttgaagcagttttaaccctatcaccttctcttccaaggttacaggaaacttctgacttttatcgccccattttaccatctctatctatcccttgcattcagtttccagtctagccatggagagtttaaaaggtttctgttctacctcctgaactcacatttc

SEQ ID NO: 399705 - DNA, 454 bp, Homo sapiens
taaactctccagctccctacatccttcctctgcagcccacagaatggaagtggtaaagtagccctcccatctgacagcagaggccagggctgggcctctctgttctctcagcttttcacaccaggaaagggaggcagaactggactgagtatcttgatagtcctcaggctacttgaatgatcgccctcagtatgttttatttggtcactgtggaacatggaaggtcatcaccgaggaacttctgcattggaatcctctacctcggaagaggaataaaaaagtacgtctctggagcgtcttccctccgacgttatccggcagttgtccccccctgctgctatctccaaggcaatcagggccagtttatgtctacagggtccccttcactgacgatctgagacactaggcaggttggaaagggtggagtggtgctaggagcaaattattcacctga

SEQ ID NO: 399706 - DNA, 370 bp, Homo sapiens
ctttgagtaacagggggccagagaaaataaactaaggcttattgtaagattctccccgggggcctgaaagcttaaggagatgaataactcctcccttctcaggcccagtcccaaggcacaaggctacttgcaccagcagtgtgctccagcaaaatagcagaagcaggaagagagccagccggaagacacgtacccctgaaaatcaagaaagaggccatccgggtacaacatagcagtaatgtcagactaggacacttcctgtttacaggagactataaaactttcgccctgtcctcacttgggggctgacgccattttaggcctcagcccgcctgcaccctggtgctcattaaaacagcatgttgctcca

SEQ ID NO: 399707 - DNA, 2142 bp, Homo sapiens
cttttaagtgaaaatatcttgacccccaacttttggggccctcagccatgggcattccctagtttccaaacaaacacggtacccgtccctcattccacccccaccaccagaaaacagttctgtttggtttatagggaggaaaatgattattatggaattaggtatgctagttattgaatacttggaattatattgtttgcttttaaaattaccttaaggaaataacttcactgtctgcttctaataatgtttagtcatttatttggtaagtaattaaagcaccatcactctcctgccctcgtcttcaggtgataatctagacatagagggagtgagccaacaagttgctgttagagttaacttgttccctaacccatcttgtgaatatcaatgctaacaacagtgtcttgtgttttttttttttcttttcttttctttttctttaaatcaatgtgcttttttcctatgtgaataattatatgtctagaaacagccatggagtgattttgctgttctgaatgggggaaagattaatagtgacatttggaaggcaagtatattgtcagatcttagatcatttaatattttatcctttctgcatggctgtggctgtatatttttcttctttgtgaatatcatgcattctgcagggacacagtgatcgggcttcttgctaggggcattcagctcacactcctgttgcctttttttggtgtctcccattgtgaatgccctaggttccccgttgttttgtaagaacaggagtttgcaccagtcagcattcaacagtccttgcatgcctttctctgcctaagctcacgtacactctctgcctcttgctgggaagacgtttctcccctttgatatttgaggcaatgaatggtcttctcccccattgtacattaacaaggttctattttcctctaggatttgcatgcagccactgttaacccggaccccagtttaaaagagtttgaaggagcaaccctacgctatgcatctttgaaactcagaaatgccccacaccctgatgatgatgattcttgtagtatcaacagtgacccagaagccaagtgttttgctgtgcgttctctgggatgggtagagatggcagaagaggacctcgcccccggtaaaagtagtgttgcggtcaacaactgcatcaggcaactttcctactgcaaaaatgacatccgagacacagtcgggatttggggagaggtaagtggcatgtagaatgatgcacggcaggctgtttacgttctcctgcatttcaggaagccccacagctcagtgacacatggtactgaggggctccgaggtgttcatcaggtgccttttcccattaatgcaggaagtgtaggcatggtacccccgtgtgactgatcccttagcactgccagatgccagtgaggactggggcctggagagagagcgtttctcagtagctaagtgacacagattcatgggtgagctttaggggcccagaactcccctaaacatgcctgcaaaatgggatgtgccagtgtataagagcagttttgcagactggaagaaggacctgtattctcaaaggggaaggtgacttccacacgtccacacaaaaatgttgatgcctctgctttaaaagttgacaaattattcttttataacactcttctttacttagcgtctgaagaatcaacattatacatgaattgtggaattgatatttatatacttctcccttttaacagagtgattccattttgaaatgttagttgagataatttcagaaaggaaaaaataagtacagataccaaatgtgtatgaaactcacatcaaaccggaaaagctgtattcctggtgtgctctgagacctgtggaaaaagcattttgggagcatcttggaatagtgtttgctacatgaatagatagatgttgttctctctgcttctagtgaacagagcagtggtagaaaagtttgctttttggttgggctgattgggactccactcacattttctcctagcagcacatcccaatgggaagtaggtttccaagcctttccatggtggagtttgtctccttaaagtggagctgaatcactgcacttcagcctgggagacaaagggtaaccctgtctcaaaaaacatttttgtt

SEQ ID NO: 399708 - DNA, 576 bp, Homo sapiens
ggaaggctgaggcaggagaatggcttgaacccaggaggcaaagtttgcagtgagccgaaatcgcgccattgaattccagtttgggcaacaaagcaaaattccgtctcaaaattaattaattaattaaattagtaaattaaattaattaaaaaggatgtcaggaattcgagacctgcctgaccaacatggagaaaccccgtctctactaaaaaagaaatacaaaattagccaggcatgatggcacatgcttgtaatcccagctagtcgggaggctgaagcaggagaattgcttgaacttgggaggcggaggttgcggtgagccaaggttgcgccaagattgtgccactgcgctccaacctaggcaataagagcgaaagtccatcccaaaaaaaaaaaaaaagtgatctgaggaaaggcaaaggcctgggctcagaaggtgggatagagagggtggatgtgagagtgtggccagagcgggacacacagcagtggcttggggatgaggaaggaagggagaatctcaacggagatgcaggtggctttggccaaggtaaggaatggggctaaaaaaaaaaa

SEQ ID NO: 399709 - DNA, 319 bp, Homo sapiens
gttaatttaagagtgagcagtgtagacacactgctgattggtgcaggaagatgaaaaaaatatttatactgagaattctagccaatgcaagaagataagaaaaataaagatataaggattggaaaagaagaaacaaaactgttctttccagattatatgattgtctacctagaaaatgcaaaagaatctatcagcatatacaaaaataataatatataatacataatatataatatgtaatatataatatgtaattatatttctatacaacagcagttagcaaatataataaaaagacatcatttttatatcaaaaaaa

SEQ ID NO: 399710 - DNA, 771 bp, Homo sapiens
caattttctgtattagtctgttcttgcattgctataaagaaatacccaagactgggtaatttataagaaggtttaacggctcatagttctgcaggctgtacaagcagcatagtggcttctacttctgggcaggcctcaggaaacttataatcatggcagaaggcaaaggaaaagcaggcatgtcttacatggcaagagcaggaggaagagagtcgggaggtgccacacactttaaaaaaaaaaaaacagatcatgaccactctcccactataaaaccagtactaatgaggcatggtgctaaaccactcatgagaactctgccaccatgatccaatcacctcccaccaggccctacctccaacactgggaattacaatccgacatgattttgggtggggacacagagccaaaccgtatcaatggccatgctcatgttccagtttctgtggttgtaggcaatgcttggtgttccctggtgtgcagctacataactctaatttctgcctccatcatcacacagcaacttttcaaaaaaaaaaaaagaaaaaaaaagaaagaaaaagaaaagaaaaaagtagtaaggaagatagagttgtactcatgtaaggctcaggttttgtcagttataagttaatgacaacagggcaaaaggagtttaagatattgccatgatagtggcagaagtattaagatgacagatctgagctggatggagaggtaagtgaaaaggttactaatggaactactaatgagaattaaaaaactggcata

SEQ ID NO: 399711 - DNA, 500 bp, Homo sapiens
cctttttatttttaactaagtcattgtgatagatgagtatggttttttaaaaataatattcatatcgtggcaaaatttaaaaatagagggatttttttaaaaaatcaaaaagtttagggatcactggcatagttaaaagagtgctgctttagaaagtaggagacctgcattttagttctatttagcccgcaagctctttctgtaaccccaagtatgatctcttggaccaggtgtggctcacacctgtaatcctggcactttgggaggccaaggtggttggatcacctgaggtccggagttcaagaccagcctggccaacatggtgaaaccctgtccctactaaaaatacaaaaattagctgggtgtagcagcaggcacctgtaatcacagctactcgggaggctgaggcaggagaatcgtttgaacctgggagacaggtccagtgagcggagatcatgccattgcactccagcctggacgacagagtgagactccatctc

SEQ ID NO: 399712 - DNA, 490 bp, Homo sapiens
ccttcagaggcgcagttcagtcttctttcttttgcattctgtgttctgccagtccttcttataagcatgtctgctccccaatggaaaccagcatcctctacatctgatcttccaaagggctacttttccagagtttgaataacaagtgtatgcattattgcaggttcaaagatggagaaggaatcatgtggcgagactttcactaagccaaagattaagtccctaacatgaaaaggctaagttgtgcaatacacactgaacagtgtttcagtgaaccagcctatgcacagaaaaccaactatgtacagaaaatccagacataggccaggcacaatggctcatgcctgtaatcccagcactttaggaggccaaggcaggaggatttcttgagaccaggaattcaagattagccaacaaattgagatctcatctctaaagagagaaagagggaaagagataaacagagaaagaggaaagaaagaaagaaaga

SEQ ID NO: 399713 - DNA, 524 bp, Homo sapiens
aagtgggagcttctgggggcacatttgtgctagtcctagccttctatctatcttatcccttgtgtgcgatttgctactcttgccaattagcttccattttctattactatctcagttacagttgaccatgcatatattctcttcagaatacgcgaataagccagtcacagcaatcagtgctatgcacatgcagactactactatggataactacagtgcgattcgttcatgactgagcgtggagcagagtccacacagaagttgatcgtggtacccaaggctgcttctcactcattctggaagcagaccgcaaaagtgaaaagcacacatcaggggaatacattcagttttcattattgacagttgtttttaaaaaagtatgatacgaaggcatttatacatttttgtgataggcattattagaaaaaacaatatccaggcactcctgaaccataagtttgtgagaactattatactgttagattaagaagcaaaagtatttattagacagataaatgtgaaaa

SEQ ID NO: 399714 - DNA, 758 bp, Homo sapiens
ggcaccaacagcagcgccgctgccaccgcccaccttctgccgccgccaccacagccaccttctcctcctccgctgtcctctcccgtcctcgcctctgtcgactatcaggtgaactttgaaccaggatggctgagccccgccaggagttcgaagtgatggaagatcacgctgggacgtacgggttgggggacaggaaagatcaggggggctacaccatgcaccaagaccaagagggtgacacggacgctggcctgaaagaatctcccctgcagacccccactgaggacggatctgaggaaccgggctctgaaacctctgatgctaagagcactccaacagcggaagctgaagaagcaggcattggagacacccccagcctggaagacgaagctgctggtcacgtgacccaagctcgcatggtcagtaaaagcaaagacgggactggaagcgatgacaaaaaagccaagacatccacacgttcctctgctaaaaccttgaaaaataggccttgccttagccccaaacaccccactcctggtagctcagaccctctgatccaaccctccagccctgctgtgtgcccagagccaccttcctctcctaaatacgtctcttctgtcacttcccgaactggcagttctggagcaaaggagatgaaactcaagggggctgatggtaaaacgaagatcgccacaccgcggggagcagcccctccaggccagaagggccaggccaacgccaccaggattccagcaaaa

SEQ ID NO: 399715 - DNA, 999 bp, Homo sapiens
  misc_feature (248)..(248): n is a, c, g, or t
  misc_feature (356)..(356): n is a, c, g, or t
cgcgaaagggcagcgccgagaggaacgagccgggagacgccggacggccgagcggcagggcgctcgcgcgcgcccactagtggccggaggagaaggctcccgcggaggccgcgctgcccgccccctcccctggggagaggcatcgctgttctcctgctgcgtcgtcgccatgcagctcgtcgccggctcggacgcgtcagcgataacgcgcacctccttcagcacgggcgtcgctgcccgcgcgtcangtcacccgcacaccccgagccagtctgtccggcgactcataagcaggccagacgcgcggcgtggcgcaaccggtgcgcagcctgtgtcgtgtgccgcactggcaaacnaacagagccagcttgtcatcactcttctccgcttgatccttcgtcaccgatccatcggccttctgttcgtatgtatcaaggtgaactttgaaccaggatggctgagccccgccaggagttcgaagtgatggaagatcacgctgggacgtacgggttgggggacaggaaagatcaggggggctacaccatgcaccaagaccaagagggtgacacggacgctggcctgaaagctgaagaagcaggcattggagacacccccagcctggaagacgaagctgctggtcacgtgacccaagctcgcatggtcagtaaaagcaaagacgggactggaagcgatgacaaaaaagccaagacatccacacgttcctctgctaaaaccttgaaaaataggccttgccttagccccaaacaccccactcctggtagctcagaccctctgatccaaccctccagccctgctgtgtgcccagagccaccttcctctcctaaatacgtctcttctgtcacttcccgaactggcagttctggagcaaaggagatgaaactcaagggggctgatggtaaaacgaagatcgccacaccgcggggagcagcccctccaggccagaagggccaggccaacgccaccaggattccagcaaaa

SEQ ID NO: 399716 - DNA, 623 bp, Homo sapiens
aggccccgctctacccagtgcagagctgctggagttccacagaccctcagcagccccgtgcccacagcagaggtgtagaggtcccccgcctgcccctcggctacatgaacaagacaggggcctaaacttcggccctggccaaggcttagatttgcccaggaaggaccggaaaggctagaggggccagccccccacaaccatcccaagcccctgtggacactggagaagcccataggacagtcaggcttctgaggatcccaggacagggccaccagcaggggaggccctcaatacctgggccatcaggctcaatacctgagcccaaacaacaatgagcagattcccaggctttgctttcactgggtggcccagggacagtgacatggtaggagacatgcaagacagagactgaagaagcaggcattggagacacccccagcctggaagacgaagctgctggtcacgtgacccaagctcgcatggtcagtaaaagcaaagacgggactggaagcgatgacaaaaaagccaagggggctgatggtaaaacgaagatcgccacaccgcggggagcagcccctccaggccagaagggccaggccaacgccaccaggattccagcaaaa

SEQ ID NO: 399717 - DNA, 762 bp, Homo sapiens
ataaagtcaatcaatacaggacaaaactgaagaacttacagagaactggagttggagccctgattaaactctgcctgaagtcctccctatctctgaacttctgttaggtcatccaataactccctttaattattttttagttcaatgactctgttgcttgcaaacaaaattatctttactgatgcatgtggtaaactggagcagcttacagtgggagaaaatcaccaagtgcagctcaaatgtaacatctactttttaaaaagatttgttgtcctctagcctgtaaaatgacttaatctgtatttcataaagtacataaaagtcatactttccagttgttccctacagaatttattggagatattatattctgtcaaaattataatgaatttgatggttcatcttggttcatcttgactacaaatgtttagtgtttataaaattgcctgtacaaagtcatgataaacctgacagtggcagggatggtaaagctggcttcttgaatggtttcttcatggtgaatgatctctccttactttttttttaaaatctcatcctttatcctgtgtgtttccttttgttcttttcttggcagctacaatctctggtatcttgaaagtcagatctaattgaataggaaataaatgcatgctggtaactctgtggattttatttccctaatttctgctattgctgcaaataaaaaaaaaagttaccaattttctagcacaggcattcaccaagcaataacaaaaaccactt

SEQ ID NO: 399718 - DNA, 956 bp, Homo sapiens
attgataagctgatcctaaaatcatatggaaattcaaggatccagagtagccaaaacagtcttgaaaaagaagaggaaagttagaaggctcacactttccaacttcaaaacatactactttagagttacagtaataaaaatagagtggctgtgtcagaaggataaatatatagatcaatggaatagaattaagagtctagaaataaactcatacatctgtggcttactgattttctacaagagtgccaaaactatttcatgagagaatagtgtctcatggtacttggacaactgtatacccacatgcgaaagaatgaagttggccccttacatcatatacaaaaaaattaaagtggattaaagacctaaatataagagctataactgtaaaactcataaaagaaaacatagggccaggcgcacgcctgtaatcccagcactttggaatgccgaggcaggtggatcacctgaagtcgagttcaagaccagcctaacgtggtgaaaccccgtatctactaaataacaaaaaattagccgggtgtagtggcgtgtgcctgtaatcccagctgaggcaggagaattgcttgaacccaggaagcggaggttgcagtgagctgagatcacaccattgcactccagcctgggagacaagaatgaaactctgtctcaaaaaaaaaaagatgggcccggcgcggtggctcacgcctgtaatcccagcactttgagaggctgaggcgggtggatcacgaggtcaggagttcgagaccagcctgaccaacatggtgaaaccccgtctctactaaaaatacaaaaattagccaggtgtggaggtgcacgcctgtaatcccagctacttgggaggctggggcagaagaattgcttgaacctgggaggcagaggttgcagtgagtggagaccgcaccattgcactccagcctgggcgacagggcaagagt

SEQ ID NO: 399719 - DNA, 269 bp, Homo sapiens
ctctgagaagatttctgcgaggcggtgatttgagccagaaagatgtacagaaagtggataaaagggggcaggtgagggttagaacagaatcatgatggcactgagaaaggactggagaaggcctagagatacaatggtttagcttaggatagtcataacggctttacgggggctgtccaccgtgtggtccaacttcagatctcagctgtgcccatttgtttcaaatgaactagtctaaaatggaagaaacgatatctggctcaaatcta

SEQ ID NO: 399720 - DNA, 536 bp, Homo sapiens
cacccaatttggtgcttggcctgtccggtggtctccatctctcactgctgctttccaaatgctctgcctgccatttctagaaggggaaatgggaggctgagggaatcagtaaggcacccaccaaggaaccatgaaggacgctggattcttgctcatgcccttagctgggtgctgagctgggcccaggttgcagtaaaacagggctcctgacccaaaggtcacaggcacagtaatggaggctgaacggaccgctgtggggactccacccttcaatttcaaaagctcttccgcacctccctcccaaacttaggtttaaatttgaaccgcctcatcccttggggaagaacccccttactctgcctcctcctcctcccatgcgtggaatgcaagagcacagagggtaggaataggagacctccttttctcaaatccaggagagcacagagctctgcacacccgcatgcccactcagcacccccaagtcccgggcggagaacggccagggtaccaaggcctgggacagggacgcggccgca

SEQ ID NO: 399721 - DNA, 573 bp, Homo sapiens
tggcatggatttgggaaggatgcagggcagcaaacaagcaagctggagagggcagcgggatgggggcccaagaggctaaatcggaggttctcaaatgttctcagtccatgtcactctggcgtctcaggtatttttttcattatacttctaggcagagaggaatacctaacagttccatgagttaaataggtagatccaaacaactcaataaatatttacgtcctaacaacttagtaactatttgaaaagaaaaagatataaattgatgagaaggtggtatttttatttcattcttatatagccaaaattttcaatgagacctatgtgctgctgggcactatgcagcttttctaactttggaattagatgggattctgccaccccatttcctgcttcacattgatttttataccacactggctatttatcacagcatcccctgaaagcccagcttttcacagatatgacttcaccgaaaggaatgtagtgatctagtgttaaaactatgaactaccttaagcccgtagttcacatggtagctgacagatgttgattgtttcagtgtttgcctca

SEQ ID NO: 399722 - DNA, 734 bp, Homo sapiens
ccacacccagccctgaaggcttttaagcagggaggtaagtgagctggtccagcatgtgtttttaaaaactctttctccagcctgggcgacagagcaagaccagttctacctggctagggtggccccagagtcatggcggaaggcgaaaggcatgtcttacatggtggcaggcaaagaatgaggacacccaatcttctttactcattcatctaacactgactgtgtggcctggcacccaccaggaatgtccctgccctcaaagtctttacaggctgttggagatggggcagatgcccaaataagtcattgttgtcccaggtagtgccatgccaggggccatccagggagctgagggcccagtaaaaaggcacttaaactcaaatgcatggagaaggggacagccagggtgtgattagggaagacttcctgaaggaggtgctgctccgagaaggttgattgggtggtttttgtaggggttttcttgtttccactttttaaataactacttcatgccacatgctattaggtgcttttcacatacatcgtcatgtttaatttgtaccaacaaccctgtgagataggaaatagcttccgtatgttagcagtgagtaagctaaggatcagagaggggaggttgcttggacaactggcttagccatgattagaactccaataggttcttaaatgatgatagaaaaggtgtaggaggatgggagccgaggctggcatacctg

SEQ ID NO: 399723 - DNA, 700 bp, Homo sapiens
tacctaaaaacttgtgatctctgtggagtcccagttcacactccagcctgggcgacagagcaagaccagttctacctggctagggtggccccagagtcatggcggaaggcgaaaggcatgtcttacatggtggcaggcaaagaatgaggacacccaatcttctttactcattcatctaacactgactgtgtggcctggcacccaccaggaatgtccctgccctcaaagtctttacaggctgttggagatggggcagatgcccaaataagtcattgttgtcccaggtagtgccatgccaggggccatccagggagctgagggcccagtaaaaaggcacttaaactcaaatgcatggagaaggggacagccagggtgtgattagggaagacttcctgaaggaggtgctgctccgagaaggttgattgggtggtttttgtaggggttttcttgtttccactttttaaataactacttcatgccacatgctattaggtgcttttcacatacatcgtcatgtttaatttgtaccaacaaccctgtgagataggaaatagcttccgtatgttagcagtgagtaagctaaggatcagagaggggaggttgcttggacaactggcttagccatgattagaactccaataggttcttaaatgatgatagaaaaggtgtaggaggatgggagccgaggctggcatacctg

SEQ ID NO: 399724 - DNA, 258 bp, Homo sapiens
tgataaaaatgttgacggtgctttcacatgccactaaaacctccttcaggctgctcttgagatacactgtcatgtctacagaggcagacgcctctcaatgccaatgtcatgggacaaacaaggatcactaggtctttcctttccgtgtttcaggcatctctcattggcaaagaattcaaaacgcatttaaaaataagtactcagtgcctgaattactttttggatggagatgacatttgtgttatttttccactctta

SEQ ID NO: 399725 - DNA, 287 bp, Homo sapiens
tattctcctgggctatgagggctagggccaggataaagaatggtggatgcctttccttatgccttgatcctaaccggtaccctcttagctgagcaggaagggaacagagaaattaatattctcttatattcctgcaggaactcttatggctatatggtgtgagatgactaaagccaatttagcagctacttgtaaaagtaataaaaatggaggggaagaagaaagattctgatgcaacaggctgtgaagactaattcaacatttatttattgagctactgagcatat

SEQ ID NO: 399726 - DNA, 323 bp, Homo sapiens
tctacggtattctgttgtatcaggctagggcagacatggggcattcctacacccagacatgcggatggtttcttgatatatcacctgtgactctttctagggccttctctggccccagaagcatgcttggcttggccagtgcagggctgagcagaagtgttgaagggtcagtgcctttgggacagccctaaacagtgacaggcaggcgtcagtggacggagccccccaccctgctgctgaccctgcagtagacaactctgagacctgctttcctctgtctcccagcaagcttgagacactgtgccagccccttcccctccctg

SEQ ID NO: 399727 - DNA, 380 bp, Homo sapiens
gtagaataacattacagagaatatatggagaatgtctatctttacaaaagatcatttattttttttagtcagttggcagatagtgctgagctcccctgttggtaatgcagcgaggcgcacagggcccaggtcacttgtttagagccacacacacagcaagatagcagcagggaggaaaccgagagcaggtcttctcatccccggccctttgcttttcctctccaagtttttccttattccaagtttttctgctgtctgtaaggcccgttatccagcactggctgcgtggggtgtgcatccctgtttctcagctcagagggctgactgcacacaatagatgtccacaaggggcttgtggtacacctgtgttgcttctagca

SEQ ID NO: 399728 - DNA, 536 bp, Homo sapiens
actgaatctcacttaaaaataatttttttatagtaaatctgttctctcagttaaggatatgaatgatcctcagaagcaatacaaatgaataagacatttaaaaacttcactaagcaaaataatgcaaattaaaatgcatgttttagtcatttgtattgattcacttgtcaagttaacaaagctttacagttagaaatattcagtatttgcaaggatacaatgaaatggtactattctaaactgctgcagataatgaaactcattctgagaaattatttggaaataccaagagccagaaacaaactaaatgctcaaaaattgaaggatgattaaatttgctggtgtattcttgttatatagacataataaatatattttttaaaacaatatggaaaaatgcttgctgaataatgtgtgaaaaatcaggatagaaaattatatgtatgttccaaatgatgtttaaaacaaaacatatacattcttacattctttcttacacgtgtttcttgaaaataaaggctggatggtaaatatca

SEQ ID NO: 399729 - DNA, 107 bp, Homo sapiens
gaggcaatttattaacctagcatggtttgttctaatgcttcttgttgtcagctgccacctctccggtgattctgtccacatctctctgtccctgaggtattagtttg

SEQ ID NO: 399730 - DNA, 483 bp, Homo sapiens
gtttgacatgaaattgactttttcttctagcaacacttatgaatattcaaatacaattatggaaaagattttttgcactgatcagcataacaaacaaattagacatcccagtgtgcaaatataactttctgaatttcctagttttaaatattccagtggccaggataccctatccagaggaagcaggaccgtctcagctgaccagggcccttgcctgctaatagcatcatgcataccttgtttcttcatgaggctgcttgcccgagttccaatccaccaggaattcatcttgtatcatagctgatggatcccgtgtctcgtttctaagttggagcatcactttgcagctcccaaccagggccagccacaaaatttgaaaggcccagtgcaaaataaaaatgcagagccccttgttcaaaaagcaggaaaagaatgggccagcaaaggaactaaaataaacgaaagcttttccctttcatccat

SEQ ID NO: 399731 - DNA, 521 bp, Homo sapiens
acagagtgagactctgtctccaaaaaaaattaaaaattaaaaaaaataataaaaataagaagtttttttgggggggattaagtctcactgtgttgcccaggctggcctcaaactcctgggcttgagcaatcctcccacctcagcctcagagtagctagactacaggcatgtgccactgagcccagtttttatttcttaagaacattctgacttaagtttaataaagacacagagaggccgggcacagtggctcacacctgtaataccagcactctgggaggctaaggcgggcggatcacctgaggctgggagttccagaccagtctggccaacatggcaaaaccccgtctccactacaaatacaaaaaattacccaggcgtggtggcaagcagctgtaactccagctactcaggaggctgaggcaggagaatcgcttaaacgcgggaggcggaggttgcagtgagctaagatcatgccactgcactccagcctgggcgacagagcaagactccgtgtcaaa

SEQ ID NO: 399732 - DNA, 557 bp, Homo sapiens
gagaaatgcttcaggacattattctagacaaagattttgtgggtaagacttaaaaagcgcagatgacaataacaaaagtagacagatgggtctatatcaaactaaaaagctttggcacagcaaaggaaacaatcaacagaatgaagagataacctgttgaatggaagaaaatattttcaaactattcattcaacaatggactgatatctggaacatacaagggattcaaaggactcaacagcaaaaacaacggcaatgacaaaacctacaagcaatcccattaaaaagtgggcaaagatataaatagacatattttaaaagaagatgtacaaatggcctgatagcatatgaaaagattctcaacatcactaatcctcagggaaatgcaaatcaaaactacaaagagatattgtctcaccctagttagaatggctattatcaaagagaacaaaataaaaatgctggtgagaatgcagagaaaaggaaatttatacatgatcaatgtgaatgtaaattagtacagccattttggaaaacagcgtggaggtttctcaaaa

SEQ ID NO: 399733 - DNA, 1244 bp, Homo sapiens
tgaaaatgcctttcccttagaattctcattctctccttcagttactcacatccaaaaattatttaaggcctaaaccaagtccaatcatcttcaagcagctttcttccactcccacccaccatagagatagatctctctttcccttaccttcctgtagcactttgttatctatacctctcatgtgcacttaccccagctccaattctggatgtcttgttctcctagtgagattgtgagctcttcaaggtaaggatcatgtctttgtgcttccttcttttgtgactctgaagtgcataacatggtgatgtgccttgggaattttcaataaatattcatgggaaaaatgaacatatcaatgtattaagctcaataaagtccgttttcctaaaaacagtccttcattgctgaagtgtgaaagcatgtaaactataatctactggatttggtatttttattattcttttttactaatatatacattctaacactttttgaccactgcttagagaaaatagaaggcatgcttatcaaatttcagatggcacgaattagaagtaataagtaatgcacgagataacagaatcaaaaactagacaaattagaaataagtaaataacatttaacagggataactacaaaattagattttaaaagaacaggtacccaatttcagtatggaaagacatggctaacatcaggttttaattggctgctagactgacatgagcccagagtggtacacagaaccctgttcatagttagactcagggcactgagtggtaggtgaaatattcaggctccaacaaggcacaggcatgaatgaagattgctagatggtggccagctagagacagatggagcctcaatgtctggtaaagtctgcagtaaagagcagaatgaagtcctatactttatttaacccgggagctaaacaaataaacaatatataataagaataaataggctgggtgcagtggctcatgcctgtaatcccagcacgttgggaggccgaggcaggcggatcacctcagttgaggagtttgagactagcctgaccaacatggagaaactccgtctctactaaaaatacaaaattagccaggcgtggtggcacatgcctataatcccagctactcgggaggccgaggcaggagaatcacttgaaccccggttgcagaggttgcagtgagctgagatcgcgccattgcactccagcctgggaaacaagagcgaaactccatctc

SEQ ID NO: 399734 - DNA, 396 bp, Homo sapiens
gatgaggccttcccttagctcctcaagctgaaggcatttcccagcctccttgttcccctccgtgtgtctcagcttggtcctcatcctgggtccccgacactcctctggcacattagggtctcccgctcacctcagggcctttgcacacactgttgcccctccttggaaagctctcctttctccgtttctcctgcatacttggctaaaagtcacttctttgtttctgtgggcctcccctggatccccaaggcttctggacatttccttgagaccgcctgtcactgactcacttcgttcccatggtgcccgcagctctgcggacctcggagggctgccctgaacacctacagttaacgagggggatccagtgctgaccaaaagaaaaacccctgccct

SEQ ID NO: 399735 - DNA, 596 bp, Homo sapiens
cacaaagttttatttagacaggaagaaaaagttcaaaagttctattgtgcaatatggcaagtagagttaataacaatgtattgtttacttccaattgctgggagtagattttaagtgtacacacacacacagatacatatgtgagggaatgcaaatattaatcagcttcatttagccattccacaatgcatacatatgtgaaaacatcatgttgtatacactaattatatacatttttatttgtcagtttaaaagaataataatgaaagaaattacacagctaaatcaaaggatgcacgtgtcagagtaactggaaagacagcacatgaatgccacacaagagtcctgttacgtacaaccccactcacaatcacctcttttttcattctgtacacaccaggctcactgcccagctaatagccccattaagcaaacccaggttctcctatatttcaacctctgtttagatacattgcctcacactattaataagtatcatcagccttcctagctttgccaatgcctcaattccctttccgcctttgtgcacatcactccaacaatcactggtcgactttattgaacctgcctcatgg

SEQ ID NO: 399736 - DNA, 454 bp, Homo sapiens
ctagctacttgggaggctgagggtggaggatcctttgaccccaggagttcaagtacggcctgggtaacagagaaaaaccaggtgacttaaaaaaaaatgtaggtgccactcaggggttcaatccccagaccactggcatttgaaagcatgttacataagcgtttcatattgctagggtcaccaaatcaatttagtatgtcactaatggcatgaaaaaaagacataatacaaagtgcagaatgtttaataaatcttttgcttcaagtataaatcatgtgtatactgggtcattgcaaaatgtatttcttatgtgagttgtggctaaaacatttgaaagacattgatctaaattaacagtcttcaaaattttgtttgcatgaatttatcattgtaagtttagttacaaaggatttcatgtggattgtaagcattagcattgttaaataaaacctta

SEQ ID NO: 399737 - DNA, 278 bp, Homo sapiens
gccttaaacatgtatttctgctctaaacattcagtagtgccggcatatatgctcagataaaagagaagatatattaataacataatacaataactgacagtaaatagtgagcttggaatatatttttacctttatagctatttaaacatggcagataaggctggagccattggtgcttaattaaattgggataaaatgtggacattttgacagcaccatggggtacaagtgaaagggagttccctaaagtaagagagtaggtcattcttttgcaccta

SEQ ID NO: 399738 - DNA, 805 bp, Homo sapiens
gctgagtacctcctatgtgctagacactgcagtggttgctgaggatatggtggtgcatgtgataaaccataaacatgattcttccctttgaaacttatactctagtggagaaaggtgggattaaacagctaattatgcagtgaaattttaaattatgatcaattctgcaaatcggaaagtatacaatactatgagaatatagcaatcagggacctaacctggcttgggggaaaaagtgatgttaaggttcatggtcaagggaaagctttcttggggaaatggtattttgagttgtactctaatgatgagttgaagtcaaccagggaaaagttaggtggggaagacacgaattaaaaacttacagatcaggaaactggcacattcaaggaactgacagaaggtcagtaaggctggaacaaagaaaataagggagaaaataactcaagctggtgctgataaagtcagcaaaaggccagatgctgcagccttataaactaagtcaaaaatcttgatcttggctaggtgcggtggctcacacctctaatcccagcactttgggaggccgaggcggaagggtcaccaggtcaggagatcaagaccatcctggctaacacagtgaaaccccatctctactaaaaatacaaaaaattagccaggtgaggtggcgggcacctgtagtcccagctactcgggaggctgaggcaggagaatggcatgaacctaggaggcggagcttgcagtgaaccgagattgcaccactgcactccagcctgggcgatagagcgagactctgtctcaaaaaaaa

SEQ ID NO: 399739 - DNA, 502 bp, Homo sapiens
attctaaaacacttagtacagtatgatcttcaggttaaattataaattaacagcagaatgagactgtgttttaaagcttgtcaagacacctgttcaaggttgatttaatacatggaataatcaggctcagctatttctatgtcattctcagtgcctaaaaacaacttttacctaatttttgaagccagcaaaaacaataataacaaaacctgtagtatttacaaatatgtcatttgtactgtaaataacatactttttctcaaatatacctgaatgtgtgctatttgaaataattccaaccagcctgaccaacatggtgaaaccctgtctctactaaaaatacaaaaattagccaggcgtggtagcgcgtgcctgtaatcccagctactgggaatgctgaggcagaagaatggcttgaacccgggaagcggaggttgtagtgagccaagatcacagcactgtactccccgcctgggcaacagagcgagactccgtctccaga

SEQ ID NO: 399740 - DNA, 279 bp, Homo sapiens
cagacatagtggacaagatcaggcagaagaacatttaattaaagctaaggttctggccctaaaccacattatcagtttcctggtgagctaggccacacttcagataagtctcaagcactttctttgcctaagctctgaaaaatctacgtacctgcaaaaaaagtgggggtgtggtagggagttctgaaaaaaactccttagcttctttttctacaccttaatctctgctgtgctcaggtcaaagaaaggtaatctgagtaaagaacagacagaggggag

SEQ ID NO: 399741 - DNA, 457 bp, Homo sapiens
gtcagaatcagattaggtagaaataataaaaaaaaagttctctaattcactctacctcttacaaatagccatgctttctcagtagagaatacatatttttaaaatggtcaagctctcccaaatgttgatacaggcaacacggtagtctatgtgctcaaatgctaactcgactctatcacagctaaaccttttaaagcagtttcttcaactattaacactgcttactaaacccctattacacagactagctatgctatttatgcccacacagaatcacaagagttgatgtacatttttaagctttttaattagaaggaaaatactaccacattgatcattataatagtcttaagcacatagtacacaagtttcaaatctcctaaatcccacttcttgcccagaggcaatcaatgttaattgtttggcatatgtatttctggacatatctcttatgtct

SEQ ID NO: 399742 - DNA, 489 bp, Homo sapiens
atgcaaaatctgtatgagaaaaactaccaaactctgattaaagaaatcaaagaagaacttaacgaagaaatattctatgttcatggataagaagacacttcattgttaagacgtcagttcttcctagcttgatctaccgatttagcacaaacccaatcaaaatcccagcaagttattttgtgggtatcaacaaactaattttatatggaaaggcaaaatacccagaatagccaacatagtattacgaaaagataaaatcaaagtactgacagtccccaacttcaagatttactataaagctatagtaatcaagacagtatggtattgggggggtggggaaagacaaatagattaaaggaacagaagagagagcccagaaatacaccccacgggtacagtcaactgatctttaaccaaagaacaaaggcaattccatggaggaagaatgtcttttccacaaatgatgctagtacaactggacatccacat

SEQ ID NO: 399743 - DNA, 275 bp, Homo sapiens
caaccagtgggcaggggctggctgaccctggagaacggggcgccttgaggtgcctgaggccccaggaagggcttagtgttggcgggagccccaggccacacagaggaggacagacactcactgggcttccaggcctcctctgggactgtccccggccagaactctggctcattcggcctcggtccctacccctgttctagccggacggtcaggtgtcccaggccccgcgggctccctcactccgccctggctcctctctgaggctcccactgccg

SEQ ID NO: 399744 - DNA, 564 bp, Homo sapiens
cagttttgtacaaatatatttaacaaatgcatgtatatcatctaatataaaatgcatttcttattgtgacttgataaaaaaaatttttttaaaaaaacgttggtcaaaagttttgaccaaaacattggtcaactcaggggaaaattcacaggagtaaacatgtgaacttagggtgactaggacacatgcctgatctcatggacaactctgaagagggacagacactccatattaatgctaccacagactgtagactacaggagccaagaggtgagaacatgaacaaaagagaaggagccctggggaaagggatcaggaagtgtcaaggcacagaggagggaagtgtgaggctggttcaggagatgctgaacatgccacttagctatggaggtggagtaggagccacagctgggaaggcaaacggagccggatgaggaaggccttgaacgtcatgccaaaaagtttagactacttcacttagtaggctgaggtagtgtttcccaaactgcaggttgagaattaagaacttaaattaccgagccataactagtatttttaaaaatt

SEQ ID NO: 399745 - DNA, 1005 bp, Homo sapiens
ctcattttacaggttagaaaaatgagacccagagaggtttaagtgatttactatcattaagtagaggaattgattctagaaccaagatatcctaactctagtagaagataatttttgatgaatatccttgatattagtaaagggaggctaatcctgtatatagaaaaagaataagagacttaaaaaggctttttttttcagcatccttatttaaagagatataattgacatacagtaaatttcacacatttaaaatatgcaatttgataagcttgacatgctgataacaactgtgaaactgtcagtgcaaacaatataatgaacatatttaccactccaaaagtttctttgtgtctctttctaatctcctcctgtcattattccctttctcccagtccctactttctgtcactatagatgaatttgccttttgtggagtttttatacaaaaagaattatacagtatgtactttggaggtggggggcatggcatctttcactcaaatcatgattttgatatttcaccatgctgcagtatgtatcggtagttcaatcatttttgttgttgagtagtatttcattatatggatatataataccataatttatctttacctgttgatggatatttgggttatcaccaggtttgagatattacaaataaagatgttttgaacatttgtgtagaagttttagtggacttacactttcattattcttgtgtaaattgcctaagagaaaaatggctaaaacatatagcaggtgcatgttttgagtttttaaaaagctaccaaatgattttccaaagtagctgtatcattttacttttccactagtagtgtttaagagttctggttgttaaccaggtgcggtgttttgcacatgtggttccagccacttgggaagctgaggcaggatgatgaattgagcctgggaggtcaaggttgtagtgagaggtgattgcccctgcacactccagcccaggcaacagcaagaccctgtctc

SEQ ID NO: 399746 - DNA, 330 bp, Homo sapiens
gtcgccatctttaagaactgtgacactcactgcggggctccgcagcttcattcctgacgtcagcgagaccaataacccaccaattccagacacactgcgtcctgtgctgcagggggaaaggcacggactcaaaactgccagctttgttctgattgggagctctgcctgcctgacaggcggcctgggctgagaagagtggggcggttcacagggagagtcccgcggagcaggagggccgtgcgatgatagtgaaaaacaagaaccatctgccaaagggctgtgctgcacccaaatgggctctgaaataaggaatgggacctgagccgcctt

SEQ ID NO: 399747 - DNA, 430 bp, Homo sapiens
aaaccacatctctacaagaaatacaaaaattagccagacctggtggtaaatattgtagtttcagctactcaggaggctgaggtgggaagatcgcttgagccctggaggttgaggctgcagtgagccgagatcacaccactgcacttcagcctgggctacagagagagatcttgtctcaaaacaaaacaaaacagaaaatgaaaataagcactaaatgaacctgtaataagggtcaatgcatgcttcaaataatgatctttgagcttctaagaaggcaaggagggaaaaaagacacaatgagttatagaattctctttttgagagtggaagaagacaatttcttggagaagatgaaattccctgtcattgaattactttgaaaaatatttttttctatttataaaagtaattagataacttctgataatgt

SEQ ID NO: 399748 - DNA, 422 bp, Homo sapiens
tttgaggtgagtctcactgtcgcccagactggagtgcagtggtgtgatcaatgcagtggcccattgcaacctctgcctcctggggttcaagtgattctcctgcctcagcctcccaagtaggtgggattacaggcgtgcaccaccaggcctggctacaaaatctgaaactttttgagtgatgacatgacactctaaggaagtgcttattggagcattttatttttcagattttaagattagtagtgctaaatgccagtgttccaaaatccaaaaaaaagaaaaaaaattgaaacccaaaacacttaaggtcccaagcatttcagataaagggatacccagtctgtattaacattttattttacttgcattaccatatattcatctctttgttgctgtgtccatccattaatgtatttttatac

SEQ ID NO: 399749 - DNA, 280 bp, Homo sapiens
ctgccatcttgtcttttccgttgttcaagaattgtgcctagaactgcctttttgtttcttgtctcttcatttaagtagttgtccacatcttttaaattctccacctggagaacctgaaaatttcattaaaggaccctcctgttccatctggcatgttggtttctatgcctcccctgcaggaatgctccaggaaggctagatgggggctgagcggccttcataggggttaatcgcattgctacaaggcagccggcatcttactgagttaaacttctgcatg

SEQ ID NO: 399750 - DNA, 577 bp, Homo sapiens
tcctgagaatattctctgttaccctgcagtaagctgtctacattccaggattcgacagcctgcttgcttaatagccttcaaaaacatacatgtcctgtcatacctgtgctatgttctgactacttggtaacttgttagctcagagattaattttagggatgttttatataaggaaacctctcctctaatgctacctccttttgttacctgttaatagtcatggtgttaggtttattgaatgacttttgcctctatattattttcttctcaatgttcttttcattaggaatataatggccgggcgcggtggctcatgcctgtaatcccagcactttgggaggccgaggcgggtggatcacctgaggttgggagttcgagacccgcctgaccaacatggagaaaccctgtctctactaaaaatacatagttagctgggcgtagtggcacatgcctgtaatcctagctattcaggaggctgaggcaggagaattgcttgaacctgggaggcggaggttgtggtgagttgagattgcaccattgcactccagcctgggcaacaagagtgaaactccatctc

SEQ ID NO: 399751 - DNA, 371 bp, Homo sapiens
agggaaactcaactcagatttctttgtcccttggaggtgctgggcctccgacattgcccagctacagtccaagaagctcttatcatcggcgacctcatgacctttgggcctcagcgcaggtccctgcagatctgaaagttctttaattgctgagtcaagtcccatcctcaaggaacctcccggcccatctcccaggagaacaatctcttcctactccccactccccatctcagtgcttttagccagcctaaactacaagcccaagaggcatttctcattccttcaacaaatatttgtatatgtttattgattacctagtaagggtattctagtcagggagatcaacaacagacatgcaaacaaataaatcc

SEQ ID NO: 399752 - DNA, 1608 bp, Homo sapiens
  misc_feature (949)..(949): n is a, c, g, or t
caagttatgccctgacctggaaattccccagagttgctaaaagaactgaatgggggatactgtacataagagcacttaagcaacttaaaatgtcacatgtagggacatatgcgtgtcatgtgaatagcagctgcattttgaagttgcaataagtgtgaggaaaatgtgcttgttagctcagctctagacagatccatggatagaaagacatagacatggatccccatccagctaagtatttgcaatccgcaggtgaagcctggaaacccagagaaatggacctgttccatccgtgacagaagcgctcccaggacctaaattaaagggatgttagaatgttttgagaatcttggcagggccattaggtagtgtttgtagcttttggatgcttttggtggagggaaaatgagatgggctcacttgggaggtctgcctgcagtttccatccaaatttctaatcaacgttgtggttttatcatccatttccggaatcattaccccttaaaatgtgaggaaaacgactctccttttcttcaactccccatcttttccaaataccgctgcgagtttttgttgccaacagcttttcccaatgtgcgtgtacttaccaacgtccagactcctccctcccatcggccagccttgcttggtctagctattattcaaaggggaacatgcgtgagatatcactttgtttttgccatctaatggattccaccccccaaagtatctgactttgacactcaggctcatctgcaggacccgagggtgtcttccctcccctcccgttggctggctaaatgggttaatagaatacattctcttttccttttccgtgttttgtctggcgtttgcaatgccaagatttttttccagatgtcccctatttcctatttccacataccgcacatgaatcatcatctggcagaggaatcgtgagaatccatgngatcagtgtgcgttcccacattcacctacttttgtcttttttgatagttctttgaaaacaatgaatttttttaaaaatatgcctgaattcaagggtaaaatatcaacaatgtaccctagaaaagcccctggaagcagatctatgctaaatggtttattttattctgcacacgaggcccacccgtcgctggctcccctatgccttggacgtcactgatacacacacatcccgttcccgaacagggagagtgagctgcacattctcgtttccagctccacttcctagatctgcccaccgtaaaatctgcccttttgccatgcgctgtgggacctgttagactcaggagagaccatcatacaaattgatggctcttgatttgcagctgtatctggagcttaccgaatctagtgcagctttaaaaatagggagccgattctgtttccaagttcagaaggagcagcgatttggcatctaccggttcctgcccttcttttttgtcctgggaggaacgatggagtggatcatgattaaagtgcgcgtgggccaggagaccttctatgatgtctaccgtagaaaagcctcagaaagacagtatcagagaaggctggaagatgaatgagactgaacttcagcagtcaataaagtcaatatgaattttt

SEQ ID NO: 399753 - DNA, 445 bp, Homo sapiens
ataaaatagagacttcaggactcagcagcagagactccatctcagaaataatagtaataaaatagagacttcaggactcagcagcagagactccatctcagaaataataataaaatagagacttcaggactcagcaacagagactccatctcagaaataatagtaataaaatagagacttcaggattcagcagcagacactccatctcagaaataatagtaataaaatagagacttcaggattcggcagcagacactccatctcagaaataatagtaataaaatagagacttcaggattcggcagcagagactccatctcagaaataatagtaataaaatggagacttcaggactcggcagcagagactccatctcagaaataataataataaaatggagacttcaggactcggcagcagagactccatctcagaaataatagta

SEQ ID NO: 399754 - DNA, 219 bp, Homo sapiens
ctctcacccccaggggagcatctgacaacctagaacagcaccctcaccccgaggtgggcatctggcagcataaaacagcacccctactggcagatgagcatatgacagcctggaacagcacccacacccgctggcgagaatctgacagcctggagcaacacccacacccccaggtgagcatctgacagcctggagcagcgcccacacccccaggtgagc

SEQ ID NO: 399755 - DNA, 371 bp, Homo sapiens
ggttctaaagactgggacgtccaagatcaaggtaccagcaggattgatgtctggtgagggctgctctctgcttccaagatggtgccttgttgctgcatcctccagaggagtataacactgtgtcctcacatggtggaagggatggaatgggacaaactcactctttcaaatctttttataaaggccctaaacccatccatgagggctccaccctcgtgacttaatcacctcctgaaggcccaactgcttaattctatcacattggcaattacattttagtacttgaatttgggggatcggtgggtataaaacagtttaagaatactgaagcctgtagccaagttgcactccacaagtgaatcaccaatagt

SEQ ID NO: 399756 - DNA, 521 bp, Homo sapiens
aataataataataataaaaataaaaacataaatgcagattttctgacgcaccacagacaacccaatgagaatctccaggggtgaggcccagccagttgtggtccaatagccctcttgagatctatcggattctaaagtaaggcactttaaagggaagaaactgctgtaactttcaaatggtgacttttctactctcagtgcttcctggaatttaaatctctcgagattcagacttacccagggtcacactactacagtgtgactaagttacgtgtcttaattcaaaagcttgaaaattaaaaacaaaagagagaatataaaatttgatttggtttacacaagtattataattatttatatgacctgctcaccatttttaaataccaaaatgccatactgcttaaaattacaatacttatatattttaaaacatgtattagataagctttgttcttcattttattttgttacatgagcatggctctctctctatgactttagaagattaggacattgtgacc

SEQ ID NO: 399757 - DNA, 235 bp, Homo sapiens
caaattatattggctaacacatccagaaaaatattaagtaatagctgtaaaaatggataaactgcttttgttcttgacttcaagtttgggagcacttttatggtgcccccattaagtatgatgctgaataattttttgtatttttagtagagatgggaggcggaggttgcagtgagccgagatcatgccattgcactccagactgggtgacagagtgagactctatctcaaaaaa

SEQ ID NO: 399758 - DNA, 303 bp, Homo sapiens
caggtagaggtgtcatctatttttttcaaacagaaggcaaaaaacttagggagagggatttctattcattttatgatacttttatcaaggcattatttttcataacttctctgttgcacagaaattgatctaattggtcatcctaggtttctaggagtcccacttttagaaaatgatgtttcaggccagtgcagtggctcacgcctgtaatcctagcactttgagaggcaacaggcaggtgggttgcctgagcttaggagttcgagaccagcctggacaacgtggcaaaaccccatctctact

SEQ ID NO: 399759 - DNA, 342 bp, Homo sapiens
ggaaggcagctctccaaggtctttcattcgacattgaacatccactttgagatccacagtcatagctcagatctttaggagaagttttttggaattacctcacacagcagagagagtgtttcattcatgaaatatctctattttatatcccaacattgtggcattttccagagtgccatgctcataaatccataaattctaagttcatttagtcaaataagtccttaacctgggacatgctgttaacatttccatatgtaaggaccctccttctaccaaatactattagtctattgacctgcaggactaattttcttgttgacagagattagaagttacctg

SEQ ID NO: 399760 - DNA, 410 bp, Homo sapiens
ctgtccagggttgtgttgaaataaattttctccacaaaatgtgtgtctaattaatgaaatgtcaactttatttatttctaggtggcagtttggtttttttcaccattgcaaatgagaagaattaaaatttccagttaaaatggcagtgaacttttatttttgttaaaaacttaaggaaagtgtttgagtctgttttactcacattatttcatttgatcttagaagaagggctgaatccctacatggtctgttttgtttgctgttttccgaataaaatgcaataaatattttctccatttgagatgatcagattatttaaactaagaaggaaatttctttccaaaacctggacaaattatatagccattcaacacttgctttattctattgtgttaactccctagcaaagc

SEQ ID NO: 399761 - DNA, 377 bp, Homo sapiens
gacacacatacacacatgagtgcccacagggacggaaatgggtagaagatgggtctagagacaccggagttcaagacccgagggctgcgaaccttcacgttttcggggagggcctgaatttcccccgtatcacaaccaccgttcttccaacaaactaaacgcccaccgtcattaacctgtccgctggttgaacacccggactctaccctctccagaattaggaaagggctgcagagtccgaaggtgctggacagagtcaatcttttatggctaagactgtgagaaggcacggaaggcgagcactccaagctctaaggctaaatcagagctttcctccccagataaaggaaattttccctccctgaatacgttttcta

SEQ ID NO: 399762 - DNA, 289 bp, Homo sapiens
ctatattaccatactggctaagatttctaacacagttattcttgacttgggaagaacttttaatattttaccaataagtacaatatttacaggcgatttctagtcctagttttctaggagtttttttttttaagatcatacatggatgttgagcatcaaatgttctttgtatctctattgagattatttttctcctttagtctgctaaaattatgaatgcttttcaaagttaaaattgtattctttgaaaaatatccaccttggtcatttttgtcctttttacataatg

SEQ ID NO: 399763 - DNA, 292 bp, Homo sapiens
tacttttgcagagacggggattttaccaccttgtccaggctagtttcaaactcctggactcaagcagtcctcccaccttagcctgtcaaagtgctgggattacaggcatgagccaccacacctggcctattttctgtaattttttaaagcactagtctgaaatggtttcaggaaataaactgcccaggtgattgtgacacagggctgtgttggagagctaccagatgaccctcaggaaggtgatttgctgcccctccctctgaggttccctttatctcctcagaggtgggca

SEQ ID NO: 399764 - DNA, 339 bp, Homo sapiens
ggtccttggtggacacggttgttcccacagtatccctcaccagtggaagctggacattgtgttccctgggctctgacactgccgactcctgaggacagtggcctatttgtttaatttattggtggtcactgttcaaaggcaggccctgtatgccagccactgcccctaccctgtcctcttagcaggagtgagcagagcagagcaggcacatgcgcccagcgccgaggcatgtttctcacctgactgcgctgaccaccagaccggtcatagtctatcggaacctcgcccctgcttacccctttcctctttatgaccaacacagcctcagccagcactgaa

SEQ ID NO: 399765 - DNA, 418 bp, Homo sapiens
caggatttgttttataaagatataaaatcaggcagtcgttttccaagaattgccttggggccttgtgacatgaaggaatgggagataagacagtgtggtactcatccgggagggcaatgttccaaacagttatttgaaaggagtggcaataatatagatttgaaaagagttgcatgtttatccattaaaatagctaagaatatatcattttattgagattttctatacctgacgtgtaatacaattttttaatggagaagttgttttcatcattatcctcacagaaaatccaagaaatccagccaggcgcagtagctcacacctgtaatcctagcaccttgggaggccaaggcaggtggactgtatgcattcagaagttcgaaatcagcctaggcaacatagtgagactctgtctcta

SEQ ID NO: 399766 - DNA, 623 bp, Homo sapiens
cagagaaggcacccagctgtggctgtgggtagagggcacagccactgccataatggtgtcccttatcaccttagggagggagcaggaggaagaaatatgctctttcctcagccacctcccaccacctgccccaatctcctgccggtgcatcccatcagctaaagcagaagatgagatccactgaagtcaaccccctgggtacagcgtaggtcagaaaagagcaaagaatggatctaaaggaaagccagtatgcagatgggcataaataccagaccactgtcgagctgtgggcatgatcacagtcctgggctctgagcagtgtttctcagaggagcatccagtgctagagttggctgctcggtacacagacacatgctccagagttttcatggcatcttgggtctgggcccttccagttaggaggagacagtctgagagattggaggccgagtttcagtccaggttttgggtttctctttgttatccccagtgccccagtctatggtggaaaaggctattttgttgatgctaaagggaatgagcagtaataagatcccaggctttcaggaaactacactctgaaatcagcaccacctctttctgtcagaagtttccattcccag

SEQ ID NO: 399767 - DNA, 958 bp, Homo sapiens
gcgaggtgctctagaggatcgcaatcagttacacaaaaaacaacacaaaacaaaaaaccatgaatgcctaatgatttcccactgaaactttcaaatttacccttgtttgatgagaggaatgagcaggagcattgttgcagtagaaaggactctctggtgaagctttcctgcaaaagctttggttaactgtctcaaaaccctcttataataagcagtattttccttggtttctccagaaagtcaaccagcagaatgccttgaacttcccaaaaaactgttgccatgacctttgctcttgaccagtctgtttttgctttgactgaaccacttccaccttttggtagccattgctttggttgtgctttgtcttcaggattgtactggtaaagccatgtttcatctcctgttatagttcttcaaagaaatgcttcagggtcttgatcctacttgtttaaaatttccattgaaattgaaagctttgttctcgtctgcagctgatctgggcacaaaagttttggcatcccttgagtggaattgtgtaagctgaatcagttgagatgtctaggcaattagctattgtttcttctgttaaacattgatcctcttcaattagagcacaaacgagatgatatttttcctcacaaattgatgtgaatggtgtgcttttgcaggcttcatcttcttctctcattccttcttaaaatgagttatccatttgtaaactcctgattgtttgggtgcgttgttcccatacactttttgtaaagcatcaatgaatttcaccattcttccacccaaacctcaccataagtttgatgtttgttcttcatgtaatttttgcagaattcatgttgctctgataggggaattttttcaaactagtattttatccttcttggtgcatgaaagtagattctattcaaacatgttataagaagatggtagaagtccatttggt

SEQ ID NO: 399768 - DNA, 352 bp, Homo sapiens
ccatcaaaatcttcacatagattcatcacttctggccacatgctaggattaaacaagattactgttatatctttgagccttgtgggagaatctgcttttcacttagctgttcatgcagggcagggtgaagcaaagaaatccttcctcttgtaaggaaactttgatatctcttacctacttctgtgcttctgctttgggatgtgaaaatactctactaagtggcaacaaaatttgcaccagttcttaacaccagtgcttcccagataaagagtgaccctccaggagttcttcagctgagcctgagttagttgctcattttgaacctcatgtggtgtgtagaaatgaattaaaa

SEQ ID NO: 399769 - DNA, 453 bp, Homo sapiens
tggggagtggaggggccttgctttgcttcttcttgactgactggtactctttttattatgtatgtatttatttattcatttagcgatcctcctacctcagcctccagagtagctgggacacaggtatgcgccaccacactcggcgaattttttaattttttgtagagatggggtcttcttctattgcctagggctaatgttggactcctgggctcaagcgatcctcttgccttggcctcccagcatgttgggattacaggcatgaactaccgcacccggcccgtactctgtcttcacctcctctgggaagccttcctcagtctctggctctcaggtcgcccgtgcatacctgtcctgaaactgctttcccacctgtgttcccagggcagagagtggatgcccatggatggtttgtcaaaggaataaattagccttttttggaggaactgtcta

SEQ ID NO: 399770 - DNA, 359 bp, Homo sapiens
actacactccagcctggacgatacagcgagaccctgtctcaaaaaaacaaaaaaaggaaaaaagtggtccaagacagggctccgtgtaaaaggcggcatgaggggaggtgaggggagtcaagttcaaagggagtcgcagctgtgagctgtctgcaatgggcggggggggcagtctgcaccagctatcctgtgtactaccattttaattttactctgttttaattcatttaagttaatttgcacatttatttttagagatgggctcttgctatactgctcaggctgatcttgaactcctaggctcaagcaatcctcccacctcagcctcccaaagtgctgggattaaaggtgtacgccac

SEQ ID NO: 399771 - DNA, 672 bp, Homo sapiens
tcaattatctgagtaagtcaaggaaagtccttgtgggaccaggtcacaagccctcagtttttagagtcaggatgttggggtgggagtgatagaactgattgaagtcaatatagcctggatgtggtagattgttttatgtggaggggtagttgttcaggacactgattgttatctgaacacccaggatgctttctttggctgtcactgtagtaaaaagaacagttttaaagcctgagccaagtgtcaagcagcaggagggtgtccttcgtgaactctgaatttatggggctgagtctgagagcgaagagatgccaacagtagcgactgagaacattctggatgattttagtaaaccccgaacaaattccttatacaccaaggagcattctccttgttagaaattcctccagaccacgactctggccctggccctggggtgaggagatagggtgcctggccgtagtggatctaaaacgggatgacaccggaaacctgtggggaggacgccgtccttgtcgccccttgacagagggggcacagaggccttagagaaacaaaaataaaaatagcaattgtttgccacttccctccctaataaagtgttctctccaaacctggtttccactctatttctgaactgtttcgccccatggtgtgtaggaagccagggta

SEQ ID NO: 399772 - DNA, 417 bp, Homo sapiens
tgctgcatcatctcgtggtggaaaggtggaagggcaagagagcgaacaaacgtgagggcaaaaggtgctgttcttatcaaacccactctcctgataatgaatgccctcctaagataataacatgaatgcatttatgggggcagagccctcatgacctaataactccctcaagatcccacctgtctggacggattgtttgagctcaggaattcaaaaccagccttgagaacatggcaaaacccagtctctacaaaaaaaaattaaaaattagctgggcatggttgtacatgcctgtagtcccagctactcaggaggctggggtgggaggatcacctgagcctgggaggccgaggctgcagtgagctgaatttgcccccctacactccagcctgggtgacaaagtgagactccgtctca

SEQ ID NO: 399773 - DNA, 343 bp, Homo sapiens
tgataacatgggcaatctggaaactactcccatttgtgagggtaaatctctattatgatacatggaaaataggacagatgctaattcaggtaagaaaaggtctttgtattatacaaatatttaccttcagacagaaatgttaatgaagatggagaaggaacagttaccaagaaactagggatagtaggacacaaaaaacctggtaacctggtagtgagtatgaaccagtctggtgccttgcctccagaggagcagcaactgagcagagctactggacaaccagccctgcacttccctagagcacagaccagctcactatgcagccaccaagagataagcaccg

SEQ ID NO: 399774 - DNA, 254 bp, Homo sapiens
tcattcaacaagaatttattgaccaaaaactggcttacatactctgttaaataaagtagacataaaaatgaagaataaaagctccctcccactatggatcccattctttaaaatatgtcagtgaggtggggtgtggtggctcacacctataatcccagaactttgggaggtcaaggcaggcagatctcttgaggtcaggagttcaagatcaacctggccaatacagtgaaacccccgtcgactctactaaaaaa

SEQ ID NO: 399775 - DNA, 560 bp, Homo sapiens
tcttatttttatggaaaaggtaatattcacacgtagtcaaaacaatgtaagcagtacaaaagggtatatagtgtaaaccaaattctctcccacctgcggtcccactgccgcttctcagaagtaacccccgttgtaggctgggcgcggtggctcatgcctgtaatcccagcacgttgggaggctgaggcgggcagatcacctgacgtcaggagttcgagaccagcttgaccaacatggtgaaaccccatctctactaaaaatacaaaacttagccaagcgtggtggcaggcgcctgtaatcccagctactcgggaggcagaggcgggaggatcgcttgaatccaggaggtagaggttgcagtaagctgagattgcgccactgtactccatcctgggtgatagagtgagaccccatctcaaaaaaaaaaaggccctgttgtagttggaacagggattctgggaactttctgtgtctttagaaatagtgtttctcggaagctcagtttggagctgactgcacacgttgcgcccgggccttcctcgctgtgtcctaaaatgaca

SEQ ID NO: 399776 - DNA, 244 bp, Homo sapiens
tgccgtctgtccccgctgaggaggtgcagcagccggagatggcggcggtgctgaacgcagagcgactcgaggtgtccgtcgacggcctcacgctcagcccggacccggaggagcggcctggggcggagggcgccccgctgctgccgccaccgctgccaccgccctcgccacctggatccggtcgcggcccgggcgcctcaggggagcagcccgagcccggggaggcggcggctgggggcgcggc

SEQ ID NO: 399777 - DNA, 457 bp, Homo sapiens
ctccaaatctccaatgcattttctgtgttcctgttttatagtatttcacaccgtttgccttatctgctcctattccttcccctaagaaaaggaaggagagagagagagagagcacaaaatactcaacacaagatttgacataccatagaatctcagtaaaaaatggatagatgggctgggcatgatggctcatgtctgtaatcacagcactgtgggaggccgtggtgggtggatcacctgagttcaggagctcaagaccagcctggccaacatgatgaaaccccgtctctactaaaaatacaaaaaattagccagacgtgatggcacatgcctgtaatcccagctacttgagaggctgaagcaggagaatcactcaaacctgggaggtggaggttgcagtgagccaagatcacaccattgcactccaacttgggcaacaagagcgaaactctgtctc

SEQ ID NO: 399778 - DNA, 227 bp, Homo sapiens
acagtccccacccaactcactttccagcttccctgcgaccctccagccttcattccaactcatcgctgcctcacttgctgggagccccttgtcttcatgcctcttttccatcactgagccctgtccttagttgtgctgccaccgagccgcacacatttgctcttttcattacacagtgtcaatagtggctgctgcccacctgccatcacaggtagcggttcccgtgg

SEQ ID NO: 399779 - DNA, 442 bp, Homo sapiens
gcctgaccaataattgatattttattttatttttatttattatcctttttgagatggagtctcactctgttgccactgcatgccagcctgggcgacggagcaagactgtttcaaaaaaaaaaagtttcgtgatttctttattcctttgcatagctgaaacaagtcttatcaaaagattgtgaaactgtaatcaaattagaacaaatatttaaaaaaatcttgtactgaagcattcattctattttttagagtttctgtgaattgttcaacaatattcccagtattatattcataggaaaacagataaacagcacaacatgagtgtttcctaccacatcaattttaatgaagacactttctatattaggatcctgtcatttatgaattgtttgtattttaaatttttttgtgtcttagcgacataaattgttaatcattggga

SEQ ID NO: 399780 - DNA, 450 bp, Homo sapiens
gcgggcgggcctctctactcgaaggtgaccacgtttagattctgagacgggaagtggagggtgaataggtcaaggcggcctttttttttagtttaacttttccttttttgctgtctagtcatcctcgtcggtcttctgtccccattttcctcattagcattcccgttagcaggggcgtctcttccattttctgcctcttccacaacttccttcttctcctttaagtccttggtggtgatttcggagctggtgtctacggctgcgtctgacatggtggggcacgccggtgatccgatgcaggggattaaaaagaaagcgagagttcagggactctggcgataaagctgccggagtccgcggcggcggaggaggcgcgcggcggaggcggctgcggcgagcaaggaggcggatgaggaacaatgcaaagatggcttttcagagcagccagtg

SEQ ID NO: 399781 - DNA, 404 bp, Homo sapiens
ctccatcctcttcctcaccatcaccttcttcctcctcctcttcctccccaccttcttcctcttcttcgtctacctcattgtcagcctcctgctccccattttcctcattagcattcccgttagcaggggcgtctcttccattttctgcctcttccacaacttccttcttctcctttaagtccttggtggtgatttcggagctggtgtctacggctgcgtctgacatggtggggcacgccggtgatccgatgcaggggattaaaaagaaagcgagagttcagggactctggcgataaagctgccggagtccgcggcggcggaggaggcgcgcggcggaggcggctgcggcgagcaaggaggcggatgaggaacaatgcaaagatggcttttcagagcagccagtg

SEQ ID NO: 399782 - DNA, 486 bp, Homo sapiens
gtcctccaattgagtcagctaggacagcagagaaagctttcagaggggtagacttgcaagctcatctaaaccaactccttcaaaacagactccaaatatttcaccctacaagggatggggaactctggaagactggcatcagccgatatggctgaacagactgcaggtttggaatccaaatgtgtctacaaatgttcactgattgattgtcattttgttctccccacattttagttttgctcattttacagcccacagcctgtcttgtggaataaatgatacaagcaattgaagaaggcacactgtgcaccaaggggacgactcaggcaatctgcagcggtggtccagggctactcagctcagcctcagtcacctgcaatgaaaaccacctcttgccatcagagtcaatgatatagatgggacacttaaaaaccaaaacaggttcatattctctggtttgtaggaaagaattcatatcttcacagc

SEQ ID NO: 399783 - DNA, 827 bp, Homo sapiens
ctagaggatcccgtgatgttatcgcccaacaccttcatcggcagcatatgccatctccttgcagctctcccagccagcactaaagccagcctccaggctgtgaggctcaccttagcctgagtcaccatcccccacacttcctgagagtagttatgtttttattatccagtaattaaagataaaacatagtataaattgaattatgcatgtaaaagcatttgtattatttatatcacgagtcccaatatcatagaatacataaatgctagagccacttgtgattttttgttatttacaaaggctgataggcaggtggatttcagcatccctgccaacatggtgggatctgaggctgccagggtgggaaccactcgtcaaggagaacattccctgtgtctaccagcaaagatccaggccaactgctggctgaagagagagcaaaaagaaacaggctatgaagggcttctgctcttacaaccctataaggagtatatattttacactggaaaatctgatccttagagcaagccagtcctgtatcagcatatagtcctggtattgtccagaaaaaataaatcatcttgctacttagagacattagctagccaaacgcagtagaatctacaagatcacatagtattcaaattattattaaccaaaaatgccttgtagtactttaggggtacagagcaagcagagaaaaggtggtggtccatgaagtgccctttgtaacattcagagctgagctgtcccctgtaactgggcaccatccctgcactgctccttgggtgttgggcgataacatcacgggatacctctagagtcac

SEQ ID NO: 399784 - DNA, 387 bp, Homo sapiens
gggcttctgctcttacaaccctataaggagtatatattttacactggaaaatctgatccttagagcaagccagtcctgtatcagcatatagtcctggtattgtccagaaaaaataaatcatcttgctacttagagacattagctagccaaacgcagtagaatctacaagatcacatagtattcaaattattattaaccaaaaatgccttgtagtactttaggggtacagagcaagcagagaaaaggtggtggtccatgaagtgccctttgtaacattcagagctgagctgtcccctgtaactgggcaccatccctgcactgctccttgggtgttgggctctgaaacactccagctgactcagaaaatgattctcggtgggggatgga

SEQ ID NO: 399785 - DNA, 500 bp, Homo sapiens
gctgagctgaagatggaagagcctgtctgcgtgtctccccagtgactagtgaggcggcttttcctcccgaagctggaccttacatcagtgagaaataaacttccattgtgctaagccaccaaagtctgaaatgttacagcagctagcagtaccttaacccattgagtacaaagataaataacagtcactatctgaaaatcaagtggaatgcctatctctgggctacctgcacttttgtttgtttgtttgtttgtttgtttttgagatggagtctcactctgttacccaggctggagtgcagtggcacaatcatctcagctcactgtaacctctgcctcctgagtccaaaccattctcctgcctcagcctcccgagtagctgggattacaggcgcctgccaccatgcccagctaatttctgtatttttagtagagatgcggtttcaccatgctggttaggctggtctcaactcctgacctggtgatccaccccttggcctc

SEQ ID NO: 399786 - DNA, 508 bp, Homo sapiens
cagccctcaagtgaggtacagaaatttatgtaccatcttgaggctatgttacaggaagaatgcaagctcaaagcatggccaaaaaacaggttattgtggtgaattaggttctggtggtaagacaggttatgagagggggagaagaggggtttggctagcaaagatgtcttgataatatacatgaaacctcacaggtagcagtcctcagacagaatagatggtaaacgtttctttcaggtcctttaaggtgtcagactctcagttaatccctcctagatctggatgagggaaggctggctgcattaattgagattctgtagatgcatacctcctccaccaaagacagctttgcaggactgcttcagtctgctgtccctgtggcagccatctcaaaatatgtcaaataaatatatttcgtggtaaaatatttttatttcctttaccctctttccttttaagttctccgctggagaccaccataacaaagatacattagcaagagaaaaac

SEQ ID NO: 399787 - DNA, 466 bp, Homo sapiens
cagtgtgccatgatagttcacctgtgccatggcaacatctgggagttaccacccctttctatggcaatgctaccttcagcacactgtctgtggggtagccctgctctgcaaaggcagtcacaaagctgtaacaccaccagagctgtaacactcctgcttcaaaaaggctgttttcttctaccctaccaccggctcaccattgaaaaaataaaaaataaaaacatccaactgcccatttgtagctcataatccacttttgtaacacgttgctatctatattttgtagaaagtgggaaactaaaaggaaaaagtaattaagcatttgctaaacttaggctaactgaaatcccctgtagagacccttaatagacattgggacaaaaataagcatcccaaaagactcaccactagggtgtcttttagacagttggagttggagtaaattcaaattattagacaaattgaa

SEQ ID NO: 399788 - DNA, 604 bp, Homo sapiens
ccaccccactcttaatcagtggtggaagaacggtctcagaactgtttgtttcaattagccatttaagtttagtagtaaaagactggttaatgataacaatgcatcgtaaaaccttcagaaggaaaggagaatgttttgtggaccactttggttttcttttttgcgtgtggcagaacagcagaggaggagagggttggaacaaaattgggcagtggcctctgtgcttgctggctccccagccccaagccgcctctctgtgggaaccagggaacattcatactgctcgaacgtggctcttcccacagtcagacaccactggccagccaggatctcccctcctgttgaaaaatgctctcccttgcagctcccactaggaaacctggaaggccaaactgtttatgacattgtttccctaaaatgtgctcagacaccatgttttataaagtttctgtctcttctttctgttaagaaaggagaaaaaggatcccagctactcaggaggctgaggcatgagaattgcttgaaccagggaggtggaggttgcagtgagccgagattgtgccactgcactccagcctgggcaacagagcgagactctgtctca

SEQ ID NO: 399789 - DNA, 476 bp, Homo sapiens
tatagtaatagagttttagctgggaaaatagccacccagaatagaaactacatttcccagtctccttcacaggtagatgtggccatgtgcctatgttcttaccaatgggaaggtgtggaagtattaacattttgttgctgcttttgagaaccttccctaggagatagcggggatgggtctttggcctcttcatgactttctctttcttgctgcatttctgctctgccagcttaggtgatgaggatacaggtcctactgtagggatggcagaggagtgagccagaaggagcctgcacactctgaggtctctgcggagtggagctcccataccagcctggaatattcacctctgggcttcatacagctgagagctaaataaacttcagtcttgtttaacttccacagttatctaggagtttccatcacttgcagtcacacccaactctaataaaatgcaagaatgatttttattttta

SEQ ID NO: 399790 - DNA, 241 bp, Homo sapiens
agatgctatagatgttactcttatactgtaaaacattgtgaaatcagattgcttaaaaatgatgtattacaaagttatggaaaaaagcagttgtgactatggaagcccaaggcttatatcctagctctgtcttacactaaatgtgggtacagtgtttccactttttgtaaaatgggagctaatatcctccaacctgtgtgcctgacatggtgattaaaaggattaatcgaaacaacagttt

SEQ ID NO: 399791 - DNA, 1061 bp, Homo sapiens
caatctgcctgtctcggcctcccaaattgctgggattacaggtgtgggacactgtgccgggcctacattccttttgtgtttccttttttaaattttttaaagataggtcttgctttgttgctcaggctgaagtgcggtggcacaatcacagctcactgcaaccttgaactcctgggctcaagcaatcctcccatcttggcctcctgagtagctggaactacaaggcacatgccaccaagcctagctaattaattgttttttctttttttgtagagatggggtcttactatgtggcccaggctggtctcaaactcctgggctcaagcaattcttggactccgtggctcacgcctgtaatctcagcactttgggaagctgtggtgggaggatcacttgaggccaggagttcaacaccagcctgggcaatctagcaagatccccatttttacaaaacgaaaaatcgaaaaacaaagataggcatgcagacaaacagttatacacattatacacaagtatgtacagatactgttgcagaaaggagaatttagatttgaggaggtcaggaaatactttaaatggagctgacgcctgagcttggtctcgacaggacagttacgtttgtgagggtgggcatggggcagagagaagagtgaagacaaaggctcagaagcatgagggtagcagtgggttaaagaatcagagaggagttttctgtggcaaaacagccctgtggagtggcagagcagatgtcattacctagtccacagggtgtacatggacatatcacttagctaagccagtttcctcatctgtgaaaagggacactttagaatatcagtactgctcaaaatgtggacggtggacgggcagcatcagcaccattgatccaccagttagaaatgcaaattcagtggcccacccagaccttctcatcagaatctctgagtgtgtgtccaaacactgctttcacaagtgtatcaggcaatttttataacatcaaagtttaaaaagttgctttaaattagggcctagcaaaccataggtcgtgggccgaactagcc

SEQ ID NO: 399792 - DNA, 268 bp, Homo sapiens
gtgtggtcctcttatttatttactgtggtggtggggttggctaattccaacattggtaaaacagttaaacacatttaaccagtaggggcggcaggggaggattggattagcagaaacagaagttacttgtgcgatgcgcctcctgctggcactgaagtgcatttgtttgggatttgctgctgtcttgcataggttctgggattgagttaaatattgtgttagtgtcctgcaagaccttttaatttagaatcctgaaagactgcctttt

SEQ ID NO: 399793 - DNA, 401 bp, Homo sapiens
caaaatatgttatttcttaatagtgtcatacatgtttaaaaaatgaaaatgctttaattcttgagtacagatttctaatctatcaaccttacaatttctctttttattgtggtaaaaatacatataacataaaattaccatcttaaccatttttaagcataaggtccagtggcattaaaaacgttcataatgtcctgtatacctgttctttacagtccttatatgtactaaatgtatatgcagactggtgaattgctccttttattatttttctgtaaccttttttcccaataatgctttggcttcaaaatatatttcttaaacattattataagaagtaacatcatctttctttgcttatatttacctcaaatataattttccatttcttcacattcata

SEQ ID NO: 399794 - DNA, 482 bp, Homo sapiens
atcaaaaggaaggtttaactctgttaatgaatccacacatcacaaagctgtttcacagatagcttctttctattttttatctcaggatattcggtttttccttgtaggattcaatgggctttaaaatgtcacttcacttatgctacaaaaagagtgtttccaacctgcttaatcaaaagaaaggcttaactttgtgagataaatccacacatcacaaagcagcttcacatagggcttctttctagtttttagctgggcattttccatttttccccataggcctcaatgggttcccaaatgtctcttcgcagatcctacaaaatgtctgttaccaacctgctgaatcaaaagaaaggtttaattatgtgagatgaatccacacatcacaaagcagtttcacagataacttctttccaatttttattttgggatatttggtttttctccataggcctaaattgtcccccaaatccctttcagag

SEQ ID NO: 399795 - DNA, 483 bp, Homo sapiens
gttttgtttccaagcagtttcattcagaaggatgtgaaagggactctgttccacagctgcactggttcatggtggtggaataatcacaagatgaaacaatcgtatcattgcttttccagcaaagtcaggcactgtgctcacaatacactacattcatggaagcctctttgttataggaatttgctttgctctaggggcgttcttttaattttacggttggaggattgagttctcaattaagggatcagcaacaaatagatattaggtatgatcaattagctatctgggaagtatgaatgttctttcagttacctagcactaattaaacaagtgtcttgccttgtgagggggagaggctcataaagacaccctcttttctctcaagggctatctgtcttggagccttggagatgagacttgtacacagactgctccctaaagagcagaatgaggccagtccctcggagaggtaggtggagagag

SEQ ID NO: 399796 - DNA, 567 bp, Homo sapiens
ttcgtgatgattcagtcttcctcactgtgaagaacgaaaccccagtcctgcaaagatttgaaactgtatttaaggccaaagtaaggttgcctgggaattaagagtactggagtcaggcaggctttgatcagatccctcccccaacacttcctgtgtgagtgacttcagcaagttgctttactttacctttctgagcctcatttcccttacttgtaacacagaaatatgaatagttactatccagggtttttttttaggatcaaaggagttactatgtgtggagcatgtcacccagaggctggtatgcagcaagtgctttgtaaatagtagcgatgggcactactgaaacctgaatgtctgcctctgcctgtttgcgaatgactccaccttcccaaatcccaacagggaaggtgagtcagcttgagaccacttgagaggcatctagcagaagggaggcaaaacttctgttaaaggataatttttagggaaaaaaaggtaagatgatgactctcatacagatattaaaaatgaattcatcatgaagattttattttactcgtatgatgg

SEQ ID NO: 399797 - DNA, 754 bp, Homo sapiens
acactgagcatttgaattagtatgttctaatcagaatattcccaaatgtgtatctttatttcattgttttattttgtttgtaaatagtaattgaaacatttccacagaagaaaatttttctcctatagccctcctctatagctgaatatatactaaaatataaagctatattcagctgaaattcagtttttagtaagtgtaaagctttaaatggctgcattcccacagttggaaacacgagtatgtggttggcatggtgaatttatttgaaataaaacatgccaccatttaagcaataaggttttcaggtagttttgaatgaataaggagcaaagcagttgagattttaagtgaggataaagtataatcattttagaagttctaaatttttggatctgtgatgctgtcttcaaaggtaaaaaaaaattttaagttctaaattttagtttgaaaacatatatagcggccgggcatggtggctcacgcctctaatcccagcttgggaggccaaggcgggtggattacttgaggtcaggagttcgagaccagcctggcaacatggtgaaactccatctctattaaaaatacaaaaattagtcgggcatggtggtgggcacggtggcaggcacctgtaatcccagctgctcaggaggctgaggcatgagcattgcttgaacccgggaggcgaaggtttcagttagccaagaaccacactccagcctgggcagtggagcccaacacagtctcaaaaaaa

SEQ ID NO: 399798 - DNA, 632 bp, Homo sapiens
tcaaaatttttaattgactgggtttgtttattttaacactttttacaagatattttagacataccaaaagtgattttttttcagtgcctcttgtaactataaatctctctaatttatagtctcatagcatcaagtgtcattacaatgatgagagtaagtgcacacacctgcatagtcttcaatggatgcctggcctgctccatgtgctttacatacagacttctctagtttccccacaagcacacaaggcagatactttccccatggcaagcaatcaaaaaagccaggacacagaggggcggaacagctgctgaggactgtactgatgcacaccccggtaggcagattcccaagcccttgttctggagtttgtgtgctggacggcctgtaactagtacaaactgacctttgtgtgtctcttctctgtcctccctgcatccatattgtaggacaggagaaagaaagggagaagtctgttgcattattaaatcttccacagcagatagttatggagaatcaacagtttggggtttacacatgaggggttcacccagctgggggtttacagccatgtctgatgtgctcctgctccagggaaagcctttattccactcacccatcagccgtagatg

SEQ ID NO: 399799 - DNA, 359 bp, Homo sapiens
aaacaatacacaggagagcactttatgaaccgtaaaatgctatacaactactataagacagtgtcaccatgtaattatgtgtaatatggcactagaattcatgtactatttcataaattcccctggataattaggttcccggagtattttcaggtagcacatgccgatttctcaatactaagggagacttgagaaatattcttgccacagggttctgttagtatattttattagtgggaaaaactgtattacacatatatatgaaaatatcaaaaattgcacaatagggctgcaacctgcccatctcacaaccaccaacatttgcctttttctgaataaacatatgtgctctgggggtt

SEQ ID NO: 399800 - DNA, 526 bp, Homo sapiens
ggaaaggcaagtttagacatgaggtgacaacaatgatttcaaatgcacatgtacataaaataccttgaagatatgagactgaatcccaaaagagaaaattaaaaaatacaagtaatttctgaagagataatagttgaaaagataaggaataaatactgaaaactaaataacaaagggagaataagtagaagaagagcctacaaggcctaaggaaggataaaaccatttcagaaatgagactaaccaacacaaaaatttgaaagagacagggagctgcatgagaaaaacaataaagacagtaatatacttttcatctgtgaggtccactgtcaattattaaacactatcacaactgtttttgctttcagaatggcctgataagattgatatttactattctcgttttataaacgtataaaattaggttaagtgacttaactaaaatcaaactgcttgtgagttatggaactgtgtctcaaatccagttcttctcactacctaggcactcagatgtagcccagtttcc

SEQ ID NO: 399801 - DNA, 602 bp, Homo sapiens
ggcgcatgctacaacatggatgaacctgaaggatttatgctaagtgaaataagccagtcacaaaaggacaaatactgtgtgattccttatatgagtccctaaaataggcaatttcatagagacagaaatagatagaggttgccagaggtgaggggaagggaatggaagttactgtgtaataggtatgaagtttcagctttatgagatgaaacagttctgtggatggatggtggtgatggttgcacagccatgtgggtgtacttaataccattgaatggtacgcttgaaaatggctaaaacgggaaattttatgttatatgtattttatcaaaataaaaagacaagtgagtgaatgaaactctttctgcatatctctatattatagactaaagcagctcccattggcttgaattcctggcaaggaacacacgaaaagcctccctctagactaagaggggatggtgtttgctgatgtttcaaccaagggtctggatattgtggcacagacagtgaagaatcccatttgatcaggctgttttccctgggtgatctggagccatctggtcccagagcctttgaaaatccttgtactgtccaataag

SEQ ID NO: 399802 - DNA, 374 bp, Homo sapiens
aatgctgagcgtgcacactgccacatttagaaaggttggaactgatgattcttcagatagaaagcttttgttgactcatgatgagacccacccatttcaatgaggtacttaggcagcacaccgtcacagagctgatcaaagctctggcatgggttcaatcaggattattccatgggccatatcaaagttcctcactgcaccttcacttcatgtaaaaacaattcatttataattgttttacacttcatgtaaaaacaattcattatataaacttctttctatgatcaggagctcagggtaaattattttaccaactcaccttttcaccattataaatatgattgcaaattataaataaaatattaaaaaaattg

SEQ ID NO: 399803 - DNA, 320 bp, Homo sapiens
tatctctggccacccctttccagcccctctctagctcagtgacaagctgagaaagagccagacctcctgagaccccatgaagaaacaatactgcacaggaagtttgatggtgacccccagggctgccgccagtgggaatcatcctcccaaagcacagaagggcttaccgcagcccttcctgaattcttacacttccacgggagaataatatcactctttgatttaattatagtagagctttgctctttccatgcaggaaggccttagtgatagggcccagtgagaaaatatagaggctgttctcagcagacctgataaat

SEQ ID NO: 399804 - DNA, 519 bp, Homo sapiens
tgtagggatggggtctcactattgcccaggctggtcttaaactcctggtctcaagtgatcttcctgctccacttcccaaagtgctggaattacaggtgtgagccactactcccagccttatataattttattttaattaattaattaattaattttttcatttttttgagacagggtctctgtctgtcacccaggctggagtgcagtggcgtgatcttggctcactgaaacctctgcctcccaggttcaagtgattcttccacctcagcctcctgagtagctgtgactacaggcgtataccaccatgcccagctaatttttgtattttttggtagagacagggtctcaccatgttggccaggctggtctcgaactcctgacctcaagtgagctgcctgccctagcctcccaaagtgctgggattacaggtgtgagtcactgcacctggcccccagccttacataattttaaagttttgggtttttagtttccttcttgaatgtctggtaggaggtttag

SEQ ID NO: 399805 - DNA, 949 bp, Homo sapiens
tgtctgtctctaactttcttttagaacaattctcaaatcacatttcctccaaatatctttctctcattgctctgggctacgtagaaaaaaaaatgcccaattctattttgaagttctgaagaggattgatttgtatcacttttttagcattcagaactgacttaaaattcttagtcttccctccatttcaagatgctttctacctagctgtattgcaaactgcttaaggtaaaaagtggtcttttgtacactcacatcactctctactgagcatagtgctcacctaagacaactttgattagtttttgctgataaaagaaaatcagaaaacctatcttccaaaatatagaaagtttgcaaaatcgtagagttgtttggggactttttcttatatttgtgaagtctggaagcaaaattacaggtactctaatcccacagtttttttttacttgcatttgaaactttgctagataaactgttacttgctaaaataaaaccagacagatcgataaacaaagaggacaagaacagacatctatgctgataagcggcatgctttcttttgctaactagcttgttcttttgtgatgatattttgcttagttacctttatctgttttgaacgataccaagcattccgttgacttattttactcataagcaatgataattcgcatgaggataaaaaagggacaagacggcagagtccatttgaaaggagtttcccgccaaccatgttggagactcctgattcctcctcacttgactggaaattcaggtgatagttatctggtgataatcattaggattaatgtatacaatttattttgattttataatctgtaatggtcatataagcactaatatgatttcctgaattcactattctactggaaagaaaatgttttgatcagctaacaaatatatacatccttcatttaaaaaaaaa

SEQ ID NO: 399806 - DNA, 484 bp, Homo sapiens
  misc_feature (475)..(475): n is a, c, g, or t
tgaggaatttcactttagttgattcaccagatacaagaaagagggtttagtattattattaattgtatttccttagttatatttgtcagactgccttttggatggatagatgggtggagtggagccagtttgctaggtatattcaggttgatctcaagaaagcaaatgaaccagccaggtgctactgaacatgacagcttcttgtcatgacaggaaacttgcatcagttggatatccttttgagaaactgaattttgcaaagggccaaatttccccaaactgaacgggctcaggaaatgttcctttacactcagaacattctattttaagtatattatttattgttggcagttcctcagggatttcccttttctctgtattggtcagtgtagttgatgtaaaaccgttttgtggatggaaaatatttttattttattgctcttttagtttggtaggttaaataaaggttcttggnaatttggga

SEQ ID NO: 399807 - DNA, 291 bp, Homo sapiens
cccccttcccatatatttcaactgtttaaatcaatttccataacttgtaactgaaagagccctgacttatacttagggaagtctctctggtgaagtgatctttgagctgaaggggctgatttggggccaggagtgagggtaggggatggtgagggggaaggagagttctgggaaggaagtgagaaattggctacccctgcgtgtctgggtctaaggtcttcaccacatgactacacaagtgcaataaacttgctctgccccgttgcggtgttgaataaaccaaacaaaacg

SEQ ID NO: 399808 - DNA, 532 bp, Homo sapiens
tgttgtctcatccataaaatgggcctgaccatgcccaagtcaacggaaggatttaaatagatcagcgccctgaggtcggtgctggacgccgagtacacgcgcccagtacacagggcttgagctcattacacgccccagttctgttcctggggtggtggcgtgaaccccactgcctttgcctttaattgcactgaaaatatccagcaccgctgatatcaagggcccaggtcccggcggaaatgaactcccagacttgggcgcccaggtttccgtgcgcgaccccagcccctccggctgcagctcagcccatcggccctgcgcgggaacagtgtcacccgggcacccgggccagaacaggccacgcgtgtcccaggagcgcgggaagctcccacgccccctcccccgcaccgctcctttggctggcagagcgggtcctcagcgcgtctcagccgcaccaagcgcctcccgctcccgcgccacccgggcgcgctgctggggcctgatttccataataatcagccagagatctccc

SEQ ID NO: 399809 - DNA, 346 bp, Homo sapiens
tgctgggattacaggcgtgagccaccacacccagccaagttgattagattcttgagactctttaacagttgataaccctcatagaatttcctacattctgaatttgacagaatatacccttaaggtacaatttaacatgcttctctattctctgaacttcctttaaactgacagttaaactgaagactggattagatttaggttcaattgctttagaaaagaaaacttttaatttttattttttggagacaggatcttgctctgtcacttaggctgaagtgcagtggtatgattgtggctcactgcagtctctacctcctgagctcaagtgatcctcccacttcag

SEQ ID NO: 399810 - DNA, 1734 bp, Homo sapiens
attagatatgacccacctgaataacctcacatactcttcctatctcaaaactcttaacttaatcctatctgcaaagtccgttttgtcatatacagtagcatgttcataggtttcaagcatttggacatggtcctctttgggaggcattacgctgcctgtgacagtgctcttctgatacattttcagtgatcttctagacataacaatcctggtcctgggaacatgcatggcggggacctaaataagtctattttttaagaggccctaccctttgcatagatcctaatcttggggtaaaggaaagtttgagatttcactccacctttttttttggtgctggtatttccactgtgggaaagatcattcggatttaacaaccacatgaagctcctggattatctggggcatgtttgctgattcccaaggaagcttgatctttttgatggagcacttgagctggtaagttattagaagctgagctataattttccttggcattggtcatttttgtctaatcttttatttttttgttttttttgttttgttttgttttgttttgagatggagtctcactgtgtcccccaggctggagtgcagtggtgcgatctcggctcactgcaacctccgcctcctgggttcaagcaattctcctccctaagccttcagagtagctgggactacaggcgtgcaccaccatgcccgggtaactttttgtattttcagtagagacagggtttcaccatgctggccaggctgatctcgaactcctgaccttgtgatccacccacctcagcctccaaaagtgctaggattacaggcatgagccaccgcgcctggcctgtctaatcttttatttaatgcatctaggctcctcctttcttccttcatggtttcctttttcctacttccctatctcgttttctttccttcttttcatttacagagaaatggtgttagaaatgaatgagaggagtgagcaaagaaagatgagggaaaaatagatgtgttaaggagtatacgcataaagaaaagaggccaggaggaaaagctgttcaccccgactcccatcctaatcttgcgtagtctttcgtttcctgagaatagttaggtcagaagttacagtagaaactttcatggaatacacaaaagggaattaagtaaggaaacttgtgaccgatgctatgggaaaggacatgtttgtcaaagcaataggttcttcctgagttagagaacaattatggttcccccatggaaatgtttatctgacgcaatgagaaccaggtcagacacaattcagaaatgaaatgaataaaattattctaagatctagatgggaggagacataagggattgtgttttgatagtcttaagggtgcacttacatttacatccccaaattccctcttccatgaaccactgcgcactgtacattgccacattaatgctaactgtgccaattagattaactaatattggtcaaaaaagaatatcctggccgggcgcagtggctcacgcctgtaatcccagcgctttgggaggccgaggcgggtcacggtgaaaccccgtctctactaaaaatacaacaattagctgggcgtggtggtgggcacctgtaatcccagctacttgggaggctgagacaggagaatcgcttgaacccgtgaggcggaggttgcagtgagccaagatcacaccactgtgttccagccctagcgacagagtgagactcttatc

SEQ ID NO: 399811 - DNA, 1043 bp, Homo sapiens
atattcacctaagacctggtgcccccacatctgagacattctcatagtcccaggacccctgagacagcaggacccctgagaaagtttcaaacagagtttgaaactctgttatgctctggaatctccagatgctgcccctcaaatctacccacgacttagtgcccacagacctggcctccagtccgggaacactgaagtctaagatgtccagggaactcccagacaccctgggaccccagactcttaagatgcactgagtgctcggatatactgaaacacgagctgttctcttaccaaaatgacttgggagacccatcccagagcccccaagatccagatatcagacaccaagatgctctggaagccagggatcaaagacctccataggtccacccacccccaagccagggttctcaggagctttggatatcatttataggactcagaggtgcctggggtcctcagatgtgcgactgaaggccaccaacacctcaggacccgagatactggtctcgagttctcaaatagccctctcttgcagtccctcctggacctggattttgagaccccaaatgtcctggaatcttcagcttctttctacccacagattcccaaccccttaagggctgggagtccagctcccagaagaggggatgctcatggtgacccagacctctgatgcccttggccctcagcccttgagtgaccctaaggactaaagagcacgggtccctacccagtgtacccaccccacaattaggattgagaccgcctggcgtgttgaacgtttaaacaaacaaactcagggccggacaacgctaagatgttaatcagcggtgaaccacacggtacacgtacacaaacccgaacctccagataaaaggcgccacccacgtgagaaaggcgtagacaccagcagcgtccaagtgtatggcggcacgtactcggcacgaccgaaccgaccacacacaacacgagccccgcacgcgaacacacgagctcagagcacatgaacacccgacccatcgaaccaccaccgtacg

SEQ ID NO: 399812 - DNA, 636 bp, Homo sapiens
ttctgtgggtgtgtctgtccttacaggtgtcacatcaggcctgctgcacttgcccctgcttgcccagggacttcccttctaacaacgagatctgacagcatctctaagttgaagaatgctgcctgacacagggccttggaaagaccccacgctatcagaggcccgatgcccaaggtccattaacttctctgtggaatcatccctgggagccggggtgcgctcccgatgctggtcctccacagtccctctctaagatggtgagggtctgccccgagcttggccttggtgctgagaccctacacacagactgcaggtccctgagcactcccagatagtcaagcatcagggtccccagccctgcctctggccatccccccacctgcagcccatgcacacgaggtgaagaagcagcaagaggcacacagagggccaccttctcacaccaggatccttcagcggctcaagaacccaaagtcaccccagaccccaggcctggccatctttccctttccctcagctgagttctgatcagcttgctcctttccaagtaccattacctgccacttatgggctgcaaaaagaaatatatggcagttcatagattttcagacataataaaacacgcttgtcaaggcc

SEQ ID NO: 399813 - DNA, 529 bp, Homo sapiens
ctaatgattagcacaaaaagggaaaggctttttaaaaccaagataaaatcactttaattccaaaagtgtccatttaagaaatataaactgtgaagataagcaatggctattttctctaaaggaaagtattttcaaatgaacagaacaggcaaatgtagacttaattaggtggagtcagatgggtattaattattcacctttccagggtgagaataatagcattgttgctaaagaaatgaaataaggcatgacacttctttcttcttcattctgtgaaagctgctctgatctgaacaggttaaagatgggataacaggaggacagactgaaaatttgctcttcccttcacaattgagggtagatagtctttcgagagtgtagtatcctccattgaaataaaatgttattgactacctgcttggagacataaaaaccttctcatgtttggaatgtacatgtacttctctgttttgctctcttgaacattttcaaaatagctaaataaaatttgtcctcattcttagagttc

SEQ ID NO: 399814 - DNA, 677 bp, Homo sapiens
gcctgtaatcccagctactcaggaggctgagacaggagaattgcttgaaccgaggaggcagaggttgtagtgagacgagatcatgccactacactccagccagggcgacggagcaagactccatctccgaaaaaaaaaaaagtgtaatgtagcctaagtacacagtgttgataaagtctatagtagtgtgcagtaatgtcctaggccctcactctcactcacccagagcaactccaggtcctgtaagctccactcatggtaagtgccctatataagtgtaccattttaaaattttatttactgtacctttttttgtttggatacgtttaggtacacaaatacttcccattgtgttataatagcctaccgtgttcagcacagtcacatggctgcacaggtttggagcctaggagcaacaggctgtcccatacagcctaggtgtggagtaggctctgccacccaggtctgtgcaagtgcactctgtgatgattgcacaacaatgaaatcacctaacaacacattactcagaatgtatcgccattattgacacatgactgtatatatacatatacatgtatatacacatttcggcttacaaataataaatagctgcataatcatatccaggcaagaaacagaatgttaacagaaccccagaaacccacaatgtgtccctc

SEQ ID NO: 399815 - DNA, 498 bp, Homo sapiens
gctactggtggtcatcggggacgcagatatgtgtgtctccattttgcagatgaggacatggaggcctcaagaggttaagtgacttgctcagccacacacagctgatgggaatgaaacagatggaaacagagactccccaagctgacaggcggactacagatctgggggttctgctccaggctcaacacaagtggcctgggcgagggagggcctggtagaccatgacacccagcatcgaggaattctgcttccccagcaggctcagaaggaagaagtctgcttcaggggccaggcctggtcaaagactccatcttccctggatggccagagtcaaatccttgcaaatcccgttcaccatggagcagagacgagacctatgttacccaggctgtatgtgaattcctggactcaagcaatcctcccatctcagcctcgtgagtagttgggacaagtctcacaccaccatacccagcttaatttaatttgaattttaatagc

SEQ ID NO: 399816 - DNA, 404 bp, Homo sapiens
gattttaacccccaggaattaacctatgtaaatgacttctgggtagcaggaaagattttttccaaaaagcactcagcccagaagtagctcttttcttgccaacattctgggtgatttatacaactgttctcactgaatagtgcagagagaagggattttgcagcagaacgtgattgtagaactggaggcaagagatgtcccctgaagttgtaataattgcacagaggcagagtgaaaagatcagctggaccaagacaaagacatttattttagccgtaacagcgtgctgatgtgatggacttaataaataatgccttggctacatgatttttattactatctattatttgtaaataataactagtatgtgcttattgtatttacgatatattacaataatgtaa

SEQ ID NO: 399817 - DNA, 516 bp, Homo sapiens
tgggatggaatgaaatattttgcatgtgagaaggacatgtattttggggggcttggatgcaatgctatagactgaatgagtctcccccaaaactcatatgtagaaacctaattcccaatgtgatgttatttggatagggcctttgggaagttaataggtcatgaggtcattaatggaattagtgcccttataaaaggaaccccagaaagctcttccttccatcatttgaggttacagccatcttatcagtgagaaagtagacctttgtcagacactaaatctgccagcactttgatctagtactttttagtccccagaactgtgagaagtaaatttctattatttacctagtctatggtattttgtcatagcagtctgaatggaccaagacagaatcttatggtaagcctgctaaaaaagtaaagacacagagaaaatattaaaagcagccagagcaaaaaaggcacattgctttcaagtgggggcagtaataaaacctagagctaactaatcacc

SEQ ID NO: 399818 - DNA, 271 bp, Homo sapiens
taaatagcattcctatttcaggagccgatggtgtgattcgaaacaactgcttggttgaaggatggggggcaggatcgagaaggagagagggaaggggcagtgctgattctggattaggtgtatgtaggttttgtcttggtttattttaaagatcagagagtaattggaaacaattattttttaattaataacttgggaaaggtgaacagaagcatttcacagggttttaccgtgtgcacactgaaaataaaacactttatgctatgcttca

SEQ ID NO: 399819 - DNA, 403 bp, Homo sapiens
atataagcttattctaaaaatttttatgaaaaagtagaggatttggaataggtaaacaattttagaaaaaaatgaaataaagtggatggagtcatcctactcaagtaattaaaaagacttaacgagcttactaaagagttacagcagtcaaggcagtgtggtactggcagagggttaaacacatagataagtagaacaaaccattggcccaagaaatataccaaaaaattaactttttattattaaaaaaatgttttagagacagactctcgctatgtcacccagcctggagtagagtggcatgatcatagctcactgtaacctcactcctgggctaaatgatcctcctgcctcagcctccagagtagctaggactatttttagtcctagccaggctaatttt

SEQ ID NO: 399820 - DNA, 359 bp, Homo sapiens
gctttttagttaagtaagtatctattggtatttcatcagctcagattttttcctcagttatatccagtctactgataagcccatttctgttattgtgtttttgatctctagtatttctttttgtttcttagaatttccatctctattcttgtctttttttatttctttttctggagaacggggtcttgctatattgcccaggcaggtctcgaactcctgggctcaagctatcctcccacctcttgcctccctgagagctgggattacaggcgtgagccaccgtgcctggcatagaatttccatctctattcttatattgctcatcttttcttgcatgctgcctactttatcctttagaa

SEQ ID NO: 399821 - DNA, 171 bp, Homo sapiens
aaagctagttatcaaaatagtatagtactgacataaagacagatatatagaacaacggaacagaacagagagcccagaaataaatccatttatgtacagtcacctgatcttacacaaggctgcaaataatacacaacggggaaagaaaaatgtcctcaacaaatggtgttg

SEQ ID NO: 399822 - DNA, 90 bp, Homo sapiens
ttttataaacacaaggtgaaaattcattagaatgacatattcccaaaaaggggattgactttgacatatgaaactgtaagataattaatt

SEQ ID NO: 399823 - DNA, 444 bp, Homo sapiens
gtgttacatgtatttagcacattatggagaaaatagagtgataacttgagttctagtgagctccaaagggatggaatgatatgtaaaaatcaccagaaatttgtttaagccatactgaacctttctataatgagacctaaatagaataaggtactgggtaatgaatgtttcccaaattatggcatgaatgtttaaggactatttcattttaagagatgcagtgtccagaaattgtcaccatggtagtagtttttaaaatgtgttcctcagagctgattggctccaggagtgtgtaactcaggagtgtcatctaccatctgtttatctatctagttaactatctattgtagagaaggttgtggtggagtaaaccaaacaggcagcttgggattcatttgttggggatctgcacaagatattgttagaaaatagtttgggctgcta

SEQ ID NO: 399824 - DNA, 270 bp, Homo sapiens
cagcatagaaatcagagtgggcttgctggatcatgtaatacagaagcgggtggtccttgtggctatcttcggtaaccactagtgcacctggatggggacaggtgcatgaatgggcccatatgtggacccacagagctggttctgtcattgtccccttgagagcagtgctccccacgcctagtttacagccatccatagcatgtaccgcagagttctggactgggctttaaacactcgggggaggaatcaataaaacagacaagactgtga

SEQ ID NO: 399825 - DNA, 633 bp, Homo sapiens
aacaagagctgttttgaggaataataggagtggcagccagatggagttggttgagggtaaggtagggaggataagatggaaaagaatagatctttctctccaggggtttgatgtgaaaacaggagagaaatcggagggggatgatggaatggactgtggggacatggaaatattttaatttcattttttaaaatttaagttattgaatagattttaaaaagtacctgtttctaaattcacaaatgatagggcttagccatagacctcctatgatttgctgggccaaaccaggcaaaaaactttatgaaataatgctttagatgaaatgattcatagagttctagccctgaaattctctactgagttatgattaatcttgctttctaaataatgtagatacttgtcacatagatgtggccaataataattactggaaggaattagatttgctggtaattatgatttcactccaatacttaggagtattgataagtgctcacttcagcagcacagacatcaaaattggaatgatacagaaaaaattagcatggcctgtaagaaaagaaaaaagaagaccagtctgagcaataaagtgagacctcatctctccaaaaaataaaaaaaaattagcca

SEQ ID NO: 399826 - DNA, 360 bp, Homo sapiens
tctctctgagccaccttagtccctgtggtatccccagtgcggccagccagggacctggcccattgtagatgctcactggcaaataatgactcagtgattgaatggagaaaagaaaaagaatcgcaaagaaaatttaaaatgcacttgacttctaaagtgcaagagaggaaaacatgaaaacttgcattaagacctattgtcaccagcggtgacagagaagccattatatatatgttttttggtttttttttttttttgagatggtgtctagctctgttgctcaggctggagtacagtgagcagagattgtgccactgcactccagcctggcaacagagtcagactctgtctcaaaaaaag

SEQ ID NO: 399827 - DNA, 614 bp, Homo sapiens
aagagacatcagtgaacttaaccagacagacccatgtcctacctgatagaaatgtgtacacatactcaccaaaagatatgtataggaatatccttagtaacagtatttgtaatagccaaaactagaaacaatgcaaacgtccatcaagaggaaaataggtaaaccagtatggtatatttatgtatatttggaatgttatttaacaatgagaatgaatgaactataactatatgtaactacataatgctaagtaaaagaagtgcttgatttcatttataaaaaatggaaaaacttgatttcatttataaaaaatagaaaaacaagagaaattaaccttgggggttagaaatcagattaatagttatttttgggggaatggtgattggaaggaggaagaactatttcttgatctaagtgttagttccatgggtatgttcactttatgaaaattcattaaactctatacctatgatgtgtggcccttttttgtatatttttattttatttgactaaaaagtttactttcataacaaaaacaagcctgccttcatggaacttacatttttgtgggagtatacatataagtaaacaagacagtcagttacaaagtgata

SEQ ID NO: 399828 - DNA, 459 bp, Homo sapiens
gatgtgctgagaatacttgaggaaacaaggcctgaggagatggaaagagaatttaaaacatttatctattatgtgattattataatatgaacctctgtttcctatgtgatgttccctgagtgtagaatttgtttctttcttactgtgatatacccagcacttgagatggtactgacagattgtatatgcttagtaaaatttgttgaatgactgaaagaattgcattgggagtttagtttatctcacacctgatggatatatgaaaaattatgaattggtaaaggagtgtttaaaagtagaaagaagagctgtgggagctcacatccactgctcatctttccaataaagtaggcaggggaattgcttaccagaaggatttggcgtatttagggcttaaagaaagttgaagagtctagaataacaccttccataagtgtgctaaggcattaactaataaaa

SEQ ID NO: 399829 - DNA, 1161 bp, Homo sapiens
actgcttgatgactgccacctggttggaagtattgtcagatgccataaattgtaagatacaccttgatttcaaatatgtgaaaaattgtgctcagtgttaagcattgaggaaattatcatatccaatctaagccacaatttggccatttaaagctaagaaaaactgagaacatggatcttgaagatacttggactggatcagctcttcctttcccatcattaatttggaaaactagaacagatctatccctggacagtccaagtaaacaaattattttgcttaattgctttactaggtttttgaatgaatgtgctgatggtttagaatttctgctttcttcgtaatgactcacctacatttttgccttttaagaactatcctcatctgttgtattatcaggattataatatcagtgtagaaagagctagtgaaattttgatattacttcctccttgaaattttcaataaaacaaaaaatatctcctccatctgtacttacatccaattctcattcacaatgctgtaattatctttttcctttgattagctatactaaaatcaagtattaatattttttcacaaagccttaataagtctattttattttcaaattcattaactccttttaatgatcctcccttctttcttatattgacttatttttcccttagtttcttgagtttaatgcttcttcattcttttaacagttttataagtgattactatgttaaagagacagtattaagtcactgggagtagagtggtgagcaggagaaacaaagtgctggccctcaatatttgtttcctgaatatattaacaggttactgatttttcactgagcacaggtttggccacattcacaaattctgatcttaccattcatttctaaattgtcctttatggtttcattttctttttgatctagtgtcattatattattggagattttaaatttccgaaatgccaaagtactactctacagatcgtttactaaattaaaagaaatatttagctctacaacagagaaacctggtgattaccatatgaagcaagtatttcagttacctatcgctgtgtggcaaactactccaaaacttagtggcttaaaacaggccatattttaaacgtaaatctgcaatttgggcaggctcatggggga

SEQ ID NO: 399830 - DNA, 790 bp, Homo sapiens
gaaaaataaaagtattttttactgtcgtttgcacagtctagttgctgtagttggtgacactcgctggctctctctgaaccatgtttccctattcactgttttgccctggctggagttgcatggaggtggagcccctcccagggcctccagctttttctgcttgagtatattgctgcccctttagcattaaaggctgtcagagagggggtgctctttttcacaccatttattttctccaaatttacctcacagggtcaattaccacattcaaccagtgatctcagatgcaacaaatgattttagtacaagcaaagtctcacacaaagacatgtacaccattatttgtaacactcctataataactctggtaaaaagtaagagaagcagaagttcttatgtttaagaaacattttcttgagtgacacaaaaggtgattacagtagtgaagctgtaggactatgtgattaagtaccaaactgtgtcacacatcatggataatagttaaaagcatgtgatatggtttggctcttgtgcctccacccaaatctcatgttgaattgtaatccccagcgttggggaatggacatggtgggaggcgattggattgtggcagcagaacagcaagttctcatgatagtgagtgagttctcgcaagatctgattgtttaatgttcttgcttccccttcacccttctgccatgattataagcttcctgaggcctccccacccacgcctgctgtacagcctgtggaattgtgagtcaattaaacctcttttctttataaatga

SEQ ID NO: 399831 - DNA, 844 bp, Homo sapiens
gaaaaataaaagtattttttactgtcgtttgcacagtctagttgctgtagttggtgacactcgctggctctctctgaaccatgtttccctattcactgttttgccctggctggagttgcatggaggtggagcccctcccagggcctccagctttttctgcttgagtatattgctgcccctttagcattaaaggctgtcagagagggggtgctctttttcacaccatttattttctccaaatttacctcacagggtcaattaccacattcaaccagtgatctcagatgcaacaaatgattttagtacaagcaaagtctcacacaaagacatgtacaccattatttgtaacactcctataataactctggtaaaaagtaagagaagcagaagttcttatgtttaagaaacattttcttgagtgacacaaaaggtgattacagtagtgaagctgtaggactatgtgattaagtaccaaactgtgtcacacatcatggataatagttaaaagcatgtgatatggtttggctcttgtgcctccacccaaatctcatgttgaattgtaatccccagcgttggggaatggacatggtgggaggcgattggattgtggcagcagaacagcaagttctcatgatagtgagtgagttctcgcaagatctgattgtttaaaagtgtgtagcacttcctgcttccctctctctctctcctgccaccatgggaagatgttcttgcttccccttcacccttctgccatgattataagcttcctgaggcctccccacccacgcctgctgtacagcctgtggaattgtgagtcaattaaacctcttttctttataaatga

SEQ ID NO: 399832 - DNA, 282 bp, Homo sapiens
ggctactcattaccattctttaactgttacaatttatatcagcatataatgttaaataattacagggagcggagctcactctagtgaggatataaacgcgctgtgggaatctacagatttaaacaaataacactcacagcagggggtgagcggatgaattagcattaatatcctgcctgggagatcccagtgcactggtactgcttaaatacagatcttttctgtaacagtcaatatgacagctcccggcaatacggcccctttcccttctgtcgtcttctc

SEQ ID NO: 399833 - DNA, 651 bp, Homo sapiens
gggctgatgggataataccattttcccagtcctggctgaatctgagcataaatctattttcttatggcctcaccttcttacaaggctcctaagttctttaggaaaacagaatccttgtggtttccctaccccaacaaaggttccagaccctctctacctcacacatggcatcaacacaattttagctataaacctgatagctttagactcttggttccctaagggagatagatacagggacccatctgtgtaccaccatccccagcacgtattttaaagttattcagacacacctcagaactagggtaagtgcagtttaggatctcaactatgaaaaccagaggcaactggcacactttcattattaactgcaatgaaccatttaccaaccagctaattgctttctcctcaatctcctcccatttcttgtgccacttatgtcagggaattgaataggatgaataaatcactttagtactttggtactggagaagagcatatcattcttagacagggtcttgctctgtcacccaggcaggagtgcagtggcatgatcatggctcatgcagccttgacctcccaggctcaagagatcttcccacttccgcctcccaagtagctgagactacatgtatgcactactacacctag

SEQ ID NO: 399834 - DNA, 398 bp, Homo sapiens
tgaatacagaatgacataggaacatgccatagaaatgtgttatagttgtcaatttcaacagctcatattataaaacatcttttataccttggatcattacagtacaaatacaaaatatccatatcatggaagattaagctgctatgtaaaataatgaggaaattctccttaattggtataaaaaggtctccatgatatttttaggtgaaaattgcaaggtgaagcaaggtgttgtctccaaaaattaataaaattggttggggtcatggtgtaagtgggcagatggtatcaaaggtagaggttagactttttatgttcttttgattttggaaccgtgtgtaagttttaccttataaaataaaagagtgcctttgaggggttgcatggaaagaaaagta

SEQ ID NO: 399835 - DNA, 454 bp, Homo sapiens
caaattcacgtacagttgcaagggccctgagtaaccaaagcagtctttaaatgggacaaaattagaggactcacactccccaatttcagaacctactacagagttatggtaatcaaaccaccatggtacttgcataggaatagacatatagatcaatggaatgggactgaatccagaagtaaacccatacaactgtagccaattgatttttgaccagggaaccacatttattcagtggggaaagatagttcaccaaatggtgctagatttctgcatacaaaagaacaaagttagacccctaccttacaccatgtacaaaaatcaactcaaaattgaaaaacaacttaaatataagagttaaaataccaagactcttagaagaaaacacaggggtaaatctttatgaccttggatttaacagtggattcttagatgtgtcaccaaaagcacaagc

SEQ ID NO: 399836 - DNA, 481 bp, Homo sapiens
ttgtagagacagggtctcattatgttgcccaggctgctctcaaacttctgggctcaagggatcctcccacctcagtctccccaaacgcgtgagtcaccatgctggacctcagcctcattttgatatgcgttgtttccaacaggctggaacaccaggtttggacataattttttcatccagtcaaacaccagaggcagcaggcaccagcacacatgtctaaggcttgactccctgaagattctttgatgtgggattctcactacagttcattagaaacaacaagcacacatgagtcttctctgtcagaagcccctgattctggggctgggaatgttccttgaggaagtgccagtgtctcaggaggtgccagcagaaccacccgcattgcccctgggtgctaaaattctaaattctcaactctgaaaatgcacacatactggggacaaaataactaactgtatgtcagtgagctttagggcca

SEQ ID NO: 399837 - DNA, 446 bp, Homo sapiens
caaagcaaggatcttttcccaccttctctgtcagatgaactcctcatccttatgtcttggtatatgaggcctttttcaggtaatgaattttgttagaattgtttgtgagcaagaggaagtcacttctgagcaaaggcctgagggccgcctgtaagaaaaagtttgggctaggccgggcgtggtggctcacgcctgtaatcccagcactttgggagactgaggcaggtggatcacctgaggtcaggagtttgagaccagcctggccaacatgggcgaaaccccacctctactaaaaattagccaggattggtggtacatgcctgtagtctcagctgctcgggaggctgagacaggagactcgcgtgaacccggggggcggcagttgcagtgagctgagatgggtccactacactccagcctgggtgacagaaggagactccgccctc

SEQ ID NO: 399838 - DNA, 476 bp, Homo sapiens
acaaggagtgaagaaaggagcaaaaggaagaagaccagaatctgagacaaggaattgtcccatgtgctcgaagtctttgaagagcaaaaatcaaggagagtaagaatggaagccactcaactactgcttcagaacaaagttagcacgggctcctgagaaatgactagaagatatgcctgggattcaaaggacctcagagccacccatagctaatgtccctgtcatccaacagatgctgtggctttgggaaagaacagcctttcttgacctcaaatctttgtgtctgaaaaatgagaggggtaccagatgctacctaagcagtcttcctacctaaaatgtatgagtataagaagaatgatcaattttaatctcaaaatacaattctcacctttcagttaccaagatacagcccccttcccttaacctgagctacaacaaaacataagttcaatagagaattgattaatgagtataaa

SEQ ID NO: 399839 - DNA, 471 bp, Homo sapiens
  misc_feature (46)..(48): n is a, c, g, or t
  misc_feature (54)..(55): n is a, c, g, or t
  misc_feature (57)..(57): n is a, c, g, or t
  misc_feature (59)..(59): n is a, c, g, or t
  misc_feature (62)..(62): n is a, c, g, or t
  misc_feature (66)..(67): n is a, c, g, or t
  misc_feature (78)..(79): n is a, c, g, or t
actcaaattttttgctgctctgcacatggcatgccgtgtaactgannncctggnnanantgncaanntggcactgtannttgttttggggggttttaaagaaattttacccagtaggtaaattcaggaatgcagctttcacaaataatgaaaatctaccatatattgaaagtagagcgggctggacgtggtggctcatgcctgtaatcccagcattttgggaggccgaggcagatggatcacttgaggccaggagttcaagaccaacctggccactggccatcatggtgaaaccgtgtctctactaaaaatacaaaaaattaaccaggcctggtggcacacgcctatagtcccagctactagggaggctgaggcaccagaattgcctgacccaggaggcggaggttgcagtgagccaagattgcccccactgcactccagctgggctgacagagcagcaagaccctgtctc

SEQ ID NO: 399840 - DNA, 498 bp, Homo sapiens
aattatttgaatgttgaacttactgatttctcatctacctcttttttgcttggttttcttattcgctatcttttttctgagatttccccagctttatctttcaacaattctattgagtttttatcttgtttttaattaattatctttttaaaaatagcatctttagtctcttggagtgctagaaatgttcggtatctaggtgttgataacacaggtatatgcacatgtaaaaactcattgagcatttagtatgcatatggtgattaattattaacctgcttctgtattacaggttctcaactgacagtaaacctcaggctaaagacttgttttataccttccaaagctagtctaccatctttagaagctggggaaggggggtgggcagctgccagttggtacagaattaaggagggtatctacgagtccacctgttttttaccattattatttagagacagggtctcattttgttgcccaggctggagtgcaatggtg

SEQ ID NO: 399841 - DNA, 396 bp, Homo sapiens
ggatataggaaccctcttaaaagggttcccactggccacatgtgggataagttgagcaccaacataattaagaacagtaataaagcataaaccattcaaaaaatgggaatctggctgggcgcggtggctcacacctgtaatcccagcactttgggaggcctaggcgggtgcatcacctgaggtcaggagttcaagaccagcctggccaacatggtgaaaccccatctctactaaaaatacaaaaattagccaggtatggtggcacacgcctgtaatcccagctactggggaagctgagacaggagaattgcttgaacccaggaggcagaggttgcagtgagccaagattgtgccattgcactccagcctgggagacaagaactaaactctgtctca

SEQ ID NO: 399842 - DNA, 645 bp, Homo sapiens
ggtgatgtttatatgaaagtttaataataaatagctggtttgagttgtgttactaccttttttggcaataacataatatgaaattgatggactacatgtttgctttgacagtgagaaaaccttgtgtatcaaaatctagacttttcatgcagatgtattttggaggtgatactcatatttcagaagtaaactgaattccataaaaggatgagcagctccttatcatagttagatatttacatatttttatccaagtaaagtgagttagacctagttaaagcattagagaccagcacaatttgaaagaatctgttatcattcaagtctttgagttaaagtaactttaggagtcacttaatcaacgtcactgattttatagatgaggtagctaaagccaaataaatagctccaaatttgcattgtaagtcagcgggaaatgtagttttacaagcattaggattaaacctgactttacatctgttatctagatagaatgaattatgtatttactagaaaaaaagtgttatcaagagcatttatgtctttcaattttagatcatactcttggtagcagatgctaaaaagacgagttctaaataatgttctggtactgtgactttaaagcatgctattgcatacttgatt

SEQ ID NO: 399843 - DNA, 514 bp, Homo sapiens
tgtgctatgaggaaaagcaaaacaggttgaagagatagctatgtggtgggagtgggactatttcgtacagggcactgattgtagacctctgatgagataacatttgacaagagatctgcagggagctatgtgtcatgggggaaggcattggagggttttgtgcaggacagtgatgtgtgatcagatttagtttaaaagaataatttgggctgggcatggtggttcctgcctgtaatcccagcactttgggagggtgaggtgggcgaatcacttgaatctgggagtttgataccagttcgggcaacatggcgaaatcccgtctctacaaaaaatacaaaaattagccagtgtggtggcacgcgcctgcagtcccagctacttgggaggctgaggtgggagaattgcttggatctgggaggtggaggttgcagtgaactcagattgcgccactgcactccagcctgagattgtgccactgcactccagccactgcactccaggaagaccctctcag

SEQ ID NO: 399844 - DNA, 428 bp, Homo sapiens
tgagccccggggacacccaccaaagcagtcgtgactctgtccacctggccatcagagggcacagtgcctcctcccccaggacgacggacccatgcacagccaccaccccaggacctccggacacactcccataccctgtacctgtcccttcttcaccagcatccaccaagggcttcctgggcccgacacctggacactgtgcagacacctccgggggtgggggcggctggggcagaaattctgcagctgttggccttgggggaaggacgcgggccgaagcagttgctgccctctaacttctccgagtggcaggctcacaggagcagagtgggctccagtggctccgccaggacaaggcactggttcacttccaatcccagccacccattccctgacccgggccagtcctgtcgtcagcccgtcctcca

SEQ ID NO: 399845 - DNA, 498 bp, Homo sapiens
tataattgtagagtgttaattgctttataacatatagatttggatgtatgttttgtttaccaaaacaatgaaaatggtaccttcttcaagcttttctcattggtttttaaggacattttgattcctaaacttggtgagactaccaagaaaattatctcatttctgtgtccccagttttttatattaaaaaatttaaacatatattagaaaaattaattgtgcggcagggcagtgactcatgcctgtaatcccagcaccttgggaggtgaggcaggtggatctcttgaggtcaggagtttgaggcctgcctggccaacatggtgaaaccctgtctctactaaaaatacaaaaattagctgggcatggtggtaggtgcctgtaatctcagcttctcgggaggctgaggcaggagaatcgcttgaacctggggggcggaggttgcagtgagccgagaccatgccactgcactccagcctgggcaacagagtagactccatc

SEQ ID NO: 399846 - DNA, 493 bp, Homo sapiens
ttggggcctggtcacgtggcccagctgcccataaaaccaaagcattgatctccgctctccagcaagcctctaagccacgggaatgatggagggggtgcgtcttggaaacctgtaatcttccaccatacatctcaggtggcatgtttgaagtcctaggatgagttatttatattatttttgcaacatgtactgaaagggcattagccaaaactcctggcaatggggcttacaggggcctggccacttaaaaaaatagggcggaccaacgggtccccctagcaagtaactcatgaggtggattttctttgggtagccagataatcaaagccagatcatcttgcccagacttccccaaatccgggttgttcaaggatcaccttcccaacttctgccgtattggtgtaccgcttgatctgttattcacttcatgctttttattttaaatcgctactttttacttggcttcattccaaacaatatccacaaaatcaca

SEQ ID NO: 399847 - DNA, 2018 bp, Homo sapiens
  misc_feature (1418)..(1418): n is a, c, g, or t
aaaataccttctggggttttctaaggtacctgaaatgcctgacagagatttgaacagagtatcagaatgagtcatcagactaaggaaacaactaatacaaaggcctgccgtgcgaggaacttggctccacttagtcttctctgagctccacagtgagagaaccatccctctacttgaccactctgatgggaaactttctggcatgtcaaacttactgtgaccaaaatagaacttgtgatttatttttctcccccagtctcttccttcttaattagtggcaccatcatctatttacccaaattaataagcccagaaatgtaaaaattatcttagattccttctgcccttctgtatcctttccttccttacttctgtctgatctttctccaaaatatatcttgaattcatcttctcttcctctctagggatatcactgtgatcctagcctctgtcatctctcacctgtcttacttcttccagtcttgtctctcccattcagtctgttgttctccacccaggagccagagtaatcctttaaaaatgtaaatcagattagattatttatgtatgttagtcatttctactactttcattaattactggttcatatttatcatcccatttgataaaaaatctccagcatttccttttgcacgtgtataaaatccaagttagctgttaccatgtcgtgtatgatgtttctttcccttgctcctttttcaggcttcatcccatgccacttgccccatcacctgtaatgctaattctagttattttgttgttattttgtccttcctttcagttccttcccatcagcttttactccttcaatgtctatgcatttgccttttctggaatttctcctcctagctgtttgcatggctggcttcatttcatccaaagtagtttcttcctgttatattctgataacatcctgttttctccttcattgtatttataacaggctttaattatttgtttacattttactttttgactcccctagtttaatgttagctctgtgagaacagggacagatattcagcctagcctagaatattgcctagtatactgtagacattcatactcaggtagattaaagcaaatatagaaggaatgaaagttcaatgtcagaagtttaggctgtatagaaattagaaacttctgcatgtcagactctatagtatatttccataaatcgagggaaaaaaataaaatgatgatacagagtatcattctaaaaattctggaaagcactacaacctcaatagaaaaagtggacaaaagtccatcaatgatagactgcattaagaaaatgtggcacatacacaccatagaatactatgcagccatagaaatggatgagttcatgtcctttgtagggacatggatgaagctggaaaccatcattctcagcnaactattgcaaggacaaaaaaccaaacaccgcatgttctcacatgtgggaattgaacaatgagaacacctggacagagggtggggaacatcacacacggggacctgtcatggggttgggggagggggggagggatagcattaggagatatacctaatgctaaatgacgagttaacgggtgcagcacaccaacatggcacatgtatacatatgtaacaaacctgcgcattgtgcacatgtaccctagaacttaaagtataataataataataaaaaagaagaagtggacaaaaggtatggaacaataattaatgaaataaatagaaatgactaacatacaaaagaaaaaaatttttcccagtatccaaaaatacaaattaaagcatgttatttttgcctcatattttcaaagtgtaagaaaatagtatttttaaggttgggataagataatttacacacaactggagggaatataaaattggtataggccagggacaatgtctcgtgcctgtagttccagcactttgggaggccaaggcaggaggattgcttgagtccaggagtttgagcctgggtgagacagtgagaccctgtctctacc

SEQ ID NO: 399848 - DNA, 488 bp, Homo sapiens
aattggaaaagtcttgactagaaatttccacattttgcttagatgatagaagcaaatgacagtttggccagctgccccaggtgcattaaaattcatgtggcccctggactaactggatcgattccaaatgtagatcttccaaatgaaactgaagacattgaattgaatccagattttacaggggaatagctaaaatgaatagaagaaagcagtgatgtcatactgtgtggtcagaaccctgccgtattatcctcctcagtatgacttttgttgtagctatctgtggagccacacattgactgggctgtctacatttgttagaacagagaaaaggatgctaccttttccctaagatgtcattgtatcttggaggaagactagaaagggataagatgtttctcatttcatctattagttcgatatctctctaagcaactcaggtatcaggcaccatagattgaaaaaagaaagctgttttataaaaatac

SEQ ID NO: 399849 - DNA, 408 bp, Homo sapiens
cttttccctttaccttaagacaacctacttctgtaactcttataaagattattcaatacctttctaattggtctctttgtcttctgtcttctctttccttgtccaacaccccagttccgatacacaaactgatttactactctaagactttaacctttgtaattattatggccctcatcctgttattcttctgtttaagaaacaagaggctccctttacaacaaatcctcttcgtgactttcccacacatttgtaacatcacctaccttttcctcagtatcttatttgttactatcccctgtatacattctttattctaattaatttgaaattggtaatgccctcacatgtgcctttactatccctgtatgtatgtgtgtagacaaatgagtctatgcatacatgctt

SEQ ID NO: 399850 - DNA, 344 bp, Homo sapiens
gcacatgtatttgaaattttgttagatatatttgtaaaaagttgttgaggatattcagcccggccgggcacggtggctcacgcctgtaattccagcacttcgagaggctgagtggggcagatcacttgaggtcaggagtttgagaccagcctggacaacatggtgaaaccctatctctactaaaaatacaaaaattaaccaggcgtagtagcacgtgtctgtaatcccagctacccgggaggctgaggcaggagaatcacttgtacctgggaagcgcaggttgcagtgagctgagatcatgccattgcactccagcctggacaacagagcaagaccttctctca

SEQ ID NO: 399851 - DNA, 520 bp, Homo sapiens
gatggtcaacaactgcacatatttcttttttcttctttgacttaagtgaagggagtaacaagagagttttctctgcaggagaaagagttgggggtggggtggggagtcaacaaatatgtcccaccacctgtttctataaagttttattggaacatatccatgcccatttcgtaacttgttgactgtgcatacagcctatgctcactttcatgctaaaacagctgaattgagtagttgcaacagagatatgactttcaaagcctaacataattgctgcctggtcctgtataaaaacaattgtggatccctgacatttgactataaccaatactagttgggaaggccagtggaaaggcatgtggccacatggaggaggctaaaataaaagtgtttgataaataatccagaggatggctacttagttcttaattaatttgtagttacatattttctcgatttgtacaattgctgagatctgttacattatttgtaaataaaactatcctcgttgacatattat

SEQ ID NO: 399852 - DNA, 450 bp, Homo sapiens
catgctcaacatcgctaatcatcagggaattacaagttaaaaccacagtgagatatcatctcctcccagttagaatggctatttcaaaaagacaacaaataaatgctggtgaggtggcggagaaaagagaactcttatacaacattggtgggaatgaacattagcatgccattatgaaaaacagtatggagaattctcaaaatactaaatatagaactaccatgtgatccagcaatcccactcctggatatttatccaaaagaaaggagatcagtatatcaaagggatacctgcactcacatgtttagtgcagcactattcacagtggccaagatacggaatcaacctatatgtccagcaacagatgaatatatatgtgtatgtgtatacaatttgaatactatttgcccataaaaaataaaacgctgtcatttgcagcaacatggatgg

SEQ ID NO: 399853 - DNA, 957 bp, Homo sapiens
gaagtagatataatcccttccttatataagtacctatcaagaacttacactataccaggcattcttttaggtatccaggattcctcaacctcagcactattgacactttgggctaaatcattctttgttgtgaggaaactgttctgtgcatgacaggacattcagcaccatccctggcctctacccactagatgtcagcagcacccctcaccctcgccaagttatgagaagcaaaactgtctccagactttgccaaatatccccagggaacaaaatcgcctctggttacgaaccactgtactagatacacaaaaattgccctgcctactagttgcaatttttgttttatgctccttaaggacagtcagtcctcaaaaactcagtgcattatctggtgtacaggttgtcaaacctcctcttctccattgctgggctactgctgacttctgaccaagtggaggaggttgcgggggttctgggagcatccagttccttactctcagttatgctttctaagtctctcatcatttccattagcattctgatcttttagaaagcttttctagagcagcaaatctctaacattcatctgatatttatattgtccataaatatttgaagtatcaaatcaacatacaaaaataagaagtgcaagttttgcattgaagtggaaattttaggaaatgttctacatcagtaggcatctcctgttagaggtttgtgattctaagtaattagtaccaagatgtttcctagttatccttttcaactcagagttggctgtgactaagggataaagaatgggagggaggtgtttgtttatgtttagttttcacaaacatgtcatgatgtattgtgagaccacagcgacttattaatgcaactttcatccagtgacttgaaaaccttcaaaaatattcattaacagatacgctgatgaggtttgcaggctttcaa

SEQ ID NO: 399854 - DNA, 512 bp, Homo sapiens
aaaatgtaattattttattaagcattatattcaatgtaaaggctttaaccaccataatcaccatgatagaatatgtgtgtatgtataaaaaatacccattgaacatgccttaagaggtataattatgtttttaaatctatgcaacatgagatgtaatttgaaataaagaacgactaatcagaagcatgaaaaaaccctgttttaatatgaatctattgctgattctggaataatggtcacgtgtatgtccttagtcacactgggtttctccagttttgattagagtaatgtgtgttccacaacaccaattctaatgtccatctgaacagtttcttgcttcagttttgttaagctctgtttaatcttaaccaaagaatcaccacctcttaaccaaagaatcaccatcagtcatgctgctgcacttttcttccatttctagttttacatgttctgtcttctgtagcctcagacagaagtctggtcctttcaattactccaccacttccttgctg

SEQ ID NO: 399855 - DNA, 255 bp, Homo sapiens
cacagctgaaaattcctggtcttatggaatttacattagttaattaattgattaattaataggcttcaagataatctgacttggagattataagcccatttgtctcccaatttcaatgctacttgaaacaccagagaacagctgtaacataggttattgtatcagagtttcaaagttatagctgccactatttggccttgaattagccagcgcttttggttttctcaaagaatgtggtgtgtttctttgcacttt

SEQ ID NO: 399856 - DNA, 460 bp, Homo sapiens
attatatacaaagtgatagaaagtgggtggcctggtgtggtcctttcctctccagcctcttctccctcctgtctcctacagatatcctctgtccaactacactgagccacttttcaagcttcttgaatttgtcaaagtgccttcttgccagggtacctttacttggaatgccctcctgtcccctatctccagctacctgcaagctttttactttctgtggcatccatcttaatagaattgatcactcgttccttgtgctatcattgtacctcttacacattctcatgtcagtacttgtcacaccaaactgcagttatttgtttccatgtcactctcttctcctgggctgtgagctccttgagaatagagactgtgtctgttttatctttatgaagtccaagaacttcatgcggaacctgacacttagtagaaagtgaatgaatgaatgaaagagaatctc

SEQ ID NO: 399857 - DNA, 1903 bp, Homo sapiens
  misc_feature (970)..(970): n is a, c, g, or t
  misc_feature (1277)..(1277): n is a, c, g, or t
  misc_feature (1305)..(1306): n is a, c, g, or t
  misc_feature (1590)..(1590): n is a, c, g, or t
  misc_feature (1731)..(1731): n is a, c, g, or t
  misc_feature (1813)..(1813): n is a, c, g, or t
  misc_feature (1894)..(1894): n is a, c, g, or t
atcttctcctctctgcaaacctctcctgtgctgatgcctgggcaccagagatgaggtgggagcagtacctgccctaggcggggctcacggtctagtgcccacagcagctgtccagggagtgcaggctgaagcagtgagatggcaggggggacggagtgagaaaagagcctctcagaagggcaggaggggcggggaggggcggggtggcacatggagctgccaggaaccccagaggcagctctgttcccagagttcagaaacctccaagaaaagctggtggcattgtccgttttgttgtttgcctatctggcctttggctattgactggatggcatcttgggaatcctctgaagggctggagtttaccccaagcacagggacagagggagcaggtggagtcacttctcgttgatgtccagctgagctgggctggtggctgcctcagaagggagggggcagctactaggagcagcagcctcaccccagggctctgtggacctccttagcctgtgatggccttggcaatggggatggcctggttgggggactgagcaaaaggcaggcagtagggatgggtgttcccagccttgagtcagatcctgagaagctccagggcggggcacgttctgtctctgccatctggaaacctaccagctacagcaattgtcacctccaacaagaacccctgagcccggaagctgggtgagaggaacctccaggtacaactctccacccagcacagaccaggtctgctgatctgtgccattccctgatgcactgtggcatcccgtgaccacagactgtcacccacatccccagaacctgcacggtgcttgcttggtacagactaactactgagtgtccattaagccaaactggtaccaccatctggacctgtgaaatgtccttcaacactcccccacccaccccttcctgccacgcccctccctcccttccacgtccctccctnccacgcccctccctcccttccatgcccctcccttccacacccctccctccctccctcccacaaacttgtcttgagacctactgtgttgggtggcgaggagacgaaggccttgggaaccacattcctgttgctcccgtggcccagaaccagccctcatgcctcctgcgcacaccatgttcacctgttctccccctgagctccagcgcagagaccctccctgcccaagttcactgcagtgtctcagcccccagctgagcgcctggcatagagcaggcactttccaaattttttaatgatctagaaatgnaataaatactgaggggctcagggtgtcnnacagcaagtgtgaaagggcttgggtgcagtggctcacgcctgtaatcccagcactttgggaggccaaggcaggcagatcacctgaggtcaggagattgagaccagctgaccaatatagagaaaccccgtctctactaaaaatacaaaatcagctgggcgtggtgttgcatgccagtaatcccagctactcgggaggctgaggcaagaggatcacttgaacctgggaggtggagattgtggtgagctgagattgcaccattgcactccagcctggacaatgagantgaaactctgtctcaaaaaaaaaaaccaaaaaggccgggcgcggtggctcacgcctgtaatcccagcactttgggaggccgaggcgggcagatcacgaggtcaggagatcgagaccatcctggctaacacggtgaaacccngtctctactaaaaatacaaaaaattagccgggtgcggtggcgggcacctgtagtcccagctactagggaggctgaggcaggngaatggcctgaacccgggaggcggagcttgcagtgagccgagatcgcgccactgtactcccgcctgggcaaaagagcgagnctccgtctt

SEQ ID NO: 399858 - DNA, 582 bp, Homo sapiens
agtcatctgaagacttgactggggctggagaacctcctctcaaggcaactcccacacaagcctaggaagttcattctggctgttggcaaggggcttctgttccttgccatgtggactgcttgccataggctgcttgagtggcctcatcacagacatggtggttggctttccccagagtgagtaatccgagagagagagcaaggaggaagccttggtgccttttatgaccccagtctcagaagtcacataccatcaattctgccatagtctatctttatttagaagtgagccatcatatcccactcacactcaaggggagaagagttagtttctcccttttgaagggggaagtgtcaaagaatttgtggatgtattttaaaaccaccacaccaagaaagagttgcaagggggaaggatgctaattaaatgacaaataacaacaacaaacaaacaagaaaggctgggtgcagtggctcatgcctgtatcccagtgttttgagagacctaggtgggaggattgcttgaggccaggagtttgagaccagcctgggcaacacagggagaccccatctcaaaaaaaaa

SEQ ID NO: 399859 - DNA, 338 bp, Homo sapiens
aagcgaagagagtgagttcaactgagccaaaatgatttttgtgtgttaagctctgaaaatactttggggagaacacagtgatatcatttaaaagttctctgcaggaaaccaggaaattaagtactagagtggatggtccgagcgggtccgctcgagaccactcgaagacacagtgactgaggaagctggatgtctgcagtcctcgtgacgtccatgcccaacgtgaacagcatgcggcagcccctcccagcctacccctcctgcgctgccccagagcctgggaaggaggccgctatgcagggtagcactgggaacaggagacccacctgaggctcagc

SEQ ID NO: 399860 - DNA, 563 bp, Homo sapiens
tcaaaaatatggccggacacattgtgttttttcccttagatgaaatgctttctcattgtaaggagttcaaatgagcacttcacacaaaaaaaatgctacgtaatcattgtccagaaggaacagatttgtggcttgtttttattgacaagcagttatttgtatttgttggtcgtaaggtataaaggaagggggtaaaaactaaattaaaccaagtatttcctcactctatcttacatgccttaaatttcatgcaaaacacttgagaaaatatgagtgcctattacttaaatcatttaaacagaaaataccatcagttgctatctagataggacacaggtaaacattcatattatgcagcagctcagcctgacaggactagattcaatcatgaagatttgaatatgcctcctacaatgagtaagacatgattccctctgactttaggaggctcacgcatatgtgatttccaatataaggtgacaggtgccagaacacaaacatgggcgaaggcacagaaggccgctcctgtgcagtggtctgtcttggctcttttgcttcatgct

SEQ ID NO: 399861 - DNA, 474 bp, Homo sapiens
cggtttatgtgttggatttgtcaggtgtccttcagcgttatttggtgaaggtgggcaaattaaatttgcctttttcaatatcctctgaatttttaatgagctgctatatgtcttgtcactttttctgcccatagctattgttttcagcataactgtgttctgtaattcttttttctctgcaatagtaatttatttattttacttttcaagatggcttccatttgtgttatgcaagttttagattttgtacaatatagagtgtataagacaccttttttttttttttaaactgaagagctatggaatctagtatacccagtgatatagctatgacacatttatctaagaaggaatatgttaccacaaagacagtttctttcttttggagaaattttcaaatgcatcagtgctttaaaaaaatcaccattttggtatccatatgtgagggtgagtgattttttcagagagaaaaaa

SEQ ID NO: 399862 - DNA, 390 bp, Homo sapiens
tcagcctcccttgctgctcaggatgaaatatgtagagctggagaagagacatggttagtccttacgtcctgccttaaatgatgatgtgatggccattatctggatccttcatggaatttcggcagttccaacgtgtcaggccagtgtctgggattctctcagcctttcgctttttcccctgggagtcggacagctgctgcagctcagtcagaccaaacctctctgaataccaccaagaatcgggatcttgttctgttgtccaggctggagtgcagtggtacaatcacagctcactgcagccttaacctcctgggctcaagacatcctcccacgtctgcctctcgagtagctcggaccacaggtacatgccaccacccccagctaattaaa

SEQ ID NO: 399863 - DNA, 1474 bp, Homo sapiens
ttcatattttaaccagtttagccagagtttttagtactagtattaacttttgaattatgtttaaggtcttagactttacagcatgtttagtttattttcatttcttattagtatttttcagtacttaatagtctcttgcccccacctccaacaagaactttcctctctgttcaacatcagaaacattttccttttggcatgtgctttctagttccccaaacagtataagcaaattggaaagtttagctgtcattcttggaaggttacagatcacactagcagcctgagtaatccaagaggttttaagtatcatagcatttagtttaaagtgaaatttgctctgacagggctggcagaccaataggaaaaagaaatatttgtgcttggagaagtgcatatgtagagaccaaaagtataactgatggctggaagtgatttcagtctaaaaaaacaaatcattaagagagtgcataggggtaaaatacacagttcatattttaaagagtctcaaaatgaaccagcaactaaggttagcattacatagtaattagttgtggtgttcaggctttaactcactcagtaccagacagtatagttaaactgtcgctgaaaaaacattgctacttacatgatattctctagtttaaacctatagcagtaatttttgtaccttaaaaaaccaaggtattatgacagattatataaatgttgaaccagtaacagacaaacaattatttaaaggacgtgctaatgactcagtttattgacctaggggttatttaagccgctcagcaagttcccttaacatttggtggtatgaaatgaagcattgcttgatagtatagaactgccagtttcaagaagtccttgtacttaatggaagaaatgtaagttaaagatgactagatggcataccttcattaaaatattgccagaaaaagccaaagacctttataggtttgagtaaatattcatttcaacttgataatcacatctgacaacttccattaggtacctattagagcattttttctgttaataactacaaataaggaaaaataaaatatattttaatggctccagttatttcttgcacgtcatttttctcttcaagaaagcctattatgagccagaggaatctaaaatttatatttttttccttgaatatgcagataaataataataaaatgggtcagacacggtggcttacgcctgtaatctcagcattttgggaggctgaggcaggcggatcacctgagttcaggagttcgagactagcctggacaacgtggcaaaaccccatctctactaaaaatacaaaaattagccaggcattgtggcacgggcctgtaatcccagctacttgggaggctaaggcaggagagtcacttgaacccaggaggtggaggttgcagtgagccaggattgcaccattgcactctagcctgggcaagaagagtgaaactccacctcg

SEQ ID NO: 399864 - DNA, 775 bp, Homo sapiens
tgtaatcctagctacttaggaggctgaggtgggaggactgcttgcacccaggaattccaggccagagtgagcagcatagcaaaaccctgtctcaatttaaaaaaaaagaaaagaaaaaagcatcaggatatcatgtaaggacacggagccttacatgttctttctgagattgaaagccactaaaggctctaagcagaggagtagaagagtgacatatatgaattcaactttaaatgaatcattataggtgcccccttgtcaagaaggggttgtagaggacaagaaagaaagcaaggaggccagctaagaacttacaataatccaggcaacatgatggtgtcatggaccaggctggtagcagcggagataatgagaagcagggaaattctggaggttaatccaaaagaatctgctaatgtgagataccagtgaaggaggcatcaaggatacctccaagatttttagtcttcttaacaaatatctgagtatctactatggtccaggctctgtactacagttcacatctttccatttaattcaatcaattttttcaaagtaggggttatcagcccctatctaaaagagaagttcagagagactttaaaactagcctttaggccgggcatggtggctcacacctgtaatcccagcactgtgggaggccaaggcaggtggatcccttgaggtcaggagtttgagaccagactggccaacatggtgaaaccccgtctctactaacaatacaaaaattagctgggtgtggttgcgcctgcat

SEQ ID NO: 399865 - DNA, 1315 bp, Homo sapiens
  misc_feature (994)..(994): n is a, c, g, or t
aaacagctaccattttaatgttttggtactgggaaatgtgttagttgaaaatttcacttacgagtaatccttttatttctctatggtaacaagacaggtaaggcatatcagttggcccagactcattggtcctcaatgactgactgccggactcagagttgagggtctgatctcagaggacgcaggttgtgttgccagcccagatacctatgacaccctttcctagcaagtggacgctgttttctgaaatatctgtcactaccttgaggcaatcctcattattttaatctttattcttaggctaatgtcttgagccatgtatcagagagagacaggcaggttgttgatttttgagatgaagaacaactatctggccagggagagaaagagaaaatcggcttataagttagaatggtacagagtgctctgccttctcagattattttgtttccaagaatcactgattatatagcttttttttttaagtttaagcccatacccattctgcatatttcagagtgaaatgtcctttcgggacaatcttattaaatcactaatctgaaattttatgttccctagttggccatgccagtattttggttagggttttaggtgatttttatatccactgtaaacttggatataacttaccattaaccagatacttaaaaccagggtattttcctaaggtttaacattggaagtggtatgtgagctgagccttgaagggtgacaccaagttttttgacacgaaaaggttggatgagctagctaaagggcttgttttttatcctgtagggcaggagtggttgtagatgccctctcatgtgctgacatactgattgatggtggcttctaaggtctctcctgagtctagtaggaggcaggcttcctaactgtcatggacaccaggcaggcaggtaggggaatgaagcaagatttggcagcgcagctgctgtgagtttgctctccagtggcttggaaatgggaagtnaaggattctgatcttatgtgagaccattttcagactgtcctagtctgccctcacatatccctggaatggacacatacaggctggtcagggctttcttggggcactgaggtgggagaagctggaggcctgggcagggtagtggaactgagagtgagaagccccctacacttggatctcttgcgtatcacacgagactcatttattgatgactgcctagctggctcataatactgatggctgaatgggggtatgaaaactggtcctcaagagtatccagtcttattggaggaataatgcaaaaacaaacaaacaaaaaaggat

SEQ ID NO: 399866 - DNA, 297 bp, Homo sapiens
gcgtccgcagtcagggagcgcaggagcaatgtggccccgaggggcacgggctccattggtccaggagaacccattcttctcccaccctcgagaccacccagcaaagccccaaggacacacggctcccctaaggaagggtggccacaggcgggagtgacccagaaacgttacaaaaccaaatgccagaacccacccaatgtttagcaagcctggggatgtgccacgtcccccagggatccagcacgcacccaaggagacactgtcccggcgaggagcctggagcctgggaaatacaag

SEQ ID NO: 399867 - DNA, 428 bp, Homo sapiens
ctccattcttctggattttgtacgttctctgtcctctaagttgcatgtcctctcctcaatcattctcaattaatagccttgtttagaaaattgaagcaatgagagaaaaaattccacagaatctcagcatcacccacacccacataccagcctctactttgccttccccaccctcacatggttgaattgccgtgctcctagctaaaggagtattgtcaccaagacatagattccagtactatcttgcctaatcaagatcctcactgtcactccagcaattatccgcctattctgttttatcagtatttctctactgggtcattctgataagcttacaagcagctgtgatttttccaatcctacagattcttctctttgacctatttctactgtcagctatcacctatttctctactccctttacaaca

SEQ ID NO: 399868 - DNA, 542 bp, Homo sapiens
aggatgaagatagtagagctgcaaatggagagggcgaagagacacacataaatgtttattcagagatgtatctctgaaaaatgctgtgaatcaaaggataggcctaataaattttagggctatacttattaggaatactttagagaataataataataaggtatagaagtactatctaataggcttataaatagataatttagtttataagtagctaaaacattcaaatacatttgtaaaaaccaagtaaaattcaagagtcttggccaggtgtagtggctcacacctgtaatcccaacactttggaaagccaggacaggaggacagtctgaagtctggagttactcgcctggccaacatggtgaaaccccatctctactaaaaatacaaaaaattagctgggcatggtggcacccacccgtagtcccagctacttgggaggctgaggcaggagaatcgcttgaaccccagaggtggaggctgcagtgagccgagatcatgccactgtactccagtgtggtgacagaacaagactccgtctc

SEQ ID NO: 399869 - DNA, 551 bp, Homo sapiens
  misc_feature (2)..(2): n is a, c, g, or t
  misc_feature (36)..(36): n is a, c, g, or t
gntcgacgcagtgtttgcctttctatgtctggcctntttcatttaacgtaagaatctccaattccacacgtgttgctgcaaatgacagggtttcattcttttttacgggtgagtagtattccattgcgtgtaggtaccacattctctagattccttcgtccgtgttggacaccgaggttgattccatgttttggctgtggtgaacagtgtggtgataaacgtgggggtgcaggtgcttcctcttgttataaagacccttgccattgagtttaggcccaccctaatcatccaggatgatctggtctggggattctttttttgttggagacggagctgagactctgtcaccaggctggagttgcagtgagcctacattgcgccatggcactccagcctgggcaacaagagtgaaactctatctcaaaaaaaaaaaaataaaaagaactctggattctgcctgtcaataagaaagcaagtaaaaagtgtcacagatgtgtgaaattggtccttgtttataccggagtttaccatgagaatgaagagttcatctc

SEQ ID NO: 399870 - DNA, 402 bp, Homo sapiens
ctcaaactatctttgggtaggactgacccctttcccagctattgagctggagccttattagtttaacctactcaacatatcccactccctagctatagtgattaagtgtgaacacggaacccaattaaaaccagagaaatcctagcactttgggaggccaaggtgggtggatcacttgaggtcaggagttcaaggccaccctggccaacacagtgaaacctcgtctctactaaaaatacaaaaaaatttagccagacatggtggcaggcacctgtaatcccagctactggggaggctgaggcaggagaatctcttgaacccaggaggtgaaggttgcagtgagctgagatcacaccgctgcactccagcctggatgacagagtgagactctgtctcaaaaaa

SEQ ID NO: 399871 - DNA, 463 bp, Homo sapiens
ttgagacattgtctcatcttgctctgtcacccaggctggagtacagtggcgtgatctcggctcactgaaacctctgcctcctgggttcaagagattctcctgcctcagcccgcagagtagctgaggtgggaggatccttgagcctgagatgttgaggctgcagtaagccttgactgtgccagtgctctccagcctgggtgacacagcaagacttgtcacttaaaaaaaaaaaaagaaaaaaaaagttttacaactaaaacacacctttttcttggacttaggctggttcagcatgtacagcattttgctcaagtcaaatgatgacctgatgagactgagccactccatgtcagagctggtataatccaactacctcacttaagggatgcagcaattatgagcagagacattttctctagagcagtggttggttcttcatgggggtgttactgccctgtagggg

SEQ ID NO: 399872 - DNA, 2313 bp, Homo sapiens
  misc_feature (321)..(321): n is a, c, g, or t
ttttggacttttttgctgtggactgcaccaaaaatgtagacagtcagttgattgaatgatacaatttttaaaaggtaaaagctttataaagccttataaataagttaaggctataggcctactgtcttcacttttgagaaatagagtttgtggatggacgtacttatactgttgcattaggggctcgtaggccaagattggtttctgcaggaaactcaattttgtttgtcccaagttaaagataaatctcatgtgatttaaaatgttttgagatgttgcacttaggctgggaaagagtaaagattacagaaaaccaacttntagatgttttttagcattttccttttttaaaaattataccaaatatgtaatatatttgcttccacttagatatatctaagtttattaagatggtttggggaaaaatttgtgtatttaccaattgttcacatagaaacaatcttaaataaataacttgatttttaagtgttatgcctgggaggaaggctggcatagctggaattcattagttaatacagaaaaccaggatgttaactgctgtattttcattgtcatgcagagcctaaaagtagactttaatttgtgttataaaataaactgaagacttgagaaggcaggaagcctgggtggccaccccacacatttactcctgtattgttagggtgatccttcattgttacaatcattttctttttatagcatagttaagaacaaaggcttgggagccagaatgcctcagtttgaatcccagccctgtgatcttagacaagttatttaacctcactgtatcacagttttctcatgtgcaaaatggacatgagtccgttttgtacctgctttacagagttttgtgaggattaggtgaattaaaccacgtggaacagtgcctagcacagagaaaacattatgcaagtgttagttgttattgttttcattcccatttattttccatttaattgctttaatcttaaagactgggacagagaaagcactatacaagtgttagctattattattttcatttccacttattttgcattttgttactttaatcttacgaaagagtaatatgtttctactttgtatgcatgtttgtgtgtgcacgtgaataagtgaaaataaaaaaaatttttcctgtttgaataggacaataccatttgaggggttatttacaatcctaaattcttagaactgcctttgagtcatgccttttctttatttccatatttggttacttgcaggtcatgtcagtgattagtttcacttagacatctttcccctgctatatttgagatcctcaagatcgggttcattgattcactagaaagattgacacattatagtcatacgcatggctgtgatttatcatagccaaaagacgcaaaacaaaatcagcacatggggtgaaatccagaggaaaccagacacaaggcttccaagagtcctcttcctgtggagtcacaggacaggctaattcagattgaattaagacaacatgtgtgaaatattgtttatcagggaagctccttagagactttattcagtgttagaggctggtcatgtaggtgcccttggctaatgttccaaaattccaaactctcagaaggaaggtaggtggtcaacataaaccacatattttatacaggcatgaagcacagtgagccattcttaggagttagggaatggtgaggtcccctctggataaacaaggtcccagacacctgccaagggccaaccttgcaagcaagactttctaaggacagcagcagcaggcctgctgtgggaactcttttctgcccacctgcccataattaccctagtgtttgtcctcatcatcttttaaacctcatttttcaaagcctattaactggcttccctgagttccagcatactgtacttggatctgtcccactaatctcctatctttaactaggcttttattgtgtctttttcctgctcatgacctttcattagctccttatttaatcatgtctgtaaaaggactttgggggccgggcgcagtggctcatgcctgtaatcacagaacatggggaagctgaggcaggcagattgcttgaggccaggagttagagaccagcctggccaacatagtcaaactctgtctctactaaaaatacaaaaattagccaggtgtaggggctcatgcctgtaatcctcccaagaagctgggctgaggcacgagaattgcttgaacccaaggggcataggttgcagtgagccaagatcatgctgctgccctccagcttgggcaataaagcaagactctgtccc

SEQ ID NO: 399873 - DNA, 381 bp, Homo sapiens
tctacatgttatgcatgtgcctagtgagcattctctgagggttgagaaacatttcccaactatcctgtacaattctctacatgtgaattatcatgtaatccctttgaactacatatcatgcacagaatttatgatttcaagttctatcctgtgctatttaatttctaagctgaacacatatttaacagaaggcaagaaagaagatgaaatgtggttcacacatttttcatcataatccatttatataagataacttggaaaagaatctgtaagtcatttttattagtctgtcaaagaaatggctgctaataaaactgccgaatcaaatcattaccagtactgtgcattgacccttggcataggtagaactttctttccatc

SEQ ID NO: 399874 - DNA, 866 bp, Homo sapiens
tgattggaatatgtaattgctacaggggtgttttcatccttctaccttcatatcccagaggaactacaggctctcctaatccaaagttaaggtcatttggaggttccctctcctactgtgcccacactaggcgctcttggcccagttacccctaactcaggggttattgtcagctctccttctctgtgaccggcccacatctgagtgagtctggttcgttacccctaaatctctctcaaattattcatccatcctcattacggttgctccctcactctcctgtcttggccagtactagcctctgactgttctctctcagtctctttcacctgctgtcctctctgccccaggcgtgttgctaaaatagaaatgatcatgtgtgtcctctggttcggccttgcactctggacagagaccaatcttcagtgcttcctagtctgtgtccctcagaaatgcccctgaaacataatgtatttttttcttcagtgcttttgcacatgtttgttactgtctggaatgttcttctctcagcttcttcccctcccacaccaaatggccacctctctaaccgcccttcattccttgaaactcagtattgccacttctacagtaacctttgaagcctctccctttgtctgatgcacttctgcccttttttttttctttctttctttttgctcttaaactcactgtattgtcatttatttgtttaaagactgtcttcagtggaccaggagctccttgaagacacatcatttgtcttacacgttctatgttgtagtatctagtatggagtctgaggaagtgctcaagtgtgctgaatggctaagaaatttgaaaacggtgcataattagctttaattaaa

SEQ ID NO: 399875 - DNA, 827 bp, Homo sapiens
acacaccaccatacgcacatgtcaccaccacacacacaccacataccatacacacacaacataccacacacacagcaccacacataccacacacatacctgcacacatactacacacaccacatacacatcacaccacatatactacacacacaaacataccacatactacacacatcacacacacacgactagcccaaccatacgcacatgtcaccaccacacacacacacacacacacacaccacacacacacacacaggttcctcaccataagctttggggaaaattcttggcttttttgctgggggagagagcagtgcccagggaagattggctgatctcagagctggagggtttatgcgggactggccagccccttcagctgagtgggacagcaacacagtgggtggtaaggggcttcataagatgtacaagatgagggagaggcccctccagccaaccctgtgtctaaagagtcaggtaacgaagaactttccagagacagctgtgagtccgtctggcttaaggggttgtacaggtgtctgagaatggggcctgaaggtgcagggcctgcaggctgccctgtttggaaggttcctgtccttctgtcttggtagaaaatggcagctagccttgtaaagggcctccttgtgtagcgagatagaccatgtagccccagatgcccccatggcttcacttccctcttgggggtctctcagtatatgtctagtgccaccactattggtggagagtttccttctggaataaccttggggtggtggatgggttttattttaataaaagaagaatgtctcattcaaaaat

SEQ ID NO: 399876 - DNA, 629 bp, Homo sapiens
  misc_feature (626)..(627): n is a, c, g, or t
  misc_feature (629)..(629): n is a, c, g, or t
caggtctggttgggttgagcaaaagaatgaaattaggcgtttagaaactagaccaggagctgaagacaggaagcagtcaaaaactctccatgagtgaagaggtagcacttttttgatccaggcatgaaaggagtattaataggaatggggaagttggaacgtgtttccctccatattcctcacgtctattttagcttttccttccatttgtttcttactctttttctttctaacattctctgctagtgtttgaagagcagttgtgagggaacttaaatgatattccccttttccttttccctaataaccttcctgccagattttcaagtaggcaatgataacagcaggtgagatattaggaactgtgactacgaagtatgtagatggagatgtgcagaaggatccagagacttagagcaatgcttcacatgcttttggtaagcatgctccctactgtgggtaaaccaaacatgtaccaacccccccagaattatgatattctactgcagtaaccagcctcttcttttaacatcagatagctaaaggacgttatcctcaaagtcatggaaaagcaggaagtttttcatgacaaatcagtttgccatagtacagttaaaaaaaaaaanntn

SEQ ID NO: 399877 - DNA, 482 bp, Homo sapiens
agctctgtggtggacagagatctcaggctgcccagattcagggggtagtaagtagccagtcagttcccattgatcacagctctttaaggatgctgcgcttatgtttccaagtctatctacttttcagattttcatgtgaaatctcttgtatcgaaatattcagtcaaatgtgtaaagaaccattcaaatgtataaagaggccaggcgcggtggctgacaccgtaatccaaacactttgggaggccaaggtgggtggatcacatgaggctaggagttcaagaccagcccagccaacatggcaaaaccccatctctactaaaaatacaaaagaattcgccaggcatggtggcacacacctgtaatcccagccactcgggaggctgaggcatgagaatcacttgaacccgggaggcagaagttgcagtaagttgagatcatgccactgcactccagcctgggtgatggagtgagactatgtctca

SEQ ID NO: 399878 - DNA, 388 bp, Homo sapiens
tagtgattgacatggcattaaactccagatctgtttctagagccagtatgctacattgccttggaaaatatatcctgtatgcacagatattacccaaacatttcttctaatgttacgaataagtaaaatgtaaataaaatgttgattaggactggtgaggactgattaacaagaactaaaaaatgaaaattaggaatattgggagatataccaaatgagctacaatataccaatttacgttgcaagagtattaactgatgtattttacttgctggaatgagttgataaaccatttactactggctggcagtttcaggttaggagaagtatatgattttggtcactcaatttcttatctagtctttacctctgagatttgaaaaaaaaa

SEQ ID NO: 399879 - DNA, 368 bp, Homo sapiens
atatttcatagtatggacataccatgtttcatatatccattcatcagttgatgaacatttgaattgtttctactttggggccattatgaacaatgctactagggacttttgtgggtgtatgttttcattattttattgggtgtttacttaggagtgcagttgctggatcttatggcaactctataacttaacattttgaagaagtgtcaaaaggttttccaaagtcactctaccattttatattcccagctccctccacgggtttcatctctgttttctttctttaaacaaggaattggcaaactatggcccatgggccaaatccagcacactgtctgttcttatgaataaagttttattggaatgga

SEQ ID NO: 399880 - DNA, 511 bp, Homo sapiens
aggaaatggagcgagaatcaagaggaagtttggcagaatgagatgctgagttccccttggggagtaagctccttaatggcaggagtcttatcttctgctcactgttgtggctccccacacctatgggatactcagatgaatattcactgaggatttttatttttatttttatttttctgagatggagtctcactctgtcacccaggctggagtgcagtggtgcaatctcagctcactacaacctccaccttctgggttcaagcaaatctcatgcctcagaaaaaaaaaaaaaaaaaaaaaaaagcctaattagtgcttgatgatgtttagtgtaaagctgtgcttctcaacagggaacgaggcaattattccccccagtacaggagacgcttgtcaatatctgaagacatttttggtggtcacacttcaggggtgctattggcacataatgaatagaagctgaggatgttgctttccaccctacgctgcacaggacagctttctaccaaaa

SEQ ID NO: 399881 - DNA, 608 bp, Homo sapiens
atttcggactcctccaggttccatgatcgtatggaacagggcagtctgttccctaatgctggaggagtagagcttggagagatttgctgctgaactcgctgcgctaaccagacacgtaatcacagtggcttcagagggactcgcacaacaatttccattagctacggacaagcattccaaactttagcctttaggtttaatcattgacacaccttccctggtcactgagtctcctctagaaactcagtataaacatccaacgatgtgttaacagggtgttttgtaattttcttttgaagattattctaggtggtgggcgtcacagggtcaataaaactatacatttctctcaaagactgcaatcctgatggcaaagctggaggaagctccgggaaacctgtaattgtgggaatccaagactcccctacagctgggctgtgcgaaggggcactacctaggagaagaaatcccctacagctgggctgtgggaaggagccctacctaggagaaatcccctacagctgacaggtgggctgtgggaaggggccctacctaggagaagaaatcaaatcccctacagctgggctgtgcgaaggggcactacctag

SEQ ID NO: 399882 - DNA, 414 bp, Homo sapiens
caacacatgaacagattggcactggggtttgttaatgagcgtcttgtgatcagtgttggtgtgaacaagttttgaaacagtcactccatgaagcccaggcccctagccatccaatctgatcagtcagcctctggtgcaccaagtaaaacgtctgaggctgctgagtctccggagtgacttctggcctcagagaccctgggctgccagccaaagctcggggcagggaaacagtgaaagaggaggccatcgtcatctttctcatctcctgcccttgctcacctttagcagggccctgcactaactctgtgaccctgagctgacctctctgagccattatctggaagagggataacagaacaacctgacagctcccggacagtagtagatgctcaataaacgatgtgtattattaac

SEQ ID NO: 399883 - DNA, 398 bp, Homo sapiens
actgaaataagtaggattcaaacagagttggaaagaaaacctgtgctctgttcaatacattaagcccattgagctaaataactagtaagtgtttaataagtgtgtttcaaaagtaaaagaaaaagagtaagaatgagacagaagtgaagaaatccacctgggggaagtgtggagattaaagatgtgtagggtttggatgcatgaggaagcgaaaatgcagggcctggaaagagtcacaaagagtcccccaaacagcagagtacagaccagtctgatcaggaaagagacacagtgggaaacaaataagacctcacctggtagggtgaaatagtgagcagggagtgtacatcgcacctgataggaagaagaacggatcagtataaaagtgtggtttcagt

SEQ ID NO: 399884 - DNA, 619 bp, Homo sapiens
agggaagagttctatgacaaactcatagatgcagactaacatgtaataaaagttttaaatgcagaaagaaacctcaaactattattggaataggtaacaagaattacagttgaccagctgtattgaagatagacacacgtataggaacagtttggtaaatgaatcaggaatggtttttaaagtataagattttgcaaaatagtattatctatatagaatcttgtttaaatgggaacccacatatataaagcacctaacaaccatttattgagagactgccatgtgccaggcacagagacattaaggatacgagaccaaagaaaacatttttttggctgggtccagtagctcacacctgtaatcccagcactttgggaggccgaggcgggtggactgcttgaggtctggagttcaagaccagcctgaccaacatggcgacacgccatctctactaaaaaaatacaaaaaattagctgggcatggtggcacgtgcctgtaatcccagctactaaggaggccgaggcaggagaatcacttgaacctgggacgcagaggttgcagtgagctgagattgcgccattgctctccagcctgggagacagagcgagactccatctca

SEQ ID NO: 399885 - DNA, 446 bp, Homo sapiens
ataagatggtttcttaaatgcctcatatgcccctacttcttcctctttacatatagacacctttttcaggagtctaataaggataaaaaggcttaggccatgacctaatgctttggtaggaagatccagggctgggatgataccactggtgctcaaggcattgctggttgacacctcgtgatccaggatgacttcttgatttctcaggacctctatgaattttattttagtgttcattctagagataatataaacccctaatttatcactgtataccttgaattaatatatcatttcacttatgaagtaagagtcttacagcaatgtttcaatttacacttctatttcttgtgctgtcatatattttattgctataaattataaaccctatgtaatgttattatttttgccttccaagagccaactgacttttaaagaattttttt

SEQ ID NO: 399886 - DNA, 986 bp, Homo sapiens
  misc_feature (122)..(123): n is a, c, g, or t
  misc_feature (368)..(368): n is a, c, g, or t
ttcccaagtttaaattgaaggagagacgaaaacctttctgctttctgtccgttaaagagctcctcatctgatcttgcagctagaccctttgagacttaagagctgcataccaggatcagaanncagggctaatggggtaggacaatattcccagcccctaagctctgtagataatgcataagaagcaccaagtcaggctcagatgcaactaaaacacatcttgagccttttctttttcccttctcccctttctaaacaaaaaccttcctaggatggcatctttgctctaactgggagacagtcataattggttgtagtcaattctactaagcagtgtggggtggttggaaagtctcttttttgtaatntgtttttgcaaatcatgtgaggccactttttctttctttctttctttctttctttctttctttctttctttctttcgttctttcgttctttcgttctttctttctttctttctctttctttctttgctttccttctttcatctcttttttgtaatttgtagtgcaaactcatgtgaggccacttttctttccccttccttccttccttttttttctgttttgtattatttttattttttccccagaggtctggctcgggcccccaggtgggaggtgcacggggcccgaacccgcgggcatcacgggcatccccattcgtgtcaccttggggatccaaagcgaaaccaaccggacatcaagacactccacaaagtaaagcctggggacaataacaagggccaatacagccacaaacgcccacaatacaaaatgacaggataattaatgaggcagcgcgcgggggatcacacccaaagaaggccaggcatagggattgcagaaaccccgtgaagcaccaagataaacgtggcaaccacggcctcccaacaggtgatctgctaacacggatggtagcccgcgggacgagacccacttattactccctacatatagggaaca

SEQ ID NO: 399887 - DNA, 937 bp, Homo sapiens
  misc_feature (73)..(74): n is a, c, g, or t
  misc_feature (319)..(319): n is a, c, g, or t
cagacccaccaccacccccccacaacatcgcaggacgagcctgcgctgaatcggacgaggacaggatcagaanncagggctaatggggtaggacaatattcccagcccctaagctctgtagataatgcataagaagcaccaagtcaggctcagatgcaactaaaacacatcttgagccttttctttttcccttctcccctttctaaacaaaaaccttcctaggatggcatctttgctctaactgggagacagtcataattggttgtagtcaattctactaagcagtgtggggtggttggaaagtctcttttttgtaatntgtttttgcaaatcatgtgaggccactttttctttctttctttctttctttctttctttctttctttctttctttcgttctttcgttctttcgttctttctttctttctttctctttctttctttgctttccttctttcatctcttttttgtaatttgtagtgcaaactcatgtgaggccacttttctttccccttccttccttccttttttttctgttttgtattatttttattttttccccagaggtctggctcgggcccccaggtgggaggtgcacggggcccgaacccgcgggcatcacgggcatccccattcgtgtcaccttggggatccaaagcgaaaccaaccggacatcaagacactccacaaagtaaagcctggggacaataacaagggccaatacagccacaaacgcccacaatacaaaatgacaggataattaatgaggcagcgcgcgggggatcacacccaaagaaggccaggcatagggattgcagaaaccccgtgaagcaccaagataaacgtggcaaccacggcctcccaacaggtgatctgctaacacggatggtagcccgcgggacgagacccacttattactccctacatatagggaaca

SEQ ID NO: 399888 - DNA, 410 bp, Homo sapiens
aatgtgaaggaagtgtctaattgtgagaactggcatgcccccagtctcccgattttgctcaatttggtggcgatgatgtcagccgggggtgtcgttttgcagagatgtgctgtctacccattcttcagtggtgattataataccgtttggtccaattatcacttatgattacataacgtgttttgattgaagagtttctgagaaaataaaggtaccctgtcttcccctgcacacaaaaagaacccccgcaagccattcgagcaggcaggctgacctaccaagaaacactgggaattattaggctaaattatgagttgaacttgatttggaaacaaagtatccattgtacataactccccacgacatccaggaagatgtcattgtttttctgacagcaagtttctccccag

SEQ ID NO: 399889 - DNA, 444 bp, Homo sapiens
agtccctaccccaggtttcctagacatggggaatgcattctgaggacaggtggagaagcctacggtaggatggggtcctcgtaggtgagcaggaaacggctaagagcagaggagttctgcttgcgccagtcacaagccgcgcaggcgcccctggtcgttcgcttttgataactagcacataaagaactagaaataatgaatgattgctttcttaaccattactttcaggcccgcattgttttagtgcacgtgaaaggctcttcccctacactcaatatgtctttttctactttttgaccgaaaagaaaaattgctgcctaaacacgtttaatgccattaattaagaaaaggcatgtaatgggaagaaatgctgaaaatcttgatttaattggcttttaaggaactagtagacgacaaaaaaaaatcacacgagtgggcaaagct

SEQ ID NO: 399890 - DNA, 584 bp, Homo sapiens
  misc_feature (34)..(34): n is a, c, g, or t
ccagcccacttcagctatcttgtcccacataaanggggaagtggaagaaacctgagaagcaggcatgaagttcacagtccagagaccttgccatcgtatccccttttggagacacaagccaggaaggaagctcttcagtgcagctgtgaatagagaaatgctggctgaggttttggagacactgggtgatcattcccagtgaaatttttagatccctggggacatgagctgctttgtcttttccaaggtcaggataaacagaataacttcaggcttctctacccagaaagaacatgtggcataaatatcaactgcagaataaatatgattaatctggtacatggacgaagatgttttctaggagatgcttatcctgggatgagagctttcataagcattgatatttacatgactcttaccgtgtgtcaggaactgttctaattgttttacctatgtcaattcatttgatagtcacaaccactgaaaggagtaagtactcttattacttccattttacagatagggaaactgaggtatagagaagtcaagtgacttgcccgaggttattaaactacttaatgtca

SEQ ID NO: 399891 - DNA, 734 bp, Homo sapiens
gtaggagtacggcacgagcgactctgaagttgcactgacctgtccagccctgtcacttaccaggttgtggtctgccctcaggggaagctgtctaaccagagcctaacccactagggttttatcagaacttaactgacctgaggaaaagaaatactcaactccagcaagctccagccttccaaatggaggaggagaaaaaacctgagaagcaggcatgaagttcacagtccagagaccttgccatcgtatccccttttggagacacaagccaggaaggaagctcttcagtgcagctgtgaatagagaaatgctggctgaggttttggagacactgggtgatcattcccagtgaaatttttagatccctggggacatgagctgctttgtcttttccaaggtcaggataaacagaataacttcaggcttctctacccagaaagaacatgtggcataaatatcaactgcagaataaatatgattaatctggtacatggacgaagatgttttctaggagatgcttatcctgggatgagagctttcataagcattgatatttacatgactcttaccgtgtgtcaggaactgttctaattgttttacctatgtcaattcatttgatagtcacaaccactgaaaggagtaagtactcttattacttccattttacagatagggaaactgaggtatagagaagtcaagtgacttgcccgaggttattaaactacttaatgtca

SEQ ID NO: 399892 - DNA, 1653 bp, Homo sapiens
ttctgggatggggccctcaggaagctatgagcatttccaggaagagctggcacatttctttgatggcctagtggtttttatatttttctgcctgaagttcaccactttctacccatgtactcctctcctgttttcatgaccctccttatttcaggaccacttgaaacccttcatttctgcccaacttctggatgttcttccctatactctattagacctccaaacagcttgagaaggagatattattgcacaatgtttaagagccctggcttctgagttggactggcttggatttgtagtagttctattacctactaactacctaatagtaggtaatagaactacctaatagtagttctattacctactaactttgaggctttgggctgattacttaatttcttggtacctgatttttcatacctgtaaactggtagaaattatgataacatctacttcataggatggttatcatgattaaaaatgccagggatttcttgtttctagtttgacgtagaagcagcttgaaggtccccactccatcataaaaacaagtaaatatctgaagaaatggtaaaaaaaaaaaaaaaaaaaaatcaacacttcttcttagatacataagagaaggaagatcacaagggaaactactgcccccagaattggagggacagataggcagataaagagaatcacaacttgctggagcagaaacctatgggctgaaacatccattggaaccagtgccagggtaggaaaacctgaactatacattgatttatttctggaggctcagtgtcaacaagtcagagataaatctcccagaggatccagaagtagggagtaccatacttttatgggttttacctctggaagctctaatacattcttacattgaatatctgagaaaaatttcctcacgctttggcaagaggagaaaaaaaggaagcattttgaaatagagcaatgcattcttttttttttaaacagggtctgccctcaggggaagctgtctaaccagagcctaacccactagggttttatcagaacttaactgacctgaggaaaagaaatactcaactccagcaagctccagccttccaaatggaggaggagaaaaaacctgagaagcaggcatgaagttcacagtccagagaccttgccatcgtatccccttttggagacacaagccaggaaggaagctcttcagtgcagctgtgaatagagaaatgctggctgaggttttggagacactgggtgatcattcccagtgaaatttttagatccctggggacatgagctgctttgtcttttccaaggtcaggataaacagaataacttcaggcttctctacccagaaagaacatgtggcataaatatcaactgcagaataaatatgattaatctggtacatggacgaagatgttttctaggagatgcttatcctgggatgagagctttcataagcattgatatttacatgactcttaccgtgtgtcaggaactgttctaattgttttacctatgtcaattcatttgatagtcacaaccactgaaaggagtaagtactcttattacttccattttacagatagggaaactgaggtatagagaagtcaagtgacttgcccgaggttattaaactacttaatgtca

SEQ ID NO: 399893 - DNA, 1600 bp, Homo sapiens
ttctgggatggggccctcaggaagctatgagcatttccaggaagagctggcacatttctttgatggcctagtggtttttatatttttctgcctgaagttcaccactttctacccatgtactcctctcctgttttcatgaccctccttatttcaggaccacttgaaacccttcatttctgcccaacttctggatgttcttccctatactctattagacctccaaacagcttgagaaggagatattattgcacaatgtttaagagccctggcttctgagttggactggcttggatttgtagtagttctattacctactaactttgaggctttgggctgattacttaatttcttggtacctgatttttcatacctgtaaactggtagaaattatgataacatctacttcataggatggttatcatgattaaaaatgccagggatttcttgtttctagtttgacgtagaagcagcttgaaggtccccactccatcataaaaacaagtaaatatctgaagaaatggtaaaaaaaaaaaaaaaaaaaaatcaacacttcttcttagatacataagagaaggaagatcacaagggaaactactgcccccagaattggagggacagataggcagataaagagaatcacaacttgctggagcagaaacctatgggctgaaacatccattggaaccagtgccagggtaggaaaacctgaactatacattgatttatttctggaggctcagtgtcaacaagtcagagataaatctcccagaggatccagaagtagggagtaccatacttttatgggttttacctctggaagctctaatacattcttacattgaatatctgagaaaaatttcctcacgctttggcaagaggagaaaaaaaggaagcattttgaaatagagcaatgcattcttttttttttaaacagggtctgccctcaggggaagctgtctaaccagagcctaacccactagggttttatcagaacttaactgacctgaggaaaagaaatactcaactccagcaagctccagccttccaaatggaggaggagaaaaaacctgagaagcaggcatgaagttcacagtccagagaccttgccatcgtatccccttttggagacacaagccaggaaggaagctcttcagtgcagctgtgaatagagaaatgctggctgaggttttggagacactgggtgatcattcccagtgaaatttttagatccctggggacatgagctgctttgtcttttccaaggtcaggataaacagaataacttcaggcttctctacccagaaagaacatgtggcataaatatcaactgcagaataaatatgattaatctggtacatggacgaagatgttttctaggagatgcttatcctgggatgagagctttcataagcattgatatttacatgactcttaccgtgtgtcaggaactgttctaattgttttacctatgtcaattcatttgatagtcacaaccactgaaaggagtaagtactcttattacttccattttacagatagggaaactgaggtatagagaagtcaagtgacttgcccgaggttattaaactacttaatgtca

SEQ ID NO: 399894 - DNA, 176 bp, Homo sapiens
ggtagtatatgagccatcctcttcaagaagcctggaaaccctgcttccccacctacaggcatgcccctcaggactgtgaaagtggcagctttcctctccctgcctcagccatcacttcagagcaggctactgctgctgcctcccagaggggcttgcagcctccagctcttgctcct

SEQ ID NO: 399895 - DNA, 746 bp, Homo sapiens
acaaatcatagattaggccactaacataaagaaatgaggtaaattccctgcagtcttcttgtggggccatgtaacagtagagaccacttgagtttgccaagtttggtggccaagtcccatgttttgtctgagaacagacagaggctcagggatattgggatgatatttggtatgaagggtttcttatttggactgcaccaagttaactgtgtgctgtgaaacattatatggcttcattttcattgggagaactagtgatataaatgatgtaacgtgaactaagtgatttagctaattacacatatttttggatgcttctaaaaaactaatatgtgatccttggagtagaggaagttgtacattcaaggttttctaccctttttgtgtgtgtttattttaatgaggacaatgggaactacaccatttctttcctgttagttcatcctggattacctttttatatccattaaacatagaaattctgaagccatgtctgcctacatgtcatcctgattgcctttgtgtataattgcagatcaaatgtagaagcagtgactacttaaaaaaaaagttgttatagaccaaggcttgaggaaagagaaaggtacagtgacaatgagatatcttgggggaaatttggtcccgtagaccaggggttagcaaatcatatcctgtgggccaaaccacagtcacctgcctgttttggtaggcctataagctaggaatggtttttacatttttttaaa

SEQ ID NO: 399896 - DNA, 402 bp, Homo sapiens
tattcagagaaaacttaagccactaagttttatggtgttttgttctgtagcagaagcataggcatactgacaatacaaaccgaaatccttctaacgtagtggaccttttcaggccagcattttttccttgaaaacctggagcatgtatccatcttatagcagagatcactttcacaatgtttgggctcttgatttgaattgatgatgtaatgagccctctatccagattgtaactaattactctgcgaattgactggattccacacccttctaatattttacttttcctcttttatcaactctcattctcgctgccatgatcaatggaccaactatgcttataaccacaaattttgatatgcttaaacaaatgaacaaatatatttaataatttcttttttt

SEQ ID NO: 399897 - DNA, 484 bp, Homo sapiens
gcttaaccccggcctcagcgactttgagcttcttattctggtgagtcttgacgtgcttcgcgaggtggtcgctgcgcatgaagcgcttgccgcactcgggacaggcaaagcgcttctcgcccgtgtgagtccgcaggtgccgctgcagctcgtccgagcgcgtgaagctcttcccgcagaagagccagttgcacacgaagggtcgctcgcccgtgtgccagcgcaggtgcgccttcaggtgcgacgtcttcccgtacaccttgccgcagcccggcacgtggcacacgtgctgcttcttcttccccggctccgcctcgggggcgccgcccgccgcctggcagttgggacagcggcagcggcggcacctcctggccgtggccgccaggggggccttggtctgcagcagcgcggcgatctggctctggtactgcgcaaagtccgacgggcccaacaccaggcctctttgtagggcggcggcggccgc

SEQ ID NO: 399898 - DNA, 316 bp, Homo sapiens
ctatagacagataaaattacccacccaggcatggtggcatgcccctgtggtttcagctactcagaggctgaggcaggaggatcactcgagcccaggggttcaaggctgaagtgagctatgattgcaccagtgcactccagcctgcatgagacattgggaccttgtcccccacccccgaaaaaagaaaaattaatcaggtcagatgcgatggcttatgcctctaatcccagcactttgggaggccaacgcagtaggattgcttgagagttaaggagtttgaaaccagcctaggcaacataagactctgtctccacaa

SEQ ID NO: 399899 - DNA, 497 bp, Homo sapiens
atccataggtatgtttttaaaaattaaaacataaacatgcctttccttttagaaaaacagtatatatatagtatacaagtaaatacagtatacaagtaaattatctacatatacataaatgtatatgtatatgcaaaagagagagataaatttcacaattctaccactcaagataattgctatcaatatctaggtgtatatccttctagaacttttaaaatagacacgtttatatacattatttacaaaacacaatatctcattttaggctatgtttaaaacctgttgtcttttccatttaccaatttaggattattgtctttccatgagaagacgtgttgttgaagcttggaattccctactaactcattttcaaaggaatctgtgattgaggtaaatccagttttctagagagaaagaggaaatgtcttttgaagccatgcctgggaagtatgatcagcgaatgttactgcacagatttttttccatcacagctt

SEQ ID NO: 399900 - DNA, 353 bp, Homo sapiens
gcagacttacactgaaggaacttgaaagaatatacttcaggctgggtatggtgacacacacctgtaatcccagcattttgggaggtcaagccaggaagattgcttgaggccagttcaagaccagtctgcacaatacagtgagaccctagctctacaaaaataaataaataaattagccaaatgggtggtgtatacctgtagtcctagctactcaggaggctgaggcgggagaatcactagagcacaggagtttaagactgcagtgagccttgatcacaccactgtactccagcttggatgacaaagtacaaccctgtctctaaataaaagaaaaaaaaagcgtatacttcaga

SEQ ID NO: 399901 - DNA, 474 bp, Homo sapiens
cattaaattgtcaccttggatattctagaagactaaatatatcctttagggggaaaaagtgtgattgtaccaaagttttaagcatggagtgtatgggatggtggaaggggaaggcacttggtatctgttggttggcagtgagtaggttgggagagttataatggagaacttagaataactttgatcatttcatgtttttttctgaggatatcagtagaatactaaatattaaaattcctaccatttctttttcctccagtctcaaagagagagggtggtaaaaacactataggtagggcaagcctattatttgctatctacacttatgcagtaaaaacaggtgtaatctgagtttgtcctgggcagaccagggatatgtggtcactcactatagaaatttccaaatcaaattttgagagatttttttttaaccaggacattattggtcattatattttacaaaaataattctgc

SEQ ID NO: 399902 - DNA, 236 bp, Homo sapiens
tccccatactcttgtttaaatatttgttgcctttttaatgtaattgctttccaattctgaaaacaataagtgaatgattagaaactgaagacttcatttaaaatatgtgaaatcggccaggcgtggttgctcacgcctgtaatcccagcactttgggaggccgaggcaggcggatcacttgaggtcaggagttcaagaccaacctggccaacatgacaaaaccccggctctactga

SEQ ID NO: 399903 - DNA, 964 bp, Homo sapiens
cttgaccaggctgatcctcaactcctgagctcagatgctcctgccttagcctcccaaagtgcttgaagtacaggcgttagccaccatgcataatggactaagacaacacccaaatggagatgttaggcaattgactacatgaagagagtttcggaggagaatgacagctaggaatatcaatttgagaattagtatataaatgctatttaaaaccatgggaacacttcatttttacagttagaaggtggaaagatgaatagaaactagtgaagactaagaataaaggatcatgagtgtagaataagacccagagatgtgaagtcccaaaagccaagtgaagaaagcagttcaagaaggaaggaagattgagttgataaaatgctgctgaaagttcaaataagataaggattggtaaataattattggacttggcaacatgaaggtaattagtgacctggaaaaaataatctctttatattgagggaataaaacctgaactgaagtggttttaagccagaagaaagagacaatgagtataggtaactcttgaggaattttgctgtagaagggttcagggacatggggcagtgactggaatacgacaggaagtcatgggaagaattttctaaggtgtaagaaatactataccaagttggtatggtgaggggatgattctcaacactggctaaataatagaactaactggggaatttattaaaggatagctgcatgagttcaatggcagactgattaaatcaaatctttgggaattggaccatggtatcagtatgtttgtttgttttacagttactcagatgattctaatatgcatccaaagttgatctgctttggagcagatcagtcaaattaactcgttatataagttaaacagtatatccaacacagttgaaaattaggaacaatagaaattacacagaatgcagcatagatatattaaaaatgg

SEQ ID NO: 399904 - DNA, 1021 bp, Homo sapiens
atcaagaggtcaagggacgaaatacaataaattaagtacaatggtagcaaaaatactgacattaaaaaatagaagttccaggccaggcacagtaggtcagacctgtgctcccaaagtgcttgaagtacaggcgttagccaccatgcataatggactaagacaacacccaaatggagatgttaggcaattgactacatgaagagagtttcggaggagaatgacagctaggaatatcaatttgagaattagtatataaatgctatttaaaaccatgggaacacttcatttttacagttagaaggtggaaagatgaatagaaactagtgaagactaagaataaaggatcatgagtgtagaataagacccagagatgtgaagtcccaaaagccaagtgaagaaagcagttcaagaaggaaggaagattgagttgataaaatgctgctgaaagttcaaataagataaggattggtaaataattattggacttggcaacatgaaggtaattagtgacctggaaaaaataatctctttatattgagggaataaaacctgaactgaagtggttttaagccagaagaaagagacaatgagtataggtaactcttgaggaattttgctgtagaagggttcagggacatggggcagtgactggaatacgacaggaagtcatgggaagaattttctaaggtgtaagaaatactataccaagttggtatggtgaggggatgattctcaacactggctaaataatagaactaactggggaatttattaaaggatagctgcatgagttcaatggcagactgattaaatcaaatctttgggaattggaccatggtatcagtatgtttgtttgttttacagttactcagatgattctaatatgcatccaaagttgatctgctttggagcagatcagtcaaattaactcgttatataagttaaacagtatatccaacacagttgaaaattaggaacaatagaaattacacagaatgcagcatagatatattaaaaatgg

SEQ ID NO: 399905 - DNA, 756 bp, Homo sapiens
gtgcccagggtgaggcagaagtgcgacacccgcctgtgggcattgcagtggctgtggcccggcagaaggacagtggcggcagtggccggctggggcctgggctggtagaccaggagcgctctctgtcgctgagtaacgtcaaagggcacggccgagcagatgaggactgtgtggacgaccgggccagacaccgggaggaacggctgctcggggcacggctggaccgggatcaggagaagctgctcagagagagtaaggagctggctgacctggcccgcctgcaccctaccagctgtgctcctaacggcctgaaccccaacctcatggtgacggggggcccggcgctggcgggctcaggtcgctggtctgccgaccccgcagcccatctggccacgcacccctggttgccccgctcgggcaacgcatccatgtggctcgctggacacccctacggcttgggtcccccatctctgcaccagggcatggcccctgcgttcccacctggcctggggggctccctcccgtcagcctaccagtttgtcagggacccccaatcgggccagctggtggtcattcccagtgatcaccttcctcactttgcggagctgatggagcgggccaccgtaccgcccctctggcccgccctgtacccgccgggccgcagccccctgcaccacgcccagcagctgcagctcttctcacagcagcacttcctgcggcagcaggagttcctgtacctgcagcagcaggcggccc

SEQ ID NO: 399906 - DNA, 232 bp, Homo sapiens
ttaagttttttatttataaaaagtttttataaaaatttattaatataatttaaaaattacaaccagttaaccatgtgtatgatattagtgtttatagtatttaaacaaataaggctgggcacagtggctcacaccatcccagcactttgggaggccaaggcgggtggatcatgaggtcaggggagggagaccatcctggctaacatggtgaaatacaaaaatacaaataaca

SEQ ID NO: 399907 - DNA, 158 bp, Homo sapiens
tctttactaatcattttggattttttctttaaattattgggcagggaagatacttatgtatggaagattactgctctaatttgagcaaaatagaagtttattagtgcgaggcaaacataaaaaaataagtaaataaataggtgaaggaggggaaaatc

SEQ ID NO: 399908 - DNA, 495 bp, Homo sapiens
tctaataactcatgtttcaaatattttaactattattttctatacagaaatactacatttttattgtaatcaatttagaaaacacagataaagaaaataaaaaccatacaggccacacaaataatgccaaatcctgccttataacacataaactgtgagccatttggtacccagaatactttatgttgagatggcagagaaagatacgatttttaaataaatattatagagactaaaatatgcatatatccggggagttcatagggtccccacccccaccatgttgtctcatggagataatgcacaaagaggcagaataggagataccaaaagtgagattggtttccatcaaggaagggcagagaagaagacgtagaaaaagattgagtcctggaaggcagaaaagggagactagcataggatgaatcatggggcaacttttccagggtcttgtaactgagactaaaaattaaagagtctgtttatactttcttt

SEQ ID NO: 399909 - DNA, 472 bp, Homo sapiens
attctaaaagggtacatgtgcaggtttgttaataatgtcatatctgcaccaatatatatgaatctgcatacaagcaaaggcaggtgtactttctgctgttagctgaaatagaggtagttcaattcccacatagattccatttctagctaagctaaaaagtacggcccctcataatctgcctaagcttccagcagggcatgtgcatttccttcaccaaaaaaccaaggcttattgcagaaaaataaaggcaagccttgttaattatgacctagagaatgtgaaattcctagtaagtcaacttcagctggcttgaaatttggaaatgaatttgctgagtaaattaacaatcaaacacaattggaggagagatgtttgaagacttaagggaacaaatgatttttcaagcacttgggaagcattatttacatacagctaattactatgtgaaaagagctgtggtacctggaaagag

SEQ ID NO: 399910 - DNA, 596 bp, Homo sapiens
agtctctccccgatgccacggccaccaatctagctccccaaacctctgcaatccccacactgcagctgaggggactccttgacgtgtcctctggaattttgaacttatcaaaaaggaaagcaaatactaaatttcccccctcaaataggatctcctcctcgtgttcctctcttactaaatagctcaggccaaaaatgccagggtcaccaacaatgcctctcttcctcacataccccacacccaatccatcagcaaatcttgtcaactctgaattcagaatataccccacatccgaatgcatctttccatccctccaccaatcaccttccttcaagcccccatcattcttaactggattatcataaccacctcctcactggttgtactgtttccactattgtcccccgctcatttaatctatccttgtacaccacaccagtgatcctgtttaaatgtaaatcagggccagtcttggtggctgacacctggaattccagaactttgggaggctgaggtgggaggatcacttgaggataggagttcgagaccagcctgggcaacatagcaagaccccacacacacaccctgtgtctaca

SEQ ID NO: 399911 - DNA, 532 bp, Homo sapiens
gtttcggatatttaccccctttcaggctttctctcctcaaggatgccagagggcgatctagtgtatgttaactatgcacgaactgaagacttctttaaattggaacgggacatgaaaatcaattgctctgggaaaattgtaattgccagatatgggaaagtttttcagaggaaataaggttaaaaatgcccagctggcaggggccaaaggattcattctctactccgaccctgctgactactttgctcctgggattgggctatcaattgatagcccaatcccaggagggttttttgcttcacccagaaaagaattcaagggtgagccaaatgtagaagaaaacagctttattgaagtgtcagtgttatagcttaggcagtggtacagctccatgactgcttctacggaatagggctgccccacaggcagtgtgctgagattagcagcttagggcagttctgcagtcagatttatacctacttttaattgcatgcatattaagaggcggtttatgaagacatgtctagggaaa

SEQ ID NO: 399912 - DNA, 451 bp, Homo sapiens
ctcaaaagccctgcaggtgaatttttacgtagaccaagacgctccatttccaccacaagctaccttgtaccttttgtatcctccacccctccctttcccctgactttccagccataagcttacgcagaaagaccccttctcccgatcatggggagtgtgcacaccagctgtgtgaaccccgtgacactctcaccgcccccaagtcagatgggagtcatttttctctggacctgaccagtactctgactttatctctttgaggccatctccccctgacccctgccatctggtgtttgctagtaatttgcattcggcccttaagttttgctcattaaacaccctccttggcagctctgtggctcccctgcaacttttacagcttggctttgggtacaggctgcttccaacagagcctgaaggtacaaaatctcagtgagatcagaatgttaaa

SEQ ID NO: 399913 - DNA, 352 bp, Homo sapiens
gaggccagagagtcagtccctggtagggccctgtgcactttcctcttcctgtgaaatggggccatgaccctgacatttccccacgaggcactgagcaggagaaccaggcaaacctgagtgggagaactgacagcacgctgcccccggccctgagcaccaaacctctccccgcttctggccaggctcgcttgaaggctccctcccccaggaggtcacctggcaggaagtaaactccagggttctttttttttccccccgagacaaaatctcactctgttgcccaggctggagtttgcagtgagccaagatcacgccactgcactccagcctgggcgacagagcaagactctcg

SEQ ID NO: 399914 - DNA, 664 bp, Homo sapiens
atttccagtttcctatctcagtaacaactccttaagaaatgatgcaacagaattaagcagtaatgagctggtgattcccgtgcacactttaaaagcactagtgtgtgtttcagaattctgtcagccatagcagatagcagccaaagcagtccaaaaaaacgtgactttgaaaatgtggttgttagatcacagtacttaaagtggttttagacaatttacagtgattcccttagaatttctgtggaaatcagtgtatctctattccaattctttcagttctgcaaaagcatcagaaacccctgtgtggaaggtgtgtgggtggaggttctgcaagcacctttcatcctgagggagggctgactttcctaccacaggctggctacgcacatgatctgcttcagagacacggtttttgaattgcaagagtgacagaagaccagatttgtttttaaaactgggaagtaaattacagatgatctgatacaaactcctaattttataagaaaataaatgatgaccaagatgcttaaattatttacttaataacacttcgttaatgacatagcttagattataacctatatcttcagttcctgaaacaacgttctttcttactatgccatgctactgtaagttatttagtgcagacttaaaaaaaaaaaaa

SEQ ID NO: 399915 - DNA, 290 bp, Homo sapiens
aattaacagataattaatatatatatttgcacatatgaaaatatgtttaaattctgtaataaaaaattgcaaattgaaactatatgaagatactgtttctctgctatcagcttggtaaaaatttaaaaagtatgtcagtgcatacaggaacaggtagtgtcattgatttctggtaaggaagcacattgttatcaatataatctttatgaaggggaatttgactatgtctaacaaaattatatatacattaatcatttcacccaaaaatcccaagtctaacaatttaccct

SEQ ID NO: 399916 - DNA, 494 bp, Homo sapiens
agtgaagtggcgtgaactcagctcactgcaacctcggcctccccgggttcaagcaattctctgcctcagcctcccgagtagctgggattacaggcgcccaccaccatgcccggctaatttttttgtatttttagtagagacgggtttcaccatcttggccacgctggtcttgaactcctgacctcgtgaccacctgcctcggcctcccaaagtgctgggatgacaggcgtgagccatcccacccggtctgccacagtcattcttttttatgctcagacagtcacaactttggccattcaagaccctttcataccggatcttatgttcttataacacgacctgatgaatctttaaaagcgaccttgctttcctggtacaaggcgccccacattcactcccaccttccctgccccaggcctggaaccagccacttctccaaggagccttggctcctttttagtggagaatgatacttggaaactaaaatctaggta

SEQ ID NO: 399917 - DNA, 364 bp, Homo sapiens
tcagctttatatcccaggcacctggaaaatacttggcacattgaggctgttcaaaaattatttcaagaatggatgaacaaaatgacctgggctgtaagcctaatcctgcttctcatttgctgtgtgacccggacaaatgccaacccatatcttttctggaattccatggtcctcttgtatggaactaggggattggggttgtctctgaagatctatccagctttagaatccactaagtacagtggagagagggttatgccaggtgtgtttgatgactctatctgcccagggtatgtggtatggcaagtgaacttgaaacccttggcatggaagtaggagacaagacatataagccagtgatagg

SEQ ID NO: 399918 - DNA, 333 bp, Homo sapiens
ccctgtcactcaggaaattgggaggtcagtgacaggaactgggaacaaagacctaatatatgtttttattataccgcagacttaaacatctgacatggtagactggatggtttgtttcccaagataaactgagaaacatacaacccaggtatcaaaaaggaaaattgtgggtgtggtggtgtacacctgtggtcccagttacttgggaggctgaggcagaaagattgcttgagcccaagaattcaaggctgcagtgagctattatcataccactgtgcttcagcctgggtgacagagtgagactctgtctctgaaaaagaaaagaagttattt

SEQ ID NO: 399919 - DNA, 225 bp, Homo sapiens
ccattgctttaattttacttcttgaaaaaaattttcaactaaaagtcatgtgcaactaatgtcatcaaaacctcactttaacacattaattcaatgctagtgaatatgaccattcggtattccaataaacacaaaatgcgtgaatttcattaacatatgcctggaataaccagtttctatgaaacctgtaatgcgatcctttcatttctgtccattttaactgcc

SEQ ID NO: 399920 - DNA, 496 bp, Homo sapiens
ctgctccatccacactatgccagtctcgttcatgttccttgaacatgccaggcaggctcttgccttcgtgtcttgcactagttgtacctgtgtctgaaaggctctttacccagatatcccttgccttcttcaagcatcggctcagctccctccttagggaggcctcctgcaataaattgaatgtttgtatccccccagaattcacgtgttgaaaccctaattcccaaagtgatggtatttggaggtgggatctctgggaagtaattaggtcacgagagggaagcccttatgatgggcttagtacccttctaagaagagacaggagagagcttgcttcttctatctaccctgtcaatatacactaccacacccttctgcaaaccaggaagtggaccttcttcaccaggaccggaattggccggccccttgaccttggacttcccagcatacagaactctgagaaataaacatttgttgtctaagccaaaaagtctat

SEQ ID NO: 399921 - DNA, 1128 bp, Homo sapiens
gtgtgattagttgtgtgtttcatgtcaggcaggatcaagtatttcttaagttaaattagacactttggattggatgccatcaagagggttgggtatcattctggactctgactcaggacttttatatttactgcaagatttatgtcaccagatggcaccatttaactaaatttatgtgctttagatgagtatgaggctggttgtttctaaatgaaggatgctattatttgtgctgtagctaatataggaaaaaaatcttttattttgagtgcatatgagatttccctatatagtgagatagtgaaaccccaaagctattgttgggagtgtgaaaggatctggtgatttctgttaagtacataataagtgaaaatttggtgatgatcactgtaactaatatgtggtagctggcaaaaaagcaataggctttctcatctaggttttcctatagcaagcaaactagtattattaatattatagccttgaattttactttttgttgttgaactactttcagggaatttatatatatatatatagagagagagagagagagaatataaaaaaaattctaaaagattattttaggaataagccctttcaagatgtcctgaaatagcgtagtaatatctaaaaaaatttttcaatatagaatatgttttactgaactgtggaactaatcaagttaatagaatgtgatatagacattatttcttagtataaacatccatcccaaggaaatgagtatttattacttggtcaaaaacttcttaatattttctacctttaagcagaattaatcacttcttcccttatgtttctatggtatttgtttatatttctggcacagcacttattatattgtactattgtttattgattacatgttgctctccctcagcagactgtgagcttcttgaatgcagggaccagttctaattcagccaaatctggcatggaatgaacagttcttcattaaatttctttcatttgaaaaaatacatttgatctcccactatcaaagagacaccacattaggctctggggttttagtgatgagagagatgtacaccttgttttcatggagctcattgtctactacattaaacaagtaagatattaaataag

SEQ ID NO: 399922 - DNA, 1186 bp, Homo sapiens
tgtctctgtgctcatgacaaggacatatcacctaactctgggctctggctcacttagtagcttctttgccgttggactctcacaccgagatgtcaccgagcagcagcctttcccaggaagttgttaaggagatgggaatcctcatgcctgctgctttttcccaaatcagaggaagcccgggagccagttgcagtaaagtcttgccagtaacgtttctcttaagaacgagaaagctactcaaagaaatgatctcttcctggatgttgtggtccacgaatattatgtctggaacatcagagccatcttgtctccatgatgggagttccatctaaagacaaagtcaaaacccagcagaggacacagctgaaggaacacgagaaagtggcatggaaacgctgaagccccagcaccggcagacctcagttattggggccaatcaacctcttgttactgttcaagcgagtttggaaacgttgtcagagacccacaacagaaaacaactcaaacagcaagggagatgtgcccctactggccagtgaaggaggaaatggctgtgaatgtggaatcagaaatctggattggaacctgagctcagccttttactggccatgggatcttgaacaagttactcaactgaactgaatgtcaatttcctaatcaacaagacagtaaaatcatgcctactctgcagggttattataaagagtaaaatcagcttgtgtctgagacagggtagatgctcagtaatgttagtagtatctttattatttcatggaaatgaataattttcctgctttaattgtttgaaaaaagatagtgtttaccaaaaaatgtgtttttttagtcaataatttcaaccacagttttaattactgacaaaatgaaatattaggttccaatacacttcttaaaaatattttaaaaatcttcagtatttagtaaatcccagcaaaagaggcaaaatgtggttgatgggaaatccttgaacggggtagaggaacaacatcaaggaaatccaggatggagtttggagcagcatgatctctcagctgtggcctgatttctgctggtatttcttgaaaaacagggtcaaaaagggagcatattgtagctaaccagagtagaactctcttgaatcaatgactcccagatggaaaaaagatcaataaaacactctaaatgcaaa

SEQ ID NO: 399923 - DNA, 432 bp, Homo sapiens
cagctggtcacaaattccctggcctcaggctactgccttggtctccccacggtgctggaattacaggcataagggcattgtgcctggccaagagttttttaaaatctatttgcattacttttataattagaattaatgtttaaaaagtcaatctaaagtaaaatggtgaattaagactccatcccaaaaaaaagatgtgtctagtgtgaataagaattttaatttgttactttattagattgtaattaatttacaattaaataatacaaatatataaaaattagctgggtttggtggcacatacctgtaatcccagctactcaggaggttgaggcaggagaattgcttgaaccccaggagaacagaggttgcagtgagccgcgattgcaccactgtactccagcctgagtgacagagcaagacttcacctcg

SEQ ID NO: 399924 - DNA, 417 bp, Homo sapiens
tggtcagcatctactttttaccatggctctgtgagagtaacacacatgattccttaaatacagttaaatacacaaatacagttaaaaacagttaaatacaggaatacagttaaaacagttaaatacagttaaaaacagttaaatacacaaatacagttaaatacagtcaaatacagaaatatagctaaatacagttaaatacagaactattttcttgagggtaataaaaagttaaccaaagaggcagtgcataatgaaggccaaatgagtgtgtctagacagtaaacatttatttcagaagaggtacctaataagtattcaataaatattcgatgaaagaataaatgggcgagagaaagctcagtgtgggctaaagcagttgggaacacagtactgaacacagcctgaccaaagcac

SEQ ID NO: 399925 - DNA, 480 bp, Homo sapiens
catatatttgaaaaatatattaataataacatgtgcaattaattgtacagagtaggctactatggctgtagcccattcaaaactctcttcataattctctggtgattttcaccatctatcttccatatcaaagaactgatattcaagtcactgtttgagttttgatcggctttatttcaaagactgtaagcagatacacttaaaataggccaagcagaaaggtaacttgggatactgtttttaaccacaaaatatgaaatcttaatgcaccagtaggtgatttaagagttaataggctaaaaaatgaagaagaaacaagagaattagaatatcctcacttttcagcccttaatgaattaaggaatctaggcaatgttcatcaactaccactaatggcacaaatagtcagatatgtgtgtgtcctgataaagcagtgttaatccagtcaaccagtaacaaaaaaatcctaaatttgaaaaa

SEQ ID NO: 399926 - DNA, 406 bp, Homo sapiens
gattctaattacgctcgagcagaaagtaatactttacagggctgggtaaaaacactcattcggaagtaaagttggggggtcataaaaactggggattactttagttagtcatttgtaacaggtaaaagttgtgttttaacttcctggagttgggcgggggaggcagaaggggctattttaggaggaaggagagtccagttaacaaaaggaaggtccttatgaatttttccagggctgcaaattcataaataacaacagtatttattgtaagaaggacagaacttgaggattaacctttccacacatctgtacttaacccattgccccagtaaaagagagcccattgtttgttcagtgtgtcaatcattattatagaaaatgcacacacatctcacccaaaagttgg

SEQ ID NO: 399927 - DNA, 381 bp, Homo sapiens
agagagaaaagtctggaaagacatatgccaaaatgttaacacctgggtgacagagcgagactccatctcaaaaaaaaaaaaaaaaaaaaaagaggccaggcatggtggctcacgcctataatcccagcgctttgggattttctgtctcaaaaaaaaaaagagagagactctggatcaaaaaggattttcacaaacagatccaaagaaccagcatccagattaagaaacagcattaacagcaacccagaagcaacccttgggacctgcctcaatctctgcctcctccctactccccataggtaacctctatcctgacctcttaacaccatggatcagtgaagctccttttaaaagtatataaatggagtcatgtagatttga

SEQ ID NO: 399928 - DNA, 546 bp, Homo sapiens
agggtaatgctgagcagacagaacaacagatggacattagacaggtccattagtgctgactctataggagagaggaagcattttgaactcccttcagttttgccaactgaataggccacagatcctgctatagttacaggcctccactagctcattcattagtgccaggtccatcttattatttgctaaaatatcccttcacctctgtgtagatagaattggtatctcacttgcagacactcttgtgtttacaaactgtgggttacaacacattagtgagtgatgaagttggtttagtgagttacaaacaacatcaaaaaaatagaacagcagataattgaagagaaagtatcatctgtaaggggaagtactattacttcataaagttgtttataaagttgtaaaaagtttacttcataaagttgtaaaactaaatatagtatatatatgataaaggaataccaggtcattctgggtttgcaatatgacatattttcttgcttggattatggtaaaaaataaagacagtctgacatatactataga

SEQ ID NO: 399929 - DNA, 279 bp, Homo sapiens
gcatgagccactgcatcccacctaaatccatccttcttggccctggcctttgatgacccctgcagcctcacttccaaacactctcagcccattctaaccccaacttcatcttgcagccacactgaatactgagcaggccctgtgctttctaacctctggccttcacacatgctgttccctttgtggagaacactcttcccttgtgtaactatttgtccctcaagtctcaacacaggttgccccctctgtcaggaagccttccttgattccacagcctcc

SEQ ID NO: 399930 - DNA, 323 bp, Homo sapiens
ctcatatcttggtggaaatttaaatttgtataagttctttggaggacaatttgacaatctcttcaaaattacaaatatgcataccttttgacccaactattccacttctaggaacacacacttgtaagttactcactatgccattattctcggaggaaacgtttggaaacaaccaaagtactcatcaggaggggaatgtaggcctggcatgatggctcacacctgttaccataggactttgggaggccaaggtggaaggatcacttgaggccaggagtttgaaaccagtctggacaacatagtaagacctcatctctacaaag

SEQ ID NO: 399931 - DNA, 476 bp, Homo sapiens
gaactaattgggaaagaaaggagtaactctctttattcacagacaaaatgatgatctatgtagtaaatctgaaggcaggtaaaaaaagctactggaatttgagtttagcaaggttgctgcacacaagatcaatataaaaaaatcaaatgatatttgtgcatttagtcacatgagaaaattaaatttaaaaatacgtattagcattaaaaatattatacacttaagggcaactctagcaaaagcatgaaagacttatacagcgaaaactataaaatattgctgagaaaaattaaagaagatgtaaaataataaagtgagatgccacaaaaaagggtcaacagacttaatactgttaagatatcaatgctcccccagtagacctacaaattagaaaaatcccaataaaaatttcagcaggttgtttttttgttgttggtttttttcgggttttttggtagaaatcgacaagtggattc

SEQ ID NO: 399932 - DNA, 429 bp, Homo sapiens
tgtcacagagtctttccacatgctgttggctggaacaagtggtttaaccccatctccttcataaccaaagatgaagaaggtgcgagctacaaggagttagcattcacctctgccacccaggagggcttcctaggggaggggaggtggttaccatactggaggaaaaagacaaggtcaaatgaggtaaaacaggcaacacgcttggaatgaaagagctcaccagaatgttatggccaaaagaacttgaaaataggctggctgcggtgtcgcgcctcggcctcccaaggtgctgggattacaggcgtgagccactgcgtccggccaaccttgggtgagttttataaacgcggcaccttggggcaattttcagtagtcacaatctaaataactgttgtgtttcctgtgtcatagcatagggatttagtgcat

SEQ ID NO: 399933 - DNA, 329 bp, Homo sapiens
gagacggagtctcactctgtcgcccaggctggagtgcagtggcgccatcttggctcactgtaacctccacgtcctgggttcaagtgattctcctctctcagcctcccacaggtgcccagcaccacgcctggctaatttttgtatttttatcagagacagggtttcgccatgttgggcaggctggtctcgactcctggtctcaagtgatccgcccacctgggcccctcaaagtgctgggattacaggtgtgagccactgcacctgacccaaacacattttaaagcagaaataaatcccaaatgcagaaatattataaatgcttagaaagg

SEQ ID NO: 399934 - DNA, 517 bp, Homo sapiens
caagaagggtggagccttcctggaaatgttctatattttttatttcagtggtagttacatgaacatatagattacataaaaattgaatgtatataatgtaaaaatatatattttaaattgtctatatatttacttatgtactttactgtaagtgtctctattaaagaaaaaataaaaccccaaaaaacccagcttatgcctggccccacccagagagatactgatttaattggtctggtgtggggcctgggcatcagcaatttaagagctccttaagtgattctgctatgcagccagggttgagaactactgctctatgtggaaaggctgaggagggaagaaatggtgtgtaaagaaggatcataaaaagcaggagtttcacttctcttttatttttaaaaattttaattaaaaatttttttattattattttttactgctccctgtgcagcagggctaccccataagcagtatgcccagagtagtcaggagtttcacttctaatatgaagttatag

SEQ ID NO: 399935 - DNA, 2959 bp, Homo sapiens
  misc_feature (174)..(174): n is a, c, g, or t
  misc_feature (242)..(242): n is a, c, g, or t
  misc_feature (254)..(254): n is a, c, g, or t
  misc_feature (393)..(393): n is a, c, g, or t
  misc_feature (752)..(752): n is a, c, g, or t
  misc_feature (1325)..(1325): n is a, c, g, or t
  misc_feature (1970)..(1970): n is a, c, g, or t
  misc_feature (2072)..(2072): n is a, c, g, or t
  misc_feature (2660)..(2660): n is a, c, g, or t
gaaacaacatggcaattgggctgtggaattctgtattggttgtaagaatggtccaacaccccatttctaattctttccctgagatcgtggttatcacaccttctaagaggaactacaaccaaacgaaggagcccatgtggcttctgtttgaaaggtcaccagagtcagattcanctggtttaggacattccagtggctataggacactatctactgtgacgcgtaccgtgtgagctcagctntagagtgtttcncagacactgtgtttcctgatcctcacgatacccccgtgagagctgccctaaaagcagagaggcagcgtgatggagaggttcagcacatgctctctgatcccaggaatcctgggtatggtgtttcgtatctgtgtgaccncaggtgagttccaggaaatctatgtgccataatctcctcatgtaaaatgaagttataatgccccatttcctgaagttatgtggattagatgagttaatgacacctggcacatgcaagtcctccacagtatcggcacgcactgttggtgctctagagacagtaataaaccaaaaagtgtctgacacaggcctcaatcaacttagaagtttattttgcctagtctaagggcatgatcagaagaaaataacatggaatcacagaaacagtctatggtctacacctttctccaaagatgaaattgagggcctcaatgtttaaaaaaggaaagtgggctggaggggagagagggagggtataantatccacatgttgcaagagcaagggagcaggtaggggaactgccaattatgtattcatgttgcgctcaataaatcagcactttacataagatatggttaacatagagtagctacctctggagctatttcacctttcatctgtagctctctgtttaggcacaaaaggaaaggcagcttctcacatgacccagcttttggcttatttttttctaaaacatagcatgatgaattgggatccagagtttttcttttcctttcacatagtagattccacacatatgcaaaagcactaacagttatctctactctcacctctccgcagagaggttaggtggtgggaatagggacccagtgagtgtctactatgcactaggcatccgaaatccttgatgagccagttgaggtcagtacaattaaggctcacagttcacagatgagaaagattaaattacctactcaaggtcactatttttaaagtaatagtcgtaatttaaagctaggtccctctgaacccagagcccatatatttaaacacacacacacacacacacacacatttatccaacatcacgnctttcctttcaccgactttcaactggggaaaacaaaacaaaacatgcgttgtttctttactaaaggcatcctcaccagagtcaatgagaattttcttaaggaaataatggtgcacctgtgttttctccttatctacactccaggccactggtttgtcactaatttcccatttgttttttctctttgggtaaaattggcctactctggaattaccattattgcttccttggctgtaaagagtatagaaattctacccctgtgagtgtgtgtcctagatctgcagctgctctttttgggggtgctaatggactgtaaatttcagacacagcaggacggttcatggtgctctctgggtatgtataacattctgacaccccagctccttccagagactaaacaggctcagagctctgcagaatcaccttggaggagattctggaacacccacgtgcatttctgaggtaggaggtagaagaaggttatgcattgttcttggtccagtacgtttccaccatggcacagctaccacatatcgggaggtcacatggtgtgggaggaatactagtcacacttcacagctagttagagccctggccacttggtctggctctaacaagctgtaccatttgttcttttcttttcctntttttgagaaggagtctcattctgttgcctaggccggagtgcagtgacatgatcttggctcactgcaatctccacctccaggttcaagtgattctcctgccncagcttcccaagtagctgggattataggtgcccaccaccacactcagctaacctcagtcctgccttcaggcgatccgcccaactcggcctcccaaagtgctgggattacaggcttcagccaccatgaccggccacaatttgttcttaaccatcccacattgcctaagttcatctgtctttagaagaatgtgtttagattaaataatttcagatttctacctaaagttacaaattcagtgattaccaccctgaggaagtaatgatagcaatcacaaatacagtgcccaccatgtacccggtcctggcttaaggacgtgttcactcatttaattctcacaaaaattctatatgtacaattatctctgttctatggatggggaaactgaggcagagggggctaaagaactttcgcataatcaaacagctactaagaaacagggctggaatttgaactcaagcagccaggctccaggacctccgctcttaccttctatgttatttcctcttagagtgaaaacaggttacttgtagtttcaattaacacatgaaaatgtccttccttattaggctatgaagtaggaaggaaantgcctctttggctgttcacatttcccctccttgctccaatgctgttcagataattagagggttataagccaacctgccaatttgtcaatgctgggaagacttttatatgctgagctcccatccatcatataggacttctgtgattaaagaccgaagcacatggttggacaaaataagtaccagaacaggcagtgcccacaggtgtgcaatggaaaaattaggcaaagatttatacagttctacacaaaaacacgtatctcaatagtcactacagagttagcatactccacacgcttgtc

SEQ ID NO: 399936 - DNA, 416 bp, Homo sapiens
agtatggatggtagggtgttgctgcttaatgattgtattgtttatgtttgggatgaaattagctgtttaattttttcctctcaacttagtcaaaggcaatgtgagaaagcatctagcaataaacagatttacaaaccttttcagatgcaaatcagtgacttagcacatgttactataaagttttaatagaatggaggattgagtttggagcaggaaggccggctagtgacaatcttgcttccttcttttcttaaatactgaaagttaagagtaggaaaaaagtagtctctaaatatcaggataataaagaatttttaaagaatttcttcccataatgggaataattcagaattaaatgtactgtgaaatatataaggatctttatttcttaatgtttttattgctgtatgatcatg

SEQ ID NO: 399937 - DNA, 427 bp, Homo sapiens
cttagcataatttttaactttgatatttcagcaattggtacaattttgaaaacaacacactgacattttattatgacttcagagttataagtaagagagtttagctgatgtgttatctgattacatcttggtatggaggataaacagtaatcttataattccatattacttttacaaatgtcacagctccaagttcaacctgaaatcattaaaaatttgttatctaaaatgtttcttaaaaacaagtgaaaggggaaaataattaacaaaaataaagtgacaatatgtgaagtataatgagagatgtaactatcaatcctgactgctgaacagaaacgtggtatctcagaatattaactagactgatattcagtgtaagccttttagtagaggtgtgcaggcttttctgttataaatgacatcttta

SEQ ID NO: 399938 - DNA, 546 bp, Homo sapiens
tgggaaactatccattctctggcatctggctgccccctgacctcttccaacagggttcctcctcccccatttgactgggtccttggaatgtgctgattcagatatgacaacaggctattcctggaggggtgggggtctcttcttcaggaatgtgcctggagagcccagaaagggcagccaaggggtgctagtctgactgttgcctcagctcaggggtgatgagtggacttctgagtccaagcattgtcccctatgggaatcagagatatgaactgctggatgtatcaagaacccaggcctgccgagcacggtggctcacgcctgtaatcccagcactttgggaggttgaggtgggcagattgcttgagctcaggagtttgagaccagcctgggcaacatggcaagaccccatctctacaaaaaaatacaaaaattagccaagtgtgttggtgtgcggctgtagtcccaggctgaggtgagaggaccgcttgagcctgggaggtagaggttgcagtgagctgagatcctgccactgcactccagcct

SEQ ID NO: 399939 - DNA, 641 bp, Homo sapiens
aacatttctgctgcttttccctgtatgtgtggtgtttagtcttttcatagttcgttgactatggaattcagagcagaaaccctatttcctaatttccttgggaagttttcagaactagatgataatgtaagtttctaataagttgatagtgttactcagaggtgattgtttcatttatgattttgaaaagaaaatgtaaatattagacttaagtccttgcatctaaaacaaattcatgagaaatcccacagaatacaatgttagagatgggagcaaaaattatcagtctaatctcagagagttgacaggcattccaaatcgttttttgtcagtatttaaaccatggtaggataatgtaagaaatatacttaatgcctggtgcgatgtctcacgcctgtaatcccagcactttgggaggcctaggcaggcaattgtctgaggtcaggagttcgagaccagtctggccaacatggtgaaaccccgtctctactaaaaatacaaaaaaaattagccgggcatggtggcgtgtgcctgtaatcccagaatcccagctactcggtaggttgcagcaggggagttgcttggaccagggaggtggaggctgcagtgagctgtgatcatgccactgcattccagcctgg

SEQ ID NO: 399940 - DNA, 983 bp, Homo sapiens
ctggagcggacagggtggcttccgggtttggcgggtactttgtctctcgctctagccggagctgcaggtctcgtcttccctggtctgtgtcctcttctcctaggggcccagcctctgtggccctgtgacctgcaggtattgggagatccccagctaagacgccaggtcctcctggaagcctagaaatgatggagtcttgctctgtcgtcagactggagtgcagtgggatgatctcggctctctgcaacctccgcctcccaggttcaagcaattctcctgcctcagcctcctgagtagctgggattacagggaccactgacaattagggatgtgactgtagaattctctctggaggagtggcattgcctggacactgcacagcagaatttatatagggatgtgatgttagagaactacagaaacctggtcttcctgggtattgctgtctctaagccagacctgatcacctgtctggagcaaggaaaagagccctgtaatatgaagagacatgagatggtagccaaacccccaggtaaagagaactggccataaactgtggcccaggaagctggaactgagactttgaactgcttcaggcaccacattaaaagccagggtctgcaggcctgcctgcatggctgtaaacgggtgtcttcctccaggcctgtgaaaggacagaacctctcccagactgcggctgaaaggattttgaaataattacagagtaaattcagaattctcagtgggaccaagtagcgttggccatttcctgtcctgtagccaagaccaggggtcctgtagtttgccaccaaaatgagagcctgctttctgaagagaacacccctcaatctttggctttagcagaatttcacaacttcatccctggactttaaagatctcttaaaggcatttattttggagatggggtcttgctacataacccaggctggtcttgaaatcttggcctgaagcaattctccaac

SEQ ID NO: 399941 - DNA, 769 bp, Homo sapiens
ctggagcggacagggtggcttccgggtttggcgggtactttgtctctcgctctagccggagctgcaggtctcgtcttccctggtctgtgtcctcttctcctaggggcccagcctctgtggccctgtgacctgcaggtattgggagatccccagctaagacgccaggtcctcctggaagcctagaaatgacggagtctcgctctgtcacccaggctggagtgcagtggcatgatttcagctcactgcaacctccgcctcccgggttcacgccattctcctgcctcagcctcccgagtagctgggactacaggcgcccgccaccatgcccggctaatttttggtatttttagtagagtcagggtttcaccgtgttagccaggatggtctcgatcacctgacctcatgatccgcctgccttggcctcccaatatgctgggattataggtatgagccaccgcacctgtcctaaaatttaccatctttaatctgtttaagtgtacatttcaggcctaggcatggtggtggctcacatctataataccaggattttgggagaccaagacagaaggattgcttgagcccaaaatgttgagaccagcctgggcagcatataaagtccccctctctccacacacaaaaaatgttttaatagccaggcatgggggtatgcacctgtggtcctagctatttgggagattgagtggggaggattacttgagcctgggagtttgaggctgcagtgagccatagttgtgccactgcaatccag

SEQ ID NO: 399942 - DNA, 547 bp, Homo sapiens
ctggagcggacagggtggcttccgggtttggcgggtactttgtctctcgctctagccggagctgcaggtctcgtcttccctggtctgtgtcctcttctcctaggggcccagcctctgtggccctgtgacctgcaggtattgggagatccccagctaagacgccaggtcctcctggaagcctagaaatgttatgtgttctcatattgctgaagacctttgcccagagcgagacataaaatattttttccaaaaagtcatactgaggagatatgataaatgtgaacatgagaatttacaattaagaaagggctgtaaaagtgtggatgagtgtaaggtgtgcaaaggaggttataatggacttaaccaatgtctgataactacccagagcaaaatgtatcaatgtgataaatatgtaaaagtcttctataagttttcaaattcagatagacataagataagacatactgaaaagaaaacttgcaaatgtaaagaatgtggcaaatcattttgcatgctttcacaactaactcgacataagagaattcat

SEQ ID NO: 399943 - DNA, 563 bp, Homo sapiens
ctggagcggacagggtggcttccgggtttggcgggtactttgtctctcgctctagccggagctgcaggtctcgtcttccctggtctgtgtcctcttctcctaggggcccagcctctgtggccctgtgacctgcaggtattgggagatccccagctaagacgccaggtcctcctggaagcctagaaatgatggagtcttgctctgtcgtcagactggagtgcagtgggatgatctcggctctctgcaacctccgcctcccaggttcaagcaattctcctgcctcagcctcctgagtagctgggattacagcattatttcaagtgcacaaagtgtgcccaaggttgccccttagatgcctgaatccaatgtctgctgaaattgagatgtccaagaattcaagaacacgtccagaaaacctggctgttgtagaaaaaaatataaattagaaatgaaaagctttattcttctaccttgaaataagcacttagcatcttaaagcatttaagatgatatgtacatttatctttgttattttgaaatatacataaattatattaacagct

SEQ ID NO: 399944 - DNA, 2447 bp, Homo sapiens
  misc_feature (647)..(647): n is a, c, g, or t
ctaggggcccagcctctgtggccctgtgacctgcaggtattgggagatccccagctaagacgccaggtcctcctggaagcctagaaatgggaccactgacaattagggatgtgactgtagaattctctctggaggagtggcattgcctggacactgcacagcagaatttatatagggatgtgatgttagagaactacagaaacctggtcttcctgggtattgctgtctctaagccagacctgatcacctgtctggagcaaggaaaagagccctgtaatatgaagagacatgagatggtagccaaacccccagttatgtgttctcatattgctgaagacctttgcccagagcgagacataaaatattttttccaaaaagtcatactgaggagatatgataaatgtgaacatgagaatttacaattaagaaagggctgtaaaagtgtggatgagtgtaaggtgtgcaaaggaggttataatggacttaaccaatgtctgataactacccagagcaaaatgtatcaatgtgataaatatgtaaaagtcttctataagttttcaaattcagatagacataagataagacatactgaaaagaaaacttgcaaatgtaaagaatgtggcaaagcctttaaccagtcctcagcncttactcgacataagatgactcatactggagagaaaccctacaaatgtgaagagtgtggaaaagcttttaaccggtcttcacaccttactcaacataaggtaattcatactagagagaaaccctacaaatgtgaagagtgtggcaaagcctttaaccggtcttcacacattactcaacataagagaattcataatagagagaagcccttcaaatatgatgaatgttgcaaagcctttaagtggtcctcagctcttactacccttactcaacataagagaattcatactggagagaaaccctacaaatgtgaagagtgtggcaaagcctttaaccagtcctcagcccttactcgacataagatgattcatactggagagaaacccttccaatgtgaagagtgtggcaaagcttttaaccggtcttcacaccttactcaacataagataattcatactaaagagaaaccctacaaatgtgaagagtgtggaaaagcctttaaccggtcttcacaccttactaaacataagagaattcatactagagagaaggcctacaaatgtgatgaatattgcaaagcttttaactggtcctcagctcttactacccttactcagcataagataattcatactggagagaaaccctacaaatgtgaagagtgtggcaaagcctttaaccggtcttcataccttattcgacataagataattcatactggagagaaaccctacaaatgtgaagagtgtggcaaagcctttaaccagtcttcacaccttactcaacataaaataattcatactggggagaagccctacaaatgtgaagaatgtggcaaagcctttaaccggtcttcacacctttctcaacataagataattcatactggagagaaaccctacaaatgtgaagaatgtggcaagccttttaatcgtttctcataccttaccgtacataagagaattcatgctggagagaaccccaacaaatatgaagaatgtggcaaagcttgtaaccattcctcaaaccttactaaacataattcataatggagaaaaaccctacaaatgtgaagaatgtgtcaaagcttttaactgttcctcaatccttactaaacataagggaattcataatagagaaaccctacaaatgtgaagaacgtggcctggcttttaacaaatcctcaacatttactaagcataaaataattcatgctggagagaaactcttgaaatgtgatgaatgtggcatagcctcttcccagttctcaactcttactaaacatgagaacactgtggaagataaagcctacaaatatgaagaatgtgacaaggcctttaaaagttctcaacccttattacacataatttatactggacagaaatcctaaagtgtgaagaatgtcacaaagcccttaataagtcctcaattcttaacagatataagatgtttcatactggagcgaaactacaatcctgaatgatgtcacagtgcttttaacaatacctcaaacttttctaaacataaaaaaaattatactagtgcaaaactctagaaatataaagaacatgaaaaacttttaaatggttttcacacttgattgcaggtaaaataatttataccggagaaaactccaagtgtgaagaatataacttttaaccagtgttcacaacttattgtacaggaaagcatttatagttgagaaatggtgtacaaatataaagaatgtggaaaagtcattaatatttgctcacatattacacatcagagagttcatacttaataaaagtattataaataca

SEQ ID NO: 399945 - DNA, 2667 bp, Homo sapiens
  misc_feature (867)..(867): n is a, c, g, or t
ctggagcggacagggtggcttccgggtttggcgggtactttgtctctcgctctagccggagctgcaggtctcgtcttccctggtctgtgtcctcttctcctaggggcccagcctctgtggccctgtgacctgcaggtattgggagatccccagctaagacgccaggtcctcctggaagcctagaaatgatggagtcttgctctgtcgtcagactggagtgcagtgggatgatctcggctctctgcaacctccgcctcccaggttcaagcaattctcctgcctcagcctcctgagtagctgggattacagggaccactgacaattagggatgtgactgtagaattctctctggaggagtggcattgcctggacactgcacagcagaatttatatagggatgtgatgttagagaactacagaaacctggtcttcctgggtattgctgtctctaagccagacctgatcacctgtctggagcaaggaaaagagccctgtaatatgaagagacatgagatggtagccaaacccccagttatgtgttctcatattgctgaagacctttgcccagagcgagacataaaatattttttccaaaaagtcatactgaggagatatgataaatgtgaacatgagaatttacaattaagaaagggctgtaaaagtgtggatgagtgtaaggtgtgcaaaggaggttataatggacttaaccaatgtctgataactacccagagcaaaatgtatcaatgtgataaatatgtaaaagtcttctataagttttcaaattcagatagacataagataagacatactgaaaagaaaacttgcaaatgtaaagaatgtggcaaagcctttaaccagtcctcagcncttactcgacataagatgactcatactggagagaaaccctacaaatgtgaagagtgtggaaaagcttttaaccggtcttcacaccttactcaacataaggtaattcatactagagagaaaccctacaaatgtgaagagtgtggcaaagcctttaaccggtcttcacacattactcaacataagagaattcataatagagagaagcccttcaaatatgatgaatgttgcaaagcctttaagtggtcctcagctcttactacccttactcaacataagagaattcatactggagagaaaccctacaaatgtgaagagtgtggcaaagcctttaaccagtcctcagcccttactcgacataagatgattcatactggagagaaacccttccaatgtgaagagtgtggcaaagcttttaaccggtcttcacaccttactcaacataagataattcatactaaagagaaaccctacaaatgtgaagagtgtggaaaagcctttaaccggtcttcacaccttactaaacataagagaattcatactagagagaaggcctacaaatgtgatgaatattgcaaagcttttaactggtcctcagctcttactacccttactcagcataagataattcatactggagagaaaccctacaaatgtgaagagtgtggcaaagcctttaaccggtcttcataccttattcgacataagataattcatactggagagaaaccctacaaatgtgaagagtgtggcaaagcctttaaccagtcttcacaccttactcaacataaaataattcatactggggagaagccctacaaatgtgaagaatgtggcaaagcctttaaccggtcttcacacctttctcaacataagataattcatactggagagaaaccctacaaatgtgaagaatgtggcaagccttttaatcgtttctcataccttaccgtacataagagaattcatgctggagagaaccccaacaaatatgaagaatgtggcaaagcttgtaaccattcctcaaaccttactaaacataattcataatggagaaaaaccctacaaatgtgaagaatgtgtcaaagcttttaactgttcctcaatccttactaaacataagggaattcataatagagaaaccctacaaatgtgaagaacgtggcctggcttttaacaaatcctcaacatttactaagcataaaataattcatgctggagagaaactcttgaaatgtgatgaatgtggcatagcctcttcccagttctcaactcttactaaacatgagaacactgtggaagataaagcctacaaatatgaagaatgtgacaaggcctttaaaagttctcaacccttattacacataatttatactggacagaaatcctaaagtgtgaagaatgtcacaaagcccttaataagtcctcaattcttaacagatataagatgtttcatactggagcgaaactacaatcctgaatgatgtcacagtgcttttaacaatacctcaaacttttctaaacataaaaaaaattatactagtgcaaaactctagaaatataaagaacatgaaaaacttttaaatggttttcacacttgattgcaggtaaaataatttataccggagaaaactccaagtgtgaagaatataacttttaaccagtgttcacaacttattgtacaggaaagcatttatagttgagaaatggtgtacaaatataaagaatgtggaaaagtcattaatatttgctcacatattacacatcagagagttcatacttaataaaagtattataaataca

SEQ ID NO: 399946 - DNA, 402 bp, Homo sapiens
ttgctctgatcggggtccaacccagggagactgttaggtcctttggtctagaaactagtttgaatatgttttaaggttttattaactttttaataaatagccagactatactgacttgtttgcattgggcatatatactactcttgcgagcaggaggcctgaaatctcctagagaagttcaggcagagggagcctggcaacaagggaaatcccgagattgtaggcaagagggtgaggaaaagatgctttcaaaaagcctggagggagtggagatgattatgtttaacgcattccttctttggttttggtaacctttaacaagtctttctcctccagcccttctcttcaatggtccctgccacctagagctgctagcatagtatggattaatagtgactggta

SEQ ID NO: 399947 - DNA, 989 bp, Homo sapiens
aatatttttttccatgaattctggttgtgtttcatagcagctgtctcttgtttcaatgtgatttactttaaagcaactctgaggatctgaactatgtttaatttcaagtttttatctgtttctattgactattctttttaagtgggctagttctatttgttaaatttggtgctctctttagtgctcttggtttctccaaatgtttgttggttcttttgttgttgttgttccatttgtaggaacagaatttcagtctagactgaaattcatagctggacgcatttcctcacttcaaatgagaactcatgtttacctggcagtgaatgcaggttttgattacaagaatctgcctcatgggatctggtagggataggcagactctgtaggtaacgtctcttcttagaatagtttcctgaccctccagggtattgtccttttcctctgaccttagcttactctggaacagtaatatgttggtaaatgtttgacagccagctctgggtggagtgggggaagtcctagtttgcagcatttcctgatttccatgcaatgtggggagctgagaagagatgtgcaaactagattcttgagactgacttcatttagcataccattgctgtggggctgctgtactatgtcagaaaactatacccatgactctcatctaagcccaaacaatggagccagctgctccaagagcaactccaggaattgatggggacttaggggtatggctccgttatttcttcagttaacaaagtactttgttcctttgaatggttttaggttcttatgccctgctagatttctctactgattcccacgtttcttatttttttcaaaaattcctttctatattgtttgctggaagcaccttttctggttttcctgtgctgctttgaatttatttttctatttctttgtgatttcagtggaatttggagaaggaatggcaaagcggaagtccttctcctatttgatgtcttaac

SEQ ID NO: 399948 - DNA, 1042 bp, Homo sapiens
aatatttttttccatgaattctggttgtgtttcatagcagctgtctcttgtttcaatgtgatttactttaaagcaactctgaggatctgaactatgtttaatttcaagtttttatctgtttctattgactattctttttaagtgggctagttctatttgttaaatttggtgctctctttagtgctcttggtttctccaaatgtttgttggttcttttgttgttgttgttccatttgtaggaacagaatttcagtctagactgaaattcatagctggacgcatttcctcacttcaaatgagaactcatgtttacctggcagtgaatgcaggttttgattacaagaatctgcctcatgggatctggtagggataggcagactctgtaggtaacgtctcttcttagaatagtttcctgaccctccagggtattgtccttttcctctgaccttagcttactctggaacagtaatatgttggtaaatgtttgacagccagctctgggtggagtgggggaagtcctagtttgcagcatttcctgatttccatgcaatgtaaaatctcccaccctagccaattttcaagctagcaacataacagtcactgaatggggagctgagaagagatgtgcaaactagattcttgagactgacttcatttagcataccattgctgtggggctgctgtactatgtcagaaaactatacccatgactctcatctaagcccaaacaatggagccagctgctccaagagcaactccaggaattgatggggacttaggggtatggctccgttatttcttcagttaacaaagtactttgttcctttgaatggttttaggttcttatgccctgctagatttctctactgattcccacgtttcttatttttttcaaaaattcctttctatattgtttgctggaagcaccttttctggttttcctgtgctgctttgaatttatttttctatttctttgtgatttcagtggaatttggagaaggaatggcaaagcggaagtccttctcctatttgatgtcttaac

SEQ ID NO: 399949 - DNA, 1792 bp, Homo sapiens
acgttatcttcagggagtttcaggaggtttttggctcaaggcacccaactgtcaggcacaaagaaagcattgtgtccctaccctcactgctctcctgtgcccaggttattaacacaaattccattattgtcaaggctttggctagaatggcttgttcctgctggggctgaccattagaactgagatggaggaacaaaagctcccccgatcccgatcctaaccttccacccagtcccctcccactccccaggtcccataaagtggcgggagcatcgtagcgtaggaagaagccgccacaccttcctccataacctgggaggatggaagagctcttcgaagctttgctcttcgtgtccccctgaaacaagggttactgtgagtcttgcacacaaggaacatgcgctccaaggttcctagccaggtgggtgctctgcaaagttagggcaaagagagtctggccacatgcagcctctccactggagaaggattttcatctgccaggtggcggggcccttagcctcgttaatcctgcttaatcctgctagaacatacctacagggagcccactttccacgcagagcatcccttgaaggaggggcttcccagaatgctgaggattctgggcttctcagactccgatcagatgcacctcagccctgggatcagtgccccagccctgcctgccagtttcctttttcacttcaccatgagcataagtttgggtgggaactcagcctgttcattcacttcatactgagttcccactctgtgccagggcctgacctgtgcactgccaaaagagcagggaacagcaaaaccctttcctcccaccgtgggccttggagaatgaatgcagggggtggccacgggtagtcgtctggggcttggttctccctgagctaacctcgccagcctggcccagcttgccctgatcccctgatggtccgtgcacatgtgtttatacttgcattgttgactggggtccaattgcctttttggcaaaggcatcaagcattcaaagatgttcagatcttttctgtctggctcttttcctcggaatgaggctccagtgtgtccctttagtcccttagccattatctgagaggctagaattctggcagtgtccccgtgcatctttccccagtggaggagagaactctcggaccagtgagctagagaagcaacccaccccggccgctggaagcaggggaggtgaaatgtgtccaaactcctctcaggctgtcagatggccttgagcggcaccaagtagaaaacgcgctcccacccctgaccttctcctcagcttcattgtgagacctcaagttcctcagcttccaggatgatcaacctagctgaaaacctgaagtccctcccggtacaagtccaagcagtccccagccagggagaccaggtgttgtctgacatcccacacacatcggcacacttgggggattgcaaaagggaggaagggagccaaaggctagggccccggggttcagctaacactcagcacccctcccaaagagcgccccctgtgtgttctggatctctagaggggtttggtttgggccaagtagtgcttagttttaattttctctttctggaaataaatacttttaataagtaaagatgctgctcagctgtcatatcctgcaaggttagaggaaagatgtgggccgtgcgcggtggctcatgcctgtaatcccagcactttgggaggccaaggcaggcagatcacttgaggccaggagttcaagaccagcccaggcaacatggtgaccccatctctacc

SEQ ID NO: 399950 - DNA, 308 bp, Homo sapiens
ttctcttggcttctgtagtccagggtcctgcatgtattgggtgccagcaaatatccgaggagcccatgattgtgtaaatcgagtccagtgtggtgtgcttcgcacagcaacgcccagactgcacctggggggatccaaggagggacccctcatccctccatctgtccctctggcagattctcactgggcgcctgctgggagccgggcgctgggggctccgctgtaaacaagaaaaacaacacagtcctgctcttgaggagtttgtgttctagtgggaaagacagataataaacaaaccagcagataaa

SEQ ID NO: 399951 - DNA, 404 bp, Homo sapiens
tgcctcagcctcctcagtagctgggattacaggtacccaccaccatgtctagttattttttgtatttttagtagagatggcatttcaccatgctggccaggctggtcttgaactcccggcctcaagtgatctgtgctcctcggcctcccaaagtgctgggattataggcatgagccaccgtgcccggccttaaatagcgtttttgaactgtctttaactacataatatgggatggcacaataacgttaatatgagagtgtgcgtagccaacccttctcccacgaaagggaagacctttgtggtcagagatttttctgccctgctcctcacttctagagagaaagaaatatccacatgagaaaaaaaggaattatctttgtaataaagagctgagataggcaatg

SEQ ID NO: 399952 - DNA, 511 bp, Homo sapiens
tcccattcctgaattcagatagagtcggcatagtgagaactcatatgacgagggatgcctgcatatccttatgtgccttggcattagagagtggagcttttcatcagtggtattagaaggtgtggcacaagagcagatttctttgcattcaaagccacatccatacatcacagtatttttagttcccgtgtgtgtgcgcgcacgtgtgtgtgtgtgtattgttaatcatatcatcttgtttacacattttaccattccagatacttcctataagtctcatttccagagacaaagatgctttaaaaagattactgttacgcagttctcatggtaaaacttcttagaatcattggtggatgcccaatctgcaagaaaattttcagtaggagcagaaaatgtgcatggtcttgaagtgacccccacagatcactcatgatctgcaggggaaaacacaataattatagagtggggaactaggacaagacctgaatgaggtgatcagaatgatgag

SEQ ID NO: 399953 - DNA, 1559 bp, Homo sapiens
  misc_feature (1006)..(1006): n is a, c, g, or t
tttactaaatgtttcatttactgaattgtttcatttattccttaaaacaactcagctctattctcggagccgttacttgcagctcagcattgttataaggaataaatgaaacaaaaagtacttaacatagtgcctccacataagatgtcacaagctgctaactactatttttgttatgcattgtctgaagataagtcacaaagttggttcttagctttcaggtaactaatagtgaagggagaaaagcaaccacttaaagaatttacaggccgggcgaggtagctcacacctgtaatcctagttctttgggaggcagaggctggtggattgcttgagctcaggagttcgagaccaacctggtcaacatggcaaaaccccatctatacaaaaaatttgcagggcgtggtggtgcgggcctgtagtcccagctacctggggggctgaggtgggaggattgcttgagcccaggaggtcgaggctgcagtgagccaggatcgagccactgcattccagactgggtagcaaagtgagaccctgtctcaaaaacaaaacaaaacaaaaaaagaatttatagtttccaaggtgaaacaaacaaaccagctgcttaggagaacacagctgattttaacatgttctgaggagcacaatttttcttgctggtactcatgaagaaaacatcttacttcatatttaaaggtatttttaatgtgaatagagtcaaaataatttataaaagtggtctttggggtccagattgatgtgttctaattatgagcctctgtgatcggacttaattcaaagatagatttttgaggggctagaggaatggattgaactttaggaatttctatggatattgtttctcttctctgtgcttttgaaatggcagtgagtgagtctggcattggtaggtgatgctcacacttatgcattccagtgataactttcgtcaagttcaagactgttttggaaaatttctgcataactttgttgagttttagaattntatttgcagttaaaatttttattttaattgtgaaataccaaatctgaagttgtattttaatattctttaagctatagaagtcagtacaacagttaatttttccttagtattaaacatccttataccatagtgtaaaaatgagaaatttggaatatctcacttttatttactatgttaaatgctccattccttctccccaccaggcacacccacataaaaaaagatttttggaaagatgttatagggcagagtgtgttaagagatgagccgggcataatggctcatgcctgtaatcccagcactttgggaggccaaggcaggcagatcacttgaggtcaggagtttgagagtagcctggccaacatggtgaaatcccgtctctactaaaaatacaaaaattagctaggtgtggtggtgggtatctgtaaacagcctggctaacttgcaaggctgaggcaggagaatcgcttgcacccgagatgtggaggttgcagtgagccgagatcgcaccactacagtccggcgtgggtgacagagcaagcctctgtctcaa

SEQ ID NO: 399954 - DNA, 2101 bp, Homo sapiens
  misc_feature (1347)..(1347): n is a, c, g, or t
ttgccttttaaatagcaataaacatggtgtaattggtttaggaaggctgtgctccatggagaagagctggtactacatttaatttatcttgtagcatagtgttttctcaaactatgcttagaagaatactggttcctcgaggtgttgattggtgttgtctggaaatacaaggagcttctgaggccaagtaatgtggcaaacactggggtaggccagttacctggggttaactttccggcaggacttctcagagtctttaatatgctactctgcatcataaattttcaagagcttgccctgtacctatttgtctttcccttttcatagtgctcacagggtttcatggatctcagcatagaaaaggctgctttagggtagaggcagctgccagcagtctttagaaagtgagtgatttctatttcagaaaggtaacactgagcacctgggaaggaaaacgccaaggatgagaaactagacccaaggcaacctataatgaggctgttaaaattttctaggcacaagaaaatgaggctcagaattagggcagtgaaaatgtgagggaagagatagaattgagagatgcttaggaggtagaatggatactccataaccacaaggatggtgaatgagagaataaaatagttgaaggtgaatcccaagtttctagctgggaagcttggacagagaagtgttgggtagaagatgaaaaacaatttaatttgggacatacggataaagatggtcaactcatagccagcaactggtgatactaatgaagcaaggtatttccctgacctcttcatgggtgggaactggagtgcatgggtgctagaactagctggccactttggtgctggcacgggtggactccactctcttggtcctgctgtgtttcaccccttgtgggagcggggggagaacaggtgagtgggtgcaggagccagggagagtgcttttgggcactggcaggagctaaactttgtgcaggcccttcagcagcatctaggggagtgcccactacctctaaagcttcagaaggagtgccacagtgctcctttagctttcctgtctgtggatcacttaagtgttaacagctcagtggagggtcagtgtgacagccttttgcacctgcactcgtggcatctgaattcttgtctggtatcctgtagtaatgaggtcgcatgaatgaattggtgatggtaaatgtgggggattttgttggtgaaagtggctggaaggggagctgaaaaggggaaagagcaggaaggtgaacttcccctggagtctggtcatctccagctggactccttccaaggctacactgtcaagctgtccctctgaagtcangctgcttctctccagtgtccaaccatagtttttcctcatccagcttcttttcctctctctgctggctgagcctggggtttttatggtcacaggatgggggacggggtgggccatgggtggttttgggagaggcaacattcaagagggacaacagggatttttactcccacttttggctgcagtattaggcttttcagcttgaaggtggggccggggacctgccctcttctgcccagagtttccctggctctggtccctatcaataatctgcagttcagggcacagatgaacatatttttatctttctttgatgcttcaagtgactctattatcttgcaatgtcttcaggtcgtcataattaacatcatgttgttgactataaatgtttaacaatgcaggttgtagagagctgtgcttaatagaaagctgaatacaaattattcgttgagatactaacatgtgcctagcacagcaatactacgtaaagaaaaagcaagcaagcaaacaaacaaacaaaaaagggaaaaataaaaagacatatcccttgcttaatttgtttattatcttaagcctagagaaggtattacaagtggtcagaatagcagtgttaagattctgacctttcacttgctatgtgacctagggcaagatacataactttttagtgcttgggttttttcatttgtaaaatattatttgtagattattagtgtctttctcattaaggagttatgaggtttagctagggttaaac

SEQ ID NO: 399955 - DNA, 453 bp, Homo sapiens
atacacttctgcattttgtagtaataaatgggttaaaaactaattactgaagcactccatgggaagaatatggcatgcattaaacaagagacatttttggaatcctgactatccttggaacacaggagcagatggacacctgaaaaactctgccacctggtcagttccacataactttgtaaaaggtcttctaggtcatttctgaagatgattttctcactttgggggcagaattcatccagcaaattagctggctgcagatgcaccctgaggcctgtagttggctggggtcctgctgaggagacgttggcacaggcacctggtttatgccactggcagcaagagttggctttgcatgctgatgatgctgctgccaaacacttaataggtttcaaataatttctccatcaataatcccatctgtaataaacatttcacttatttttctttatc

SEQ ID NO: 399956 - DNA, 401 bp, Homo sapiens
ttgcttcatgttataaatgccagtacaaaaaataaatagaagattaagttgctataatccaatttttaatagccttttttttgtatgatgcaatggtttgaatgtttttctctccagatctcatgttgaaaactaatcctcaatgcagcagtattgaaaggtgaggcctttaagaggtgattgggttatgaggactctgcttaaataaattgaagcatcatttatggattaatgaattagtggattatcacaggaatgggactggtggacctttaagaggaatatatatacacacacatatatatttgttccattgatctaagttggaagggaaggtttagtaagaaatacgtagtataataactaactggtggagccctctgatgactgatgattctggc

SEQ ID NO: 399957 - DNA, 483 bp, Homo sapiens
taaaatacatcaaatatgcttaaatcctcaaattcttaatgatactccccctcatgccctcacaaaaggaaaaattcattagctactttggcggatactaggaaattgattcttttttttttttaactcataaatggaagttgaaacccaacctatttatcctgtcttccctaagtgagctgtagttcagggcaaccaaaccactgaggagccaagtttctctctctaggagtattctagctaaataaatgaggaaggagtgatggaccaagatggtggccatggagccacccctaatgcattagtggaccaggcaataatcatcaatggctgctaatatcacaaaaggagagacaggcagacatttcgtgtcccctgatgggatgcagtaggaggaaccaccacccgtaaggcagatatgccaaagattcaaacttgaatctgattaaacctctaagtccatctgccaacttgcaaaaaaaa

SEQ ID NO: 399958 - DNA, 421 bp, Homo sapiens
caaatataaattgacaatgcaatttgtacatgtaaaggaaagggaaatacagagtattactgatgtccacagaaggggcatctaaccttctacaagaaatgtcaatatggagtgcctttctcttagtaaatttagacagcattctagaacctggtgaaaatggtgacttgaaaatactgactacttggagcaacctagcattattttacaaacattatttctactgcaggacaagcagtgagatccaatcatccatgacctcaagcaaaatcactgtaccataaactaaagttcaaaagaaaatgggtctttgtcttggaaatgtattaactctggggaaggaaaaatcctgtaatagaaattgatggctgaatataatttgggataataaggcaaacaacatgagaataaacactaagta

SEQ ID NO: 399959 - DNA, 382 bp, Homo sapiens
tcgcgctctgtcctgctctgcctggcttttcttcagagtgtgtttccccatctgacattactgtagaaaatggagcagagaacaggaaggggaattagcagagatgaggctccaggcatgtcttcctcttgtccctctccccactgtttctcttgattgtgattcaagtccttacactcatttttacattctcaaatctcaaatcagctaatttcctcttttctatcagataattgcatttcatcagtctaatttttactaatccaaactgtaactttataaggctatatatatgagcatatttataaacttagatttataaactatatacacacatatatgtatcatataaatgcataataaattactttcagactatttc

SEQ ID NO: 399960 - DNA, 444 bp, Homo sapiens
tatataggaagatgtacccagaagaaatagcccatgatatttcagggcaatatcatgtgactagagaaagtcatcttaggctagtaatctccactcatgcccatctagttgagggctcaattcacttattttcaacatccacaaccatttctaaggtgatagcttctctggttacttatcactggtatgaccaaacatcttgatttgcctaagatggctctggtttatgcctattgttcaagaccaacctggccaacatggtgaaaccccatctctactaaaaatacaaaaaattagctaggtgtggtgacgcacacctgtaatcccagctactgaggaggctgaggcatgagaatcgcttgaacctaggaggtggaggctgcagtgagccgagatcgcaccactgcattccagcctgggcgacaagagtgagatttcatctca

SEQ ID NO: 399961 - DNA, 339 bp, Homo sapiens
tatgatttttaaatgtttaatcagttgttacataaactaaaataaattgcattataaacacaaactgttataaattgtgaggtgtttttacatgttatcttctgtgttgtaaaaaaaaagtatatactagttattattatacctatatcacaattgaggaaaccagagaaaattcgttgtgaattgctcatttggaaaatgagaaaataatataaggcagctttagaaaaaaaaatcacttactgttatactgggagtcatgaataataatagaaccagagatattaaatagaccaggcccaggaattacagagtgatctagtttggatgtcccctcca

SEQ ID NO: 399962 - DNA, 289 bp, Homo sapiens
catcaacaccaacaagtttctgtgttccttttacagcaaaagggactttttatataaccaaatgtggtgttttagtgactttttgataatgtacagttttttgtgaatttaaatttatttctttctatatttttaggaccaatctcatttttaataaggttaaaaagaaaaaaaaagtctagcgaaaaaactcctgtttttgccatgtgatgttccacaagtgcagctgtagaaaagtgcttgtcagttgttgaataaaaaaaaccacatttgatagagattcaaaaga

SEQ ID NO: 399963 - DNA, 396 bp, Homo sapiens
taactcataaaatccttgggatcgccgaagtgttttctttagaataccttttgtctgataggttccagggtggggctggtccctggaaagacaaaggcaggagtagagagttgggactttcagccccacacccaatctccagggaagggataggggctgaaggtcaagttgttcaccaatggccaatggtttaatcaatcatgcctatgtaacaaagcttccataatccaaaaggactgggttcagagagcttccgggtagctgaacatgtggaggttcctgggaaacggtacgcccagggagggcagggtggctccacgcctcttccttccttcatactttgccctatgtgtctgtatcctttgtaacatccttcttaataaagcagtaaacata

SEQ ID NO: 399964 - DNA, 338 bp, Homo sapiens
tacgggccctgggctaaccctccccccatcacacaactcaacagcaacgcccaagccacaacttctctggacctcaggttccctacctgcaaaacagtggcaacaggggtctggagtttcccggtcctctgggatcccgagtgggccagatgtctcggacggcaacacactcacccagcctagagtgccttccacccagggccagtcctaatggcctgggtgaagaacagagactcctggggcctgggtcccacccgagccaccccctagcccaggccacacctccacccgcccaggccgccaataaaacaggccgggcagaacccaacaggcctgga

SEQ ID NO: 399965 - DNA, 257 bp, Homo sapiens
aagcctaacaaggacagcataataagaaaagttacagatctcttacttatttatatgcatgcaaacatcttaaaatgctaacaaagcaaacacatcactatgaaaataattcaggtttaaaaggtaagttttcatttttaatgttagaaaattaatcaatacacttccttaacagatcagagtaataatctcagtgatttcagaaaaaaaaggatcactaaaattcaacacacatttattgaaaaaaaaaacgcttt

SEQ ID NO: 399966 - DNA, 376 bp, Homo sapiens
atcctgcgctgctggtaatacaatggaaacatatcaagtgtggagggttcccttcagagttggaataatgatggagtttgatttgattttagaagaggaacaactaagtccagctgtcagaaggagggggagattggagatccaggtgtctccaattccccttccacgctagccctgtactgagcactactgtataagcactctgggaaggtgtctggacctaggtctggctttgggactggactttgatccctgattatccaaggatctcatttacatttgcctgaaccactcctcaaaccccgtgaatcccagaatttccacatttttttcccagtgaaaggactcaggcattcctgatagatgcgtgcacaaa

SEQ ID NO: 399967 - DNA, 305 bp, Homo sapiens
aataaatttcttcttctttttttttagagacagggtcttgcccagggtggagtgtagggatacaatcatggctcgctgcagcctcaaatccctgggaggatcacttgagtgatccccctgcctctgcctcctgagtagctgggactacaggtgtgtgccactgcacctagttaatttgtatttttaatggagacagggtcttgctcattacctagggtatagtgcagtcgcataatcacagctcactgtagccttaacttcccaggctcaggatcctcccacctcagtctcctgaggagctggga

SEQ ID NO: 399968 - DNA, 634 bp, Homo sapiens
ctgcagtgagccatgtttgtgccactacactctggcctaggcaacaaagggagaccctgtctcaataaataaaatataggataatgatatctgtaaattctccagtaaccagagattaatactaaatgtatactcagggtagaggagagtaagcaagagaatcacctgtaattttcaaagcagtaatattactgagagctggctgaaaaatatactaaccttcagtcatttttgagtcattgattcatattctgatttattataacctaacagtgctgtttcaaattagtacccagtgctcttagtcgcttgggtactgtggttcattttgtggatttgctttagctactttgtttagaccatctgccaaaagttaattgagactgtacaaggcttccaagagagagcagatgtacccatggctgagagtggtacagcagtggacaggcatgtgtccgctattggcctttgacctttttaagcaaggagaaacctttcttctgttgtgcttttttgtgacttttggtttgttaaccactattctaaaatcctttatatcatactgatgaatgcaaagtgaggtgctttttttcagtgagtcagtgtgcatgttcaggattgattcattggaata

SEQ ID NO: 399969 - DNA, 579 bp, Homo sapiens
ctgcagtgagccatgtttgtgccactacactctggcctaggcaacaaagggagaccctgtctcaataaataaaatataggataatgatatctgtaaattctccagtaaccagagattaatactaaatgtatactcagggtagaggagagtaagcaagagaatcacctgtaattttcaaagcagtaatattactgagagctggctgaaaaatatactaaccttcagtcatttttgagtcattgattcatattctgatttattataacctaacagtgctgtttcaaattagtacccagtgctcttagtcgcttgggtactgtggttcattttgtggatttgctttagctactttgtttagaccatctgccaaaaagtggtacagcagtggacaggcatgtgtccgctattggcctttgacctttttaagcaaggagaaacctttcttctgttgtgcttttttgtgacttttggtttgttaaccactattctaaaatcctttatatcatactgatgaatgcaaagtgaggtgctttttttcagtgagtcagtgtgcatgttcaggattgattcattggaata

SEQ ID NO: 399970 - DNA, 461 bp, Homo sapiens
attagaacagaatttctcaaattgtgctttgtgagatgtacaagtaagaaattccttctgagcatgattgaaatattttaaaatacctaataaggaggtgtaatattgagtaaggcctttaagtgggtggcagggggcaggatcacccttgtaagcaagcatttgtgtaacacgatattactttgagatactacattttgaattttattttcaatgtggtgctttattgtgataaggcactgtatcggctgttgggtttttctttttcctcatcatcaactatctctattcaatatccattttcctatcagctagttaatataaatgtactgctaatttgatgcttaaaactgtgtttggactggaaaaattgataactcattgaagcatatggtagattagataaaagttcaaaacagtctaagcaaaggcataacacagggatcattagttcaaaagcg

SEQ ID NO: 399971 - DNA, 792 bp, Homo sapiens
ccagatgacaagaatgtagaaagggttgtttgaaacatgttagaggagaacattggaaacatcaaacactgtgattgtaagcaatggaaataactgtcctaaactgtaaaacaatgcaagaacatgaagatgtcaaagcccatggtatgttcatttagtcattctccggactaaaaatatttgtattttctatcaacaagagtttaccttgatatataaatatattcatgcaaatgtgcatattaataagcacacatgtatgtatataatatacatatattgtgtatatatatgtatatgtgggtgtgtatttccatgtattgaggtttttcagagaacgaatgtcactagtaaacggtagaaaatgtatgttattaaacctttatttactaattttcttaacaacaacactaaagctagaaaataaaaaggatcattcatttttaaacagatggcacctgtagaccgtctgccatgctttgacaagctcggcatgcctcccttacatgttgaacatcaatatctatagacaactctatatatgttctcatgagggtaaaggctatgtcaaataactaccaatatgtatatgtaattattttctatgtggcatatactagctgtcatattttcacttaataataaatgctttcagaaatagggaccattttgtattttttctatgttctccatgacacatgtcttgagactattgtcccttcctatacaattgaaattatatatgtttctgccacagtcattttcatacaactggcctttggatttcaggag

SEQ ID NO: 399972 - DNA, 846 bp, Homo sapiens
ccagatgacaagaatgtagaaagggttgtttgaaacatgttagaggagaacattggaaacatcaaacactgtgattgtaagcaatggaaataactgtcctaaactgtaaaacaatgcaagaacatgaagatgtcaaagcccatggtatgttcatttagtcattctccggactaaaaatatttgtattttctatcaacaagagtttaccttgatatataaatatattcatgcaaatgtgcatattaataagcacacatgtatgtatataatatacatatattgtgtatatatatgtatatgtgggtgtgtatttccatgtattgaggtttttcagagaacgaatgtcactagtaaacggtagaaaatgtatgttattaaacctttatttactaattttcttaacaacaacactaaagctagaaaataaaaaggatcattcatttttaaacagatggcaaaaacactccctggggaagtccaaccagactgatgttttgtctgcatcaatttccctgtagaccgtctgccatgctttgacaagctcggcatgcctcccttacatgttgaacatcaatatctatagacaactctatatatgttctcatgagggtaaaggctatgtcaaataactaccaatatgtatatgtaattattttctatgtggcatatactagctgtcatattttcacttaataataaatgctttcagaaatagggaccattttgtattttttctatgttctccatgacacatgtcttgagactattgtcccttcctatacaattgaaattatatatgtttctgccacagtcattttcatacaactggcctttggatttcaggag

SEQ ID NO: 399973 - DNA, 153 bp, Homo sapiens
attctatacctagtaaaatgatactttaaaagtgaagaagtaaaaactttctcagactaacaaaatctgagagattttaatgaaggcagacatgtcatgcaaacaatattgaaaaagggagagtgaaataatataggtcagaaactcagatct

SEQ ID NO: 399974 - DNA, 487 bp, Homo sapiens
ttcagaaaagaagaaataatatcaagtatcctttctggctacaatggaataaaacaagaaatcaataacaagaagaacctcagaaactacacaaatacatggaaactaagcaacatgctcctgaatgatgaatgggacaatgaataaattaagaaaaaaaatgtaaaaagtctctcaaaacaaattaaaaggaaatataccataatctgggggatacatcaaaggcaatactaagaaggaagtttatacaacaaacaactatatcaaaaaagcagaaagatttcaaataaataacctaatgatgcacctcaggaaactagaaaagcaataacaaaccaaaccctaaattagtagaaggaaataaatactaaagattagagcagaaataaatgaaattgagatttaaaaaatacagaagatcaatgaaacaaaaagttggttcttttgaaaaaataaaatcaacaaacatttagctagactatctaag

SEQ ID NO: 399975 - DNA, 410 bp, Homo sapiens
tccacgtcacaaacatatccatcactttcttttctctttctcttttcttttctttctttcctttcttttttctttcttcctttcttttctttcctttctttccttctttcccttcctttctttctttttcttctttctttctctttttcttttttccctttttctttctttcctttccttttctttttctctctcttctctctcccttccctcctgtcttccctttccttctttcctctttccttctttctccttcctcccttccttcttttcttttctttctctttctttccttctttacttttcttttctttccttctttctttccaatatacccagcatccctctcacccatctcctggaaaccatcattctattgtctatttctatacatttgactaccttagatg

SEQ ID NO: 399976 - DNA, 357 bp, Homo sapiens
atctcaagaaccattaacctcatcaggttcttaagttttctggtacctagctaagttctttgatttatatcctgatctagagttcctggacaagctaggctgatggttgaatgagtcattcatacttgttaatcatatttaatttaattttctaagtgcagtatttctggatctgttccattctcatattctatcctcaacaagcacagctggtattaaaaaaaaaaattaccacgcaatcaggaaacatagcacaagcacacatggtcagatggtgataaatgtagagaagaataaaggtggcaggaaataagaaatttttactctctgaggtcttccacaatgcaggatgaatgt

SEQ ID NO: 399977 - DNA, 573 bp, Homo sapiens
ctgttttgtacccttaacacttaagagtcttaacacttatttctaatgtagagttgaggaaggaattataataaacctatgagaaatctctgttgagtaaaatgataaataatatccttgttaatttattaatttatcttatcttacttttgacagctatttatagtactttcaatttcaaaatagacaaaaggtttgtcttccaatttgtatgtggtaattagaaccattgtaacttatgacctccccaattgaataactgaattattttatagaaataacatagtaaattttgtgaatagagaaaaagaagccaagaagtcatagaagagagaacaaggggagtggactttgagtattgtaaaaaacagtgggtttggcagagttcactggtgtcttaaaaacatttaaaaatgaattagtgtgatctagtaatagagttttgcatttttttacttaatattataatgtgtacattttttcttgatgtaaaattttttctaaagcatgagttttaaaattgattgtgtatagcattccatagtttggatttactataatgatttaccccat

SEQ ID NO: 399978 - DNA, 450 bp, Homo sapiens
taaccaggtgctaggccatggacatcactttctcagcccattgaccgtcctgtgtcttcaggacaagaaccagcactgagccttccctttccttcaggtgcctaaagtcaacatcaatagtgttcaaaaatccagaacgtaagatctactactaaagagaattattacagtcaaggaaaatgcttgaataaagaaggaagctgaattctgtaagccgccaggggctacaacaaacttttaagggatacaagttcttaatattctctgcagcccactaatacatacagaatgggtagaaaacacgccaggcgtggtggcaggcatctgtaatcctagctactagggaggctgaggcacgagaatcgtttgaacccgggaggcagaggttgcagtgagcagagatggcgccactgcactccagcctgggcgacagagtgagactttgtctca

SEQ ID NO: 399979 - DNA, 626 bp, Homo sapiens
agcatatcaaaaagatacttcaccatgatcaagtgggtttcatactagggatgcagggttgatttaagagacataagtcaataaatatgatacatcacataaacagaattaaaaacaaaaatcacatgatcatcttaatagatgcagaagaagcatttgacaaaatccagcatcgctttatgattaaaaccctgagcaaaattggcatagaagggacataccttgaggtaataatagccatctacaacaaacagataacattatactgaatagggaaagttgaaagcattccccctgagaactggaacaagacaaggattcccattttcaccacttctattcaacatagaattggaagtcctagccagagtcatcagacaagaaaaagatatcaagtgcatcccaatcagtaaagaggaagtcaaactgtcactgtttgctgatgatatgattgtatatgtagaaaaccctaaagactcatccaaaaagctcctaaaactagcaaatgaattcagcaaaggttcaggatacaaaattaatgtacacaaatcactagctcttctatataccaacagcaaccaagctgagaatcaaattaagaactcaacccctttcacaatagctga

SEQ ID NO: 399980 - DNA, 290 bp, Homo sapiens
gaaaaattacagcaagctgggtgcggtggcttatgtctgtaatcccagcactttgggaggctgaggcgggaggatcacttgagctctggagttcaaaaccaacctaggcaacatagcgagaccctctctctacaaaaaaaaaataataataataattagctgggcatagtgacacacacctgtagctcctgcttcttgcgaagctgaggccagaaggtaaaggctacagttacctatgattgtgcctctgcactccagcctgggcaacagagcagactcagtgtctccca

SEQ ID NO: 399981 - DNA, 102 bp, Homo sapiens
atatctgatatagatttcagtctttctctagtgttcatgaaaataaagccatttaaacaaatggctattcaaattaaaagatgtgatggaaacttcatcttg

SEQ ID NO: 399982 - DNA, 2149 bp, Homo sapiens
  misc_feature (619)..(619): n is a, c, g, or t
  misc_feature (680)..(680): n is a, c, g, or t
  misc_feature (1468)..(1468): n is a, c, g, or t
aaattcaatgcaatgtctcacaatagctgcgctctccttcttccaagcacagagattctctctctacgccacaaagccactgccatgggatggggacgggtggcatcagcaactcaagactgtcttccctaccctcttcattgcctctttcaacagtatgaagttaaaatcagctctgaagatgacaatgcattcaaattcaccagatcacccccagctctgaagatgacaatgcattcaaattcaccagatcacccccagctctgaagatgacaatgcattcaaattcaccagatcacccccagctctgaagatgacaatgcattcaaattcaccagatcacccccagctctgaagatgacaatgcattcaaattcaccagatcacccccagctctgaagatgacaatgcattcaaattcaccagatcatctaatgaagtttcacttctgtttcttagcacctccctgactcttctgttccctagagtggaaggagggtctgggaaaggacctttgcctgaaactaagaagtcaacatgatacccctcaatatcccacctgggaagggagctgccaatgagccgaagcagatggggaggagatgaaactgggctatcngctttgcaggctggagccccctcctgtatctgccttatcttctggtatccccagcacttgncccttggccttgtagaaagcaggaatgtgatacatgtttggtgaatgaatgagtgaattaattaattaatttaatatattaatttgtatctatttcaaatagagtctgaagctcaattaatactttaaaaatacagctgggcatggtggctcacacctgtaatcccagcactttgggaggccaaggcgggagcatcgtccaagagtttaaggctagcttgggcaacatggtgaaaccccatctctaccaaaaatttaaaaaaaaaagaattagctaggcatggtggtatgcgcctgtagtcccagctactcaggagactgaggtgggggaatcacttgatcctgggagggtgagactgcagtgagctgagatcacggcactgccctccagcctgggtgacaaggtgtggccctgtctcaaaaataaataaaaataaaaatactatataatcattcattctaaaacagaagttataatcatgcctatccctagggccattgggaagattaaatccatgaataaatgtaaaacacttagaccagcgcctggcacataccaatcccgcaataagctattcatgtaaactgagagtaggttgtcccactccatgtgggattaggggtcagtgtaggaccagggtcagagatcaaggggagaatcacgcaaaaatttagtatgaagttaggattagaggaccagtttgtgtccacccagcagtcagattttttagttaccatctatttgtttatttatgtcccacattgttccaggaggagtcaaggcagctntcaggaattctaactacagaaatcaagaaagagaaagatcaaagttactatggactgaatgtttgtgtcctccccaaaattaatatgttgaagcctaatccctaatgggatggtattaagaggtgagacctttgagaggtgattacgtcatgaaggtggggctctcatgaatgggattagttcccttttaagaagaaacataaaaggaaaaaaagaaagaaagaaaaaaagaaaaaataataaaaagagaagaaacgtaagagagaaatggtatttggacaggtaagaaaaaaagccaggagaattaatggtcattggatccaaatgcaaaggacctcaaagaatgtgctcatccacctcattgagtgttgcaggaaggtggagaagaataggctactctacttggaaactaggaagtccctgattagaatagaagccagaccaacagtgttaaaggaatgaaaaataaagcagaaaaggcagcacatgtagactgtcctttctgaatctttcaaacacaggtgagggcaacagtgacctaaggacaacttgggaagcaggttaggggttctaagactgggctccatacacacactgcttaagttcaaatcatagccccaacactcaatagctgtgtgactttgggcaagttaacttacttaactttcctaagtctcagtt

SEQ ID NO: 399983 - DNA, 421 bp, Homo sapiens
cctgtaatcccagcactttgggaggctgtggcaggtggatcacctgaggtcaagagtttgaaaccagcctggccaacatggtgaaaccctgtctttactaaaaatacaaaaattagccaagcatggtgacacgtgcctgtagccccagctacttgggagattgaggtaggacaatcatttgaacccgggaggcggagcttgcagtgagctgagatcgcaccactgcactccagcctgagcaacagagggagactccatctcaaaaaaaaaaaaaatctgtgacaaaaaagtacatgttttacaagaactcatacaaatagaaaaatacacatcatatgctttaggatggttgcttatgaggaagaagtaagagggctgggaagagtcaaaaggaagaaataagtggcatttgccttatttt

SEQ ID NO: 399984 - DNA, 1445 bp, Homo sapiens
agaaaggtgattgtacttgccaaatctaaatggaccaggatgaacaaattaagtctccctcctgagtatctgaacttgccatactgaatcagttatatgggcatggcactggagctgtactggctgtgtggattcagaagctactggccattgggtacaaatgcagagaatgaaggtaacagaaaggaaaacagaagacaaatgcagagtagaaatgagagaggatgcaatgtgaggcaaaccaagacatacagagacagagaggcagacaggcacatacacggaatagcatgtttgttgttttaacctgctatgttttgttatgcagtaagataattaatacagtgggtgcccagggctggcaaaatgggaaaagggagaggtaatggctaaaggggatgagctttcttttggaagtgataaaaatattctaaaattgattatggtggtggttgtacaaatctgaaaaccttgaattgtacacttcaaatgacaattatatggcatatgaatcatatctcagagctgttacaaaaaaacattctataaagtcacttctgaaatcttacatgaaattttgattatgtcaaaaattaagaatcaaaaagttcttgacaaaaataactaatcaagagaatgaaggtgacttcaggtaaaagcagattaaaaagactagacaagaaaaggtatctacagatataagaactgttaaagaagtagtaaggctgggcactgtggctcacgcctgtaatctcagcactttaagaggccgaggcgggcagatcacctgaggtcacgagttcaagaccagcctggccaaggcggcaaaaccccatctctactaaaaatacaaaaattagccaggtgtggtggctcatgcctgtaatagcagctactcgggaggctgaggcaggagaatcgcttgagcctgggagatggaggttgcagtgagctgagatggtgccactgcatttctgcctggcaacagagcgagactccgtctcaaaaaaaaaaaaaaaagtagtaaaactgcatttgctggtgatattgttggatatttagaaaaactcataagagtaaatggaaaaattactatagataggagtttagtaaagtagccagattatataagattaaacaccagttgtcatatacaaacaaaatacacatgttaaaatactaaaaagttaaaatataattgaaaagacctttacaacagcaacaaaaagaacaaaaaataccatggcaaaacctatatgaaaagtttaaagtttcttgaaagacttaaaaatagacttgaataatagaaagatatttcattcttatatacaaagtctcagcattattattagttcttcctaagttaataaatgtaatatcccaataaaaatagcaacagattttcccctggagctatacaagttacaaataaaagttcctaaagg

SEQ ID NO: 399985 - DNA, 598 bp, Homo sapiens
cacataataatctcttgctattttagggaacagtatcagctttcaactggacacccttttttgtggaagaatttgaaaagctgtttccatatgagaaacatgattttgttttgttctgttttttttgagacagtctaactctgttggctaggctggagtgcagtggcacaatctcagctcactgcaacctccgcctcctgggttcaagtgattctcccgcctcagcctgccaagtagctgggactacaggcatgtgccaccacgcccagctaatttttgtatttttagtagagatgaggttttgccacgttggccaggccggtcttgaactcctgacctcaggtaatccacccagctcggcctcccaaagtgctgggattacagacgtgagccaccatgtctggcccatgattttattttctaaccatgtggtcatgaatgtgtataacaaggtcagggcccagcagcccttggcacgtcctgacttgcacagccacttctcctgaatgccctgtcgcccatccaggcaccgttcattcacagtgaaacgtggttctctgtcagcggcacactcagcttctccagggcctggtcagaa

SEQ ID NO: 399986 - DNA, 668 bp, Homo sapiens
ccacacctcccacaggactgggctgagcacagtcatgcattaaaaaagcttctgaacttattttggaaagagtagctccctggagtgtggaggaggacaggaatttgctatctgcaggacttaaatcaggatagagtatcaaatattccaaggccttacatgcatgttttgttttttgataaagacagaagattgcaaatggtttgctctttaacagtcaataaaatcatatctactaatcaatacatttgaagtttactagattctcaaactttccataagatttgagttcattagtttaatgggatcgatctgagaaaaattagatttatgtgcagattttagctacccttgtccttggaatgtgtatgcacacacacacacatctgtgagaatgattattttctacttgatacagtgtgcatcaaataaaagtttactatattggaatatgggaataaattcatttataattagttgaaattgtccagacacatattttagaaaagtatgttatttttgttttaagtttggaagaacctgaatgattaaacctgatttaagtccctctaacaattatgaagaaaaaaaaagactagattttatatcaacttaattgtcttttggtttaaaattatgtatccaataaagacatttaaaaagtaaat

SEQ ID NO: 399987 - DNA, 456 bp, Homo sapiens
ttttagaatgttctagtcaacaggtaatatgaattaaactaatcgagggtgacagggcattatatcagccacttatcaacaaacatttcagagaaaaatagttccttgtattgttattgcaattttctttgagattgccccctccaaaacagtaagaactttcaaaaacaaacaaatatatcaagccacagattcaaagtgctataaactccatgcatgattagttctcactcataggtgggaattgaacaatgagaacacatggacacaggaaggggaacatcacacaccagggcctgttgtgggggagggggaggggggagggataacattaggagatatacctaatgttaaataacgagttaatgggtgcagcacaccaacatggcacatgtatacatatgtaactaaactgcacattgtgcacatgtaccctaaaacttaaagtataataaa

SEQ ID NO: 399988 - DNA, 452 bp, Homo sapiens
tcccaccagtgacccctccatgcaggctgcctggctggcttgctgtggggggcaggggggatggtgcagtgcccaaaggcgcagctggggcagggacgggtccgcagggaagcaggggtagcctctcagaggttttgtgtgctctctgttcctcaaccattggtttaaaattttaagcctgtagaaaagctgcaagagcagtggagggggcatctgaggccccaaaatcaccagagtccttgacattcatatctgtgctctctccagctctcccagatagcctgatgcctgaacacctgagagtgctggctgagcccagggcacactcttgcacacacccaaagcaggaccacgctcgagagactccacgtggggccgatgtggtccatgcccagattcttccagttgtcctcatcatgttctttctttttaattttttaataatttttctt

SEQ ID NO: 399989 - DNA, 353 bp, Homo sapiens
cacatgttaagtatagcaagagctgaacgacagaagcccgggtcccaggtgaacccatggagttgctgttccaggttggccctggctagcatttgacctctcatagatgtcataaataaagttctcttttatttaaggcactattacttttgagttttctttctgttatatgcagatgaagttaatattaactgattttaaaaatttctagtaaaactgctgctcccctccccccagaaaaaaataggccacacttctcctgaagcctcctgtagccctgggtttgagtagcttggaactacggacaatgcaagggtttaaggtcagtggatttggggtccaaatccacctat

SEQ ID NO: 399990 - DNA, 444 bp, Homo sapiens
actttcatggggaacattaacaaactcacagaattccaacctccaataaggttactctgagaccatgataaaatgaggcaaggcaaggccatgtcataattttgtctaagcactgacaaaaacaaggtcactatgctgtcacccataaaataccaaataatctctctcggctaaagtgagtgactgctatcctttgaacagatttataaagatctaattcacataccatttaactcatccattcaaagtgtataatttggtggctcatgcctgtaatctcagcactttgggaggccaaggtggagaatcgcttgagcccaggagttcgagaccaacctgggcaacatagcgagaccctgtctctacaaaataataaattttaaaaattagctgagcattgggagttcaagaccagcctggacaacacggtgaaaccctgtctct

SEQ ID NO: 399991 - DNA, 454 bp, Homo sapiens
gtttttagccagaatgtagcctcaccagaagttgggtgctatgttgttgaacctcacaacctacataattgtgagctaaataaatctcttttctttataaactatccagccataggtattctggtatagcaacaccaaatggactaagacaagggggaagaaaacacatgattatctcaattgatatagaaaaagcatttgacaaaattcaacagcctttcataattaaaaaacaagtcaacaaactagaaatagaaggaaactgcctcagtataataaaagccatatgtgaaaaaactcactattaacataaaactaaatggtgaaagactgaaagctttttctctaaaatcaggcacaaagcaatgatgcctacttttgctacttctattcaacatagaactggaagttgtaaacacagtatttaggcaagaaaaagacataaaagacatcc

SEQ ID NO: 399992 - DNA, 414 bp, Homo sapiens
acattactcctgcatttttacctacgtttggatggaatgaaatctgtgaatgcaatcccataaatacatgtttgaaccaaagcaagacactatcaccacaagaggcatgagggaagcatgccaaggggaaaaaaaagcagagaaaagggcatccgctattacgaagttgtgataagcattgtgaagtttcaaaaaagaaaataatttaggagctctaattaaaacaaaaaaaagaaaaagaaaaaaaaagctggattcagtggctcacgcccataatctcagcactttgggaggcagaggtgggcggatcacttaagatcaggagttagaggaagccgggccgaatggtgaaacctcgtctctactaaaaatataaaaattagccaggcatggtggcaggtgcctgtaatccca

SEQ ID NO: 399993 - DNA, 389 bp, Homo sapiens
ctgccgacaggttgggggcacaaacggcgaactatcccggcctgggtcccggcctcgaggccatcagaactcgcagtgattggaggtggacgcagcggctggaccgggagcgcgaaactgctgcgctctccccaggatctgcgccctgcagctacagaggggacatgttctcaaggtggtgaggcagcgggggcccaagcaggactggacgttgagcgccgcgtctcctccatcggcgcagcagtgggaccgatcctcgcggggcaaagagcccgcgaggggtgggggaaagcccgcgagagtcccggcggcgtcccgccgtttgccggctggagcctggccccagttccccgcagccactcaagcccggtggagcccactcgcggccg

SEQ ID NO: 399994 - DNA, 483 bp, Homo sapiens
ttactctatttttctcaagttttcttttggtcccttccctgaacccactattccttcaaattcaacaatgccccctaggtttcaagctgcttggcaacagaccttccaatgcattatgcactacatgttcaaagtgtcatttttaaacaaaaaaactaaagaccaactctgcattagaaagtcgtcactaatccctgtctttcatgaaaaagtcttctgaggagataaaagagtggaaactagaaagttcccacaaggttctgaaattttctgacttctcagcatcaatctattatgattcagactctctcctaataatttacaaacttcaggttataaagcaaacacaggcaatatcaatagagttagtataatcagtttaaaccatagggctctgtactttttaaagggactatgtgtgtgatggtggggaggtggggcatgtccgctaagtttggtacaacaaatcccaagcaaagactt

SEQ ID NO: 399995 - DNA, 183 bp, Homo sapiens
acatcctaaatctctcccagtctagtgtgctaaatttgctgacttcctcccttagtctttctgaattctggcatttttaagtgtatatattcttttcctcatatttacttaacagtgtgggctggaaaccactccgtgtccattcataatgatcttcctcagtctgtttttataccattggat

SEQ ID NO: 399996 - DNA, 346 bp, Homo sapiens
tgaatgactccagcttcctctggaagtaaagcggctttgagaagcgtttttattaaagacgcattaatgatagaggacccttgtgtagtgaggaaacctcttgcatggtggtgcaggatatggaaggcatatatagagtcagtataaatactgacatgtagtccctttgcaagagtgagggtttgacttaaggcaatgagttcggcttgctgagaggtagtggagcggggcagagcggtagcctcaatgatagatgtggaagatactatagcatagcctgcctttgctggtgagtggcgattaggcctggtggaactgctatcagtaaaccaagtgtgttcagggt

SEQ ID NO: 399997 - DNA, 440 bp, Homo sapiens
aagagttattgttgtgaaagtgtcagtcagtactgaagtaactatgggggctgaacgcagtggcacatacctgtagtcccaacttcttgggaggttgaggtgggagggtcacctgagccccagaggtcaaggctgcagtgagcagtgatcatgccactgcaccccagcctgaacgagaaggcgagactgtctcaagaaataaaaacaaaaacagaaacttattttattagatacccaatctatgtgacactaattacaagtgaatcaagatttaaaagaaaatcgtgctaaccacattaactctcagtatagttttatgactattacaagccatccaaatctattcctacttattcggtttactaactagtatattcagcaagtatttatggagtgcctgccatgacaaaggccctatgctaagcctaacacatatacaa

SEQ ID NO: 399998 - DNA, 476 bp, Homo sapiens
agatgtagagaaggttattcatcaattgacctgaacatgggggtgtctccaggtggacctaatctaatcaagcaagcctcttaaaagcagactttcttctagctggtagcagaagacattcaagatattggaagtttcacggagatttggcatgaggttggctttttgtggaggtggagggggatgggtaaaaagacctcaaagcagattttaggaactaaacgtgaccccgtgactgaaagccagcaagaaaactggcacctcacgcttgcaaccacatggaactaaattctgccaacaacatgaatgaccttggaaagaaattcttccccagatattccaaataagaatgtaatctgggcaagactttggttttagcctcatgagatcctagaccgaaaacccagttgagccctcctggacttctgacctacatatctgtgcgacaataaatgggtgttgctttaagcagctaa

SEQ ID NO: 399999 - DNA, 305 bp, Homo sapiens
gggaaaacaaaattattttattttttattgaaggcttcacgaatttgcgtgtcattcttgctcgggggcaatgccaatctctgtctagttccaattttagtatatgtgctgccaaagtgagcaccaaaaccaattttattaaggaagtaaaaactcgttttttgctttttgttttttttttgctttctctgttgcaactttcccacagattgtgctgcgcatttgggcctgaacagaaaaatctgaggcttacgcagcatgcgtacaatcagcatctctgtggaggcattcccagcagcactctc

SEQ ID NO: 400000 - DNA, 449 bp, Homo sapiens
ctgtcactctgaaatgctgtaagtctctaacgggactcaaattgaacaaataataaaaggtatgccatgtgaaaggcacatttatctacatgagtctattgactattgctctggacctcacagagatcagataggatggaaaccatttattttgtaaagaaaggtaaatcattaatttatttaatgcaatgcatttctcctgtggggcggttcgagcagttcttgtagcaacaggggcaagtgttgaagtgcaggctgccatttgatgtccatagcccatcgttcagaactgatgcatccattcccctagttgctaggagcattggaggcttacagctccatgaggattgcctgggtctgaagggatcttcctccaccaagatccctggtggcagcttctatcaatgcaggagtaaaaagatctagcccccttccctcagctcagatga

SEQ ID NO: 400001 - DNA, 411 bp, Homo sapiens
acatggagaaattcagaaagttgccgtgagacctcatgccttgtgatctgtctcataggaatctctaagcatcacctcttcagcagaacacttgtgtcctcataaattatttatttcagagcctacttacttctgagataaaggtgatcggcccaaagtcatagaatttagacaatgaatgatcttaaaaagtagcaagtatgctatctcattttgcagatgagaaagctgtgatttcagagaggagcagtagcttatcaaaggccgtgcaagtcaatttgtgacaaagtgtaaaccagacaaaaggttatcacaaggctcatatcatggccagctgaatgactgaaaacctggatatatactctataaacaatgtcatggtgctgtggcgcaaagaaagttgaattgcag

SEQ ID NO: 400002 - DNA, 476 bp, Homo sapiens
attttggatattagacccctgccagatgggtagactgcaaaatttttctcacattctctaggttgcctcttccctcagatgttagtttcttttgctgtacagaagctctttagtttaattagatcccatttgtcaattttagatcacaaagcattttctatgtgtatgtgactatagtgtattatagatactgacgagtgttagagataagactggaaaaaattcaggtaccaaataatgaagggaatttggatcttatgctggagttttcacagaactattgaaggttgattggccaaataataaaattttctgtgtttcgaaactttctgtatagtaacaatgtaaagtcataatagggatagtttggagattaatgcttcatgtatcatactccatgtaacaattaatcaggcagatcacaagatcaggagtttgagactggcctggctaacatggcgaaatcccgtctctac

SEQ ID NO: 400003 - DNA, 497 bp, Homo sapiens
tccctgggcccagggggccctgtgaccccacacagacttcctggctacatgcaacacatgtgcctatgtgccctgtgtgcccaaataacacaaccatctccttaagcatcaattttggccaaaaaatgcctctctctgataagagcctttcctctttcacagccacagctgagagggtgggtccctttgtgccagcagtgtgggtttctccacagcagggaaccactgttacccagtgcaaggagggccttttcagagaggcattgataggtgttgattggtttctgtttatctgacaaggtcctaccatacacactgataggcacttgattttatggcttcctaatatctcttgcagaactttctgtgtcaacactcatatagttgcatcacccgttctttggctatctggtatcacctgctatgcaccacaatttatttaactagtacctattgatggacacatttgctgtttatgaataaacgctgctaacaac

SEQ ID NO: 400004 - DNA, 1847 bp, Homo sapiens
  misc_feature (304)..(304): n is a, c, g, or t
  misc_feature (821)..(821): n is a, c, g, or t
  misc_feature (1639)..(1639): n is a, c, g, or t
caaagggaatttagctgtgtacttcttagggggaggatagagggactgggttgaaagagggggttgcccaaatgtagcaatgactcctaaaatttaagaaaagggatgtggtgatgggttccataaggggctgggacctttgtggaagtcccagtaaggcagtaggacttatgacagagggtgctgctgtgctttcagaggtggggagtggctaaacatccagcatcatagtcttgggactggcagcaaaagatgccatggcccacattggcagaggctgtgtcatcagctgcctttgaatggnccatcttctcatatatatagtgtgtatcctactggcaaacttggaggttcaaagactggaggctgtttcctaaggtttttttgtgtgtgttgttgttgtttttgtttgttcgtttgtttttccctatgagaatgtacatcacactaacaagggaaaagagtcctcagcagtaaatgatattaggtatcttcccttaaaaatggggggatgagacacagatttaatttaatttataaaaattaaacatcatcagccgggcgcggtggctcatacctgtaatcccagcactatgggaggctgaggtgagcagatcacctgaggtgttcaagagtttgagaccagcctgaccaacgtggcaaaaccccatctctactaaaaatacaaaaataaccaggagtggtggcacatgcctataatcctagctacttgggaggctgaggcaggagaatcgtttgaacctcggaggcgggggttgtggtgagctgagattgcgccattgcactccagcctgggcaanaaaagtgaaactctgtctcaaaaaaaaaaaaaaaattaaatatcgtgttatttgcatctcagatttgtgaatcaaatttatttttacacagattactccatgtaatatctgcaaatgttttaactatttattgtaggtaagtagttatcatcttttttagaagggaaactgaggcacagtgaaatacacaccccccacacacactgagtacactaactcagaggtaggtatgatagacagaagacctgtttgtatttcaaggaattatttgagtgcgagtaacaaaaaaaaaatctaactggtttaaaccaaaaggaaataattgactgatgtaaactgaaagttctggaaatagggctggtttctggtagtgggactcaaattatattatcagaattcagttcctctctacttctagactctctgtcttctgttctgactttattctcagattttgtgcaggggcaggatggctgccagcaagttcagggctatcatttcccaggtttgactgcagctgaaaatgtggctcccctctcatgaccctcccactggtctcattgtgccttgttggctccggttgggtcccagaaccaatcactctggctagggcaatagaatgctccttttggccatggctgaatcacccagacactgttggggtttgggtgtgggagaggacactgttggggttcgggtgtgggagaggacacctgcacctgcacagggactgaggctgaaaaggaaaatagaagcactcttccagaagggtgaagaaatgccgatagtccaaatcaaagtgataacaaagaagatgntcagttcagccttctctcatagcctacttcttgccttctagcctagagccacctgattgtcccttgaagctctgaaatttaaattgaaggataaatataaattgtgtgaaggaaggccctttacagtaaactgaataatgccccccaccccgaccccaaatatccaggccctaatccctggagcctgtgattatttccttatatggtt
